United States Patent Application Publication US 2004/0034888 A1 - sequence listing, part 14

SEQ ID NO: 31600 - DNA, 1648 bp, Zea mays
  Clone ID: UC-ZMFLB73193G03_FLI
gttcatctctgtgctgcttacaattggaagtgaaactgctgaaaaagagctaagaaggcagtcagcaataaagcgctcgattgatttgttctttgagtatccatataacaactttttgcaccatcatgttgagaatataattgttgcttgcctggagggtaaaagacctgaagttgttgagcatgttcttcatgaatgtgatattgttggtaaaattcttgtctcagagaggttttcatccttgtcgactgagtctaatgggcctactgttccctctgaagggaaaacccctccaagaattggaaatgttggtcacatgacaagaatagccaataaacttattcagttgggcaatagtaacaacacaatccaggctcacttacaggaaaataatgattgggttgaatggcaaacaaatgtgctggtcaaacgcaatgaagtggagaatgtttatcattgggcttgtgggcgcccgacatctttacatgaccgtggtagggacagcgatgatgatgacttccgggacagggattacgacgtggcagctcttgctaataacttaagtcaggcatttcgttatgggatatatagcaacgatgacattgaagaggcacaaggatcacttgaacgagatgatgaggatgtgtattttgatgatgaatcagctgaggttgtaatatcttctttgcgtctgggagatgaccaggacagctccctctttacaaattcaaattggttcacatttgatggagagagaggcattgatgatcgtttatctgcctctgttccttcatcatcccccaattctctggagacttcactagaggccgaggaagctgatgatggtaaagtcattggcactgaggatgaaatggaaacagtatatcttggaaatggtagtgctgaggaggtaaaagatgtagcagaatgtaatgaacagccaaattgttgtactgaggatgagcgattgaaaaatactgaagggattgaacggcatccagatgtttcaaatcactataccgacatatgtacaaatgaggctgcctctgctgcagcagaatcttcagccccatcagttgagatagtggcaaagaaaacagtagatgaaccatcggaggcagaaagaacagtggatgaaccggcagaatcatctttggacagttctgtctctatacctttgcctgctcctgttaatggtagtgagcctgccaactcggaagcctcttccgaacaagttgcccatgacactgatgtgcagcaaccagtcaaggaagctcctgatgaggacgttaatgcaaagaaaactgatgtagccaaagcaagcgagtgaattagcaacatgttggactgagctgatcagagcaattacttgcgaactgaaaacactggagtgtagcctgtgctcagctgccacaagatagcctgaagcaaactgctgtacaataagcaagtgattgttctgccatcaacggtggcatatcactgtacaaatgagcaccattgactaacgcacataagtcgccttgtctgaaactggtcattttctttgaaattcaccctccagttcatgtgctttggtggcagacgtcgtggcatggtatatggtacctgagaacattctttgggtggcaactggttttggctactt

SEQ ID NO: 31601 - DNA, 696 bp, Zea mays
  Clone ID: UC-ZMFLB73193G04_FLI
atctcctcgcattttccttgcaaccgattgcctatccccctcccaacccaagaccgatggcgcccaaggccgagaagaagcccgcggcgaagaagccggcggaggaggagcccgcggcggagaagacgaccgccgggaagaagcccaaggcggagaagcgggtccccgcgggcaagtccgccggcaaggagggcggcgagggcaagcgtggcaagaagaagggcaagaagagcgtggagacgtacaagatctacatcttcaaggtgctgaagcaggtgcacccggacatcggcatctcgtccaaggccatgtccatcatgaactccttcatcaacgacatcttcgagaagctggccggcgaggccgccaagctcgcgcgctacaacaagaagcccaccatcacgtcccgcgagatccagacctccgtgcgcctcgtgctccccggcgagctcgccaagcacgccgtctctgagggcaccaaggccgtcaccaagttcacctcctcctaggcttgcacgctcgccctttgtaggcatctcttgtgttgatgttccccttgttgtagttatatgttgctggtttctctgtcggcgctgctcgtaactgcgtcatgtaaccctgcaaggacttgtttatttgtgaatcatcaacactttgttgttgatcactcatgttccaaaatctgagtttgacgct

SEQ ID NO: 31602 - DNA, 1012 bp, Zea mays
  Clone ID: UC-ZMFLB73193G06_FLI
ccgaattcccaggcaggcaggtcggcgaggagggcaggaagaccgaagaccgagccgtgcgggggctcgggacgggaacgggacaggaccccaaaatctcagatccttcctgcccgcccgcccgtgcccgtcgacgcgtcgttcttgccggccgcgccccacctccgccctctcctcctccagggggatcggatacgccacaggctgcgcgatggtgctgtgggtcttcggctacggctccctcatctggaaccccggcttcgacttcgacgacaaaatcctcggcttcatcaagggctacaagcgcacctttaatctcgcttgcattgaccacagaggcacaccggagcatccggcgaggacctgcacgcttgaaaccgacgacgaggccatatgctggggaattgcatattgtgtcaagggtggtccagaaaaagagctaaaagcaatacagtacttggagagaagagagtgtgagtacgaccagaaaatatccattgatttctacaaggaaggagatcccttgaaaccagctgtgacgggcgtcttagtgttcgtttccactccagatccaattggcaacaagtactatcttggccctgctcctctgcaggatatggcaaggcaaattgctacagccaatggccctactggctataatagggattacctgttctcaatggagaaggcattagccagcattagccacgaagatgattcgatcatagagcttgcaaacgaggtgaggaaggtgctcaacagaacaaaggagaccaagatcactggtgccaatgcttccatgaaatcacatgcccctcttgtgcacctgtccgcgcttccagaaggcaccgttgtggactcgagatagcgacctctactcggaatttactttcagctcttgcatgtttgtggttgtggccatcatgtactgattttcccttttcaacagttgtcgtgaggctgtatcgtctggagtaaaaaaaaaaaaagctaaaagccggcactaataatg

SEQ ID NO: 31603 - DNA, 1519 bp, Zea mays
  Clone ID: UC-ZMFLB73193H03_FLI
gcacgtacatagagaaggtggtagtgccggcgtcgaagccgtacgtcacgttccagggcgccgggcgcgacgtgacggtggtggagtggcacgaccgggccagcgaccgcggccccgacgggcagccgctccgcacctacaacaccgcctcagtaaccatcctagctaactatttcaacgctaagaacatcagcttcaaggtgagcagccgtttgcccagcagaccacccagtacgtggccgagagacgatggtgcagcaggggcaggcaaagtgacaaaacctctcagagagtcacaagtctctggacttttgcttctaaacgccgctgtctctgtgtatctcgttccttttcgaaaattttgaatccgatcgatccgcgtgttttcacacactaagctagcaagatcgacgctatcacgctactgcgtgccctgtatctgttgaagttgtgcctgtaggctgcaggttggctgggtgtgtgtggcttcaaaattcggcggcgacaggcatcctggacgagcaaaacgcgcattcgatctggctgattttttcggttggccgtcttggtccaatgcagcaggggcaggctcctaactgacgcaccttttccctttccaatgtctcgtcttgacacgcagaacacagctccggcgccgatgcccggcacgcaaggagggcaggcggtggcgttccgcatctccggcgacaaggccttcttcttcggctgcgggttctacggcgcgcaggacacgctgtgcgacgacgccggccggcactacttccgcgactgctacatcgagggctccatcgacttcgtcttcggcaacgcccgctccctctacaaggactgcgagctgcactcgacggcgcagcggttcggctcggtggcggcgcacgggcggcgcgacccgtgcgagcgcaccggcttcgccttcgtcaactgccgggtgaccggcacggggcggctctacgtggggcgggccatggggcagtactcgcgcatcgtctacgcctacacctacttcgacagcgtcatcgcgccaggcggctgggatgactgggaccacaccagcaacaagagcatgacggcgttcttcgggatgtacaggaactggggccccggcgtcgacgccgtgcacggcgtctcctgggcgcgagagctcgactacttcgccgcccgccctttcctcggcaagagcttcgtcaacggataccactggctcacacctgatgtctgaaaaacacacaaacacacgcgcgagagtcaggagacacatcgattacagcaaaccagattaatttattcgtacagcataaagacagaataagacaccatttacaagccactgaatatgtatagtgatccactggcgcagaagtcagattcaagattcatttcgtctataaaaaatagtttccaaaacttcgtcatgtgcagtgtaaactagacagtgagcagtgagtctgttatgtctctgcataggagaccttggatgtgcaattcaagttgttccatt

SEQ ID NO: 31604 - DNA, 677 bp, Zea mays
  Clone ID: UC-ZMFLB73193H05_FLI
gttgctaacagctgccaaaacagacgagcagctctcagcccttggagagctgatgttccagtgccactacagctacaacgcttgcgggctcggctctgacggcacagacaggctagtgaatctagttcaagaaatccggcacaggaagagctcgcgcgccggagggcccagcctgttcggcgcgaagatcaccggcggagggtccggcggctcggtctgcgtgatggggaagaactgcctgaaaagcagcgaggagatcctcgagatccagaagaggtacaaagcggcgactgggtacctcccgactgttttcgacggctcgtctcccggcgccggcaagtttgggtacctgaagattcggcgccggtccacgtcgccgtctgattgaagaagaagaagaaggaagagctctgctcggtcggccgtaccctcacggtcgtattgatcgtatcgtatcccacgcactacgcccaagatgccaataaatgggacagattgatcggcaataataatactagtagccatagaaaactctagtgataagctgcgaaacaacttgtatgtcgaagaaaatatttgaaaccatggtatctttgtggtcgatatctgaagtgagatgatgtgaatggctattggcgtatgttcatgtttgagctgtacggagaagaaaaggccgt

SEQ ID NO: 31605 - DNA, 2149 bp, Zea mays
  Clone ID: UC-ZMFLB73194A08_FLI
ctcacacaccatcgtcctctccttttgccagcaccgcgaacccgccaccagccttctcccacccacgaagtacggaaggctgccggaaggagctctcacctcacatccatctctgtcgcgcccgtcatcctcctcctcctcccctcctcaactgctatcggatttgcgctgcagtggagatcgacccgggctgggaatttctttcgttggtaaggaaccctaatttggtcggatgggattttcatcttcgacgaagcccgcgagattgatcgaccttagctgacgcgagggattggaaagcgaacgctcgggcgtagttaattttctaggaagattggggtttcagctcaaacccccatgctcgatgctgaggacgaccctggcgggagatgacgaggatcttcgtgcagcgcgggaccgccggctcctcgtccagctccggccgctcgggctcgcaatcagcgcagcagccggcagcagctgcccgggaggagttgccgttgcaacctcagccacagctaccagaactattggctatagatgatgtaactgagcatttaaatgagggcaacgagaacaacagtagcagaattaagtttttgaggacggatgacaccatttcagagagctcgagctacgcagaggagagggctgccagggagaagcctcctaaggatgactctaatgtaatcaaccccacttccttggtagaggaaccgatagtgctccatacccctgatcagattgaacatggaaattctgtgccgtcaggaactaattcatcacagatggtgggtgcagcatcgcacccgccgccaccgccagctccgcctccaaaatcattgttggggaatagtgggttgtggagaatgggacctggaagttccaacagtgtgcggattggatctccaagaagaccagtagcttggccaccagtggcagctcggacatctgcttcaggttctcgtccttcttcgcctaggtcactcgttgatggtgaaggttacaatagtgctgatgaacagggtccctgttacgcctcgagttatgatgattcggaaagagagcgtatgtttgagcatgacctaaggcgagtgaaagggttggaaatcagaaagacggccgaagatgggaactgtctattcagagctgttgctgatcaagtttatggagatgcagaagcttatgacatggctaggcagatgtgtgttgattatatggaaagggaacgggatcatttctctcagtttataactgaaagttttacattatactgcaagaggaaaaggagagacaaggtttatggcaacaatgttgagatccaagcatttgcagagatgtacaatcgtcccattcacatatattcctacagtacagagcccattaacatttttcaaggaagctacaacacagacactcctccaattaggttaagttaccatcatggtaatcattacaattcagtggttgatccccgccgacagactattggggcaggccttggatttagctcttttagagggactaatgttgacagggatcaggtgaaggctgcaataaaagctcagcaagaccagcaaattgataatgcactgatggcagaagggcgattctactctgatctggagttaacagagagggaaatagaacggatggtgatggaagcctcgcgttcagaatatctggccaaggagaaaaagcttaacataagggaatcatcgacatcaggggcagagccatcttcatccgctgcaattagtggttcctctcgatcagttgctggagcggacagaagcagcgaggactactttgtgcttccagacactgtgctgactcgcagcatgcagctgcttctcgcaatgggcttcggctacaaccaggtcatggaggcctacagcatattcggcgaggatgtggactcgatggtctgctacctggtggagaccggaggagcctcggcaggtggtagcaatcgccggaaaggaaaggctgctgagtgatgtgtgcaccttcattgctgtgaatgtaattgatggaaaacgttgggcacaactcataccagataatgacagccttatgagttgagatgtcgatatacctgctaccttatgggtgatgaataaatggaactcacaactcttctcgatgc

SEQ ID NO: 31606 - DNA, 711 bp, Zea mays
  Clone ID: UC-ZMFLB73194C05_FLI
gactactctcctccctcttggctcttgcagtgcaggcctctcctccgatccctcccacggtctcaccccaccgcctcgaccacacagctagcttaattagcttgcccctcctcacgctctcctcgcccgaatggggttcacggcgagctataggcggagtagctggccaatgtgcggcggcgacagaggaaaggtgcggctgcggctcgatggaaggcagcacacgcacaggtaggagaagggcgggcgtgcgaccgagcgtgcaccattggctcccactgcctgtcggctgaaactcttctgctcgctcgacccatgagctgagcgcgagggaggaaagacgacgacgcagatggttcgagctagcttccgtggggaattgaggcttgatggtccgagatatatatataaatatctcttaggtatcttaactagcatgcagctgcttgtactaatctagattttcctagctagctacatcattttcatcttcttctcccccctttcttctcttctcgttctcccctgcgcttctttgttactgccattctgagaggacgcgcgtccaaacgggatgctcttgtctggctacctcctcctgctgctgctgcagtggcagtgccaaggcatctccgagttgtcctctaagtgatgtaataacaattaatattgttagaggcactatattaagtttggaatgctacattctgc

SEQ ID NO: 31607 - DNA, 1005 bp, Zea mays
  Clone ID: UC-ZMFLB73194C12_FLI
cgtaaaccctagtccccggcggcgaccttgcggcctccgctgcgctctgactggtgcgcgtttagacgaggagctgcggcggccaagaccaatcgaccatggctacccgtatccagtttgagaacaactgtgaaattggtgttttctccaagctgacaaatgcttactgtctggtagcgattggagggtcagagaacttctacagtgcctttgaggctgagcttgcagatgccatccctgtggtcaagacctctattggtggcactagaataataggccgactttgtgttggaaacaagaatggacttctattgccacatactacaaccgaccaagagcttcagcatctgaggaattgcttgcctgatcaagtggtggttcagcgcattgatgagaggttatctgcccttggcaattgcatagcctgcaatgaccatgttgcacttacgcaccctgaccttgacaaggagactgaggagttcattgcagatgtgcttggggtcgaggtgtttaggcagactattgctggaaatatccttgtggggagttactgcgccttctctaacaggggtggtttggttcatccccatacatccgttgaagaccttgacgagctctccacgctcctccaagttcctcttgtcgcaggaactgtgaacagaggaagcgaggtcattgctgcaggcatgacagtgaacgactggactgccttttgtggctcggacacgacagccaccgagctctcagtcatcgaaagcgtcttcaagctgagagaagggcagcccactgcgattgtggaggacatgaggaagtctctgatagacagttacgtgtaactggggggccagcagatgtgggtcagagtttgcctttgctaaaagatgtattgcaagctatagtcgaattatcagtagcacaacataaccctctgatatgttcgtggtttatccgtggtttctgaattgtagacttctgcgttgaagctcgtgctactgtttgttttcc

SEQ ID NO: 31608 - DNA, 1459 bp, Zea mays
  Clone ID: UC-ZMFLB73194F04_FLI
cgcacgctcgaacgcgctcccaccccctcccgccgccaccgccgccaaaaccccggcccgacttggcgtcctccgccaacctcctcctgggcagcgcgggcggggggatatggcatcggaggacgtggtgggcaagagcaggggcgacacggccgtcaccaccatcgtcaacctggcggaggaggccaagctcgcgcgcgagggcgtcaaggcgcccggccaccagatcctcaccatctgcaagtcgctcgtcgccggcggcgtagcaggcggagtgtctcgtactgctgttgctccacttgaacgattgaaaatattgcttcaggttcaaaatccgcacagcatcaagtacaatggtactgttcagggtctcaagtatatctggagaacagagggcctccgtggacttttcaagggcaatggtaccaattgtgcaaggattgttccaaattctgccgtgaagttttttagctacgagcaggcgtcaaagggaattctgtgggcctaccgtcaacagactggtgaagaggatgctcagcttactccgctcttgcgccttggagctggagcatgtgctggtatcatagctatgtctgctacttacccgatggatatggttaggggaaggatcactgttcagacagacaaatctccctaccagtaccgtggtatgtttcatgcactgggtacagtctaccgtgaagaaggctttcgtgctctatacaaagggtggcttccatctgtaatcggagttgttccatatgttggtctcaacttcgctgtatatgagtccctcaaagactggctactccagacaaattcatttggccttgcaaatgacaacgagctgcacgtagttacaaggcttgggtgtggagctgtggcgggaaccattgggcagactgttgcataccctcttgatgtcatcaggagaagaatgcagatggttggttggagccatgctgactctattgttactgggcaaggcaaagaagcactccagtacaatggcatgatcgatgcattcaggaagactgttcgtcatgaaggcgttggtgctctgtacaagggtcttgtgccgaactcagtcaaggtggtgccctcaattgccattgcatttgtgacttacgaggttgtgaaggatgtgctaggagtagagatgaggatatcagactgaggatggtcgttttcaactgctatttttgtaggctttgggaagttgtgtttttttttttgtaggcagggcgggtagaagggtatgaccgcggctccattcagcatcaggccctctcagcccatgttggatatatatcatatatcctgccactggcttcagtcaggtcctagaattgttgctgggtcgtgcaaaaagtaataagtcggctgtaaagcttattaagcatctgcctaactcatcaaaagaaatctattccttattgatgatgtaccgagattttcg

SEQ ID NO: 31609 - DNA, 815 bp, Zea mays
  Clone ID: UC-ZMFLB73194F06_FLI
cgtcgcggctccactgggcgtgcgcgtcaccggcgggaggcgagggcaggcggtggtcgcgatggcgtccgccgacgcgcgcttggcggggattgcctcctccatccgcgtcatccccgacttccccaagccagggatcatgttccaggacatcacgacactgctgctcgaccccaaggcgttccgtgacaccatcgacctcttcgttgagcggtacaaggaccaagggatcaccgtagttgctggtgtggaagctagagggttcatttttggtcctcctatcgctctagccatcggtgctaaatttgtacctttgaggaagccgaagaagttgccaggcgaggtgatctccgaagaatattctctggaatacggaactgacaagatagagatgcatgttggagctgtacaggccaacgatcgggctcttgtagtcgatgatcttattgccaccggtggaacactctgtgcagctgtcaaacttattgaacgtgttggagcaaaggttgttgagtgtgcttgcgtcattgaattgccagaactgaagggccgagacaaacttggggacaggccagtttttgttcttgtggaagcagatgcttgagcggaacttgggacttctcttctcagagagttagagttggtgctgttgatgctacctctctgtcaacaacaaagtttcccatgttggctatattcttgctgacacgtaataaagtttcattccaaattgtgatcccctgaatgatttgtcaatgtagacatgattgctggtccttgtatactgtggcttattattcacatcaattaaggat

SEQ ID NO: 31610 - DNA, 1960 bp, Zea mays
  Clone ID: UC-ZMFLB73194F11_FLI
cctcggtccctcccgcgctgctcactgcccaccgacactctcctgcgctgcgccgccatggaccgcgacccttccgtctccgacgaggacgacgacctcgagaccctcgtaccacagaaccacgccaagcccccgtccccctccgcccgctcccgctcgccgccctcctccttcagcgtcgccgcgctccgtccgacgcttccgtcctccgccgcctccctccggcgcgtcctctggtcccgccgctacctcgtgctcttcgtttccctcccgcttctcttcctaatcctcttcttctcctacgggggtgcgtcctccctccgcctgcccgcctccatccgcctcccctccgccgcacccgccgccgaccccgcggcctcccgcatgcgcgaggccgagctgcacgcgctctacctcctccgctcccagcgctccggtctcctcagcctcttcaaccgcaccgcagcccccaccaacggctccgcccccgcccccatctcgctctccgatctccagtccgcgctcgagagccagatcaagatcaaccgcgagattcaagcggcgctcctctcctcgcaccgctcagggtccggcaatgcgaccgaggacggcctggatctcgatctccctttctccggctgcaggaagagggaattgccggccagccggcggaccattgagtggaaccccaagaaagaccggttcctcctagtcatctgcatctccgggcaaatgtccaaccacttgatttgcttggagaagcacatgttcatggcagcgcttcttggacgtaccctggtggtgcccagccagaaggcagattaccagtatgatcgggtgcttgatatcaaccacattaatgactgcattgggaggaaggttgtgatcacctatgaggagtttgtggagaagaggaagaaagtggccatcgatcagttcatatgctatgcagcctcgcctccatgtttccttgatgaggaacatattaagaagctgaaaggacttgggatttctctgagcaagattgaggcagcttggccagaggatgcaaagctgaaggagccaaagaagagatctgttggggatattgcaccaaagttttcgacagaggctgaggtccttgccattggcgacatgttttatgctgacatggaggatgagtggctgaatcaacctggtggtccattggctcacaagtgcaaggcattgattcaaccaagtaggctcatagtgctcactgctcaacgtttcgtccagactttcttgggaggaaactatattgccttgcattttcgacggcatggattcctgaaattctgtaatgtgaagaaagagagctgcttcttccccatcccccaggctgcagaatgcattctgcgaatcgttgagaaggccaatgcacctgtgatatatttatctactgatgctgctgagagcgaaacaaatcttctgcagtccttggttgtgttcaacgacaggcaagtccctctcgtgaagaggccagagcaccacagctccgagaaatgggatgccttgctaaacagaaaccgcatgggtggagatggtcaggttgacgcgatgcttgacaagacgatctgtgcgctatcaaacgtattcataggatcgtcagggtccaccttcacggaggacatcttccggctgcggaggggctggggatcggcgtcgcactgtgacgagtacctctgccagggcgagctgcctaacttcatagcagagctagattgagaaggcaacttcccaggaggatcgatagctgcaattttctcccattcgtgtccatatgtcctgtaaaaaaaatggtggtgtgtacatctagtgtgatttgtggtggtgctggtgtgtgtgtgtgttggggggcggggggaaggtctctgtatcggggatgtccattgatttgttcggtgttattcttgcacaggtaggcaataagctttgagag

SEQ ID NO: 31611 - DNA, 816 bp, Zea mays
  Clone ID: UC-ZMFLB73194H01_FLI
gtcgcagcccccaaggccccaactacccccagtctcggaagagaactatccagaagcgcaagactccaaagccgtcgccttcctatccatcccttcctcgccgcgggggtcgcctgagatcacataaacaatggtgaaggctgttgctgtgcttggtagcagcgatggtgtcaagggcaccatcttcttcacccaagagggagatggccctaccactgtcaccggaagtgtctctggcctcaagcctggcctccatgggttccatgtgcatgcacttggtgacaccaccaatggctgcatgtcaactggaccacactacaatcctgcgagcaaggaacatggagcaccagaagatgagaaccgccatgccggtgatcttggaaatgtgacagctggagcagatggtgttgcaaacattaatgttaccgacagccagatcccactgactgggccaaactcaatcattggcagagctgttgttgttcacgctgatcccgatgatcttggaaagggtggacacgagctcaggaagagccccggaaacgctggcggccgtgttgcttgtgggatcatcggactccagggctgaactgaaacaaatggtcgttggacttcgggggcgcctgggagtgccgtcaccagcaggctagaataacatcccgaagacatcgtgaaataataataataagagcgcctgatatgtgatcagtggtgtactcgccattaagcacctgtggcaaccgatgagctgaactgtgttggactgttggctaaaatgctggttcgcctgagcatgtgtcacatgtctgtcggttt

SEQ ID NO: 31612 - DNA, 534 bp, Zea mays
  Clone ID: UC-ZMFLB73195E05_FLI
cgcggctgggatctagcacgctagcgagcgagagagacgcacatctatctgtcaagcgacgccgcggcctcgatcagagtcggaggcgaacacccccatggcggcggctggcggcggcgcaggagggaaggttcagcgtgcccgaggcggcgccctttaccgcggtgctcaagtacgccgcggaggagttcaaggtcccgccccagaccagcgccatcatcaccaacgatggaattggcatcaacccccagcaaagtgcaggcaacgtgtttctgaaacatggttcggagctgcgtctcatccctcgcgatagagttggagctgtagtcatgtcttccggttagaggatatatacagtccaatgcataatgagcaaaacttgagagaaataaagctttgatgttggccttgcttggctgtaggatgttgttacaaggataataagcgaaccttaccgtacatgtctcaagttgtatgctctctgtttgtatgtggagagatttctgaaagtgaatccagtatctgaatcgactc

SEQ ID NO: 31613 - DNA, 1733 bp, Zea mays
  Clone ID: UC-ZMFLB73195H02_FLI
acccgctgagcttgcttgttttcctgccgcggtcgctgcttggccaggaccagctgcttgctgccgtcgtctcgtctgcggctactccggcctctcatgctggccacgccaccgacgctgcgatacgaagcgccgcggtgggcacgtcggaaatggcatcgtcgctgggagtgggtggtcagcagcaggggcacgggcacgggcacggcgaggccagggcgcggctcaggtggacgcgccagctgcacgaccgcttcgtgctcgccgtggcccagctcggcggcgcagacagtgagtcctctcttctgtccacccctccattcacagtcacagcctcacaggcagtcctttgtctgatgctaccgtaccgacgacgtcggctttcccgttccttgccattggctgcagaggcgacacccaagtccgtgctgagggcgatggccgtgccggggctcacgctgtaccacctcaagaggcacctgcagaagtaccggctggtggcggtgagccgaggcgtcgcttccccgctgggcgacagcggagatggcaccgacgagcgttcgtcctcgtcctcggagaaccagccggcggacgagtgcgacgacggtaccgtcgccgagccgcatggcgattcttccaggagcgtggcgcggatgcagaggaagctgcaggagcagatcgaggtaaacgaaacgatagagtccggtcggtcgatcaccattgtcccgaccttgtggttgtggcagtgaaatccattaggtttcaggctttcagccgattgtgtgccgccggttcgtgcttggctgctgatcaagccgagctcggccattcatgaccacacacatccatacatggtggcaggtgcagcggcacctacagctgaggatcgaggcgcaggggaggtacctgcagtccgtgctgcgccgggcgcaggaggtcctcgccgaccacggcctgggctcggcagccggcgcggaggcggagctggcctccgcggtggacaccgggtccctgtcctcctcctgctgctgctccccgacgcgccgccgctccgccgacagctgcgtgacgtcctcctcttcggaggccgagagccaggcccccgtcggcggcgccacgtggctccacacgtgcgccggtacgcgcgactgctccgttgagcaacagccggtgcagggggagaagagtacattcctgcagaggcacggggcagcagaggacggcacttcgtctgagatcgatcccaacggcaacaggtaggggacggagtcggagatcgtgatcggaagcatctctctgctctgcatgtgcccagcgtcggagaacagggaatgaatgattggcggggtggccttcaaggttgggacttggggaggggggccaggcttttgagcaatgtctgctgctgaaacagctacctgctctgctcttcgttccagaatatgatgtgcatgtttattttcgtttatgcgaatggttcttgtgtttcatgtaaaaaaattatgactgcaactcgaggaagggccagctgcaaatgatgcatgcagtgtgcttgaggtagcagtacaatgcaaggatgattgcatggtacagaactgtagtagctactatattattagtaagattgtatgccatcagtgagattgatgccttaagagggtaatggcatgagaactggaaaaggtttagaatgtatattaaggcctcatttgaaatagaggattagtaaaaat

SEQ ID NO: 31614 - DNA, 2609 bp, Zea mays
  Clone ID: UC-ZMFLB73195H03_FLI
gttactgtagaggaactcgagaggaccaaaatgtgtcttgtacaacatgaggaggatacccgtaccttgacccagtcattacagtctaaacatgaattgttagtgcatatggagagcgaaatcaaatgtttacgtgatgatctgatgcgcactgacgagaatttgctgagagaaaagagacttaaggaggaacttgagtctgcccttgctagtcttacatcacagattggtgagaaggatcaaattctactttcttttgatgaacacaaaacggagttcattcatctgaagggccaacttttggacatgggaaaaacacatagtttaatgcaagattcactgtcacagagtgaacaaatccaaagggacctcaactgtaagaatcactctcttcagtcccagctttcaattctggaaaaccagttaggagcagttgttgagaccatgttttccagtgaaattgaagctagttatatgagaagtcaggtaagagaggctgttgtgcagcttaatatgttaagaaatgagcttgagaaacttcaactcaaaagtaaagatgctaatgaatcattacgggcacacatgtccactgaagcagaattagctgatagaaatagcacacttgaagcagctatccattctcttgaaaccaaccttagcagtgttattcaagagaaggaaggtcttgaggagcttatgaaaggacatgacgaagcgtcaaatcaagttagtaacaagtctcgtgatatagcagtcaataacagtgatagagtattgaaggatcaagatgagattttacagcttagggtcttgcaggcagatcttgaagagcaagttgataatttgaaatctgcaaaagatgagactgaaattttaaacatgattcttaggtcaaaattggaggagcaacacactgtgatgtcattattgctccagaatcagaggcatgagttgataaattcaatagaagagaacaaggatctcactcaaaaacttgctgaacaaagtctgaaggcagaagagttcaaaaacttgtctatccatttgagagagctaaaagaaaaggctgaagctggaagaaaggagaaggaagggtcgctacataccatgcaagattctcttagaattgcatttattaaggagcagtatgaatcgaaggtccaagagctgaaaggtcaagtttttgtcagtaaaaaatatgccgaagagatgctgctgaaactgcaaagtgctttggatgatgttgaaactgggaagaaaaatgagattgctcttgccaagagaattgaggagttgtcgatgaaagtttctgaaatggaggtggagatgctggatttatcagctgataaaagagaactgtcaaatgcatatgacagcatgatgacagaactagaatgcacaaaattaaacttagattgctgcaatgaagaaaaacagaagattgaagtctctctggaagagtgcagtgaggaacgcaacagaataagggtggaacttgacctgattaagaagttattggagaatatggcattaactgacaataacacatcacatgatagttctgaatcatgcacccctggaaccacgtcgattaggcatgttcttggagatggtaaggcggagcctgcatcaaaggctacaccaaatacaacaaaaatagattcagggttacaggaacatgaaattcagagtagaagttcctcttcaaatttgtctcaaggagcagaggatgttgtgaagtttgacaataatgaagagagcaagaacttggagaattgcgatgaggaaatggaatcgccaacaaagaacaatttgaatagcaacaatagcatcaaagatatttctcaagagcacaagaaattagcaaatggattcaaccttttccagaaggagctggaaagactgaaagatgagaatctgtctcctcttcttcccctagacgtcaatctaactgacccatcactcagtggtttggaaaggacattgtcacaactcgatatggcaaatgagcatttgcaaagtatttttccatcatttaaagagcttcctggttctggcaatgctttggaaagattactcgccttggaactcgagcttgcagaggctctccaagcaaagaagaaaacaaacatccttttccagagttcattcttgaagcagcacaatgatgaagcagcgatcttccaaagcttcagggacatcaatgaagtgatacaagatacgatcgagctgaagaggaggcagatggcggtagaaaacgagctaaaggagatgcagggcaggtattcagagctcagcgtgcagttcgccgaggtggagggcgagcgacagaagctcgaaatgaatctgaagaaccgaacaccatggagatcatagggaaccaccaatcaaagcgaagaaaactaacgagagaagaaaaaaaaagtgtcagccagctgcaggctttgtatacaatcttgtgcgacggcagtgggatacattttgtagtgtatatatatcagctgtatcgattgtagagttgtagtgagcgagtgatatgcataaaatgtaacacagcaccttgtacaagaaacaagccttgttatctgattgttccttgccaacaaacc

SEQ ID NO: 31615 - DNA, 2290 bp, Zea mays
  Clone ID: UC-ZMFLB73195H06_FLI
gattccaatccttcctccacaccccaccctcccttcgcctccacatccaccaccatccaatccgcgcgggtgcttcgccaccctatcccgattgctacctcctcgtggtgggcgccgctccgatccgcccgatccgcgctgctcctggggctccggcgcgcggcggcgagcggcggaggcggcgcaggaatggaatccgaggacgatatgcacgacgcaaacgactccgccgaagatgacttctacagcggcggggaggctggtctcgccgccagcgacgacggagacgcagactacgacttcgcggaccacgactccgacgactccgcggagctcctctcccacagacagcagtatattgagtgaagttgatatcaagcggcgccaagaggatgacataaatagggtttcaactgttctttcaatttccaaaccagaggcatgtgttcttctccgcaactataactggagtgttagtaaggtgcatgacgaatggtttgctgatgaagagcgtgttcggaaggtggttggtttaccagagaagcatattgaaatgccaaatgacagagaagtaacatgtggaatatgtttcgaaagttgccctctcggatcgatgagtgctgctgcatgtggtcatcctttctgcggtacatgttggcgaggttacattagcactgctataagtgatggtccgggatgcttgatgctgaggtgtcctgatccgtcctgtgctgctgctgttggacaagatatgataaattcactggctgatgttgaggatacagaaaagtatgggcgatatcttcgcagatcttacattgaagataatagaaagacaaaatggtgtcctgcgcctggatgtgaatatgcagcggaattcgtcatgggcagtggcagctatgacgttaattgcaactgttcatatgggttttgttggaattgcaccgaggaagctcatcgtccagtagactgtgccactgtttcgaagtggatcctcaagaacagtgcggagtcggagaatatgaactggatactggctaattcaaagccttgtcccaaatgcaagcggcctattgaaaaaaatcagggatgcatgcacatcacatgcactccaccatgcaaatttgagttctgctggctatgtcttggtccatggtcagagcatggagagaggactggtggattttatgcttgtaaccgctatgagtcagcaaggcaagaaggagtgtatgatgaatctgaaaggagaagagaaatggcaaagaactcgcttgagagatatacacattattatgaacgatgggcagccaatcagtcgtcgaggcaaaaggcactgggggaccttcaaagcctacagaacgacaagcttgaaaggttaagtgacatacaaagtcaacctgagtcacagctgaagttcattatagaggcatggttacagattgtcgaatgcagaagggtattgaagtggacttatgcctatggattttacctgccagagcatgagcatgccaaaagacagttctttgaatatctgcaaggtgaggcagaatcaggattggagcggctacatcaatgtgcagagaaagaacttcaaatataccttgatgcagaatctccctcgaaagacttcaatgatttccgtacaaagttggctggattaactagtgtgactcgcaattattttgaaaacctcgtccgggctctggaaactggattaaatgatgtaggtccttccactagccatggtacatgcagcaaaagcgcaacttcgaagagcctcggtggtaaaagtaagagtggcaagaaccgagcatcaagcaccagttccaagtcgggtggctcaagccgaggtgtggatgatagtaacatatggacgtgcgatcagtgcacatatgcaaaccccaaatctgccagagcctgccaggcttgtgatcaccagcatcgatagcgctgtcagtccttgctagagatttgaaccccatttgttgagaatcttctggtgctcccccgtgtaatacacaaacatacatgaaattgaatgctagctgatctctgggggtaattgcactaggaatgctgtaggttttcgtgtatctcggattgtttgtcgactgacatcgcctgagaagcctcaactcatcatccagttcgatttgtgtatataagtgtatcatctgtaacaatgttctttagatgagctaggaggcgtctgctgccaaaggaactgaactgttgtactgctgttgtaatataataatgcatttgtcaaatttaaagaaagttagccatc

SEQ ID NO: 31616 - DNA, 2523 bp, Zea mays
  Clone ID: UC-ZMFLB73195H08_FLI
aaatagactgattggcaaaattcctgaagtgattggcctcatgcaggctcttgctgtcctagaccttagtgagaatgaactggtggggcctattcctcctatacttggcaacctgtcctacacaggcaaactctatttacatggcaacaaactcactggacatataccaccagaactggggaacatgagtaaacttagctacctgcagctgaatgacaatgaattagtgggcacaatcccagctgagcttggcaaactcacagagttatttgaattgaatcttgccaacaacaatcttgagggccatatccctgcaaacatcagctcttgcagtgcactgaacaaattcaatgtgtatggcaatagactgaatggctctatccctgctggtttccagaagctggagagtttgacatacctaaacctttcttcaaacagtttcaaaggccagattccctctgagcttggtcacatagtcaacttggacacactagatctttcctacaatgaattctccgggccagttcctcctactattggtgatctcgagcatcttcttgaattgaatttgagtaaaaaccatctcactggatctgtgcctgctgaatttggaaacttgagaagtgtccaagtgattgacatgtccagcaacaacctgtctggctacctccctgaagaacttggacagctgcaaaaccttgatagcctgattcttaacaacaacagtttggctggggagatccctgctcagctggctaactgcttcagtttagtcagcctaaacctgtcatacaacaacttctctgggcacgtcccgtcatcgaaaaacttctcaaagttcccaatggagagcttcatgggtaatctgatgctccatgtgtactgccaagactccagctgtggacattctcatggaaccaaagttagcatctctcggacggcggttgcctgcatgatcttaggcttcgtcatattgctctgcatcgtgctgctggcgatatacaagaccaaccagccacagctacctgagaaagcatccgacaagccagtgcaagggccaccaaagctggtggttcttcagatggacatggccgtgcacacgtacgaggacatcatgaggctgaccgagaacctgagcgagaagtacatcatcggatacggcgcgtcgagcaccgtgtacaggtgtgacctcaagagcggcaaggccatcgccgtcaagcggctctacagccagtacaaccacagcctccgggagttcgagacggagctggagacgatcggcagcatccggcacaggaacctcgtcagcctccacggcttctcgctctcccctcacgggaacctgctgttctacgactacatggagaacggctccctgtgggatcttctccatggcccgtcgaagaaggtgaagctggactgggacacgaggctgaggatcgcagtgggcgccgcgcaggggctggcgtacctccaccacgactgcaacccgcgcatcgtgcaccgggacgtcaagtcctccaacatcctgctggacggcagcttcgaggcgcacctgtccgacttcggcatcgccaagtgcgtgccggccgccaagtcccacgcctccacctacgtgctgggcaccatcgggtacatcgacccggagtacgcccgcacgtccaggctcaacgagaagtccgacgtctacagcttcggcgtcgtcctgctggagctgctcacggggaggaaggccgtggacaacgagtccaacctgcaccagctgatactctcgaaggccgacgacgacacggtgatggaggccgtggacccggaggtgtcggtgacgtgcacggacatgaacctggtgcggaaggccttccagctcgcgctgctgtgcaccaagcgccaccccgcggaccggccgaccatgcacgaggtcgcgagggtgctgctctccctcctgccgcccgccgccaagcctcccgcgtccaaggcggcggcggcttcggcggcggccggcgactacacgcgcttcctcgcgacggcggccgacctgaggcgcggcggcgtggccgacgacgacaccggcgacaacagctcctccgacgagcagtggttcgtgcggttcggcgaggttatatccaagcacacgctgtcatgatcgtccgtccgtccgtctccctaactcccccccagaaagttttctcccaagtagagatcgaagtgaaagcataggagcacagcgcaggaaatagacgtagggttatgttgtgaggtccgccgtagaatggagacgatgtccgttggttcaggagtggtccaaatggaaggagaggcgttggttactctgccgctgctgctgggacgacgcatttgcagtggttggtttggttgtccttgggtgtaatcacacggcggcacgacaggtgccccccccccccccccccgtccccgtgaacggacgtaagttttcttggatcctagcaggaaccgcattgaatcggaccatgcatcctgcctgcattggaccagggtcgttgt

SEQ ID NO: 31617 - DNA, 2033 bp, Zea mays
  Clone ID: UC-ZMFLB73196A03_FLI
ctagagcgagctgccacagacaaggacacaatgccacccatacccaagagaggcgagcatctcctggtcctcctaattgtcgcatgcgctgccaccgccgccaccgccgccggcaccgtccccttctacccgtccgcggagtccgccgccgccgcgcactgcgacggcacgctgtacccggagctctgcctgtcgacactcgcggacatcccggacctacacaagaagccgctcccggacgtcatctgcgcggccgtgaaccgcaccgaggacgtggtggtcgccacgtccagcaactgctcgtactacctgcaggacaggtccctgtcggcgcgggaccgcctggccatcaacgactgcctggagctgctgtccaccacgatggacgagctccgcgccagcaccgccgacctggcgtcccccgccggcagggggtcggcgtcggcgggcgtgtcgcagggcgccaggcgcgcgacgatggagcacgtgatgacggtgctttcggcggccatcaccaaccagtacacctgcctcgacggcttcgcgtaccagagcggcgggcgcgtgcggcgctacatcgagccgaccttccaccacgtgtcccgcatggtgagcaactcgctggccatggccaagaagctgcccggcgccggcgcctcagcggcgccagcgccgccgcggcagccgttcacggggtacgggcagatggtgaaggggttcccccggtgggtgcgtcccggggaccggcgcctgctgcaggccccggcgtcggccgttgccgccgacgcggtggtggccaaggacggcagcggggactacacgacggtggcggcggccgtggcagccgcccccaccaactcgaagaagcggcacgtgatctacattaaggccggcgcgtacatggagaacgtggaggtcgggaagaagcacgtcaacctcatgttcgtcggcgacggcatcggcaagaccgtcatcaaggccagccgcaacgtcgtcgacggctacaccaccttccgctcggccacagtcgctgtggtgggcaacaacttcttggcccgcgacctgacgatcgagaactcggccgggccgtcgaagcaccaggcggtggcgctccgcgtgggggcggacctgtcggcgttctaccggtgcagcttcgtggggtaccaggacactctgtacgtgcactcgctgcggcagttcttccgcgactgcgacgtctacggcaccatcgacttcgtgttcggcaacgcggccgtggtgctgcagggctgcaacctgtacgcgcgcaagccgctgccgaaccagagcaacatcttcacggcgcaggggcgggaggaccccaaccagaacacgggcatctccatccagaggtgcaaggtggcggcggcggccgacctcgccgccgcccagtcctccaccaagacctacctgggccgcccatggaagcagtactcccgcacggtgtacctgcagtcggagctggactcgctggtcgacccggccggctggctcgagtggaacggcagcttcgcgctcgacacgctctactacggcgagtacatgaacacggggcccggcgccggcacgtccgggcgggtcaagtggaaggggtaccgcgtcatcaccagcgccgccgaggccagcgccttcaccgttggcaacttcatcgacggcgacctctggctcgccggcacgtccatccccttcaccaccggcttgtgagcgcgcggcggtatgtatacgaggggtttcacggcaagggatgacaataaaccaaattggcggcggcggaagttcgtcgtttgtacgttcgttcatttcaatcagagctaaaaaaaaggcaccgtatcgatccggtcgatcgtgttactgtagttgattattttgtgcttggggacgcaggccaatatatttatttaatttaaccgtcccatatatatgtacacgtgcttgttatgattcggtgtattatttatatgtattgatacggtatcaatatataattaataatgatacgggttctaataacgcac

SEQ ID NO: 31618 - DNA, 1128 bp, Zea mays
  Clone ID: UC-ZMFLB73196B05_FLI
ctcggatcgatggtgttgccggccaaagattcggcattaccagagcaagaacagtgcgtgctaatggtgagctcatcgaaaaggatgcagtgttgctcctaaggaggaaccagacggtaagagttgttggatcagaggcactgccgaagtctggaaggatttctcgctatgatgtgaagatcaaacacaaagcaggggaagagcaagaggagacagggaaagcccaagacaaagtagagaaaatccaagttaatgcaagcgggattcaagaaagttccaaggaaatattaggcaagacagataaattgttggatgcactggagccaaaccttgacaaagaagagaaggttcaagaaaaggaagagcaacacctcgatgaagtggataatgttcaagagaatgaaggcaaagtccaatgcccggcagagaaaatccaggaaggtggagaagtccaatgcccccggcagagaaaatccaggaaagtcgaggattctgagacaaagtagaaaagtccatttgaagagtgaggggagttttaaatccatacaatgtttttgaggttggcttaaccaactatcacctggcagcttacctggagcccacgagatacaaatctcattccccatgtatcatcatggtaactgggattgtaccagaaatgttccctggtcttgatgattggctgatacatccttgaattaaaacccaagcgatgtgatctgctatttcgaatgccagcaatgacaacaactcccccagctattgattgaatcttggttctcgggtgatgtccaatgcaatggcttgcttgcgatatctcctagcgtagctctgagatcgaaatcacaaagagctgtaagatcttcggattcaatttaagcagctagtgataacttcgctgcttcaaactgattcagatggagcttcaaaatgaccactagttgaggtagattgttccttgtagtattcttttgttgattacttttcctgcctgcataaaacgagaagcacaagtgtggaattgttttgtatgtatgtaggcatggtggtagctgcagcggatgttaacttttgtatatatctaagcggcctcttaacccctcatcatattcggaaaactattcaacc

SEQ ID NO: 31619 - DNA, 1204 bp, Zea mays
  Clone ID: UC-ZMFLB73196D09_FLI
agttcgagcaagaggttgctatcctgagtagagtgaggcaccctcaccttgtaactctgttgggagcttgctcagaggtgtctacacttgtatatgagttcttatcaaatggaagccttgaagactttctcatgtgtgcagaaaaaaggcagactctaccatggcaaattcgtgtgcggataatttctgagatctgttcagcactgacctttctacacaagaataaaccgcacccagttgttcatggagatctgaaacctgccaacatccttcttgatgtgaatttagtcagtaagcttagtgacttcggtatctctcgccacctgatccagtccagcagcaacaacaccaccatgtatcacaccatgcatcctatgggaacctttcagtacatggacccagaattttttgccactggagagctcacatgtcagtccgatatctattcttttgggattgtggtcttgcgccttttgacaggaaggcctcctgatggcataaagaagattgtggaggatgccatggagaaaggcgacctgaactcagtagttgataccttggcaggagactggcctgctttgcacgtccagcagttagcactccttgctcttagttgcacagagatgagccggaggcaccgtcctgatctttcagccgtggtgtgggcagtggatgaggcgatgaaggatgctacaacagtaccttcagcctcatcttctagaccagtgtcggatgaaaataacacaccgtcatatttcatttgccctatatctcaggatgtcatgagcgatccacgtatcgcagctgacgggttcacctacgaagccgaggccatcaggagctggcttgacagtggccacgacacgtctccaatgaccaacatgccactagaacacgacgagctcgttcccaatcgcgcgcttcgttctgccatccaggaatggctccagcggcagaaaacggccttgtagcttgttgttgttcctgttggattgctgcgtgattgattgtccaccaccacaaccacgagacggtgttgcttctccaccagaccaccactacgcacggtcatctactgctgcacgctcggagttcaaggttgtttgctgtgaggattctggagaggcaccctcgccttgtaactctgtttgagcatggtctgatgagtaatctttacttgtctaacgagttcgtacctaaacgg

SEQ ID NO: 31620 - DNA, 2197 bp, Zea mays
  Clone ID: UC-ZMFLB73196E06_FLI
ccggaggctgcgtcgctgccccgccggcgccgccgtatgccagttctttgtcagtcccttcggcaggtcttcgtgggtccttctccttcgccggcgacgagcacccaccaagagaaccttcctgcaaggctgcattgatctcgtcttgttgtttctggcccaacacttggtttattgctcaaccttaaccccggacttgttcttctacaggacagcgggtacagcgctagttattgcttcaccttccttatctttgctgcagcaactggaggccgaggcttttacaaggagctggggaagaatgggcagaagctgctatcgaatctgaagctttgcttggcacaccagcactggagagatgtataagaaccaactccaggagcttgctcagaggagctgcttcaatctgccgtcctattcctgcatccgggagggaccagatcatgcaccccggtttaaggctacagttaatttcaacggggagatgttcgagagcccagtgttttgttccactctgcggcaggcggagcatgcggcagctgaggtagcactcaatgagttatcaaagagggggccttcgtcgacgctggctgccaaagttctggatgaaaccgggatatacaagaatcttcttcaagaaactgctcatcgagctggtctaaaactccccatctatactactattagatctgggccaggtcatacgcctgtgttcgcatgcacagtggagttggcaggaaaggcatttactggcaatcctggcaagaccaagaagcaagctcaaaagaatgctgcaatggctgcctggtctgaattgaagaaactgcccagggtaggtgagccgtcatcctcatcttgtccacctgatcaggatgatgaagtgcaggaacaggtcgtagttactcggactcttgcaagcttgaaccaggcaaatagtggcaaggtgccacatcagaaggaaaaacagcaaagcaataaccgcccatcatcacggagatgttatcctaaaccaaatacaccattctaccgaccatttatgcaaaatcaggcttatcctagcgttccaccagatcaagctatgtaccatctgtggcatcggatgcaagtgacagccaacgcctcgctttccagtggtaccagctatgggcaatacaagtttttgcccaccagcagctatgctccccatgtaccctccttcacctcaagggcaattctccaatccggctaaccaggatgctctaggccttcttccatgttttcctgatgcttctcctgccatgctacggcacttctcaccttaccctgtctcctatgtgccaagaagtcctctgccggttactgttcacaatgttcatgagagaaggcatgaccatactgaaacagttgagcttcctgatgctgtggtgttctcccaatgcacgaccctagattcctttaggacatcagaatgtggcggtccaccactcaaggttcaagaaccaaccaaaaatcggaaagaaggctgtattgggtcccctgagaaagaacttgacactcttgccgtctcaagctctaccgcacaagcgtcgtcgcaaaagttggaagcaaatgaaggtaagcaaacagtgcaggcaggtttgaagcagacccatgaacagcagctgatgtcatcctcgtcttgtgttagttcttcagttgtggcacagagctcgcattacgctagctccatccagcatgatgagtctatacatagaaggaatcctcctcatactagttcgcctgcattgcctgatgtgtggtcttcccgctcgcaagctctgcccagatttggatcaccaagttgggtgttccagcagcgaccttggttggctgcacccgtcacagttcgaaccgctgttcctgtctgctcagccaggccaaacgtggtgaattctaccactggaataagacctgctgcccagagccatgatggagagagagatctgaacagcgccgcagcagcgagttctggattcaataaactccaaatttgagctgcggttttggttctgctgagcttttcatctcagttttgtttgcttcttggcttgaggtttattttttagttagatataccagataggctcttaggttttcattttacatttaccagatgtccagttccttctgaagataaatggacgagaactgtaatataaaaaatgcagaggcctttctc

SEQ ID NO: 31621 - DNA, 1453 bp, Zea mays
  Clone ID: UC-ZMFLB73196F04_FLI
gggcgagcagtctgcgagatctcgattcgtctggaagacatcgctactaccccagccacagtacccattgggtatttatctgctcccttgctgaagctggaatgtgcagctcgatcggttagcgctacgagtcctcgctgaatccagccaaatgatccccttgagcttgccagttagagcacgcacctaatataatgctggccttccgtcagaagtaacagctagctaagagaagcacaagaaaaatctggtagcttgagttctgactcgaactcagagatggcttatgcaagccccgggactgatgatacgtcgacagatctagatactgacgagaagaatcacatgttggagctagggcagcttgtgtcccttacagcttctgattccggcaacaaagcaaaggacaagctactaggtcaaaaggcactgcgccgtctggcccagaaccgtgaagctgctaggaaaagccgtctaagaaagaaggcatacgttgagcaacttgagaatagcaggctgaaacttagccagctggagcaggaactccagcgtgctcgccaacagggcatcttcattcctactccgggagacgaccagcagccaaactctactagtgaaaaaggtgctttggcgtttgacaaggactacgctggatgggaagacgagcacaggaagcagataagcgagctgagggccgcgctcagcgcacacgccggtgacgacgagctccggcgcatcgtggacggcgtcatggcgcatcaccacgaagcgttcaggctcaagtgcgtggcagccagggccgacgccttccacgtgctgtcggggatgtggaagacccccgtggagaggtgctttatgtggctgggcggatttcgaccgtcagagattctaaagttcctcgcaagccatctggaccccctcaccgagcggcagctcgcgagcgtacacggcctgcagcagtcctcgcagcaagccgaagagggcatctcgcagcgggtgcaagcgctgcagcagtcggtcgcggagaccctcgcgtcgtcagggtccccgtgcctgcctgtgcctgcaggtcgtgctcctccgcctggcgacgacgccgctccagactgctcggggacgatggcggcggcggttgcgaagcttgtcgctcttgaaagcttggtgcatgaggctgacggtctgcggaggcagactcttgagcagatgcagcgcgtgctgaccacccgccagtccgcgcgggcgctgcttgtgatcagtgactacctttcccggctacgcgctctgagttctctctggatcgcacgaccacgggaatgaattcagctcggcttatgtatctttgtttgacccggccgtggagaaaaataagaatcgaagatgcctccgctccttccatcatcactgcatgtaattgtaatctgaacatcattataaacagccgtaaccgttggcc

SEQ ID NO: 31622 - DNA, 1143 bp, Zea mays
  Clone ID: UC-ZMFLB73196G08_FLI
gaccgtatcgtctcgcctgttcagtttccttctcctcttcccgcagcccggtttgccgaccaggttccaccgttccagagtagccaagcgaatcccgtgtctggttcgcgcgatggcggaggagcagtccaacccccagcaccagcaagcggaggagagggaggttatggtggagcagcagcagccgaggagggccccgaagctgaggtacctggacttcgtccaggtggcggctgcccaggccgcggtgtgcctcgctgggctctacggcctcgccaaggaccacgccggcccgctccgccccagcgttgacgccgtcgagtctgccgtcaagggcgtcgttagccccgtctacgaccgcttcggcggcctgccgctcgacgtcctcgccttcgtcgaccgcaaggtggacgacacggtgcacgaggtggacaagcacctcccgggcgcgctgaaggcggcgtcggcgcatgtctacgcggtggttcggggcgtgccggaggtggcgcgcgagctggcggccgaggcgcagcggtcgggcgtgaggggcgcagcccgtgcggcgctcgcgatgacggagccggtggcgcgggacgtgtacggccgcgtggagcccgtggccaaggacctctacgtgcggtacgagcccgcggcggagcacctggccgtctccgcctggcgctcgctgaacggcctgccggtgttcccgcacgtcgcggagatcgtcgtgcccaccgccgcgcactgggccgacaagtacaacagggcggtcgcagccgccgcggagcacggctacgcgggggccaagtacctccccgccatccccaccgaacgcatcgccaaggtgttttcgtcggcgccagaggccgagccgctggcagagggccagtagtgtgtgtgtgtgtgcgcgcgcgcgcgagctcgtctttgccggtggtgactctggatttggatcaccttccgaactgaactgaaaataaggaagcgtgaatccgggggccagttaaagatggtggtatggtatggtagcggcgttgtactagatgcgtgatgggacgatggttacggaccatgatgatgacgctgtgttccatttagctctctgctgcgtgcttttgtataaaagaagtggttcgatgtcgc

SEQ ID NO: 31623 - DNA, 1286 bp, Zea mays
  Clone ID: UC-ZMFLB73196G11_FLI
cttcttcacgtcgcctcctccctaggcgccgatcctacagagcctcgctggtcatccctgctctctcgacgtctctcccatggcgccctccccttcctgccatggtcgcccctccctgctgcagcttgacgctcctccctggagctcgcccctgccctctgtccagcgccctccctgctgcccatggtatggacgcacagccccaacgtcggctgccctgttccttcccttcctgttgatgagcacgacgtctcccttcatctttctctccatgccggtgctgccctctcctgctcgtcgagccgctccctaatggttgctcgcaagttcccaatgctgccagccgtgcagagccttcatcagccatggccgccgacctcctcttccatggatgacgattttctttcctgcagcaagaagccatggcgccccttctcctcttgttttccatggaaaacccacgcatctactcctccccatggctgcgtctcccgtagggtttcgtacaatcgcagcagcagcggatatagaatcacctctatgtagtgcccttggcatgctcgatgaaatacagcaacaagctccacctcgatttgtgcagccccagttgtgaccttgtcgaatcccggtgaggacccattgttttccttgtgtttatttctctccggtacatgtattcgacgccgatttattagatgctaatcatgtgtatgtatggtgtgcttgtgaggagagaaatccctggaagtttggttgaatgaaagcgaagtctcgaggtgtcgttcattaggtactcgacgtatgggctaaattgtagctcgacgtggtgcttatagtctccgagctgaatttaattttgggtgtgttaatcgatcacgtgatgcggaggacaagaaccagatttctctcaaggtgatgctggtgaaagaacctaaagcttggataatctgataatatgatcaagtaccaggatgagagatgctccccaagcggacgtcatctaacaacactgacttagtgttatcccaggttataattttgctctgttgtggatgctgctaagtgccggtgggctcggccttcttatataggtgtatcccatctttaacttctttattgaggattgtcacttaagctagcatgtattttaaaacctataaatattttatacattttaaattgtaattcttttgaatcactttcttttgtaatcactccgataattgtataatgtaaacttattgtaacatgtaatcattttgcaataaagaatttatttccgctgc

SEQ ID NO: 31624 - DNA, 1467 bp, Zea mays
  Clone ID: UC-ZMFLB73196H02_FLI
ggccgtcaaataatgagtttcgaaagcgataatggtcccacccacccatccacccgcacgcccaggaggtggacctaccaatcatcactgtccctgttctcttccagcggcgcgggggatagctcgccggagtccggagtcgccgctgccagtccacagccccaccgtctgcttcacctcgcccgtcatgtctgctgccgcagcagctgcagctgccgctcggtgcgtccctctccgggtgtcctcgccggagaccgcgaagtccgccgcttccattcccacctcctcggccgcctctgcgtctgctcccctccgcgccgccgtcgccgcgggacccggccgccggcttccggcgccgccgttccggtgctcctcatcgtcgccggagaactctgccccgcgcgatcttggattgcttctggaggtggaaggagttcttgcagatgtctaccgttttggcaatcgccaagctttcaatcatttcgaagcctcggactagattgtgcaaattggacagagccaatatatgctgatttggtgaggaaagcttgtggtgatgaggaaaggatgctggcattattctttgacaggattggctggcctacatctttgccaactagtgagaaaggatcatttataaaaagtgttcttcgtgagaagctgaaagctttggaagagttctcagcttctgatagcttaccactacggcctggagtggaaaagttcattgacgatgcacttggtgaaggtgttcctttggccatattggctgcatatgggagaaatggagaaaagatttcaagatctatagctatgaagttaggtcccgaaagaatctcaaaaataaagattgttggaaacgttgaggttgaagaaagcttttatgggcaacttgttcttggtaaaggagtcacatccggtttggatgagcaacttgtcagggaagcccagaaggctgcttctgcagagaagcagaggattgcagaaaaggttgcatcgatcctaaaacttagtgttgacatcacagcatccgaaagctctgacaaggtaatagctgctctccgagctggttcagaatacgttgggtgcgacgtgcaaagctgcatccttgttgcgggcagccaatctggtgtccttgcagccgaacgcattggcatgccatgcatagttgttcgaagcagctttaccgcaagagccgaatttcactccgcgaaggccgttatggatggattcggcgacacagacttgaccgtttcgaaactgctgagcaaaaagtggttttgattgtctgtcacctgtggaaacgaagggttggattggaggctgttgtgatttatgaacctgtaaatgattcagtgctaaccggagcaaacctttgtataaacaagaggtgttgctgattaaagttaatgagtaacaaactgaaagaataaattcaggtggcgccatcgtgtgcttctggttatc

SEQ ID NO: 31625 - DNA, 2245 bp, Zea mays
  Clone ID: UC-ZMFLB73196H08_FLI
ggctttgacgccttcggtgtccttgcgtccgcgtcgtgtccgcgcgcctgctgcccgccaacccgcctctcccaaatcccatccaaattcctccgcgtctttcgaagatcatattttgggaggggcaccgcccccagatcggggaggaatccccattccgtctggtgggtcggtctcccctgtccgtttttggctcttttcccctctcacaagggcggctcttggatgggctgcctgccgtgcttcgggtcggctggtgagggggcggccaaggagggcggtgcgcgcaaggacggtacgtcggatcttcgcgtcacccgggtcgaatcagataaatcaaaaccacagggtggactagactctaagaaggatgcagtcattttgagggaggggaataatcaacatattgcagcacacactttcacttttcgtgaacttgcagctgccactaagaacttcagacaagattgcttattgggtgagggaggttttggtcgtgtttataaaggacgtttggagaatggacaggttgttgcagtgaagcaacttgatcgcaatggccttcaaggaaacagggagtttctggttgaggttctaatgcttagtctgttgcaccatgacaatctagtaaacttaattggatactgcgctgatggagaccaacgtcttcttgtatacgagtttatgccattgggatcacttgaggatcatttgcatgatattccacctgataaggaacctctggactggaatacacgtatgaagattgctgctggtgccgccaagggcttagagtacttgcatgataaggcaagtcctcctgttatttacagggatttcaagtcctcaaacattctactcggtgaagggtttcatccgaagctatcagacttcggccttgccaaacttggccctgttggtgacaagactcacgtttcaacacgtgtcatgggaacttatggctactgtgctccagagtatgcaatgacagggcagcttacagctaaatctgatgtatatagttttggtgttgtgttccttgaactgattactggccgcaaagcaattgacaacacaaaaccccatggagagcaaaacctagttgcatgggctcgtcctctattcaaggaccgcagaaaattccctaaaatggctgatccgtcacttcagggctgtttccccatgaggggactgtatcaagctctagctgttgctgcaatgtgtttgcaagagcaggctgctacccgcccctttataggtgacgtggtcactgctctttcatacctagcttctcacacatatgatccaaatgcgcctgctcaacataatcggagtaattcatctactccgagggttagccgaggtggtgggagcaatgaccaacgccgtctccgctcatcaaaccaccactctccagatttgagaagggaagtcaccacagcatcaagatacgacgatgaggttagcagggcaaactctggtactggttctggtcgccggtctggcttggatgatgcggatatgtcaggctcacaattgggtagccctgctcacactggaaggaagaggggatctcctaggacttctgaaagccagcatgctatagcagaggccaaaacatatggggaaaattcaagaggcagaaagtgaccaaactctcagagcagcattgaccgtatgagcagaatgctgaaccagatggttcatccattcatcattcatagaaaaaaaaaatgataagttccttgctagcgccagacaggaacattgcatcagtccatctaggtcccttggtctttgtgaatagagctttcctcttttccctttacgggctattgccactgcttcttaacttctccatacaaatatcattgccaccacaaccaccatcagaactcccattcctgtcatctattcctcatgaatgcgatcatcatgcttacgagccttcgtcgtcacggtgtataacaacattcggttcacaatgtggaggtaaggcaaacatctgctctggggagcacaggatctcatccagttgggcatcttctgttgctgttgcatgctgggtgtcagcagtcacaccattgtcgaggggtgtgatgttctttttcttgaatggtttgtacctggggttacagcagttcacctgtgtttgatacatctgccttgtgacatttttgtgttgagttgtcggaacacatctattatcatctctaccataaaattgttgtggcccttgcatctt

SEQ ID NO: 31626 - DNA, 917 bp, Zea mays
  Clone ID: UC-ZMFLB73196H10_FLI
ggttctcgttttcttcattgttaggtctgtttaattaaatcgtacgagacgttatgttaattgtatcacaacatctgtcgtctatgagcaggcaggacagaagtgatccactttcttcatgcattcttgtaccgaaacagggtaacctcgtgctaactgggccatcaatggccacctcggcagaaagtccaattgccttcaccttctacctccatgatggcagcccgcaagccggagaagccgctgaggacgacgaggacatcgggaggataatctgcgactgcatcggcgacgacttctccaactacaacagggccatagtcgagactgtccaaatgggctatggcctcgctgaagtgatctatgccgtgctgaacaacggcgtccaaggccgggtcgctgtcaaacttgctcgcctgccggtgtccaaagccggagaagaagacgccaccgccattctcgggaggatcgttgctcgcagcaagctgttcgacgtcggctgcgtgctcttctacaaagagggtgacaatggagtgagcgtgcgaccgggggggctgattcagctggcgagggaagcgctcgccgtgccgctgcacatgccgctgacgattgagcttgacctgcatcgctgttccggcgatgaaattgttggaggggtccttgagttcaatcctgcgattgacggccagcacacggaacgacttgttggacaaaatggcgctgaattggaagtggcaatttcatggtcggagtacccttggtaatgcctattattattagccattaattcaagagtgcatttttatatgtatcaatgactaagggttttaaatcatgtttcatacaagacagttgcactagagcaagataacatttcgtggtgggaacgccaaataaataaaaatagagcgagtatc

SEQ ID NO: 31627 - DNA, 1882 bp, Zea mays
  Clone ID: UC-ZMFLB73197E03_FLI
ttgcccggaggtttagtgatgcctctgtccagagtgatattaagctgtggcccttcaaggtcattcctgggcccggtgagaagccaatgatagttgttcagcacaagggggaggagaaacagtttgcagccgaagagatctcctccatggttctcatcaagatgcgtgagatcgctgaagcttaccttggcagcacgatcaagaatgctgttgtcacggtccctgcctacttcaacgactcacagaggcaggccacgaaggatgctggggtgattgctggcctcaatgtgctgcgtatcatcaatgagccaaccgctgctgctattgcctatggtcttgacaagaaggcaaccagcgtcggtgagaagaatgtcctcatctttgaccttggaggtggtaccttcgatgtctccctccttactattgaggaaggtatctttgaggtcaaggccacagctggcgacacccatcttgggggtgaggactttgacaacaggatggtcaaccactttgtccaggagttcaagaggaagaacaagaaggatatcactggcaacccgagggctctccggaggctgaggacctcttgtgagagggccaagagaactctgtcttccactgcccagaccaccattgagattgactcgctgtacgagggcattgacttctactccaccatcacccgtgccaggtttgaggagctcaacatggacctgttcaggaagtgcatggagcctgttgagaaatgcctgagggatgccaagatggacaagagcagcgtccatgatgttgtccttgttggtggctccactaggatccccagggtgcagcagctgctccaggacttcttcaacggcaaggagctgtgcaagaacatcaatcctgatgaggccgttgcctatggtgctgctgtccaggctgctatcctcagtggtgagggcaacgagaaggtgcaggacctgcttctgcttgacgtcactcctctctctctgggtctggagactgccggaggagtgatgaccgtccttatcccgaggaacaccaccatccccaccaagaaggagcaggtgttctccacctactcggacaaccagcctggtgtgttgatccaggtgtacgagggcgagaggacccggacccgcgacaacaacctgcttgggaagttcgagctctccggcatcccaccggctccccgtggtgtcccccagatcacggtctgcttcgacatcgacgccaacggcatcctgaacgtgtctgccgaggacaagacgacggggcagaagaacaagattaccatcaccaacgacaagggccgtctgtccaaggaggagatcgagaagatggtgcaggacgcggagaagtacaagtccgaggacgaggagcacaagaagaaggtggagtccaagaactcgctggagaactacgcctacaacatgcgcaacacgatcaaggacgagaagatcgcgtccaagctggctgccgacgacaagaagaagatcgaggacgccatcgacgcggccatcagctggctggacgccaaccagctcgccgaggcggacgagttcgatgacaagatgaaggagctggagagcctttgcaaccccatcatcgccaagatgtaccagggcgcgggtgccgacatgggaggctccggcggcatggacgaggacgctccggctggaagcggtggccctggccccaagatcgaggaggtggactaagcggtttgtgtcagtctcgtgtgtctgctgcagtggctggctggcccagtcgctgctcgatttatcgtcgtcgtcgcggtgtatccgcgttagaaccttttgttggtgaacaatattatcgtggcacgcgttttaagtaatacggtattctggttcggttt

SEQ ID NO: 31628 - DNA, 1653 bp, Zea mays
  Clone ID: UC-ZMFLB73197E11_FLI
cacaacacaaccacggtgtcgtgtggtcgtcttatgcaagaaaggccagggccactgcgcgcttcaccagagagagcaaggctacaaccaagaggtgtgctggaattatacatctccaaaagctagctagaagaccttggtgggtggtgagcttggaggaggagctcatggctgcttcttcctgcatagcttgcaataatggcagtaccgatgagaaggaggagaagcggaagtgtgatctcgtcgggtacgaagcactgcctgagtggctcaaggacaacgagttcatccatggctactaccggtgcgagtggccgatgaaggagaccgtcctcagcatcttctccatccacaacgagaccctcaatgtttggtcgcatttgctagggttcctgctgttcctgtgcctggcaatctttacagcaatggtgatcccaaggaatggcagcagcaggagcagtaacagcgctgcataccagctgggagatctggtggagatggccaacatgacggtagcgctgaggcacgaggcacttgcagcgtgtttcctgctgccaccatctgctgctgctttgtctgaagatggtcagcagcagatcccaaccagctgtccacccaacacttcctcctcccatcatcatgccatccagatccagagcagcactggtacggcggccaccgtggacgccggcaccgccgccgaccccatcacgcggtggccgctgttcgcgtacctggtcggcgcgatggtgtgcctgctgacgagcagcgtgtgtcacctgatcctgtgccactcggagcgcacggcgtacgtgacgctccggctcgactacgccggcatcgccgcgctgatcgtcacctctttctacccgctcgcctactactccttcctctgcaacccggcgctgcagcggctctacatgggctccatcacggcgctgggcgccgccgccgtgacggcgtcgctggtccccgcgttccaggcgcctgagctgcgcccgctccgcgccgcgctcttctcctgcatgggcgcgtcgggcgccgtgcccatcgcgcacaagctgctcctctacggcggcacggcgcccggcgccgtagcctcggcggggtacgaggcgctcatgggcgtgctctacggcctcggcgtcgccgtgtacgccgcgcgcgtccccgagcggtgggcgcccgggaggttcgacctagtcggacatagccaccagctgttccacctcttcgtcatcgccggcgcgtacgcgcactaccacgccggagtcgagtacctcaagtggagggacgtcgacaaatgctgactggactggttgctcacggcgtaagcaatgcttgtgctgcggccttgcttgagaagagatcttgtgaaactttcaaagaatggcaggtgggtccgaccgatatatacctggtcggtggcaaagttcatggagaggtttggtgagaggattatgatgtgtacctaattagtagtagcagtagtagtagacaatacatcgaggttactttttgtgcactgattgacatgaatgggtgtaaacaaattattattgtatctcatatttaagtattattacgtggctgaacaccacacgacaatgttcagcctcagacttcaagtcatgagatacagaaatattcttt

SEQ ID NO: 31629 - DNA, 2505 bp, Zea mays
  Clone ID: UC-ZMFLB73197F11_FLI
gctcgtgatattccagccccgccgccgccgtccccgcccccatccgtgacaccccaccatcaccgccgcgccacgcgcgacaactccatcccccgtccgcacccctaccccgagcatcgcagcgcctcccgcacgaggtcgttgcgcttgtcgatctgatggcggcccatggcaaaggagcaggcggtgatggcagccacagcagaaagccgacgctcggcgtgattcccacccgtcgcgagccaagaggttcgaggtcatttttgagccaagaggttcgcggccacgggagcaaccctacagaaccatcaccaccaccgctctctcttcctctgctcttctctgcctgcctgagctcaccgcacctcgcctcctcaccgcggatcctccgttaatccggtagaaaatggccgatgccgaggatatccagcccctcgtctgcgacaacggaactggcatggtcaaggctgggttcgctggcgacgacgccccgagggccgtcttccccagcatcgtggggcgcccgcgccacattggtgtcatggtcgggatggggcagaaggacgcctacgtcggtgacgaggttctgcaaaccgatcatgacaaaaccaaaggtagctttgaagccgcagactctgtctccacaacctgaagcccaagcacctcatgatcctcaaacaccagagcaacaacaaagcgggactggtgtaggcgtgtagctggtgagccgggtagtgaaggaggtgtgtaccaggcctccagtgagcaaatgggcatggtgccggatgcatctgcggccggtggcaggaaggtcgagctggatggggacatgcgatggacatcacaggttggcccctccagtgatccatctcaaacactagccaggtttcctcctttgccaccctcctttggcagttctcttcctaacgtcgccgtaggttcccttccctgctgtttttgtctcccatagctcttaaaattttaagttccctgtttgcataaaggccataggaaaaacgttgaatcaaagcaaacttgatgcttaccgaaagcatgttcgatgagttactcagattcatggcccaggaattgaatctacacggtttaataactatttgcatggctctaaatgcttaattaggtttgctcatcgttcctcagtgctacttcatcttgattttctgctgagtatacaagggatgaatgaggctgctcatggtggacagaacagaagacgaaatgaatcgcaaggggaaactaacatgcgagagaggaggagctagccacaaccaaagagcttggttcaatacttcaatggctagaataatgaacgatatgaagatcaggtagcattatatatgtcaataagaagcagaggagagaagcagcccacatcgcaggagacaaggacttcacttgtttggccagttcaggacttcaggatgttgtcgatgatgtccatgctatattccctcgcttcatgcttaacaatgagggagagactaagtgaggggctgaaggccgttggtgctgtcagaatgtttttttggagttttggtggatgatgctcagtgactgcaatgcaaaggatccttctgttttgtatattgaatgagattacatcactgtttttttcttagcgatatgttgagctcatgtgctcgtttatgttagtcgatctctggctcttgtagtaacttggaaagcttgctgctttttttaagggcatacatgcctgtgatgtgtggtcatgatcatttttttctcctgttattttagttgtcgtatcataaatgccatgtttgcattggtgttccaacatgtcaatattattgaataaatgtttgcattggcggcagcggggacgacgctaagtcgagcaatggcgaagcggcccgtggtggcagtaacggtggagagaagcagggggatgaatccaacggtggcgggatacttagcgctgtggcttccaggattggcgtggtcgtgtccagcgccaacggggaccgcagcggcagcgctgaggatggtgccaagacgagcgctggcgacgctggtcacggtagcaagggcgaggagaaggggcgtggtgtgaacggtggtagaatagtcgagcagatcatttccaatctgccctcagatgatcaggcgcctgatgccgatgaagcttccttgctcatcgccattatcgaagattagctccatgttccgaaggctctctaggtcgtcctcaacgccaggatcaaatcatcagctgagccggagactgaaaacaataaagaaaagcaagcagctggtcatagtaaacatcatgtagcgaggcttagcagattgcttttttttcccgttagaatcagtccacatgtcctcgacacgggctagatttgttctaggattatttttccagtagtaagccatgtatccatggacagtccacagcgcgacgtctaatgtaacatcatcaaggttcttttgactatcccataagaaaccattccttaagac

SEQ ID NO: 31630 - DNA, 1088 bp, Zea mays
  Clone ID: UC-ZMFLB73197H07_FLI
gtgcccgtgcacgtgtcggagacggggtggccgtccaagggcgacgccaacgaggccggcgccacgatagagaacgcgcggcaatacaaccggaacctgctcatgcggcaggtgagcggcgagggcacgccgctgcggcccaggctccgcctcgaggtctacctcttcgcgctcttcaacgaggacatgaagcccggccccgcctccgagaggaactacggactctaccagccggacatgagcatggtctacaacgtcggactctcccagctcgccaccacgtcggccgcctccctctccctcgccacgtcgccagcagccaggaccacggatgttgggaaggactatgccggcctatgcctcgtcgccgtatctgtggccatcctgcttatcacccaacaaggatcgctcctcctgtgaccgcaaaaagcgcgcgcccgcccactgccaggcctgcagaatggcctggcttttgtggaccaaaagcctccaagaccaaaggggagacgcaccgttcaaatccaagggagaaaaaagctaggacgagggggcgatgtggaagccactatcttgaggacagaaacagcgtgtataagctatttgcgaggccattttctagcacacaccagactttattccttggttacttgcagaggagatcaggagaaggaaccaggaaaactagttcgttctgagaagatttatgccaggaggaaaaagggtggcctgcgctgcttgggagaactggcgtctccttctcagcgagaagagagctggctttattccccttgcgttgacaagcccgtggtctaggcctcttctgatgcgaattttagctgtacataccaattggttcattcgtttatttttagctccatttagcttgaccattctgccctcatcccccggggtggttggtcgaaatgagaggccagtggcccagtcatgtaaataactcgagtaaacaaatgaggcagctattgcatcttattgtaatctgtttaaaaactatgacattatgaagtcctcattgttaaagaaagatttgtttttccgctacaatgttaatagagtaaaaatgagttagc

SEQ ID NO: 31631 - DNA, 2611 bp, Zea mays
  Clone ID: UC-ZMFLB73198A04_FLI
cttatcctatctccatcgccccatttcctatcctcccagccgatcccctctccctcacggcgccctctcccatggccgtcggccctccccgccatggacgtcgctcttccttcctacaccgccatggcagtgcctccctgcagcagtccggtgaccgggccctccccttcccacgtcatgctggtgccatgtcttctccctcaccggccaacctcgccagccaccaggaaggtgtctccctctcggcagctcccatggccaccatcagccctagctgcgcttgccctggttccagcagctcgacgccagcccctctcaatcttccatcgctgccgctcagcttgtcccagatatattgtatgttcctctattttattgtggtaattgtgcttacattaggtggtgttgaagcgatgcaaatggtagttagtgttttaagaaattaaccagttagttttgtcgatgtgctcggatgaatatatgtgtgtgcataatgtgtttaaattgattctttgtttgcataatgtcaaagtaggttcaaaatactagattatgtgaagtaaatggattcatggctataaaatagcagaaatctatatatgcgattagaaagtgtcaaacacatgataagtgtagaaagtatatatgagtaaattgaatgttggctgtttggacttgctatttggactgtgtctagttttagtatccaggtagttgagtgaagtaaacattgttttctgtagaaatgttatatataaaagttgtagctcacttctttatcttggttgtgtaaaaattgcatgaccataggtttagtagtttaggagttatgatttttcaaagtccagtctcagaatctgcccagattctgtactgatttcgaaaataaccttgtttgcccaagttaaacttagaatcagctcttagtaattataggagaattgtagtacttttcttaagctttgcaacaaattttggagcaccaattttggtggtctataagtcaggttatggctgtttgaaatgtgatgtttgaagctgtcaaaatctggacaacaatgcttgtttgtattaactgacttcgatacacattgaatcaccttgagatgattataaatgaactgtagacaattctattagctttctaaaaagtctaggatcacctgatttggacttctaaaactccagttatgaattaatgaagtaagtagtcgaattctgtccaaatctggacagaaattgcgtttagtactgtttgacatttctaaatgtcgaatctcatggtgatgataataccaaaattttagaggactttataagcttttcaaaaagtcttagtttactatttttggatgaatattgtgtaagttatgaataaaacaactagctctacaactttcatttaatcaagcgtgtttctgctttatcttgctatgctctgaccgaagctttagtttttgtgcgactggtatttctgtgttctgcagatcatttagctcaagtaattggtagttcaaatgtcataatgtttggtttgagatttctatccgtggatggttcgtctggcttatctatgcttttaggtgcttcatctggcttatctatgtttttgcgctctcgcttttgcatgtgttgcaggatgttgacaattggaaatccatgtagcaaataaatgattttggaactagggacaggtcagagtctagagcatgttcattccacgtatgttggttttgtgacttgttttcggtgatttcagatctgaatggctgacattctgtctccatcgatatttaatagtaaagcaaggtttgtgacctggatttattgggtgctgtagacattggaggtggattttcctcaattggagatattgacaaattggaaaaaatgtgacttgacctgtgctgcaacaaccttaaactaggaggggcttctaattcttcatctctaccaacagtcctctcctgttactttttaaaccaataactttttcaagtttgtgcagatgcacacatccttgagccaaaatagaaaaaaaatcatagaagagttctttggtaaatataaattgtgcactcataattttgcaagtgcatctatggataccttcacttattcctaacggatgtctttcaggctgtcacgtgattcaagagtattaatgatatacaaaagtttgctttatggcaagtcaagtaaccaccaattttgggcaatgacagggatgtgcagtggtggtctcttaaaagaattttgtgttccagcgtagctatttccactgcaaactatcaaatcattacaaactggcattccatggcttccactagttgagtccccatgataaccaatccttgttatcatatacttcttcaagtttgacgtcagcaacgtggtcatggtgaccggcgggaggaacaccgggcgtgtaggagtgatcaagaactgggagaagcacaagggcagcttcgaggtcatcgacgtgctgcttggaggcttttgcatgctatttctagttttctcttatttgttgtacaagaaaacatagaatggaattcaaatttggtggtcgcaaaagtgtggagacttgaattcatataaagttaggctt

SEQ ID NO: 31632 - DNA, 619 bp, Zea mays
  Clone ID: UC-ZMFLB73198C11_FLI
aggagagcctttatgttctcaagttctggcgagacccacacgctgttacaagtgtgtcgccgaaatcttcaggctctgaatcatggttttctcagttgcatttcaaatccctttggcacaagggctcgtagcagttcatgccctcatcattttggcagtttggcgtcttcatcagctccaaaacatagcaagagatcttctgcaaatctgagatggcagtatgtttagatgtgtttggataaaatggttactgttggtttctgaccgtctcaggcacagtgaaagaatcaagaatcagcctagcttgattggtttaaggcgcagagcaaacatgtccttagaccagaaagtactgaaccttattaatttggtagcttaaatcgttaccttatgttctcttggtgtgtgtggtgtgtcaatgtttttaaggttctcttggtgtgtgtgtgtgtgtcattgtttttaaggtgtcgccaaggcgtccaaaaatcataggcgccttgctcgcctaggcgtccagtcgataggccaacgtcttatctcgacttatgctttaagaaccatggtttgtgtatgctacgttgctactatggattctttgccttgctaggtttggaat

SEQ ID NO: 31633 - DNA, 644 bp, Zea mays
  Clone ID: UC-ZMFLB73198F03_FLI
caggatttcgctcaccaaacgagatacaaaatcagcatcagtcaacatcaaagagacctatcgaacatctagaaaatcaaccctttttacaccttttccatcaagcagaagatgatagcatgcagcaagttcaacattgtgctcagttcccacccattcatcaatgtacgagcactccacatctatcagataacccccaacaccagcaacaggcttatttatctcaacatatatcttgcttgcaagttgggcaaggtcatcttggaggacgcatgcatattattccaaccagccctgcgaagttctgtgatgagtgtggctccccatatttgagggcgacatcgaagttctgctcagagtgtggtaccaagaggctaggaatgtgaggtgacttgatcaatgtgtatatgaatctgatgatgtagcaattgtagtcttatgtttgtaaaagggtctctagcgtaatggttaaggcagcccggcgaagttctgtgatgagtgtggctccccatatttgagggcaacatcaaagttctgctcagagtgaggtaccaagaggctaggaatgcgcggtgacttgatcaatgtgtatatgaatctgatgatgtagcaattgtagtcttatttgtaaaagggttatttgt

SEQ ID NO: 31634 - DNA, 1455 bp, Zea mays
  Clone ID: UC-ZMFLB73198F05_FLI
taggggttcccgatccttcctttcccacttccccttttttgcccgcccgctacccaaccgccgccgcggttctcgctgccagcgacggacgggccacaccgcgcaggggctcagccccgccacccaccttaaccccgccgtcgggaggcgtcgtccccggcccggcccggcccggccctcgccctctactgcaactggactggcgcgtagacctgtccccgccacgagatcgttccgccctatgtcggtgaagatgctctttgcatagctcaagctgcaatctgatggaccctgatgacaagaagtttggaaatggaccaagggagctcactggtgctgttgatttgatcagccactacaaactgctgccacaccatgatttcttttgcaagaaacctttgccgctggcaatatcagatacacattatcttcacaatgttgtgggagacactgaaattcgcaaaggagaaggaatggagttagatcaacttgttcataatgcatatctgagggataaacctgcttatattcagccctttgatatggaaactctggggcaagcgttccaacttcgagaaacagctcttgtggatttgccttctactgaaaaaggtataccgactatttcgggtaaaccaaaaagtgagtccaaggacaaagagaagaagcataaaaggcacaaagacaaagacaaggaacacaagaagcacaaacatcggcataaggatcggagtaaggacaaagataaagacaaagacaaggataagaaaaaagataaaagtggccatcatgaaaagaagaggaagcatgagggaacagaagattcagtagatgtgcataagcacaagaagagtaagcacaagagctccaaaaccgatgagatggggaatggagttagttaacacttcctagctctacctccaatccttgtaatttgctgttaaaacttaaaaggagacagacggtctctgctatcaaaaccctgtgcagaatagtgggtatcatgaatgggagctcttatttttgcagagtccattgtgaagagaattgaatttgttaatataggtctaatccttccaactgtgcaaatcaactgtgttcctccctgaagcattggttgtagggtgcgcttgaaaggatgtgcaatgagattgtttcgatgtagcgtgcatgagtaccctgagtagctgtggatggttatacagtttgtggtctagggatgtgcagtgagggcagggaattgggaataatttcgtgcccccatcgaccttgatttgtagggtaggatgatttactgtttaaccactagcaaatgttagtagccagttccatgttcatttactccacggcaactgtgctttcgtgtgccaataaccggagttgatccacatgtaatgaattggtgtcaaattgacgatcctgtgtttcaaagtatggttattggatcgtgttgcc

SEQ ID NO: 31635 - DNA, 1467 bp, Zea mays
  Clone ID: UC-ZMFLB73198F12_FLI
aaccattcctcccaacaccacctcgcctgcgatcttcgtagcctccgtcgcgtcgagcatcgatcatgtcggcctactgcggaaagtacaaggatgagctcatcaagaatgctgcctacattggcacccccggcaagggtatccttgctgctgatgagtccactggcaccattggcaagcgcctttccagcatcaatgtcgagaacgttgaggagaaccgccgtgccctccgtgagctcctattctgctgccctggtgctctccagtacatcagcggtgtgatcctcttcgaggagaccctgtaccagaagaccaaggatggcaagccttttgttgatgtcctcaaggagggaggcgtcctccctggcatcaaggttgacaagggcaccattgaggttgttggcactgataaggagaccaccacccaaggccatgacgaccttggcaagcgttgcgccaagtactacgaggcaggtgcccgctttgccaagtggcgcgctgttctcaagattggccctaatgagccatcacagcttgccatcgacctgaacgctcagggtctggctcgctatgccatcatctgccaggagaatggtctggtgccaattgttgagcctgagatccttgttgatggccctcatgacattgatcgctgcgcttacgtcactgagaccgtccttgctgcctgctacaaggcgctcaacgagcaccatgtcctcctggagggtaccctcctgaagcccaacatggtgactccaggctccgactccaagaaggtgacccctgaggtgattgctgagtacaccgtccgtaccctccagaggaccgtccctgctgctgtgcctgctgttgtcttcctctctggtggacagagcgaggaggaggccacccgcaacctcaatgccatgaacaagctcagcaccaagaagccgtggtccctgtctttctccttcggccgtgccctccaggcgagcaccctcaaggcctgggctggcaaggtggagaacctggagaaggctagagctgccttcctcgccaggtgcaaggccaactctgaggctaccctcggcacctacaagggtgatgctgccgccgacaccgagagcctccacgtcaaggactacaagtactgagttgcttctctttgcgtgcccgttttggaactcctgcctacgagctaggttgcggagtgtggtttgctcgttagagcttattttcggacatccaaaaaacatgcttcctatgtgggatgatggttatctttatatttgtatgttaattagtctctttgctgttaaatttcgtgtaagttggtcctgccgatggagaatcgagcagctccctttttttgttctatcaactatgctgtaattctggctatgtatcggcaaaaacaattctatatgctgagttggagtcggcaaaaattcatatatgctgagttggagacagcaacttgtttggatc

SEQ ID NO: 31636 - DNA, 329 bp, Zea mays
  Clone ID: UC-ZMFLB73198H12_FLI
aaggccgccgccgagaaggggcggcgcctgatgctcatggacgccacggcggcgatgctgatgcggcccgacggccaccccagccgctacgggcactggcccaacgagaaggtgcagctctacaacgactgcatccactggtgcctcccgggacccatcgacatctggaacgacatgctcttccagatgctcctcgcctagcagcaagcagcaaagattaaaaaaaaaactcagcaattcggtcgccggtaaccgtgcacagattggccttcttttttttgccttgtttcgttttttttaaaaaaagaagaaaatggtgcaattttgac

SEQ ID NO: 31637 - DNA, 757 bp, Zea mays
  Clone ID: UC-ZMFLB73199A07_FLI
tgagaggaacacccagcagcaccagggcggtgaggcccagcaggacgccaccagcacgaccacggcgtcgtcgtccaggacgacgtgaagaccgggaccccgccgcatgcaccggaggaggagaagaaaggcctgctggacaagatcaaggagaagctccccggtggccacaacaagaagcctgaagccgctgccgctgccgcaccggctccgcccgtccacgcgccggcgccggcgccgcaggcggagaacgtgagcagcccggatggcaaggagaagaagggcttgctgggcaagatcatggacaagatacccggctaccacaagagctcagctgaggaagcagaccacaaggcggacgccgccggcgagcacaggaccagctcctaaggtcgcagtcgcagcgcgtgtcctggccgtggccgggccttgggcgatcagaaggtagctagcgttggcatgtgggttcggttctggtttgcttttaccaaaagtttgtttcaaggtggatcgcctggtcaaggtccgtgtgctttttaaggtggatcgcgtgactggcagtgagtgttgctgcttgtgtaggacgtggtacgtacgggttttattttggttccaagtcaaaagtcacggtcggtctggatgttgtgtactgggtttgttgaattatgagcagctgcgcgttgtaattcggctgggctacctggatgcgttaataattgctttggtttctgcccagcgcgcgaacgtgttagcgtgt

SEQ ID NO: 31638 - DNA, 1535 bp, Zea mays
  Clone ID: UC-ZMFLB73199A09_FLI
cgacaaaaaggccaccagcagcggcgagaagaacgtgctcatcttcgacctcggtggtggcaccttcgatgtgtcgctcttgaccatcgaggagggcatcttcgaggtgaaggccaccgccggtgatacccatctgggtggggaggacttcgacaaccgcatggtcaaccacttcgtccaggagttcaagcgcaagcacaagaaggacatcagcggcaacccgcgcgcgctgcggcgtctgcggacggcctgcgagcgggccaagcgcacgctgtcgtccaccgcgcagaccaccatcgagatcgactcgctgtacgagggcatcgacttctacaccaccatcacccgcgcccggttcgaggagctgaacatggacctcttccgcaagtgcatggagcccgtggagaaatgcctccgcgatgccaagatggacaagagcaccgtgcacgacgtggtgctcgtgggcggctccacgcgcatccccaaggtgcagcagctgctccaggacttcttcaacggcaaggagctctgcaagagcatcaaccctgacgaggccgtggcgtacggtgctgctgtccaggccgccatcctgagcggcgagggcaacgagaaggtgcaggacctgctccttctggacgtcaccccgctgtccctgggcctggagactgccggcggcgtgatgaccgtgctgatccctcgcaacaccaccataccaacgaagaaggagcaggtgttctccacctactccgacaaccagccgggggtgctgatccaggtgtacgagggagagcgcgccaggaccaaggacaacaacctccttggcaagttcgagctgtccggcatcccgccggcgcctcgcggcgtgccccagatcaccgtgtgcttcgacatcgacgccaacggcattctgaacgtatcagcggaggacaagactacaggacagaaaaacaagatcaccatcaccaacgacaaggggcggctgagcaaggaggagatcgagaagatggtgaaggaggcggagaagtacaaggcggaggacgaggagcataagaagaaggtggacgccaagaactcgctggagaactacgcgtacaacatgcgcaacaccatcaaggacgacaagatcgcctccaagctaggtgcggatgacaagaagcgcatcgagaacgccgtggacggtgccatcagctggctggacagcaaccagctcgcggaggtggacgagttcgaggacaagatgaaggagctggagggcatctgcaaccccatcatcgccaagatgtaccagggcgctggcgcggacatgggtgctgctgccggcatggacgaggacgcaccggccgccggcggcagcgccgctggccccaagatcgaggaggtcgactaagtgcttccacctgtggtcgtgttatcgtggtagaagttgaattgcttctgtttctgtgggaacagtaaactctgaggttgtggttgatctgatgatacttttctaattggttccccttccttccctgagattttatagttgtttgctc

SEQ ID NO: 31639 - DNA, 2647 bp, Zea mays
  Clone ID: UC-ZMFLB73199A11_FLI
cccacgttccccgcctgcttcctccaggccccggccagatccgcgcgcccgcggggaagagggcctcctctcctccctcctcccttggctcgcgctctggtcgaggaggcggaggccggtgccggcgggcgggcggggaggtaggtagcagcttgcggttgcgggagggaagctgcgcgcgctaggctgccatggcggtggagaagacgctgcccggcgcgagtgcggggaggaccgtgctggtcacgggcggggcgggctacatcggtagccacgccgtgctgcagctcctcctcgcgggcttccgcgccgtcgtcatcgacaacctcaacaactcctccgagctggccgtccgccgcgtcgccgcgctcgcgggggaccactcccgcaacctctctttccacaagattgatctccgtgacaagggagcactggaaatggtttttgcttctacaagatttgaagctgtcattcacttcgctggattgaaagctgtgggtgaaagcgtacagaagccattactttattatgacaacaacgtcattggcacgataaatcttctagaagttatgtctgttcacggttgcaagaagttggtgttctcatcatcagctgcagtttatggatcacccaaaaactcaccctgcacagaaaattttcctcttactccaaacaatccatatggcaaaacaaagctcgttgttgaagatatttgccgggatatctaccgttcagatcctgaatggaagatcattttacttaggtacttcaatccagttggtgctcatcctagtggatatcttggcgaggacccacgaggaattcccaacaatcttatgccctatgttcagcaagttgcggttggtaggaggccagctctaacagttttaggaaatgactatgcaacaagagatgggactggggtaattctgttgcatatgatgtgcttaattgtgtttttttggtataccattcaaattgattaatctgatgcatttgaagctgggtattccaaataaaactgttgtcaattttctgtcaaaatttaataatctgtggtaggtatagtactaacaagagttatgagaactgtcatctcttccttaaaaaacttgactaggtctgtttatatgacttgctgcctagtgtattgacccggcttgttgaagttgatctttaactacacaggacttcctataatttacttttatttcatatattggctatgttgcatagttttcacctttttctttctcttctttggcaccctgctgtttatatctctatagtttttcctctgcactttgtatggttgctatccgattctatatttaattatttataatataccacattaggggtgtactgaatttcccttataaaaagaagattgattcattgctttgtcatttccttctctatgtaagccacaagcttaacttgaattctggaacgatttataacctacaaaatcttctcattttaattcatctgactgaaagtttggaagatactcgcacaatagaacatatgatacccatgtgcttcttacttgagtcaattattttttacattgcttagggttaatgattttgaatcaaatatttagcgatatcattgtgacatctgtgattcacatgcgtcatggaatcatcccatctttaatcaggctattgtttttacaggtccgagattacatccatgtggttgaccttgctgacggacatattgctgcattgcagaagctttttgagaactctagcatagggtgtgaagcgtacaaccttggaaccggaagaggtacatctgtgctggagattgttaaagcatttgagaaggcttctgggaagaaaatacctctgatttttggtgaaagacgcccaggtgatgcagagattctgttttcagagactactaaagcagagagggagcttaactggaaagcaaaatacggtattgaagagatgtgccgcgaccaatggaactgggccagcaagaacccttatggctatggatcacctgactctatcaagcagaatggtcaccaaacaaacggatccgctgactcctccaagcagaatggccaccgcacaaacggttcaactgactcacccaagcggaacggccaccatgcgtatgggtctgctgactcacccaagcgcaacgggcactgcgtttttggatcatcagacctcaagccgaatggtaatggccacctgcgctgagcagaactgtttggcctgtgagctccctgtacattcggttgcgatgtgagctccctgcacgttcggtcgaggtctatcgtgaacccactatccgagattgatgtggatcattgggttgacaggtcatacagtatagagccggtggcagaggaattcctgtttgctgtgggtaaagcttatcttctgctttcgtgttttttcttgcttctttcgattatggtgtaggaatgtggtcataatgtattagctgattatcctttccctgctaattggactttattacgcttcattaagtttggctgattactgtttaacggggaaaagttgcacctgtgtacgattatttatttgtacctgtaatatttatggagaactagcctcgccgcaaatagccctgatgaattcagctgcagtttattccc

SEQ ID NO: 31640 - DNA, 979 bp, Zea mays
  Clone ID: UC-ZMFLB73199E11_FLI
cgcggacaaggcgacgcccaagtccgtgatgagggcgatggccgtgtcggggctcacgctgtaccacctcaagagccacctccagaggtaccggctggcggtgagccaaggcaccgcgtccccggtgggcgagggcgacaacggaggtggcgccaacgagcggtcgtcctcctcggagagccagctggacgagtacgacgacggttccgtggccgacctgcatggtgattcttccgggagcatggcggcgcgggtgcagagagaggcgaaaaggaagcggcatgagcagatgcagatcgaggtgcagcggcacctccagctgaggatcgaggcgcaggggaggtacatgcagtccgtgctgcgccgggcgcaggaggccctcgccgaccacatactgggctcgccggccaccggcgcggaggcagagctctcggagctggcctccgcggtggagaccgggaccgggtgcctgtcctccacttcctgctgctccacctcgccttccccgatgcgccaccgctccgccgacagctgcgtgacgtcctcctcctcctcctcctcctcggaggccgagagccaggcccccgccggcgccaacacgtgcgctggtacgcgcgactgctccgtcgagcggccggtgcagggcgaggagagtacattcctgcagaggcacgaggacgaggacgaggcagaggaagccgacgttggagctgcagctgcagctgaggacgaggacggcacttcgtcagagattgatctcaacaggtaggcgacgaagatcctgatcagaagcatctgtgctgcatgtgcccagcatcggatgattggcggggtggccttcaaggttgggacttgcttgggagggggcaggcttttgagcaacgtctgctgctgaaacagctggctacatacactgcaagtctgcagcgaccacactgctcttcattccataatatatgatatacataatattccaatt

SEQ ID NO: 31641 - DNA, 1027 bp, Zea mays
  Clone ID: UC-ZMFLB73199F01_FLI
caagcggcacgcacggcgttaacctgcccagcgtgaaataattgctacctatttctctcgccggcgacgagcctccgcggaaaccagtgccaagccagagagtgcttctttctccgccagactgctgctccgcgcgagaagagccaccacggagtctgcgtgactcgggacagtggagaaaatcagcggcacagcgtgggtctcgcgacctccagcgaacgagatccctaagtttcgatccactgtcccagtggatttgggactgcgatggaggagcagttcatcctccgcgtgccgccatccgtcgcagagcggatcgagcgcctcatgaatgaatccgccgcctcctcctccaaccccgacgaggcctccctggacctctccttctcagaggatggaagaaatggcacatttatgatcggtaatgagagctttcctgcatctctcttggatctacctgctgtggtggagtcatacaaaacatatgatgattctgtactaattaaaactgctgatgttggtcagatgattatggtaagagaagaaaatgatcctgctccagaaggagtcgagtacaagcatgggcttactcctccaatgagggatgcacgcaggcgacgtttccgcagagaaccagacttgaacgcagagctggttaaccaagttgagaagcatcttatcagtatcatgcatggagtatctgtcaaccagaacgccagtgcgacaggaggcgaagaaggtggtgatcgtaagaaacctccagtagctcgtgcagcaaagcagcctggggttcaggagcccgccgcgaatggagaggaagctgatcctgagaggagcgacagtgatgattcagataactgaaatggaggacctggactgggtgcagcctcagtggtccaggcgagccatgccaaacttcgcaatttgaataaatcagaatgtatatatttgtaacaaacaatgtgtttgttgttcgctgaagcatgtactgtcacggtaaacatgatgtgacgctataatgccaaac

SEQ ID NO: 31642 - DNA, 2045 bp, Zea mays
  Clone ID: UC-ZMFLB73199F06_FLI
gcgagctttggcagctgctggaggtgaaggtaggggaagcgtgtcagcatgcgagtcctaccttccaatgggcaaactaacacggagggtactcagagccaatgggatggaaaataaggtcaaagtatttcacaagcgatcagatgagctcggagttggagtcgagcttgattctcgacctgatatattggtaagtgaaattcttgattctgagctgctgggtgagggtctcatacctactctacagcatgcgcatgacatgctattggtgaaaaatccaaagacagttccatatcgagctactacttatggagtgttggttgagagcacgtccttgtggaagatgcatgatctgcacagcaatgaagcaaatgctgaagatggtgtgaggcttattcccagtggaacacaaattgttctttctgtgaagtcacagcaacatgcgatgcaatgtgatgcgctggcagatgaaataagattgctgtcagaacccttcaaagtttttgaatttgacttttcggaacgtccagatagtcatcgtgaaacaaagattgagataaaagcaacagctgatgggcatgctcatgctattgtttcatggtgggtgcttcagttggattcttctggatcagtcttttactcaactgctcctagatgggtgagacaatccagtggtgtcgatttaccacaatatgccaatggcacgaaggattggtgtgatcattggaagcagtgtgtttggtttatacaagggacaggggctcctgcaaagaaagatcaaactctttctttgagcgctagccataatcaaactagcatctcatatcagttgaatataaatgatgaaggaagtagaagccccaaaagtaatcatctaacactgttaccagaaagggtagcactttatggtgataaagtttggagatcagcgttgataagtgtaatcaggaattatacgagcgaaagatcctctccgatctgcattgtggctgatgacagcgtgttcctagctctcattgtttcttttctgttaccatcttcaaaagtcctcgctatgtttccatgtcttagagacagtggcctcaactatcttcaagctgttgcagatgcaaataatttatccatggaccggattaaagtgattggtaaaaaggcatcgtcccttactacaaatgacttaaatcatgaaaaggttaatatgttagtgggggaacccttttatcatggaagtgaagggatgctgccatggcaaaatctgcgtttctggaatgaaaggactctgcttgatccgttgctctctgaggatgcattcatcatgccttgtaagggaatattaaggttctgtgccatgtcacttccggacttgtggagaagccgtcgtagccttaaagatgttgagggttttgaccactcagttgttaatgatactttaggggcctgtggtgacctgcctggagagcaacaaggcccttgcctaccttattatgtgtggcaatgcggttataccaagaaattaagtgaagtttactctctcatggatttgaacttttctgagcctatccactcttgttttggtgaaacaaaggttgagtttgcccacgatggaacatgccatgggttcgctgtttggatcgactgggtacttgacaaggaaaattccatagtgataagcaccgggccagagagcagatactggaagcaaggggtgcagctgcttagcacgcctgtacaagtgaacccagcgaattcggtgatgcacgtggaggcgaatttcgatgctgacattggggagctcacgtttaaatccaccacgctctcatgatgccaactgtaatgtgtggacaaccaagcctcatgcgtgtgttgttcttaaaagttagcatttgtcgctgcgttttgttcgtcggagctcctgatgtgagtcaagcactcaagctcatgattacgtgtgtgttctgtcatgctagcacaagcaactgcctcctcggtggagctgttttttcatggtcttgtttgttagcccctcacgtcgtgaggaagatgct

SEQ ID NO: 31643 - DNA, 667 bp, Zea mays
  Clone ID: UC-ZMFLB73199H07_FLI
tcgtcgcctttgcccacctcccaagcttccgcctcctcccctcccgcgctttctccgattcttccacgagcttccagatcgcgaaaccaccatagccgcagtcaggcgagacgagtgcccacccgcgccgcgggattcatcggaatggcgtacgtggaccacgccttctcaatcaccgacgacgaagacctggtcggcggcgcggtgggaggcccgcgtggcgccccggtcaaggaaatcgcctttgctgccgcgctcctcgcttttggcgtcctcggtgtcgtcgcgggatccttcatggccgcgcaccaagtcggcggcgaccgcgcccacggcattttctttgcagttctgggaggggtgatgttcatcccagggttctactacacaagaatagcgtattatgcttacaaagggtacaagggtttcaccttctccaacatacctcctatctgaagaagcaattggattggctcatccaactatccaacacatggctgtctctctctctctctgtctctcttttttgtttcttattaacctttgtataaagtcgacagcgtggcaagtgatctgtacatataaaaacaccaccgtaatgtaatgtgtcatcacaacattatgttaccacgtgaagttgttcgttatgagatataaacgttgacct

SEQ ID NO: 31644 - DNA, 821 bp, Zea mays
  Clone ID: UC-ZMFLB73199H08_FLI
cctcactgctgccgcctgggccaagtcgtcgtcttgcttgccaatccgtcgctccacctgaacacaccggcgaagaggaggcgaagaagcgatgggcgtgaccaaggaggacgtcgaggcggccatcacctccgctctcagcccttccaatctcgtggtgacggacacgtccggagggtgtggcgcgagctacgagatcgaggtggtgtcggagaagttcgaggggaagcggctgctggagaggcaccggatggtgaacaccgcgctggcgtctcacatggcggagatccacgccgtctccatcaagaaggcgctcaccccggctcaggcccagccccaggcccagccggagccggccgccgataagccccaggcttaagtgcttaacaccccccaaaacggtttgatcccacatgccgatgcacgattacattggctatctgcttgaataatgcggcggatgcacttgctaaattgcaggatgttatccttgactgattagaaacttctgcaccgtgcatttaacttctgtgtcactgtgtgtgtgttctggatgcttctgccctggtcgtttgctcgagactgtgtgttgcagttcatgctgttaatgttctgccagggtggggttttcagtcctggaatttttatatttgactgttgctatgtctttccttgcttgtaggggtaaggggtttattctttaaccttgtggattagattactgtatccatcatggtctgcagtggggagtggggtgtgatgatgatggctgcatcttgtttacacaacattttaatttcctgattgatgatgccgcaatc

SEQ ID NO: 31645 - DNA, 1664 bp, Zea mays
  Clone ID: UC-ZMFLB73200A06_FLI
gcagagacaggcgtcttcgtactcgcctatctccgcgactcaaagctttccccaattcccccccttctcccatttctcaccaccgccgccgctccccccgttcaacaacaccatgagggagtgcatctcgatccacatcggccaggctggtatccaggtcggaaacgcgtgctgggagctgtactgcctcgagcatggcattcaggctgatggccagatgcccggtgacaagaccattgggggaggtgatgatgctttcaacaccttcttcagtgagactggcgctgggaagcacgtcccccgtgctgtttttgttgaccttgagcccactgtcatcgatgaggtgaggactggcacctaccgccagctcttccatcctgagcagctcatcagtggcaaggaggatgcagccaacaacttcgctcgtggtcactacaccattggcaaggagattgttgacctgtgccttgaccgcatcaggaagcttgcagataattgcactggtctccagggcttcctcgtcttcaacgctgttggtggaggaacgggctctgggcttggttctctcctcctggagcgcctgtctgttgactatggcaagaagtccaagctcggtttcaccgtgtacccatccccccaggtgtccacatccgtggttgagccatacaacagtgtcctgtccacccactctctcctcgagcacactgatgttgctgtcctgctcgacaatgaggccatctatgacatctgccgccgctcccttgacattgagcgcccaacctacaccaacctcaacaggcttgtctcccaggtcatctcatccctgacggcttccctgaggttcgatggtgctctgaacgttgatgtgaacgagttccagaccaacctggtgccctacccgaggatccacttcatgctttcgtcctacgctccagtcatttctgctgagaaggcctaccacgagcagctgtccgtggctgaaatcaccaacagcgccttcgagccatcctccatgatggccaagtgcgacccccgccatggcaagtacatggcatgctgcctcatgtaccgtggtgatgtggttcccaaggacgtgaacgctgctgtggccacaatcaagaccaagcgcaccatccagttcgtggactggtgcccgactggcttcaagtgcggaatcaactaccagcctcccagcgtcgtcccaggcggtgatctggccaaggtgcagcgtgccgtgtgtatgatctccaactccaccagtgttgtggaggtcttctcccgcattgaccacaagttcgacctcatgtacgccaagcgcgccttcgtgcactggtacgtcggtgagggtatggaggagggcgagttctccgaggctcgtgaggatctggcggcgcttgagaaggactacgaggaggtcggtgctgagtttgacgagggtgaggacggcgacgagggtgacgagtactagacgctctactggcgcggcgtcgtcgggcttgtgtgccactgctatcctgtgatctgccctgagtggctcctatcgtgttatgtttctgtcggttcttatctatctgtcgttgtgtggtttacaacttacgttgtaagactttattcccccgctttgctactgggttattaagtttggcgttattgttttcttgatc

SEQ ID NO: 31646 - DNA, 2431 bp, Zea mays
  Clone ID: UC-ZMFLB73200B10_FLI
gtcccctccgcgtgctctccgcctgcggcatctgtatcccacaacgaaaaactaccaaaaaaattagaaatccccaaatccgcgagatctatcagtatcgagcgatttaccgatccgattgctagggtttagtttcgaaaaagaaactctgaaaaaaaattctggtcgaggggaggagacgatggcagcgcaagtggcggcggtggtggtgccgaatgggagcccgggcgctgtccccgcggtggtgtcgccgggagcggtcggcgtcggactcggcgtggcgcagccgctcccgaccacgtcgctctacgtcggcgacctggaggggtccgtctcggactcgcagctgtacgagctcttcagccaggcggggcaggtggtgtcggtgcgcgtctgcagggacgtcacctcgcgccgctcgctcggatacgcctacgtcaacttcaacaaccccttggatgctgcaagggcattggaagtgctgaactttgctcctcttaacaacaaacctatccgggtgatgtattcaaaccgtgatccaagtagccgcaggagtggatctgctaacattttcataaagaatcttgacaagatgatagacaataaatcccttcatgagaccttttcttcatttggtaccattctctcatgtaaggtagccatggatgaaggaggccaatccaaaggctttggttttgttcagtatgaaaaagaagaagcagcacagaacgctataaaaagtcttaacggaatgcttataaatgataaacctgtttttgttggaccttttcttcgcaagcaagaaagggatcactcttttgacaagacaaaatttaacaatgtcttcgtgaaaaacttgtctgagtctaccacaaaagaagatttactcaaaatctttggtgaatatgggaatattacaagtgctgttgtgatgattggcatggatggtaaatcaaggtgctttggtttcatcaattttgagaatccagatgcagcttcccgtgctgttcaggaacttaatggtaagaagataaatgacaaagagtggtatgttggaagagctcagaagaagtcagaaagagagatggaactaaaaaggagatttgagcagatcttgaaagatgctgctgacaaatatcaaggactgaacttatatctcaagaacttggatgatagcattggagatgatcaacttcgtgaattgttctcaaattttggcaaaattacttcatgcaaggtgatgcgtgatcaaaatggtcttagcaaaggctctggatttgttgctttctcaactcgtgaggaagcatctcaggctttaactgaaatgaatggcaaaatgatatctggaaaaccattgtatgttgcatttgcgcagcgcaaagaagatagaaaagcgatgttgcaggcacagttttctcagatgcgccctgctgtaccaatgacacccactctagccccgcgccttccaatgtaccctcctatggctcctcagcaactcttctatggacaagcgccacctgctatgataccccctcagccaggatttggtttccagcaacaacttgttccaggcatgaggcctgggggtcctcatatgccaaattattttgttccagttgtccaacaccaacagggccaacagggtccacgcccaggtattaggcgtggagctggagcccagggtcagcaacctgtgccaccatttcagcagcagattgttccaagaggacggatgtaccgttacccaactggtcgcaacatgcctgaagctccggcgatgccaggggttgctggaggtatgatgcaggcatacgatatgggcggcttccctgtgagggatgctgccttatccccggctgcccaaattgggactctgacttctgcccttgcaaatgctaatcctgaacagcaaagaacgatccttggtgaaaacctatacccactggttgagcaactggaaccaaaccaagcggcaaaggtcactggaatgcttttggagatggatcagactgaggtcctccacctgcttgagtcccctgatgccctcaagtcaaaggttgctgaggcgatggatgttctccacaatgtggcccatcagcaaaacgcaaacaccccgaccagtcagcttgctgcattatcactaaccgaaggcattatctcctaacttgaaagccataacaaactatcttcagtttgcaattgagtgatgtttccagaggttatctggcacatgacagtattgctccttttttttcttctatggttggacttgagtgctgttttcgtatttgcactctgcggtgtactgccgttaaggcaaatcagttgtttgcaagtttgagtgttattgggggccgttgattacatacctgtcttttgcaccttgtcggaagttttgctacttaattgaatgagtgagggaacttgtttg

SEQ ID NO: 31647 - DNA, 1718 bp, Zea mays
  Clone ID: UC-ZMFLB73200C04_FLI
cgtcttcacaaacgccggcgcaaactctcgcccgagcccgacagatcttcaattccccattccgcccaccgatcgaccttcacgccagtctcggtctcttccgaaggcgtcgcgcgcggttgtttgagaggagaggaggaagatgagggagtgcatctccgtccacatcgggcaggccggcatccaagtcggcaacgcgtgctgggaactttactgcctcgagcacggcatccagcctgatggccaagtgcctggagataagaccgcgggacatcacgatgatgccttcagcaccttcttcagccagactggtgctgggaagcacgttccccgtgcaatcttcgttgatctagaacccactgtgatcgatgaggtgcgcactggcacgtaccgccagctcttccaccctgagcagctcatcagtggcaaggaggatgccgctaacaatttcgcccgtggccactacacaattggcaaggagattgttgatctgtgccttgaccgtatccgcaagcttgctgacaactgcaccggcctccagggcttcctggtcttcaatgccgttggtggtggcactggctctggccttggttctctcctccttgagcgcctgtctgtggagtacggcaagaaatccaagctgggcttcactgtgtacccatctccccaggtgtcaacctctgttgtggagccttacaacagcgtgctctccactcactcactcctggagcacactgatgtctccatcctgctcgacaacgaggccatctatgacatctgcaggcgctccctcgacattgagaggcccaactactccaacttgaatcgccttgtgtctcaggtgatctcatcgctgactgcttctctgaggttcgatggtgccctcaatgtggatgtgaacgagttccagaccaacctggttccttacccgaggatccacttcatgctctcctcctacgcaccggtgatctcttctgcgaaggccttccacgagcagctgtctgtggcggagatcaccagcagcgcgttcgagccggcttccatgatggtcaagtgcgacccacggcacggcaagtacatggcttgctgcctgatgtaccgcggcgacgtggtgcccaaggacgtgaacgccgcggtggccaccatcaagacgaagcgcaccatccagttcgtggactggtgcccgacggggttcaagtgcggcatcaactaccaggcgccgacagtggtgccgggtgccgacctcgccaaggtgcagcgcgcggtgtgcatgatctccaactccaccagcgtcgtcgaggtgttctcccgcatcaacagcaagttcgacctcatgtacgccaagcgcgcgttcgtgcactggtacgtcggcgagggcatggaggagggggagttctccgaggcacgcgaggacctggccgccctggagaaggactacgaggaggtcgccgcagagggcggcagtgatgacggtgacgaggaggaggaatactgatctgcttgcatgaatctgtttggctgtcgagccaggttgtggtgttgaaaaacctttgtttgtgtcctggcccccctgggtaatgtttgggtgtttccttccatcatcacttgctgaactgctctagtatttgcatttgtaattgaagtctgtcgctttaagcactcttggttctaaagatctctgtgcttttggggggtgtttttgcattgccccagattcc

SEQ ID NO: 31648 - DNA, 836 bp, Zea mays
  Clone ID: UC-ZMFLB73200E02_FLI
gcagcccccaactacccccagcctcggaaggaaccttccagaagcgcaagactctaaaggccgtcgccttcccattcttcctcgccgcgggggtcgcctgagatcacataaacaatggtgaaggctgttgctgtgcttggtagcagcgatggtgtcaagggcaccatctttttcacccaagagggagatggccctaccgctgtcaccggaagtgtctctggcctcaagcctggcctccatgggttccatgtacatgcacttggtgacaccaccaatggatgcatgtcaactggaccacactacaatcctgcgagcaaggagcatggggcaccagaagatgagaaccgccatgctggtgatcttggaaacgtgacagctggagcagatggtgttgctaatatcaatgtcaccgacagccagatcccactgactgggccaaactcaatcattggcagagctgttgttgttcacgctgatcctgatgatcttggaaagggtgggcacgagctcagcaagagcactggaaacgccggtggccgtgttgcttgtgggatcattggactccagggctgaaaacgatcgccggacttgggggtgcctgagaggtccgtctcctgccgtccccagcagacgagcctgaacattcggagacatcgtgaaataagagcgtcgctgatctgtgatcatcgtatttgtcattatgcacctgtagcaaccgatggactgaactgtgctggattatgctgttggatcacctgagtatgtgttacatgtcggttttgatgtgacatcctatcgtttcgatgtgttttgtggaagtgttgttgcaagatttc

SEQ ID NO: 31649 - DNA, 974 bp, Zea mays
  Clone ID: UC-ZMFLB73200G02_FLI
ctgaggaacaagttcccacaattagtacaaacactgaaagtaaggaggatactgaggaaaaagttcccacaaatggagcatcttttaagctgaacgaaggtgctgctcatgggccaactgaatctaataactcggcatctatgctatccgttgagacaattgagaaaatgatggaagatccagctgtgcagaagatggtgtatccctacttgcctgaagagatgcggaacccaaattcattcaagtaatccaatgtaccgccaacaactacaggatatgctaaataacatgggcgcaactcctgatcaatgggataaccgcatgcttgatcaccttaagaacttcgaccttagcagtccagaagtgcggcagcagtttgcgcaagttggcatgactcctgaggaagtagtatcgaaaataatggcaaacccagatgtagctgttgcattccagaatccaaaaatacagacagccatcatggactgctcgcagaaccctcttaacattgtaaaataccaaaatgacaaggaggtcatggatgttttcatgaagatatcacaaatcttcccccaaattaacggctagctgatcttcgtcgtgggatagcacttctgatttttgtcggcccgtcatctccagtctggagggctgctgcggtagcatctatcaagaaaagggtcgtgacgctccgatataccctccccgtgtcaaggtttttgagtttcttatgtacatcatgtgatgtagcggccttggtttagctatgagtaattgagtatgacccttgccagttcattaagtcaggctattgacatagcagggtccaagtttttattaagccagccaatcagtggaaaggtgcagcagagacggttcgtatcagatcaattttgatatataattgttattattaatctgtaatatattagagacacaatggcaatgcaagtaatctgttacgacatttcctgacc

SEQ ID NO: 31650 - DNA, 511 bp, Zea mays
  Clone ID: UC-ZMFLB73200H02_FLI
atgggccgcgacgaggtgtccgcgctcttcgacgccgacgagcccagcttcgccgaggtgcggggcgccttcgccgtcttcgacgccgaccgcgacggcttcatcggcgccgaggacctgcagtgcgccctggcgcggctcggcgtcaggcaggacgccgccgcgtgccgcgccatggtcgtcgcggccggcggcggccgggacgcccggatgagcctgttccagttcgtcaggttcctcgagaacggcctgtgctgaagccacagagggggcagagaagctgtcccttcattttttttcttcttcttcgttcttcttcgtttgcctcggctgctcgtggcaggagatgagacagtgcaccattcggagaggtgttcactggctggcgcgcgtgtgtttttccctcctgccatgagctttgggggtggactcaactgtgcagcaattaacgcactaattcccaaactaagaactactatgatttaatggaactaatttgccggttgcaaac

SEQ ID NO: 31651 - DNA, 511 bp, Zea mays; identical to SEQ ID NO: 31650
  Clone ID: UC-ZMFLB73200H03_FLI

SEQ ID NO: 31652 - DNA, 1341 bp, Zea mays
  Clone ID: UC-ZMFLB73201A12_FLI
gcgggatcgtccggcaagaaaagaaatgaaatcaggtgcattgaacctgagcttgtcatatacccaccacatctcaaaatataattccttttacactaaacatatattcatcaattaatctacgaatgcagtttgtatgtacgtttatattcattatcatttattctaatgtggatggaaaaaaagagtgccacaaacaactatattttagcggaatgattaataatctaatggtatacatgatgtatgggcttctaagcaagccatgtgcggaaatgcagaatcggcccatagcctgcatcggcggacctggacatgttgggctggagtcctaagatgacctttttgcgagatatttgactcaaacaatataaccaactcaactaaactagatacttttggctcttttatttcttttcacgaaacttttgtcaacgtaggtttttagtttggtatacttattaaacaaggaaaatattgaaaacataacatcaggtgaaagtaactaaacttttcatgatccacgcttatagaagatatatacgcaagctgggaccgtagcctgaataatggatctggttgcgctgtgtgttattttttgtgaaataaaaatctagatggttgtgtttatgatagatgttactatacggtcgcacttgccgtcaattcaatttttatttgtgcaggaatcggggatgttgataccaaagagacacctctacccatggaggctgccttaaatgactacaaaaggctagattacatccagcgccacatcgctactcttaaggaatcaatagagtatgaatctacactagaacttatctctagtatatatttcgcctccgtttttattgctctttgttctgttgcaatcatttatatgtggcacatgcatggttcaatcaagataatgcttgcattaatggatccgttcatgcagcttgggatcaaatgtgcaaggctacttcgcttggtctctgctggacaactttgaatggtttgccggcttcaccgaacgttatggcattgtctacgtcgaccgcaacaataactgcacgcgctacatgaaggagtctgccaagtggttgaaagagttcaacaccgcgaaaaagcccagcaagaagattcttacgccagcttaaaaatcgggggcctcatgatgtgggtgcagcccataaaaactgtgtggtttggaaccgaagattttctctttttttttctgccacgagaggttctctggaggcatactctccagcaccgtggctaataacgcgttgttccaattcagtctggccttgtcatgcatgcaataaataaagtgatgggtttccctgtttc

SEQ ID NO: 31653 - DNA, 1545 bp, Zea mays
  Clone ID: UC-ZMFLB73201B01_FLI
cggaagcgtggctagagctagagacgcggaaaagacgagaggaggggcccactgaacccacacagcgcgaggaagcgggaaggacgaccgtgttcccgattcccgttccaccatgccaccgtgacaccgtctctctctctctgtcggtcctccgctccgccgctttaaaaccaaagccgaaccactgctccgcccactccatcccggctccgtcgtcgcgtgccatcctagggtttctttccccgtcggcgcctccccagatttggccgccgccgccgctgacccaggttgtcttgatggcgcccgctgtagaagccgtgaaggagacaggcaccttccagaaggttcctgccttgaacgaaaggatactgtcatccatgtccaggaggtctgttgctgcacacccttggcatgatctggagataggtcctggtgctccaaccatattcaactgcgtaaggccaccctgtcatgcttgactggtcctcttgtgatatgttcatgttaatagcatgatgtcttttgttctattggaaaataaaaagtctccctggactctaaaatcaatgcctgtgaacacatgaactgtttgtgtcacccatgttcctctgctccttggcactttctgatgcatgctcaaatgcttaagaaagactcatagaagcgactcctattcctatgccaggtcattgagataccaaggggcagcaaggttaaatatgaacttgacaagaaaactggactgatcaaggtaaagcaatgttgttttcctcccgctgaagtcttattgtgaagctatatttcttgccagttctaatatttactcctttccgtttcaatctgtgtgcatgtgcaggtggaccgtgtgctgtattcatcagttgtttaccctcacaactatggattcattcctcgcacgctttgtgaagacagtgatcctttggatgtactggttataatgcaggagcctgttatcccaggctgtttcctacgtgcgaaggccatcggccttatgccgatgattgatcagggagaggcagatgacaagatcattgcagtgtgcgctgatgatcccgagtacaggcattacaatgatatcaaggagctcccacctcaccgcttggctgaaatcaggcgcttcttcgaggactacaagaagaatgagaacaaggaggttgctgtgaatgactttctaccagcgagcgccgcttatgaagccatacagcactctatggacctgtatgctacatacatcgttgagggcctgaggaggtaggattctgatggctaggaaaggtggggaggatgttgacgaaaaactgggagaccatttaccgcatggaacgagtaccgttattattttatttgtgtcgtgtatactgctagtagtgaaccctcaatcaaagaccgaaatcccctggggagtcggagtcggtagtaggtgaagctagtaacaaggttggcgaaatattattttctggcctgactgcctatatatgttgtacgtgattggtatcgtaatattcattcgcttttgtgatacat

SEQ ID NO: 31654 - DNA, 2157 bp, Zea mays
  Clone ID: UC-ZMFLB73201B08_FLI
caactttagaggtttgacagacggtagcatgaaggatcagattattggcctattactggaggttctttcaagatgctcttggcttggctgcacgaaattatgctcatgccctatcgtaattacatcttacttgcgggtattggatctcatgcttgatgttgcaaggacagggaaaagcagacatactgaagtcattcaggcattgctgctagagttaacttcccagtgcttgagcaacacagcatcaacccagtacgcattccatgatccaacccgtattgaactaaaacaacaagcaactgaatcatttttgagctgtgttggtctttctaagaaaaccgatgaaactaacgatgatgatgtgcagttgcaaatactcggtgaaccaactttagagatgcctagagtggattactcccttcatgaagtacacaaggagatcctgtcatgtctcactgatccttcatatgatgttagaattacggtgctgaagaggattctttggctcacaaaatcaatcagacatggttatgcagataacattttgcaccagtgggcaggagttaatctgcagcctgctttaatggaacggttgtttgtggaagaacaccctaagtgcctttattataatctgaagatcatcttttcatggaacatggaattcccattcaacaatggagaagattctagcacacttttgtccttgtgggataggttagttcatttaaacagcaccatgtcacatgcaaaaacgagagaaatagttctatgttgcatgggtatgtgcatgaaattgttcactaaacaatctaggggtggtatttcaatggattgtcttaagaccagtgagatctctgcatcctttgtcagaatcaatgaaggggatggattatctgatgccatgcttagattaaacttgtttgtcacacttgtcaagaaccaaagtgaaccatcagaaagcatgaatgctcgacgggctgctgctgaggcaattgttgcttctggtcttcttgaagaagcaagctacgttgcttcatctgtgtccaacatgtactctccttcagaatttgatgaagaccataccaaagagaaatgcatggaagatagcgtttttgaatttgttagtctttatacatgcaagatacttgacttgtggtttgtatgtattcagttgctggaggatgaggatgcatatctgaggcaaaaacttgcgaaggatattcagaaaataatcgctaagggttcagctaataccttctgtgatgattccacaccactacaagttgatagagtcattgaattaagcttggactatttaacttctttgtttggcctctggctgaaatacgttgaattcttgttaaggatagtcttgggcactggaaacgctctgaactcccgtggcgatttggtccgtcagatatttgataaagaaattgataaccaccatgaggagaagctattgatatgtcaaatctgctgttcaaacattcagaaacttctgaattcaaaatgccagatggaagcaggagcagagactaaactgttcctgcagaattggagggagatatttctaaagcagctcacatcgctgactggtggctatattgagaaagaggggaagaacgattggattggcggcataggtaaccacaaggacgtgttcatatcagtgtatgcagtcctactcggtttatacgcgctcacgcagtctggctctctggatcaattggaggaccactgtgcagtttatttgcaggaatttgcaaaccttgaaaggtctatcacaccattcctcaagaacccgttgatttctaatctttacgctctggtaaaattgtcacacgagaggttcatatcatcagataagcctgaggaccaagtgggtgattcaggatcaagttttgacccatattttcttatcagatgattttcgctaatgtactagtaattcttcattgttattcctccgttgtaagactcaatactaattgcttttttatacaaattaccatactatagattctttacttgatgccccttctctgtgtatcagtgcattttaagtgccttgggttttctagcactcaaaaaatgtatgacaaggttgtgactaacgtccgaacaactgataatgatataaatatttttccgatt

SEQ ID NO: 31655 - DNA, 924 bp, Zea mays
  Clone ID: UC-ZMFLB73201C02_FLI
cccaccgaattccctgcgattcctctcccctcgcctcctcgtctccccctaggggatcgtcggagaggaatcgcaaagagggccgtctcatccgagttaaggaagccatggagcacaaggaggctgggtgccaggcccccgagggacccatcctctgcatcaataactgtggcttcttcggcagcgcggcgaccatgaacatgtgctccaagtgccacaaggagatgataacgaagcaggatcaggccaagctggctgcctcctctatcgacagcatcgtgaacggcagcgacgccgtcatggagccggttgttgctggcagcaacacggtagtagctgttgcccaagttgagttgcaaacaatgaacgtgcagcagcccgctgatgttgccggacccagcgagggggtggcggcgatctccaaaggggggaaggtagggccgaaccggtgcagcgcctgcaggaagagggttggacttacgggattcaactgccggtgtgggaacttgtactgcgcactccaccgctactccgacaagcacgactgcaagttcgactaccggactgctgccagggacgccattgccaaggctaatccggtggtgaaggcagacaagctcgacaagatctagggggggttccctacggttgggtatcaggaagattgtaaaccgcggtaactcgtcatgcggaactgctgccttgccccccgcgcctttctcttccatgtttgctgctacaatcttgttgttgggcattgcagtgcacggtgcacacttgtgtagcccgcctcgagaattcctgcctctgcatctggtcagttctaaaatgatttgcatgttggctatgttgtgtaagctctatttatggtggtctcgctgagacgggtatttggcttcgcagttatctagctatgtgatgtac

SEQ ID NO: 31656 - DNA, 1233 bp, Zea mays
  Clone ID: UC-ZMFLB73201C03_FLI
tgtttttgctgttggagataacctcacatctcgctataagatcaatgcaaaaatgggagaaggtcagtttggatggccatgtcttctgaaataattgattaaactcgcgtttggcatgctgtgcaacacatgcagcaggttatgtttgtaacgaatgtgtctggaatacattaggtacctttggtcaggtgttggagtgttgggacaaggaaaggaaagaaatggtggctatcaaaatcattaggggcattaaaaagtacagggatgctgcaatgatcgaaattggcatgctcgagcagcttggtaaatatgatgaaagtagatctagttatgcacgaattgtgtctcatacacactgatttaaagcctgagaacattctccttgtttctccggagtacattaaagtgcctgattacaaagtttcatcccgatccccaaaggagggatcctattacaagcgggtgcccaagtctagtgctatcaaggtgattgattttggtagcactacctatgatcaacaggatcagagttatgttgtgtcgacgaggcattatcgggctccagaagttatactgggacttggatggagttacccatgtgatatctggagtgttggttgtattcttgttgagctttgcacgggtgaggcgatattccagactcacgaaaacttggaacatctggctatgatggagagggttcttggacctttgccataccatatgttcaagagggcagatcggcactctgacaaatacatcagaaaaggacgcctgaattggcctgagggttgcacttcgcgtgaaagcatgaaagctgtgatgaaattgtccaggcttcagaacctggtgatgcaaaatgtggatcaagctgcaggagatttcattgaccttttgcaagggctgctgaagtatgatccatcaagccgtttaacagcacgagaggccctgaggcatcccttctttacccaagggttttggcgaagatgatgatactccttgcattctaccttgtttgtctgacttgatgtcttgcatttgacagtctgtacttttcagtggtgtatgtaggcggtagatcaatctgtataaagccgttgtagagttgtttcagtcttgtttggaacgtcgtgcagattaagttgtagcataatggaagtcaaatggatgcatttgactttaaatcctgacttgtttgaatttggaatgtcaatggaaatctggtttgaggag

SEQ ID NO: 31657 - DNA, 1473 bp, Zea mays
  Clone ID: UC-ZMFLB73201C06_FLI
gcgagtagctaacacagccgccgagtagcttcaagtcattcaccgtggaggaccgcccgggggagcagtgggtgcgcctccacgccagcgcgggagggggaggcgaggaggtgaaggtcgaggccaccatgttcgacggcgctgcggagcgtgtcccggacgacgcgcccctcttccgccgcgtcgagtcgctcgagcgcgggtcccgcctccacctcagcctcatcgtcgaggtcgcccggggcgaccgcgtcctcggcttcgtctgctccgcctggcccgacgacctcgccgtccgccacgtgctcacgttcgcagctagcggcggcagcagtggtggtggtcgtcgtggtgggcgcgatttcgagaaactatggggcgaggagagggaagcagtgacgaagttcttgaaggagaggcattgaatcaattcttggttgtgtaatgttgttttagaaaaaaaaatgggtttcttaccagttccacaagtcgttgaaaaaataatttaactgtttactacatggtgaaccacaatcaatctttttttcctgaaatgacttcaaagtttctaaaaatactaaaaaaagtgctagctacaggtcatatagagcaacatcttccatcttatggagcataatcagtttcactaatatacggccaaccatactatggcaatttatttccacatctgttagaccaagagagtcatcttctccaatgactgaaatgagatgagggagagaaaaattccagttcttgtcgggattacaatattatttgttgttcatgtatctggattttactggtgttacaagaacggggatcttataagacctctcatgatgcttcctccaaaagaaataccaccattttggcacgcaatattcatcatcttggtgaacgatacaatggtgcgccaaactgctatggttgtcaaatgtttactgctgatgtactataagaacagcagaggccgtagctatcgtaggcagggtcaaatgttgacgattgtggaatattttctacttttgtaccgtgcattattgcctacacctgtgtggtaccgttttttcctgaacaaggagtatggaagcctattttcgtctctaaccactggcttgtatctcactttcaagttgacatctgttgtggaaaagattggaaaaggatggtgcgtagctgcaaaagagaggacatcttgcttgtgtgctcgcaagaaggatgcaaaggatctgtgatgatcagctgctgttttgggttcttgtcatgtaacatctcctatttttaaagagcaaaactgaaaatgcagttccggtcttgttgatgaaccgctagagacttaatgattttatatggtgctgtcggttgtctgttgtcttatatcttactgtatatggtaatcatctttgtttttctagatcttcatgtaattgttgctattcaattgtttttttaatggttgaaagggcgcgc

SEQ ID NO: 31658 - DNA, 573 bp, Zea mays
  Clone ID: UC-ZMFLB73201G11_FLI
ggctgactttggaagagatggttgagaacccctatgcattttatggcagtgtttatctcagcagcagcgacaacgacgacgaagactacttccacgacgaatttcgctgagaccaatattgttactatcctgacacacgcaaggaacacagctgacgagcatcaaggtgcgcacagaggttcggaacgtctagcatactatgtgtgatgcccgggctgggctgctgacagaatgggagagcttagagttacggccatggagtgaggaactagtttttagccgcttggttcttcaagttgtttgtgttaaatggaacgacgacagcatcctagtaccggccaggcccagcagtgatggatgttacgcggcaagttgagccacctttatctaggctgagctgcattggtctccatcctgatgttcctgcagcaggggaaatgtagttcaggagaacaatgagtggaggagcgtcatctctgtggcgagcggcttcagaaatctaacgggaacgtgttgtttggtgtccgaaatgtatgtgtgtgtgtgtatgctatgaattcaattatttctggc

SEQ ID NO: 31659 - DNA, 1342 bp, Zea mays
  Clone ID: UC-ZMFLB73201H04_FLI
cccgactccccgaggcaccccctcctccctcctcggcgaaacgacaaccaccccgccggggagggtaatccaagcgagggcgagccatcaccgtgctgttcctcgtttgctgtcgcctcgaagagcctcctccgttccctctccctcgaccgatcggccggtctcacggggcatttcgcggggctggtcgatctctccccgctcattctgtcaagggattggtcggttgccgattccgtgcggccggataactcggatttattcagtttttcgggttcgctacatgcgtgtgcgatgccggccagctccctcccggcgtcccccgacgccaccggcgacattggcgccgcgctcgagctcgatctcgaggatctcgccgccggcggcggcacggactgcatcggcgcgctcgcctgcggcaggagcagcttctcctaccgccgcctcccggagccccgcctccgcctcaccgttcagaagcttgacgactccttcttcgacattgaaatcgcgcggtcggccacggtgtgggagctcaaggtgaccatagagaacttgttctccgccctctatgacgacacccagaagaccatctcttggaatcacgtgtggagtcacttctgcttatgcttcaaggacgagagactgacggatgacaaggcaacattgcgtgggtttggtataagagatggtgatgtgcttcattttgcccagcatctgtctgttgactacagcccatgcagggatcctcccaaaaaccagaaggaagcgtctcacactcacagaaggtcaaggacttcgctggatggttacaggccagtgagcatgctggatgatctcagcgaagatgatgatgagaagtttacacacagcaggtgctctacgagtgtcttagaagatccgtgtctttacgagtacatcgaggagcgcgtggaagaagaaactcccaagaaaggaagtctgttccaaagatggttctgctcctctaaactaaggagcaacaggaggacacatgcagaggacactgtgccactatctggtgagaagaagaatgctcatccaaagctggggaagtggctgaccttcaaattctgagatggtgttgtttattctgtctatacacgctcctccgttcggcgcggccagctgagaagaagatggcatggttccttgtgaacttattattgacggctaatttaggtttcatgtatctctgtgtatggtccgagctattcttccttctaatgtcatgcgcctatgcggcggtggtatgagcagaactgtttgtctcatgactcatgagaaacaacgactgatgcatcacgcggttcacatttttttt

SEQ ID NO: 31660 - DNA, 1100 bp, Zea mays
  Clone ID: UC-ZMFLB73201H09_FLI
gttgttgctgggactgcagcgttggcgggccttgtagcgaggagggggtgcggaggcgccgcgactgttcgcgggatgagcttcggcggcagcagctccctcgcatcaggtgcgaagaggccgttcgagtacgggagaacgcatgtggtgaggcccaagggcacgcacaaggccaccattgtctggctccatggacttggggacaatggagccagctggtctcaactactggaaactcttccccttcctaatataaaatggatatgccccactgcaccttcaagacccgtgtcagtgtttggcgggttcccctccacagcatggtttgatgttgctgatctttctgaggatgctcctgatgacattgagggaatcgatgcctcagcagcacatgttgcgaatttgttgtcaactgaacctgctgacatcaaacttggtgttggcggctttagtatgggtgctgctactgctctgtactctgcaacttgctttgcccatggaaaatatgggaatggcaaaccattccctgtgaacctaagtcttgccgttggtcttagtggctggcttccatgtgccaggaccttgaagaacagaattgaagcctcaccagagtgtgcacaaaaggcttcatcaatacctcttttgctctgtcatggaaaagctgatgatgtagttgcctacaagcacggggagagatctgctggtgccttgaaggcaaatggcttttccaatgtgctcttcaaggcatacaatagtcttgggcactacactgttccagaggagatggatgaagtttgcaaatggatcacagcaaatttggggcttggcactaagtcatcttgattggaatttgatgcgagaaagactcgcagggacggtgtccaaataataccggtatcttttccaggaggtatatggtttaatagcaaatttgggcttgggtatacggccatgttctagcttttcttaacgcagacgtgtctgcgaatgatgtatgcttataatatctatattttggtctacgtcgatttggttgtggcacggataatgtttgtttcaaatattctgctctgcgaattggaattgtgatgttttgcttt

SEQ ID NO: 31661 - DNA, 847 bp, Zea mays
  Clone ID: UC-ZMFLB73201H12_FLI
aataaagatgcgtgataaacaaacagagggatgctgcattatgcgtggacacgactgacgacacaagctttaggatggatgatgcatgcatgcatcgtacatatatatagagtactatatagaagctaagaaacatgtaacgtgcaaagcaggaagcagcagacacgtgtgtgtgcaagcagtcatgcacgctaagcttcacgttgacgatcacgggtgaaggcagccaccgccgccaccgagcccactgccaccgccaaggccgccgctgccgcccagacccgatcctgagccgccaccaaggccgccgccgccgccaccgccgagacctgacccgccaccaaggcctgatccgcctccagcaccaccaagcggtccaaaccctccgagtccaccaccgacgacacctccgaggccaccgccagtcataccgccaatgccgcccgcaacgcctccgatgcccccgaggccggcgccggcgccagcgaaccctccgacgccgccgacgtagcccggcaggaaggtcttctggtcggcgttcacgccggcggcagcagctctctgaccatgcttctgctggctgtcgttgctgttagtagtagtgccgcctatggccgtcgtagtcgtcgttggcatggctctgctggcctcggcgggcgtcagcgccaggatgacaaccaggagcaccaggctcaggctgctgctgctgcagcacgccacgattccggcggtgttgcgccacccgctaggcataccggatcaataataatgtgccttctcttatctctcggcttttcttttttggtggctagggctcaggtctccgtctctctctgcaggtcgcaac

SEQ ID NO: 31662 - DNA, 2274 bp, Zea mays
  Clone ID: UC-ZMFLB73202A11_FLI
aaacagttaaactggaaggcaccacacgcagtgctccacaagggtcacctggtgcctcttctggaattttagctaataacatatgttcaggggcaaaaactgcacctcaatcagccattaacgagtctgagaagatctggctgtacatggatccttctaataaaatccaaggtcctttctcaatcatacagctgcggaaatggaacagcaatggctacttccctcctagtttgaaaatatggaaagctagtgagaagcaggacgattccattctattgactgatgctttggcagggaagtttgagaaagaccttcctccatgggaaccgccacatgttagtttgtttcaaattaacaaaacccctcttgagcaaagcacaatagctggtgaacaaactccaaaatcagtagttgcaaagtctttctcaagtagtaatcaaagacatggttatagttcaacaaaccttggaacaaccatgatccattctggcacacaaggttattatggaatgcaaaattcccatgcagcatacacaagccaacattctcttactggaagttggaatgccacgtcaagtcagtttggggttgcggtaaatcctgtgacacctactcagcctgccatggggagcttttcaggacaaaacatagtgtctgcagaaaatatgggtcatctaactcctggaacggctcctgcagctgcaaatgcagaaatggttaattcagatttgacctcccagaagcaaatatcgtatttaccgcaaacagacggcatattagctgatgacattgaatccaaatcaggagaagatgtttcacatggaaaagtgagctcttcagccaaagcaattggaccactgggtgcacagcttggacaaggacaactgaacactcagcaacatgaagcagacataaaaaaccagatgtcatcaactgatgtctccaactcgacgatgccatcgcagatgatgtcaacaccatccgctgcatcagtacaaccttcattgtcaaccattgctggcagtgataatcaaagcagtgggtgggctgtacctacacaagtggtgaacacatctggccagtctcagataactggaaatctgacctggggaaatacacctcagggtgatgcaagcttaggttggggaatgatgggacagaacaatatgaatatgccttgggtagcatcagctcaaggtgcttcgggctacaacatgggtgcagccatgccaacccagccaaatgcagttccaaacatgggttggttaccaaatccaggaaacaccaacatgaacatgatctgggccgcaactcaaggccaggggattccaaatgcagctgctatgatgggaggtcagatgcaaggagtcgcagtggccccttggggtggtgttgcagcaggaaatgcaaattcttatcctgcctggggaaaccaacaagttggaaacatgaaccaaaacgttcgatggagtgctcctgtgcagggaaacccgagtcaggaaaataacaacatgaactggaatgcaccaaatggtaatcctaataattggaataatcagcagagagagaatgagggcaggcactctggacaccgtggtgcttttagtgctggcgactcaggcagaaagtcatggaagccacgctctggtgccgatggggggtcatgggggacatagaggagtctgctatacatttcttgaacgcggggactgctttaaagttgactgcaaattcgcccattcaacaaacacagagggatatccatccatccaggattcgggcaacgagatgcgatatgagaatcacaatgagagaaatgatcgacagtttgataggcagccttcggataatgaaaggcatcatgttaggcctgatgacaggcatggtggcagggatgacgataggcaggctgataggtctcagtcaagagagccgcgttagaactgatttctgtttcgtaccttccctttgttgtatgtgcagtagcaaactagcataatagcttccgtgcatgttttgaactttatgccctgtagcaagctgcaaacatgtgcaaatcgtgtacagcagttgtagtttaatgctgtgtgcgtcctagccccatatttaataatttacttgaataaatcgtagttgtctgatatctgatgtatagcaggggctacacacccaggtcctttatggtgatgactattgagtgttttcttataagcctcatgattgtaagtgaaggtgtttttggaaatcctatgacctaatgtccgatctgtgttc

SEQ ID NO: 31663 - DNA, 1904 bp, Zea mays
  Clone ID: UC-ZMFLB73202B10_FLI
caggttccgtcgtcccgcactgcacagccgctcaaaaaccctagttctcgccgccacctccgccgccagtccaccacttgcccacctcgtcgcgacgtcgcgcagatatcttcaccgcccgccgcagcaggttcagctgctggcacgggacatttgaaccggcactacaaagcttgtttagcaaagctaggaaagactcaaggaggaggtacgcaaacccatcttaactttgctgctgatggtacaataagtacatgggtttacaacccacaggtagcacgtgatgaaatagccaaatttattgtttgtgaagatttaccgattatgttgggcgagagccaaaattttaaaaacttgattcaacgtgctttttgcccacaatatcagcctgtcactagaaaaactacaaaatctgatttgattgcaatatacaaaaataaacttgctgctcttaaagagtcttttaaaaaggttcagttctcatttgctttaacatcagacatttggacatcatcacaccaaaaaacatgttatgtttctgttgttgcccactacttggacaattcttatgctttaaacaagcgagtcatcggttttagaatgatggatgagtcacacactggagatgcaattgccaaccatatacttgaggtagttcgtgattttgagatagatggtaagattctctctataacccttgacaatgcttccgcaaacacaactgctattgatattctcacccctcggttgcagccatatatacaaggttatattatccaccataggtgtgtgtgccacattataaatttggttgttcaagctggtataacagttgcaaataagtacttgaataatatccgtgctgctattcgtttcataacaagcacacctcaaatgatttctagatttgctgagtattgtaaagctcaggatatgagaccaagaaaatttggtcttgatatgaagatcagatggaattcaacctaccatatgcttaagagtttagaaggttatgaacaattaattactgtctttgtgaatgccaatggaggtaaagtttctaaaatactttgaacaaatatcacatgtatactgttttgcaactatttttgatccacgcaagaaactggatggtttgcaaattgcattggagggaataggtgatgcattggacatggatttttcagatgcttttaatcatgcaaaagatgacttgtttcgtgtctttggttactattacaaaaaatatggtgaaagtgagatagactcacctgctgttgagtttggtgcagaaatttcagatacctctcttacagctcacttatggaagagagcgaaggggaaagaaaatgtcgcctcatctcaaaggtggaatcctaatgctgaattaaatcactatctgtccactaactttgtaggtactgatcgcgcattaaggggtgagaaggtaaagttacttgagtggtggagggaccacaagtatagttttcctgtcttgtctcagtttgctagagatatacttgttattcctgtctcaactgtttcctctgaagctacctttagcactgttgggagaataattgaggaacgaaggtcttctctagcacctaagacggtggaggcaatcacttgccttaaagattggaacagagccgaagagcggaagcaacatcaacttgaggatcctgagattgaatttgctgctgcagatttggacattgattagacaataatgtttagttgctgctgcagattgaatttgctactatgaactttatgtggttgtaatatttagactttatttggacattgccggtctgtactcttttccttatagaggggccatgtaatggggtataaggtttttaatgagacatgccgaggaatatatttttgtttccctc

SEQ ID NO: 31664 - DNA, 1022 bp, Zea mays
  Clone ID: UC-ZMFLB73202C01_FLI
gggaagttctgtgggtagaggactagagactgcagatcgagggtctggcagcgggccgtggcagttgggtgattacgacgaagagagatgggcctcctcgacaagctgtgggacgacaccgtcgcaggcccgcgcccggacaccgggctcggccgcctccgcaagcagcctgtgcgtcccgccgccgtcaagatcagtgatccggccggggacgctgcagcgttcgtgccgccctcgccggcttcgggtagcgaggagacgccggtgaaggtgacgcgcagcatcatgatcaagcgccccgcggggtacccgtcgtcgccgaggagcgcggcaagcacgccgccggcctcgccactggggactaccccgcccatctcgccgtttgccggcgccggtggtcggttcagaaggaaatcatcgtccgacgcatacgagagggcgaccccgccagggacgaccagccaccctcctcccttcgacgtgtgaactgaccgcaccctcgcacttgtttttgctccttcacaagcatcatctacggtagacagggaggaccggagaagaaagacatcaagaggggaacggggatgatctagtcgcgggttgtcttacctctactgtgatatattatattgtagatatatctgtatggtttccttcctagtatgtggcatatgatgtataataataatacgtcgaacgctcatggtactgtgctgtgtgtgccatgtgcataggggtgggtgcctcagggtcagggattcgtgtgcgctatgccgcagcttggatctcgccgtgggccgtgtcgtgtgtttcctcctgctctgctatgtatgtcatcactgacggtgtgtggaggttgggttcatatatatgcttgtaatgttagctggtttgaggtgtggactacgagagtagttttgttcagtgtctggtatctagtagctgaaggtgtttgcttgaactctgtgaactgtgatgtgggataatgctaagaagatgaatagatgatcgttgggttgtct

SEQ ID NO: 31665 - DNA, 467 bp, Zea mays
  Clone ID: UC-ZMFLB73202D01_FLI
gcctacttgtgcagctcattgcttgtggcgtcgctgtggccacctacaacgacggggcaacggatttcagagacacgcctgcttacaaggaatcccaatcacaggagttccctgaggagtcggaatcatcgagcgctgatgtgttcgaaggcaacccgactgaggtagcaccagctcttgagtaggactagcaaggaggcacgggggagaaaactcgtctctctattcaagctttagcctatagggagggcttcgcgtttgctgtatagatataaaaggtttggttaaaatctgatgctacgaaaattggctggtataattattttgtactggattttcccttagaatcaaatatagatggatggctagtgcctggtggtgatgggattcaactgtgttattccaaaaaagtgggggatgggggaaagaaacagagcatcagagcaagcattactgtcttttcctgt

SEQ ID NO: 31666 - DNA, 1646 bp, Zea mays
  Clone ID: UC-ZMFLB73202E06_FLI
aacgcattcccctcccccgcgtcgtcatctccccaaatccccccaaaccctaccgccgatccgggcccagatcgccatggccgcgcccaacagcaatgacgccgccagcgccagcggcaccggcccggctggcgaggaggacatctccatcgaggcgttggcgcggcgcgtgcaagagcacatgaccctcaactcgaaccccgccgctcgccgccacaagttctgggagacacagcccgtcggccagttccgtgacgccgccgacgcatcgctaccgaacggccccatcgagccgcccacgccactctccgaggtgcgcgccgacccctacccgctgcccgccgccttcgagtggctcacctgcgacctcgatgacgacgcgctcctcgccgacctctactcgttgctcgcccacaactacgtcgaggatgacgagaacatgttccgcttcaactactccccggccttcctccgctgggcgctcaagccgccgtccttcttccgggcctggcacatcggcgttcgcgccaaggagtccaagaagctcgtcgccttcatctcgggcgtccccgcccgcatccgcgcccgcgacgacgtcgtccgcatggccgagatcaactttctctgcgtccacaagaagctccgatccaagcgcctggcacccgtgctcatccgggaggtcacccgccgcgtccaccaggagaacatctggcaggctgcatacaccgcggggatcgtcctcccaacccccatcaccacctgccgctactggcaccgatccctcaaccccaagaagcttatcgatgttggattctctcgccttggtccgcgcatgactatgagccgcacggtccggctatacaagctgcctgatgcgccgctcacccctgggtttcgcaggatggagctgcgggatgtcgctgcggtcacacggctgctgagggcataccttgcgaggtttgtggtagcaccggattttgatgaggtagatgtggagcactggttgctgccccaagaggatgtggtggacagctaccttgtggagagccctgagacgcatgaggtcacagatttctgcagcttttacacactgccctcatcagtgttgaacaatgctaactatgcgacgctcaaagcggcgtactcatattacaacgtttcaaccaaaactccattgcagcagctgatgaatgatgctcttattgttgccaaacggaacaattatgatgtgttcaatgctctcgatgtcatggagaatgagtcattcctcaaggagctcaagtttggtcctggagatgggcagctccactattacctctacaattaccgtattcgcaatggcatcaagccctctgagcttggtcttgtgctgttatagggcagtctaatcaggacagtcctgagtttacaccttccaggtctcactgtgcaatcccagtggtttcctcattttgtctattgtggtagtggtttctttgatatgattgccatgcccattgatgggagtccaagatgatttgcaaacaaggagactggaattagaaatcctttccttaatttaaggttattattcccattagtgacattttgtgtgcgtggtccacaacttgtatgctggcattgattttactgagaaattttgatac

SEQ ID NO: 31667 - DNA, 2101 bp, Zea mays
  Clone ID: UC-ZMFLB73202F02_FLI
gttcccaactgcgtttcctcctccgcgtcttcaaggaggggagacctgaaacgaatccagtccaggctggtggctgccggcgctggacctgaacgctggtgcatactgcgtaggcaagagcaggcaatggcggaggcgaatgcggggaaggagaagaaggaagtggtgcggctggagcgcgagtccgtgatccccatcatgaagcccaagctcaccatgaagctcgcctacctcatcgaacatcagtctgacagagaagaattcttgaagctctgcaggagggttgagtacaccataagggcttggtaccatctccagtttgatgatatgatggaactgttcgctctcttcgatcctgtgcatggtgctaaaaaactcgagcagcagaacttcctacctgaggaaatcgacacgcttgagcagaacttcctgtcctatttctttcgggtgatggaaaagagcaattttaacatagtaaatgacgatgaggttgaacttgctcattctggacaatatctgttgaatcttcccattaaagttgatgaatcaaagttagatgacaaacttctgtcgaagtattttaaggagcaccgtcatgaaaacctgcccgacttctcagacaagtatgttatatttcgtaggggcattggattggaccgcactagcaactttttcttcatggagaaagtggacatgatcatagctcgtgcatggcgaaggttccttgagaagacgagactgcaaaagctgttctcaagaaagaaaaatagtaagccaaagatagattccaagaagaatgatgatttagctagtgaaatagaagacaaggagctttatgttgaacgcatacgtcttgaaacaatggatttaagctttgggaatttatttggcaaggtcacaattcaagagcctacatttgaagaggtgattgtcttgtataggagaaaaagtccaaagggccaggatgatagggcaattcatgtaaagcacttcaaaaatatcccaatggcagacatggagttggttctgcctgagaagaaaaacccgagcctcacacctatggactgggttcaatttattgtttctgttgtcattggacttgttacactcatcagttcactggaaatgcctaaagctgatttctgggttgtaattgcaatcctctctgcactggcaggatattgcgcgaagatctatttctcgtttcaacagaatatggcaacctaccaaaacttaatcactcaatcaatgtatgacaaacaactagatagtgggaaaggcacactcctccacctctgtgatgatgtgattcaacaggaggtcaaggaggtcataattgcctactacattttgatggagaatggaaaggctaccagtgatgatcttgacttgcaatgcgaggagttaatccaggaagagtttggcttgcaatgcaattttgaggtgatggatgcagttcagaagctggagaggcttggtgtcattacaagagtgagttctcacttgtttctttttcttctcatggtgccacctgatcagagcatagggacgttttcttacagatacagtgcacagaataacgatttttgcagacacgtttacagggccagaagtttttgcatctactgaccatcatgttgtcacgtattgttctctgcttctttttttctttttctttctgcccaatactgaaggccgttttgcatccaggactctattggaaggatttgctgtgtccctctaaagcgtgccaatgagatcatcggcgcgaccacggaagaactggttatgaaagccaggcaaagctagcaatctattattttgaacaatgtagccgcattgtagattcttgcctgatggcgctgtaacgtttatggttactccagaaagtccaaacactgaactcttgcacaccaggagataagtacattctggtcatctccacagtagttctgggagagctacaagaaaatgtggttgtatttatttttttttatttttttggtggggggtactatggtttgtggaacgtcgtcgagggtgttgtaagcatgtagcattcttttgataacaagcgtggtaggaaggatgtttgaagaac

SEQ ID NO: 31668 - DNA, 896 bp, Zea mays
  Clone ID: UC-ZMFLB73202G10_FLI
gtgcgcgcctaccttagccgcttcgcccaccgccaccacctccagcagatcggccacggccccggcccgcacggccgaggggagccgcccgccacggccgcctccatcgccgcgctgcccacggtcgaggttgctgagcccaccgccgtctgcgccatctgcaaggacgacctgcccctcgcctccgaggcgcggaagctcccctgcgcccacctctatcactccttctgcatcgtcacctggctcgggatgcacaactcctgccccgtctgccgcttccgcatcccccccgccgacgaccccgaccaggccgcaccgtcgcagcaggacccgccgcccacgcggatcaccatccgcttcagcaccaccacacgccgccgcgtccgcatcggcagcgatgcgccactggcgtctcatatctcggcgtcgcccacgcagctcgcacaggctattaccggggatggagctggtggacctgccaatagcggcgagactgtgtcatctgagtggcctccgcaccccgaatcggatacagtcatgtcggaggcacgcgaggggggtggcttttttgattgagccagaggttccaattatcaggcgataaggtagctgctgttagctgtcagccaacaggagtaaaaggaggctaccacctaccatacgcttcctgtcttcgttcggacgaggtttctcgcaaggtgatggcgtgctgttacagctgaaactaaagctgtccttgttcggacgaggtttctggcgagcgagaagatggcatgttggttacagctgaactaaagttgtcctgttaggagaacaagagcattcatcgcatgggttcccggtgtcttgtatattggttaaacgtatttattcgtaataaatatataggcatgtac

SEQ ID NO: 31669 - DNA, 1199 bp, Zea mays
  Clone ID: UC-ZMFLB73202G12_FLI
ccatcgtccggtcaagaaagaggataagaaatcactttctgacattcccctttcccattcagcagtcaaggaggatgagacaccagttgcttcaattggccctccacagtctgcagttatggagaacattcccaaacatacacagttacaggatgctcatgctggggagaggccaccaaaaaagttgaaattatcccaagaaactacagagcaggacatagatccaacgaatactgaacaaagacctttggagctacagccaaagaatattgacagaagcaaatggtttaacattgaatggaatgacagactaaagatggctgatgataaggggacacttgtctatattcaaaatctcgatattcggtttggacctgctgacatagaggagttagttcgtaaagcattacagctaaattgtactgcgaagcccattaaccaccccacatatgatgatccaaacaatggcaaagcatatgctatattcagaactaaagatgctgctgatgctgccatttcaaaaatcaattctggtttggttgttggtggaaggcccctgtactgcagcaaagggttacttgaggttccaaaaccttcagcgaatcttgttgggcacctctcctcatatgttaagattggtcaaaagcagcgcgacgagcagaagaaggctgtagcaacctcgcattgttcccagcccaacacgatcgagtacgacttggccttggactggatgcttcttcgggaaaagcaagaccagagcttcagagtacttcacaagaagcacagagaagccaggaaagggttcgcaagcctggtcggcaaaggatccaaggcagagtagcaggccggttgcccggttccaacctttcagagcttggcgcggtatgactgccgactggcaggaagagagggtcgtgcgcgcagaggttctctttttgcagtagccatcgagtagttcgttgggtcaattcgtgttaatttctgttaggaaaggaaaaatgtgttaataagtgttaggatagaaaatgcacgtcagctttgacaggtcagagcagcctaggtaggcatcaatatgttgctgcgactgcgatgttttaatttgacttggaacctcttatgttgggcgacaagtttgccctatgggggagagagacactgtttcgtctctgttaccatctcatctgatttcactttcagtc

SEQ ID NO: 31670 - DNA, 3011 bp, Zea mays
  Clone ID: UC-ZMFLB73203H01_FLI
ccgcttgtttccttgcccgcggtgggtagccgagttgtgtacttccctcagggccacagcgagcaggtagcagcatcaacaaacaaggaaatagagtctcagatccccaactatcctaatctgccgccacagcttatatgccaacttcataatgtgacgatgcatgctgatgcagagacagatgaggtatatgcacagatgacactacaaccactcaacccgcaagaactgaaggacccatatttacctgcagaattaggttcggccaataaacagccaacaaactatttctgcaaaacattaacagcaagtgataccagtacccatggtgggttctccgttccccgtcgagcagctgagaaagtgtttcctccactggatttcacccagcaacccccatgccaggagttgatggcaaaagatcttcatggcaatgagtggaaattccgtcacatctttcgtggccagccaaagcggcatcttctaactacaggttggagtgtctttgtaagtgcaaagagactcgttgctggcgactctgtcctttttatctggaatgacaataaccagcttctgctgggaattcgtcgtgcaaatcggccacaaactgtcatgccatcttcagtcttatcaagcgatagcatgcatatcggtcttcttgctgcagctgctcatgctgcttcgacaaatagccgatttacaattttttacaacccaagggcaagcccttcagagtttgtcataccactcgtaaagtatgttaaggctgtgtatcatacccgcatatctgtggggatgcgattcaggatgctttttgagacagaagagtctagcgttaggagatacatggggacaattaccggaatctgtgatcttgattctgttcggtggccaaattcacactggcgttctgttaaggttggctgggatgagtcaactgctggtgagcgacaaccaagggtgtcactatgggagattgaacccctgacaactttcccaatgtatccatctccttttccgctcaggctcaagcgtccatggccaacaggcttgccttctctgcatggtgggaaggatgatgacctggctaactctctcatgtggcttcgagataccgcaaatcctggttttcagtcgttaaattttggtggacttggtatgagcccttggatgcagccaaggctggatgctaccttacttggtctgcaacctgacatgtatcaggcgatggccacagctgcttttcaggatgcaacaaagcaggcatcgcccacaatgctgcagttccagcagccccagaacatagctggcggggcttccccgcttctttcaagtcagattttgcagcaagcacatcatcaatttcagcagcaaccgtaccttcaaaacatctctgagagcacaatccaagcacagggtcagtctgagttcctcaagcagcagatccaacgcagccagtcattcaatgagcagaagccccagatgcaacaccagcaagaatcacagcagcagcagcaaccacagtgtctgccagtcccccaacatcagcaaatgcaacaacagaatatgaccaactaccagtctatatctaatgcattatcaccgttttctcagctgtcgccagtttctcagtcttcacctatggcgctgcagactatattaccgttctcgcaggcacagagcttcacagacacgaatgtaggttcattgtctccatccaatggtaacaccatgcaaaacacactgaggccgttctcatcagaagcagtttctcacctcagtatgccgaggcccactgcgatacctgtcgcagacccatggtcgtcgaagcgtgtcgcggtggagtctctgcttccttctcggcctcaggtttcatcccagatggaacaattggaccctgcaccagctagtatacctcatagctctgcgttggcaccacttcccggaagagggtgcttggttgaccaagatgtgaactctgatcctcaaaatcatctcttgttcggtgttagtatagactcgcagtcactgctaatgcaagggggcattcctggtctccaaaacgggaatgattcagctgctataccttattccacttccaatttcctcagcccttctcagaatgactttcctctggaccatacactaaattcttcaggctgcttagatgattctgggtacgtcccgccatgttcagataattctgacaaagtgaaccgaccaccagcgaccttcgtgaaggtttacaaatctggaacctacgggaggtcgcttgatatcactaggtttagcagctatcacgagctccgtagggaactggggcgcctatttggccttgagggccagttggaagacccattgagatcaggctggcagcttgtattcgtcgaccgtgaggaggacgtccttctcgtgggcgacgacccttggcaggaattcgtgagcacggtgtcctgcataaagatcctctccccgcaggaggtgcagcagatggggaagcagggcctggagctcctgagctcggcccccgcgcggaggctcggtagcagctgtgacgactacgtcagcaggcaggagtcgagaagcctgagcaccgggatcgcgtccgtcggttcggtcgagttgggatgagcagcaagatagcgcgcacgcagcagcagcagcagcaggttacgcatcctcagcctcagggtaggtaggggactgaagggttggtctgcgacttgatgacccacgagctcctcgttgcgcgcttcgttcgcctccatgcgatggatagaagttcagcgcagaccaagccttagctctgcgagctatgtaccatctaataattctgtccgtgtcgtaccatgtcaactcctaagtagaagaattgaagaaactaccagcagccgctgtctggtatacacgctgaaacattttttttcttgtatggagaaatactaatcatctggatgtagccaggcctatgctctctaatggttgatcgggtaatacagcccctcgcacac

SEQ ID NO: 31671 - DNA, 1096 bp, Zea mays
  Clone ID: UC-ZMFLB73204B11_FLI
gccaggtctccctctccccggctctccgccttcctcttccagtccccgcgcgcgagatcgccgccccgtgtgggccctagatcccgatggcctcgcgccgccgcaccctgctcaaggtcatcatcctcggcgatagtggggttgggaagacttccttgatgaaccagtatcctgcgattcggatcgattcttgacaagctgacttgatttcgtttcgtcgatttttttatttcttctggttggttggcttgttttctttgagctgtgatgtaattcagatatgtgaacaagaagttcagcaatcagtacaaggctacgatcggcgcggatttcctcaccaaggaggtgcagttcgaggacaggctcttcactctgcaaatatgggacactgctggccaggaaaggtttcagagtctcggcgttgcattctaccggggagcagattgttgtgtcctagtctatgatgttaattctatgaaatcatttgacaacctgaataactggcgagaagagtttctaattcaggctagcccatcagatcctgataatttcccttttgttctgttgggtaacaaagttgatgtagatggtggcaacagccgcgtggtatctgagaaaaaggcaaaggcatggtgtgcttccaaagggaacatcccgtactttgagacgtctgctaaggacggaacgaacgtggaagacgccttccagtgtatcgtgaagaatgctctgaagaatgagccagaggaagaactgtatgtgccagataccgtggacgtggtgggtggcaaccgggcccagagatcatccgggtgctgttaaggcacgaggcatcacgaggcgttgtgaccatcatcgtcggttatgcagtgaccaaacaataccttagcattgctgggtctccgtggttatctacgtatccgtattccatttgttacctttccagtctcactgctatgtacccaagggcgcctgtcaattcggtggactttgtgcagtttcatcagtagcgtcataccttgtgaatacaattggccaaaataagaggaagtgtaaactaaagttcatgctttatggttttgtgttgtattaactcgtc

SEQ ID NO: 31672 - DNA, 1831 bp, Zea mays
  Clone ID: UC-ZMFLB73204C02_FLI
gtatgaagtattttctccttcaattggtggtaatggtctttcacgctatcgaactgatttccatgaaatagagaaaattggttatggcaacttcagtgttgtgttcaaagttctgaataggatagacgggtgcttgtatgctgttaaacggagcatcaagcaattgcataatgatatggaaaggaggcaagcagtgaaagaagtccaagctatggcagccttaggttctcacgagaacatagttcgatatttcacctcttggtttgagaatgagcaactttatattcagatggaactctgcgaccgctgtctatctatgaatcggaaccagccagtgaagcgtggggaagccctggaactgttgtatcaggtttgtggttttgttgtttaccaattttattccttctttgtcaccgagcctggtctcgtaggataagaggcctaagtcttaacacttctgttttttttaccaataattctgtagaaacatggaactactcattcaggatgtttcacatcttagcatctataagcattaactcattttagtctgctaatttggttcagaaggaatgtattccgggaactaataatgtggtttacaaaactgtcacaacaaaattggagaaaaacacattgatttgccctagtttgaattaaagagagattggattgatgtatttggtagtttgatgttataattaggtctaccactccagcatgttgaccaagtcaaacccatataaaatgcaaagaaatataggatgcatgccagttctgtagtgtatgatctacgaagtccaaatatgttcgacttgtgcaagttttagaattgaactattgaattgatcaatttcaaagttttttatatcaagtggggaaatatgtaaacctatgttctgttggacatgcattagtgatgtttcttttttagcccccctgtgaagttcattcagcatcattccttttaattatttctggttctttattaaaaaacttatccggttcactccaccagaaaacatttttttatcttatacttttcatatgtaccttggttacaatactaacagtgagctttgtgaatcctaagatctgcaaaggcttggatttcatgcacgaacgtggcatagcacaccttgatgtgaagcctgataacatatatgtcagaaatggtatttataagctcggggattttggctgtgctacacttgttaaccggagtctagcaattgaagatggagattcacgctatatgcctccggaaatgctgaatgataagtatgagcatcttgacaaggttgatatcttttctcttggggcagccgtctatgagctaataagaggcaccccgcttcctgagtctggatctcactttacaagcattagagagggtaagatcgcattgcttccagggtgcccgatgcagtttcaaagtttaatcaagtctatgatggaccctgatccggtgaggcggccttcagcaaaggagatcctgagacacccttcgtttgacaagctccacaaggcctcatcgaagtagaagtgctgccgcgcccccgtcagatcagagcagccggcaaagggaattccgcagctgcgtcacattcaccatcagctgctcccaatttttgtgtatctatctatctatatgcgtgtgccatgtgccctgttctgatactgtagaagatggttggaaacgaagcagggatctgattttaactccaggaactggagcacgagcagcgtctgtaaaggactaaaaggctgttgctgctgttgtgttaaggttgtgcctctttttggtttctgatgcacgcttgaaaccatc

SEQ ID NO: 31673 - DNA, 3052 bp, Zea mays
  Clone ID: UC-ZMFLB73204C06_FLI
cccacgacgagtcgctaccgctcaagcgtaccggctacctcgccgtcgcactcttcctcgacgagcgccacgacctcgtcatcctcgtggtcaacaccatccagaaggacctcaggtcggacaactacctcgtcgtctgcgcagcactcaccgccgcgtgccgccttattggtgaggaggccatccccgccgtgctgccccaggtcgtagatctgctcgtgcaccccaaggaggctgtgaggaagaaggccgtcatggcattacaccggttctaccagcgatcctcctcctccgtttcccacctcgtctccaacttccgcaagaggctatgtgataatgatccaggggtaatgggtgcaactctatgccccctctatgacctgatttcggaggaaccaaattcgtacaaggatttggttgttagtttcgttaacatcctcaaacaagttgctgagaggaggcttccgacttcctacgattatcaccaaatgcctgcaccatttattcagataaaactattgaagatacttgctgtgcttggcagtggtgataaacaagcaagtggacatatgtacactgtattgggcgacatattcaagaagggtgacactgcgagcaacattggcaatgctatactgtatgaatgcatatgctgcatttcatccattttcccaaaccctaagatgctagtggctgcagctgaaacaacatcaaagtttctgaagagtgatagtcataatcttaagtacatgggcattgatgctcttggcaggttaataaaaataaatccagatattgcagaagagcaccagctggctgtcattgattgcttagaggacccagatgacactttgaagcgcaagacatttgagcttctttataagatgacaaagtcaacaaatgttgaggtgattgttgataggatgattgagtacatgatcaacataactgatcatcattacaagacagaaattgcatcacgttgtgtcgaactcgcagagcaatttgcgcctagcaatcagtggttcatccagaccatgaacagagtttttgagcatgctggagatcttgtcaacatcagagtggcacacaatttgatgcggctaattgctgaaggctttggagatgaggacgaaggtgctgacagtcagctaagatcatcggctgtagattcttatgtccgcattgtcggagagccaaagcttccttcttctttccttcagataatatgctgggtgttgggggaatatggaacagcagatggaaaacattcggcttcttatattattgggaaattgtgtgatgtggcagaggcccacctcactgatgacactgtcaaggcgtatgcaatctcagcaattctgaagatatttgcgtttgaaatcgctcttggaaggaggattgatttgctgcctgagtgtcaaacattggtagatgaattgttagcttcacattcaacagacctgcagcaacgggcatacgagctacatgctttactaggcttgggcaaaaatgatgttgaaagtgttatgcctgcagatgcaagctgtgaagatattgaggtcgacagaaacctctcatttctagacagttatgtgcagcaagccttggaaaacggtgcatcaccttacattccagagagtgaacgctctggtcttacaagtgttggcagctacagaagccaagaacaacaggaaacatctgcccatactcttagattcgaggcctatgagatgcctaaaccttctttgccactagcaacttcacaaaccagcatgtccacaccaaatactgaccttgttccagtttcagagccaggctactataaggaagaccatcaaacatcaaggcctcaaccaccaagcgatgcggtttctggtgagtttggtgtcaaactccgccttgatggggttcaaaagaaatggggaaggtcaacatattcctcttccacaccctcaagctcgatgtccagtcaacaaacaacaaatggggcctctcattctgatgggggagggccaagttcacagccacgggagtcctcatacggttcgaagagacagcagggcacagaagtctcagcagaaaagcaacggctggctgcttcgctttttggttcggcagcagctagagctgacaggaaagcacaagcttctcgaaagacagggaaggacagtccctcaactgagaaagtagctaccactaatgtggctgcccagtctgttaaggagcaagtaatcccagctgctgcaccaccgcctgatctgctggatctgggtgacgagacagttccatcgagccgtccatcggctgaccctttctcacagttggtgggtcttcttggaccagcatctgctgctccggcgctttctgggactccggctaccactaccagtacttccaaagcaccagatcttatgtcaatcttctcagatgatgtaccaactggagtgactagtagtgggtccaccgatcccactccaggtgatgctatttcggtgagctcccacaaaggagcgacggcagtggcaccaaagaagggctcgagccttcaagatgccttgcaaaaggactcgactgcacggcaagtaggtgtgacaccgacagggaacaaccccaatcttttcaaggacttgctaggctaaaggggacagtaaggcacaccgtatgctccgcgtggcctctttgggtagatggagttcatctccgacatgtctcgatcactgaaacagcgatgatctcgctgtttgatcagcgtaggaaaagggttgcaacttgcaagggctatatttgttctcgagtcacaagacacgacctgtcctccttccagttgggaggggggttgcgctgttgagatctgtgaatggttgcgggtatttttcctttaacctcttgtgattttgtgctgagactattgtacatgtgtttacatgacgtgtaatctgtacatgagaccgtggtacagaagcgtgtgccggcgcatttttgttcagctgggctagatacactacaattgctgggcactggaaagtaaaacaatgaaagaattggtgtc

SEQ ID NO: 31674 - DNA, 1149 bp, Zea mays
  Clone ID: UC-ZMFLB73204D05_FLI
ggggaacaaaaaggaggggcgaggaggacagggagccgagcgcaagagctgaggcttcgccgcgaaaccccagacctcgcgccgccccttcccctccgcggcgtcgtcctcgcacgctctccgatccaagatgtataagctggggagaggaaaccgcgacaaggtgcagcagttcatgaccattaccggcgccagtgagaaggttgcccttcaggcactgaaagctagtgattggcacttggaaggagcttttgacttcttctatagccaacctcaggtttctgtggtcaatactcggcatcttgaagatattttcaacagatataaagaacctgatgctgatatgataatggtggaaggaatatctcaattttgcaatgatctgcaggttgatcctcaggatattgtcatgcttgtcatatcatggcacatgaaagccgccacaatgtgtgaatttactcgtcaggaattcattggtggactgcaatcaattggggtagattcaatcgagaagtttcgtggaaaattaccatcattacgagctgagctaaaagatgacaataaattccgtgatatatacaactttgcattcacttgggcaagggaaaagggtcaaaagtctctctcactggagactgctattggaatgtggcagttgctatttgctgaaaggaactggcctcttctggatcattggtgtcagtttttacaggtcagacacaataaagccatatctagagacacatggtcccagctgctggaatttgtgaagacgaccgatccacagttatccaactacgacgacgaaggtgcctggccctacctcatagacgaatttgtggaatatctgactgagaacggactcgtccagcgtaaaagatgaacaacggggagatgcatctccaaacaatggttgggctgtacaaacatgatttatctcggtcagctcgacgcccagggcctgatattggcactcctgctcaattcattcaccaaactgttggcatatcattgaatttgcttataaacgtggggaaacataacttgcctgggaagtggtggctgtcagcctgcgatcgtgaactgtaacttatcgaaaatgcaacggagtttgggactctactatatgatttgtttcagtttttctta

SEQ ID NO: 31675 - DNA, 431 bp, Zea mays
  Clone ID: UC-ZMFLB73204E01_FLI
ggaggcgctcgagaaggtcgccgacttcttccagtccaagtacttcaagccgggctccgtcgtcaccttccacttcccggcaccggcctccgcctccccgggacccgcggcggagatcaccttcgcgacggagggcaagggcgacgccaggatcgcggtggagaacgggaacgtcgccgggatgatccagacctggtacctcggcggcgactccgcggtgtcccccagcaccgtccgcagcctggccaaccgtttcgccgcgctgctcgccgtcgccgcgtgatttataccggtcggcgggccggttggtcgagttgcgttggatttgagttcgtgaatgtccgtcctgtacgcgtgttgtctcgtgtgtgttgtcgtttgcagcgaatttgcaagtaataataataaaaattatgtccggtaggttgtgc

SEQ ID NO: 31676 - DNA, 2377 bp, Zea mays
  Clone ID: UC-ZMFLB73204F11_FLI
ggctattgggatatgcaccaaatgctaacgcagcagcagctgctagtaattcgcacaattattcaagtggaaatcagcgccctgtccttgcgcaccgacaggagagtgacaaaactggagaagatggtctatcgagtgatgacaagccatcccactctcagaagagcgggtatgaacacaattttgctgttccagtccatctaccgaattttgcaatgatgccagctgctcaacctgctggcagtcagagtgagaagaagttaagtgaccatcaccaccagcagcagcagccacaagtcagtcgtggccagggtgtgaggattgatcttgcgtcttctcagccttttgtgatgccctttggctccattggtcctcctggatctgccccatctggtctcgacttctcggcattggcgcagagccatgcatttttacagagccatcaagaagcagcccggcatggttatcctcaacttaattttgctgcagctcaatctacgcagcacaagccccagcatggagaaacaaaatctgtcgctggggattcatccttgacacacattgccggagacagccagagaaagaaatcaacttctacaaagtattctggtgattcacagcagcattcgctgtccttcaccaggacagaaagcaagaatcatgtgcctcctttccttagtggcagcacaaatgaaagttcgtcccgaaccctaagccttattggaacagaatcttcaaatacatttatgggaagcaaatccacaaattccaccactcctgcctcaacaccacctgcagcttcgtctagcatttctcagcagcaccagcatttccttcagatgcaagtgcagcataagcatcagcatcagcagatgattcagcaccaccatttgaatcggcctagatctgccgcaccaagtacacaaaatagtgcaggtgggtacccagaccgtctcaatatggcgagctttcagaatatgatgtacccaccaaatgctgcccaaggccaagggagagttcaatccccccagttgaaggcatcctcagggagagggacaccttcatctactgctaccactccccctgctgctgcaccccctaatttgattgtgatgaagacaagtagtctccacccgcaacaagcaaagattcctatgcaggctctctccactcctggtcaccaatcccagagttctctaagcatgagttcatcaaaaatggctcctgtaactaacctttctactggaggaggggatctatctcgatcttcaaatgcccctgttgcttctggttcaccatccaattcggtgtccaaaagcactggtggcagcccgcctgccacaggaaatgcaaagggtgttcagcagcctgtccaattgccatcaccacaacagcagttagccaagaactctgtgtcgacgtgtggctccaagtctactcctgcaaaccatttcagtatggctatgccatctatccttggccaacagcctaattcatcgcctggttctaataccgggagcaagcagcagtcacatatgtcatcgtcaatgaaacagcagccgttccctcaaggccatttcttcatatccagcacgtatgctcctcaggctccaggagccggcggtgctgctgcccttggcctataccagaagcgaccaggcgacaagacacagccacaggcaccacaccagcagaacgccttgtcagccgctgctggcagtaacatgaaatcgcttcatccttcgtccggtggatttatgcatctcgcagcggcaacccagtctgcaggtggtggcatgccacacacccacatgcccgcggcgcaactgagtttcggaacaatgccggtgcctttaaaaccctcaagcgaccagaagcccgctgctggaaaataaacagagcccaggtgaccatgcgtcggagtggtaatctgagctggcgagctcaagtgcttatccagcggaagccccaaatggaggaggaaagatacaatgagaagagaaaagcaggccacagctcgaagaacctgcttttggttgctgctgtggtgatcaggaagggggaggaggggcactgcgaggacacgccttgctaacttaaaaggttgttcgggtctgggaatggctgatgtgagtgaatacttttgtgtagttttggctggttatccatcctcccatcccatggtgtaaaggtcggaggagtgcatagaatctgtctcgtagccccgttttttgtgcatggatggatgtcgaaggctgttctctccctctattctcttgtagcttctccagttcctcgtttcttttgggtggggggtctcagctttaaccggaggaggaaagattcaatcagaatgcagatctcaggtaactttgtt

SEQ ID NO: 31677 - DNA, 1884 bp, Zea mays
  Clone ID: UC-ZMFLB73204G09_FLI
gctgcctcggtcgatttctaattctcctcgcgagcccaaaccctaaacctaaacctttcacccgccgccgccgccaccaccagcactgccactccgccaccaccgtcccgaagccccctcccagcgccatcgacttcatctcggattgaagcaatgtcgtcggacgatgaggtcagggaggagaaggagctcgacctctcctccaacgacgttgtcaccaagtacaaggctgccgccgaaatcctcaacaacgctctgaagattgttgtgtctcagtgcaagccaaaagtcaagattgttgacctttgcgagaagggcgactctttcataagagagcaaactgggaatgtttacaagaacgcaaagaggaagattgaaaggggtattgctttcccaacctgtgtatccgtcaatgacacagtttgccacttctcaccgcttgcaaccgatgatgccgttctggaagaaaatgacatggttaaaattgatatgggctgtcatattgatggctttattgctgtggtggcacatacacatgtaattacaaatgggcctgtcacaggaagggctggtgatgtgcttgctgctgccaacacagcagcagaagtcgcaatgcggcttgtgagacctgggaagaaagtaagtgtttttgcaaagcccaaagttttgtttcacaagttatattttatcaatcattgttcccttatccttaagcatatatctttgaaagatgtttcaagtggtgatctaactaagtatttcctttctcattttttacatgtactgatttgttcatttcgttggtatttatatatatatatatatatatattcagaataaggatgttactgaagcaattcagaaagttgctgctgcttatgattgcaaaattgtggaaggtgttcttagccatcaactgaaacaatttgtgattgatggtaacaaagttgtgctcagtgtctccaatgctgatacaaaggttgatgatgctgaatttgaagaaaatgaagtatatgcaatcgatattgtcaccagcactggggaggggaagcccaagttattggatgagaaacagaccaccatctacaaaagggccgtagacaagaattatcacttgaagatgaaagcgtcaaggtttattttcagtgagatcagccagaagttcccaatcatgccttttactgctagggcattagaagagaagcgtgcgcgtttaggcttggtggaatgcatgaaccatgaactattgcagccgtaccctgtacttcatgagaagccaggtagagatataccccctataactactggtcataccatagcttcttactaaggtttgtgggcttctggtgtagattgatttatgtgcttatttgcaatttcttcaaacttctaatgtcaacatacctattagattattgtaacagccatctcatcaagtggttgcatcatgcaggcgatcttgttgcacacataaagttcactgtgctgctgatgcccaatggatcagataagataacatcacatcctctacaggagttaaagcccaccaaatccattgaagacaatgcagagataaaggcatggcttgctttggggacgaaatcaaagaagaagggtggtgggaagaagaagaaaggcaagaaaggagatgcagcagaagcagatcccatggaggaggcgacaaacggtgctacaagccaagaataattctgatttttggaattactgccaccagcttttttcttgtttcttcgctgcatctgatggtgttatattacattcagttgtggaaaaattgagtactatttctagcttctaagaaatgaagcatcctattatcgcatctaatggcgcaaagataatcgacaaggcatgcccagtgtt

SEQ ID NO: 31678 - DNA, 835 bp, Zea mays
  Clone ID: UC-ZMFLB73205A08_FLI
tgaactttgacgctctcttcaagaacagcaacaagcagaccgttccactctcaggtggcggatggcttgaggtgaacgaagtcatggtgcggatcattaccatggtaacctttctgctgcagctgcggcttcttcagcaggcctggtccgcacggtccgtggatgcaagcaaagccgagtcatgggctgccgagaagaaagtgctctggatatgcctgccactgtacatcattggcggagctattacttgggttgttcacatgaggtcaaaccacagccgaagaatgctaaggcaggttgtacacttgaagccagttgagcagcatgcgttctgggaggaccttgtgtcttattgtggactgatactcgatgggttcctgctccctcaagtgatcctaaacgtgttctcagactccaaagttagagccctctccccagggttctacatcggaagcaccttgatccgtgtcctgcctcatgtgtacgatgtgttcaggagacagcactttgttccaagcctgagaccatcttacatgtatgcaggccctcgtgacgacctcttcagcctcgcttgggacatcgtcataccttgcggagcactgctactgtcggcgctcctcttcttccagcagtggcgcggaggagctttcttcctctgttcgaagaacaggaggacgagagagtacgaaatggtttccgtggccagctcttaagaaaaatcgagtggatatgaaatgcttttatagccggttcttgacatcgttattgcaagggaaatgtagaggaggtttacttatagactttttaaaaaatagctattccatttttcggatcc

SEQ ID NO: 31679 - DNA, 699 bp, Zea mays
  Clone ID: UC-ZMFLB73205G03_FLI
gaaaacatactacttgtgtcttctgagtatataaaagttccaagtacaaaggtttaggctggagttttccatgtgatatttggagtgttggctgtattcttgttgaactatgctctggggaagcattgtttcagacacatgagaatctggaacacctagcaatgatggagagagttttgggacctctaccagagcatatgatacggaaatcaagttcttctgctcagaaatatttcaggagggcaacacgtttaaattggcctgaaggtgctgtttcaagagaaagcatcagagctgtgaagaaactggatcgactaaaggacttggtatcgaggaacgctggccattcgaaggcagagctggcagacttgctatacagtatcctccggttcgagccatcagaacgtctgacagcgcaagaagctctggagcatccattcttcaggaacccgacatgacttgttggacaggcttgactcgtgtaactctctgcttcaagaaggtatcgaggaagcaggcagagccgtccattgcaaagctgatgggtatcttgctcctcttttaccagagagtttgtgtaagcctgtcagtaaggcttcttgcggtggtgataaagctgatggctttggtcacccaatgtaatgtacactagcattttttttttacctagggagtttagtgcctgtatgttgttaaccg

SEQ ID NO: 31680 - DNA, 1546 bp, Zea mays
  Clone ID: UC-ZMFLB73205H04_FLI
cgaagcacgtttgtaaattatgttattttcaaccacctttcctttgtaaggatttgaaacttccacacatggtttctggcatcaacgttaagattcactgcacacttgatatgataatggttttgaaacttccacacattgtttgtggtatcaacgtgaagattcacctacagtgtataacccaaactctatcccccaaacagttattaagcagcaatgcctcaacatttgacgaagcacctgtaaggctgcaactgttaatatctgccgttaaacagttcaacagtccaagaatctgaagatcatacagctagttattgaagccatgaagctcattttctgcagccagcaccttaagatagagccgaactggtcgaagagtagacaaaaaagcctgtcactgtgctcagactgtaaacagtatccaggtagagggttttttctatatttttattttcataataagggtgtccatgtagtttaaacatgtgtgccgcctgcttacacaaagatggttagctgtggcattgccaccatggcataggagatgcagcgagtgcgctacttcaccttcgtcatgctcatcagaatggtgcaggagaagataccccgtaacaccaccttcctgatgcccagcgacaggctgctgtcacgtccatttctgagccaggtgctggagttcctatccaggcattccatcactgtgcccctcgtgttcaactacctcatcaggcttcccaatggaaccatagtccccagttcccacccaccacttgggtgacacgatcaccgtaaccaacatcaagcgtcaaaagttctacttcaccggcatcgagctcacaagtcctgatctctaccacttgggggagttattcaggtgccatggaataaaaggaatcataaagcaaacagcaacacagagtaaaagcggcaacatgcactcgctatgccgctccaacttctgcggcaccagagaagacattgaccaaaaaccaatcattggcacatcttctctaccacctcccaacacaggttcttccacgatccctgcttaagaacctgtaaggcagacatactaatgaactatgcttcccatctaagacatagtccagaaccattttcctgtaaaaagcaaatcaaaataagatcataaaagtaaagtgccaggagcccaaaaacttaccagaatcaagagcaagttcaggaaagcaagtttaacaaacgattctgctgacacttaaatagatggatgaaaaaaaaggattactaatatcagtgtcactaaacagaaaaataggaatgtcttttaaccaaacttacctacagcaggtggatcatttaaacttaaaaaaaataccgccagcgccaaggctcacaatcaaacagggctgaaacaaacctgcaaactttgaagtaaaacagaaaatagacgcaaaaaagaggtgtgtgtgtgtgtgtgtgtccatatatatattggtgcagaggttgagacagtgtccctcatctatttgttaattattacaaaaaataactaggaacaaccgac

SEQ ID NO: 31681 - DNA, 1078 bp, Zea mays
  Clone ID: UC-ZMFLB73205H11_FLI
gctccagccgaactccctcacgccatcctcttccctggcgttcatccctacggcagccaccacttgggcgctcctctccctgccctcccatggcggctccccctggatccctccctgcgaggaccctctcccgtggatggtgtcgtcccttcctgcagcacaccgtgctccctcccatggccgatgcccctctctggagctcgcccctgccctctgtccagcgccctccctgcttgccgttcctatccccctgcaatggagttcgtcgtcagtccgagctcgcccatcctctgctcggtttcaacttggtcgtgcctgcagaccgctccctttactgctgcagcaggtcagcgcccctctgttttttttttttccatagttgcgcacctatctgtagcagcccctcgctgccggacatcatccggtagtcccgcaccatccgcacccgtatggtgtttgataaaatgttcaagtggagtgttgtgtcatggacaactctattagcggcgtgggatgtttggtattttcgcagcctatctgcgacaccgtcgacccccggtgaggtcctgttcttgccctatcgttttagcgctcgacgtcgattactaatgtgtgaattgtgtgtgttgatgagggagttaaccgataaagaagcgaggtccgtgcgatgtttgccaagtgtttgatggaaggtccgaaccgggaacctcgcctttctcgcgcatcttctggtcggtttgtgaattggtacgctagatgattatgcgatatgaagggcatggactagactggaccacaagatgatattgacggaccaacctcaagatggatgatctgacccagtgccaggataggaggtgctcgccaagcgagtatcatctaacaacactgacgtagtgttattctaggcaagccccggtgcatttgccaccttccttgtgttttcaaaattttatcacttatatgttgcattaggtgatagaagttgagtgattaaacacttgatgcattaccatccttgaaaggttgattaccacaccttgtcatccgttttataaaagctagagatgcttagtct

SEQ ID NO: 31682 - DNA, 2946 bp, Zea mays
  Clone ID: UC-ZMFLB73206A12_FLI
tcccccccctccctcgaagcggccaaggcggcggcagcagtgccggcatgggcgcaatgtcggcttcgatttcgtcggtgaattggctagtcgaggatgacatccttctcaagaacgccgtcgaggctggtgcttcgttagagtccttagccagaggagctgtatgtttttcccgtaaattcactcttcatgaaatacaggaccgctggaattcattgctatatgacccagatatctcaacacaagcagcttctcggatggctgagtatgagaatgaactttctacttccgatccagccaaggcacataaacttttcaactcaaaagcaaaggatttttcatttcagaaacggaaaatagacagtgtaaagaatctatattatgcgatgagaaaaagagtacgcaatgatccacgcaacagtggcgaccttggatttcttgtcccctgttcgtgtacggcaattggtagtgagtgtatctgtggaggcctacctaacaatattgaaccagagctgaattcagtaagccgctatgggcaagtaggttcaaggtacaccattggacattcatattctgaaatgaacgaacatgcttttcatacgaagcatactgaaagcatgacaagagatggggatggcaccagtaatgttgtgtatggctactcagatgtaggccaactatatgaacatcatgcgtacacagcgaataatcatgggaatagagaagggaacaatctttctctaaagagtatcacaaattttcaggattctatgcagtttcagcagttggacaacaatcaatgtggtaatggggtggtagactcaaaggctttggtgatccctaaccatttcagtggaagtgtgcaggaacctatgcctctccaaatgattggtcaacctgagggttctgaagcaccaggtggtgcaatcttgagtcttcagcgaagcgacaggctcgctcttgctgatgataaggatgtaaaatcagaagacagggaccctctcacatttgaagcgcatttagatggtgggatatctggtttagatcacgctactgagtttatggacttcccatatttcactaatagtgaagaccttgatatcctgaatagtgaaaatcttttgaattctccaagtgagggaatccaggaggatttagacgatactgcattagttgttcatggggttagatcaaccatgcaaaatctggttcatgctgatgaagccaatatgtcctgtgatcaaatagatcttggtgatgtgaaaaataatgtagatgcttctggtataatcttatttcctacttcattagtagtgccctgtcctggcctgtatgttgagtgcaaattgaacacagaagatactgaaattccttgcaacgacgatgtttctacaccaacagagtatcctcttgaatgctgtacttctacctttgggcagaaatctgagaatactatctattccgtctcccctgcaatcagccctccatcaattgctgaacagcccaacccatccacttcagaacaaaaagaagattcagtggctcatgacgaaggtggtgtcctaggagctaaaccatcagaaggtgctttaacagttggaggccttttgcctggtaacattgacacaaatgatgcaaacacatgcatgctagctttgccttcttttagcactgctggatttggtgaaggatcaccttgtagtttaggaccacacgagagctttgataactctcatggtttgactttgcaaaattcagttcaagctcctgatcagatgcaacacaactcacttgatggtaaaccagaattaggtgacaaggctgctctacagaactgtatgccatcaaatgcactgcccgatttggatattcagaacactattgcaaatgcgccaacaccagctcaagcagaagaatgccctgactatgaaaaagatgttccaaattactatgatctagaagctttgattcttgaccaggatcttatcccgtgggaccaagactccgattttatgcatcctgaagttaccggatttcctcacccggaaagcaggaaggcattgattagattggagcaaggtgctcggtcttgtatgaacagagctatcatgtcgcatggtgcctttgcagttatctatggattgcacttgagatgctacataaaggatcctgaggttactcttggaagagagacagaagacattaaagttgacattgatttaggaaaagaagggagggcaaataagatatctcgccgacaggcggttatcaagatggatgaatctgggtattttcatattaagaacactggaaaatgtccaatctttgttaatagcaaggaaataccaagctgcaaacgcatcaacctaagctcagactcattaatcgagataaaggacatgaggtttattttccatgtaaaccaagaggctgtgaggcagtacattgatcgtgacctgaagccagaacgctaatttcccctggctttccagtcagcagcagcctgtgagtgactgcctcattaacagcaatagaagtagcatagcagtaaatttgagtaagcattgctcgtttaggatgttccttcatatgatgttaacaagttaggttcacttggctccggtctgtaaatggttgtagtttgttgcgttttctgtctgtttggcgggcataaatcatgcatataaccagcgcatttgcttccagtttgtacctacactcccaggaatgatttcatttgtaatactggcaccctagattgtggtgactgccgccaagagcaagaggcaaccaatgcaataaagtgcggaaaagaatcaatagaagggtagattctagggtagaacaggaggagggtgcacttgtgcaagaaaccattcggttcttgcgacgctataagcataaactttattggtttttatttatataccctgatgatcttgaagc

SEQ ID NO: 31683 - DNA, 1226 bp, Zea mays
  Clone ID: UC-ZMFLB73206B02_FLI
gggagttgcggttgcaggcatcctctgctcgccgtcttgctgccgttgctgctagtgctagcaatggtgcccgagtcggcgcagctgcagtcgtcgcagacgtggtcgctgctcaagatccagcagctgctcagctacccgccggtgctccgcacctggggcaacggcaccgacttctgctacggcggggactacaagaccgcctccgccttcgtcgagtgctacggcgacagcgtgacgcagctccacatcatgggccccggcggcgccccgccgctgcccaagacgttcaacctggacgccctcttcacgacgctgacgaggctccccgacctccgggtgctgacgctcaccgggctcggcctctggggcccgctgccggggaaggtgtcgcggctggcgtcgctggagatcgtcaacgtcagcggcaactacctctacgggcagctcccggaggggctatcccggctgggcggcctccagacgttcatcgccgacgacaacatgctctccggcgagctgcccgggtggctcgggaggctggcgtcgctggccgtgctcagcctccggaacaactcgctgcagggcgcggtgccggagtccgtccgggacatggggtcgctgcggtcgctggcgctcgcgtgcaacaacctctccggccaggtgccggacctgagcgcgctgacgaacctgcaggcggtggacctctccaacaactcgcttggcccggcgttcccgcgcctggggcggaaggtggccagcgtcgtgctcagcggcaaccgcttcggcaacggggtccccgccgaggaggtcgcctcgctctacctcctggagcgcctggacgtgtcgaggaaccggttcgtcggcccgctcccgccggcgctgctcgcgctcccgtccatcgagtacctcagcgtcgccggaaaccgcttcacgggcctgctcgccgccaacatgtcctgcggcgagaacctccggttcgtggacgtgtcgtcgaacctcctgacggggacgctcccgtcgtgcctgaagacgctcccgtcgtcctccaactccaagcaggtgacggtcctggcggcgtccaactgcctgtccggcggcgccggcagcacgcagcacccggccctgttctgccagaaccaggcgctggccgtgggcatcgtgcccgtgcacgcgcggggcggcggcaaggccaagggcaaggaaaaaaaaaaagccggcgccgt

SEQ ID NO: 31684 - DNA, 1764 bp, Zea mays
  Clone ID: UC-ZMFLB73206D12_FLI
gccagaagttcatgtgccatctttgcaatcagctcctcctagttttaggaacagggtcaagatatccgagtcatcaaatgaagtttcaaacagaaacagcagggctcgcgtgctgtctgctccatcagcccttattgtggttgatcagtttggctttccatattcggaataccgagatcaagatgactccagggataaggaaggtttgacaaaggggcatcgcttttcaaatcctttgccccttcctcttccttcacgcgaaggacattcttttaggaactctggtagcttcaaagccagcaacgtaagcgggccattggagatgtctggccctctcccattgcctcttatgaggagatttcatctgcctgccaacgattttctagtgatcagtgtgtttcagaaacacttggttcaacatcatacaaggcaacatttagagatgaatttattgatacgaggaccactgaagcaacagtagctcgattactcccctccactcagagtttgaaggagtttaaaacgcaagcgaccacattggcatcgcttcagcatcccaatttatgtaaactgattggctattatgcaaaagaagattctaatgaaaggatgttggtctatgaacggctttatcatggaagcttagataagctactctttggaagatcagatggtcgtttcatggactggtctaaacgtttgaaggttgccctgggtgctgccagaggtctagctttcttgcatgatgaaggaccctttcaggccatgtacagcgagttctcaactttgaacatccaaatagataaaggtttcactgctaagctttcaggatatggttgtgttggcttcaataccgaggagatatctaatgcacctgtgtctgcagcaaacctttcggtggagaccttggagaagggtttactcactcccaagagcaacgtctggagctttggagtcgtgttactggagctaataactggaaggaagaaccttgatcccaattattccaaagaagaacgcaatattgtcaactggagtaggcctttccttactgatgacagtcgcttgtctcttatcatggactcccgtataaaagggcgctttcccactaaggctgctcggatagtagcagacatcattttgaaatgcctgcgtaaggatccatcggagaggcctaccatgagggatgttgtggaggccctagcaagagtccaggaaataaaggttccgtgcagatatcctctgcaagaaccttctgctgcaccaagaaaagtgatgttgaaatctacatccctcaatgggattgtgcctcaccatcctgtcataaccttctctccatcgccgccttcacataaccagcacttgatttcaccaaggtcgtcgacatctgccttgtttcatccaagggcatgctcttctaccctggacgatccgagtgtaagttctataaagaaaacaccacctattatgcgaaggtctagcgtcgaaggcttttgattgtccatattgttcctttatttccttttcttggatttatttgtttctttgttagtagtgtagcggtttttagctgtgttctgtattgtaagacaagtggcctcatatgtagtgcccttgggtctggagtaaagcagaacaggatgaattgtaaataggaccaggttgtagataccttttttttgtgctcgaattgggtggaagcagcgtgccgagtgggccttgtaacctcataatgcaataaactccgtttcccagtttctgttc

SEQ ID NO: 31685 - DNA, 1348 bp, Zea mays
  Clone ID: UC-ZMFLB73206E02_FLI
cgggtgatgctgcttcagtgcttggatctagataaaatggacaagaaaccttctaaaatactttgggatgttccttgggaagaagtactttcattggagctagcaaaagctgggtatcagaggccttcacatgtaatcatacatctgaagaattttaggaggtcagagaactttgtaaggcttattaagtgcaacattgacaacgaacgggaacctcaggctctttcactttgctgttcaattcggaaaatgtggagatctcaccaagcagcaatgaaagttataccattgaaggttccatcaggccagcgtcatgtgtattttgtgtcagatgatgataaaaaggaatcccacagtttatctaggcctttgctaagctcgggaggaacctctactgatgttgagcaacagttcataaacaatacagttcactttcagaaaatgtggagcagtgaaccagaaattcagagccgatgcaaactagttgccaagcagattgcggatgacggaagggtgttcagcatatggaggcctctctgccctaatgggtatgtctcaattggtgatattgcgcatgttggcatccatccaccgcattttgctgctgtatacaagaatatcaatgggaactttgcactgcctcttggctatgacctggtttggagaaattgtgctgaggattacaagagccctgtatcaatatggcttccaaggccaccggggggatacgtagctcttgggtgtgttgctgtcccttcattcaaggagcccactcttgactgtgctttctgtgtggatgagagactcgcggaggatgccgcgtatgaggagcaaatcatatgggcctcatcggatgcttacccatggggatgctatatctaccaagttcagagcgcctcaatgcagttcatggcacttcgtgtcccaaaagaacaatctgagctaaggcccaagaagatattggagtcatttctgcagcaagcatcagagactcaaacgtcccgtgcatgaagaagctgcacatgatgcttgtgcgtgcaagagaactcggctgggacaaagggcaagtctcgtgcaagaaagctcgaagaatgccacttctttcggatcactccatttctccgttgtcaaagcatacacagaggacagagccttgcatgccaacactcgggttgacggaagtgttgtatactagaatagtaggttaaaggttgtaaatgtaaagttttgtaacgtttgatatagtttttgtccagctacatttgttaaggcccatgtggacgtgggccatattagttgtggctacatattctactaagaagttctcaggactaatcatactttctct

SEQ ID NO: 31686 - DNA, 1434 bp, Zea mays
  Clone ID: UC-ZMFLB73206E06_FLI
cggagcgccagcggcttcatccgatctccttctcacctcctcacctcaggcgcacaccgatcactctcttccctcctccagcagtccagctcacacccaccgccccaccccttccactcaaatccagggacatcgcagatccaccggctctccgatccgctcgcctccgcacccgcccgatcggatcccgcagtgttgatggaacactgaattgtggatattcaagttttagaggaagaagggcaagcatggaagatttctatgatataaaagcatctaaaattgatgataaacaaataaatctcttcggaatttttgatggtcatggtggttcacgtgctgctgagtatttgaaggagcacttgtttgagaacctcatgaaacatccggagttcatgacaaatacaaaattagcattaagtgaaacatatagaaagaccgattcagagtttttggatgctgaaaggaatactcatagagatgatgggtcaacggcatcgacagcagtgatggttgctgatcatctttacgtggcaaatgttggagactcgagggctgttatatcaaaggctggcaaagctattgcgctctctgaagatcacaagccaaacagaagtgatgagaggaatcgaattgagagtgctggtgggatagttatgtgggcaggaacttggagggtaggtggtgtacttgcgatgtctcgggcatttggcaaccgtctcttaaaacaatttgttattgcagaccctgaaattcaggaacaagaaataaatgaggagttggagtttctaattatagctagtgatgggctgtgggatgtggtttcgaatgaggacgctgttacacttgtgaaaatggaggaggaaccagaggctgcagctcggaagctgacagagaccgcgttctctcgcgggagcggcgataacatcacgtgcatcgtggtgaagttccagcatgacaagccgcgcagtggcggtggcgattccccttcctcgcctcgtctctaggcgacaggagttgattccatttgtttttggttatacgtgttgtcggggtcctttttaccttgagccggattttgctggcccccgaggctgatacttgagaaaaggagtcggttcatgttcattgcctgtcttgtctatatatgcccccctccctaattttgcttctccggtggcagtgctgcccattggcatgcacatcgtcggcattgtcgtagacttgtagtttgctgttgtatcagtgagagagagagttaattctgtgaggtgttcattttgagatgtcactggaccgatcttcagtccagctagatccgtaagatgtgcagtgcataatctcgtagaggtgatgatattcgtcagaagaatcagtgagagattaccgtgtcacattactgtgtttttctaatgtaatgggtgtactgtttct

SEQ ID NO: 31687 - DNA, 562 bp, Zea mays
  Clone ID: UC-ZMFLB73206E07_FLI
tgggagatggttgcttctgcgtttggagaagacaaatctggttcccgacagactcgattgaccgttgaagacctgaattatctgtttatggtgtagaatcgctcctgagagtgaacagttttgctcattggattggtgttagacgtggtagataaaaatgttctctgaaaaaataacaaaatgctttcatttagggattattagttcttgtagcttgtacagttgcagagatttaggggttgctagcgacgtgtcttccaattctttttgcacgggaagcagtaagatgctgaactaggtgaattcttcagatagctgctatagtgcctgttaacttggggggtgttttctatgtactaatttctagttcctccattttattttcttttacttcctaaattgtcaaacacagatactaaaatagagataatctctcttttagtctatgtgtttagcaatttaggggctaaaagggactaaaatagagagactaaagacaccccttaatgtaatgaagataacgacaatgaagctcagatgatatatatgtacatattcttct

SEQ ID NO: 31688 - DNA, 1117 bp, Zea mays
  Clone ID: UC-ZMFLB73206E08_FLI
gctgcatctgacaagcaatctgaacctcaatctagacagcatattccttttaacttccctccaactacccagcttaacttgaaaaacagtgcaacagagaatcctaatgttgtaaatcaggttgatacaatgaaatcagttacaggtggttttggttcacagttacctcgtgtacctaaggaacctgctctcctagatgagagatctctattggcttgtattgtacgtgcagttcctgctggacctgagggtggaatcaggattagctcaactctgccaaataggcttgggaaaatgttggctcctcttcactggcatgattataagaagcaatatgggaagcttgatgattttgtggctagtcgtccagactgtttgtgattgagggagacttcattcaccttcgtgaaggagcacagcagatcatttctgctactacagctgctgcaaaaatagctgctgctacagcatcttctgccccttactcatccttactgccttctgttgctgttactcctgtggcacaaagcactcggcaaaagaggggccctgcagttgattccagatcatcaaatgcaattctttctggaaatggcttcacagatcaatttaacatcattcagggggttagtgacgtacctgtttcaggcaaagtaagaaacaccctagataatggcttcttaggtgaagttcgaactgggcagccatctgtgctcacagctgctgcgaatggagcaagacatgacaaaggtacaaataatgtcatacagggttatggtggaaagcaacaagggaggtcaactgggatggcttacctttccagaagatgaagtagttttcactcgacgcaattggttttgagggtggtgaagctgttggaaaccatacaagtggcattgttttggcctccaaacggccgatgctgaagatgacctggattaaagttattctagattttttttgttgcaccattgctattcacagcgcctgtatgagggccttgttgtggcgaagcctgctgaaattttgcgactatgtaactcgtctgtgcttgtattgtggtgcacttggaatgatgtgaatgttatagcaaatctgggaaatgtggtcacatttt

SEQ ID NO: 31689 - DNA, 1623 bp, Zea mays
  Clone ID: UC-ZMFLB73206F11_FLI
ctgcagatccgcctgagcaagattggctcgtcggactccggcgctgccgccaccggctcggcagccgccgccggtgccgccgccgctgtggggtcggctgcggcgctgggcggcggcatcccggaatcggtcaccgtggcatgccccgaccacctggtgatcgcggacctacccgtcgcgaagagcctcggtgccgtcacgacctccgctgccgccgccacgcgcgccatcggccgtcgctcccgtcgcccgctcggggagcgcgtccacatctgctcccgctgcgagttccccatcgccatctacggccgcctcatcccttgtgaacatgccttttgtttaacctgtgcaagaagtgattccagctgctatctttgtgatgagcgcattcagaagatacaaagtgtgaaaatgatggaggggattttcatctgtgctgcaccgatgtgtctcaagtcattccttaagaaagcagattttgagtttcatgttcccgatgtccatgccaacctcctgcaaactaatctagagaaggaagaagaacgcaatgagccagatgctcctaacatctcccgtgcttctgcaggggatacacaaagacaatctcaaatgcctgaaatgtctactgcacgggctccttcaaggccaggtgtttcacaagatcgtgatgaacgctctcgctaccaccagtccagggagcaaacaccactgaggcccccaaccctttcaaaaccaccttcattccatggtcggcattcgtacccaccaggggatactcaggccgagaacaatccacctcaaggattcgaccgggcctacaactgggcttctcaatcacggcaagagagcccaggtgcggcgactccacttcgccaagaatctgaccaaagtattcaggacaagcagcaattgatggctaatgcaccttttatgtttccgccgattcctcctcaccagggaaactttatgatgcctatgaatatgaatcagcctttgattcctaatgcaccattcaattatcctctccagcaagatggaaaccctcagtacttctctgcccctttccagatgcagctaccagatactggatcagaacaaggttccatgtcaaatgtccagcctccagctggtcctatgagtttccctgaggggcctcagcgcccatggggtatgaggctgatgagtaatccatttcaatcgatggcccttggtcagggaatgattgatggtgcgggtgatcctcaaggtggtggtggccttgccttcatgcaagctggttttgggggcatgcctgatggctccatgaatacaggcatgcccgatagaggtgatggaaggggtattctagcacagatgcatatgcaaatgcagatgtcacttcccccacctccgcctacacaacctcctccaggttcacagcaaacgtttaacaggacttgatatttttttttgtacgaattgatggcaactcccagaattgcatgtcaattcattgagcaaattgtaattttgtcgtttttggcatgtaacctgtggactagatggctcagttctgttccctggttggataggagcctgtattatgctataactcctgtttgaatgaaatgttccgaaatttcg

SEQ ID NO: 31690 - DNA, 1675 bp, Zea mays
  Clone ID: UC-ZMFLB73206G03_FLI
cccgaatgtggaggagaacctcaagcaccgcaaggaagaagagttccctcagtctcggggctcgcaggaagggtgctcgtcgtcgtcgtctccttccgcctccgccgctggcaaggagatctcgcctccgcccgccactccgcggccacagcagcaggcgcagtcggcagccctgccgccgccgccgtcgccgtcgccggcttccaccagccgcgaggacgacccgtgccggaccgcgcactcaggctcgtccggcaaccagtcccccgaacccgctgcgagaaacgctccaccgtcagaggctagctccccaggaccgtcggagtacagagtctgcagacccgtcggggctcaggacgcggccacacagacagacgacagcgagagggacgctgctgaaaaccatagtactcgcgtggccggagcgtccaccatggacacgacgtcggatgccgagatccaggaatgccaccggaggagctcgccgctgtcacccaaggtacccgagaccgttcgtgagtcaccgccggccgtgtgctcctccgatgctgcttcgcctggtggcagagtcgagacgttggagtccctgataagagcagaggccagcaggaggagtagcttcaggacattggaggagggacacatgcttggcccggtgggtgtcaaactgaagccggccaacttgctgatgcagcttatcacgtgtgggttcgtgtctgtgaaagaacaccgaggcttcgggttcatcccgacgtacaggcctcggtttacgcaggtcgagttcccttctccggtgttctccactcccgtggcgttgcggcaccttgacagaatcccttgcaatacaaaagcaactgggtcgacgagagctccggagccggaatgtttcagcgggagcttggttgttgagacgaagcagcaggacgagcccgggagagggatcgcctcactcaaacgctcgtcatcttacgacgaggatagagtgtacagagcagcacatcccaaaagcaacacggaaagctcctgtgaggcaggtagtttcaggtgcctcccacagaccatcaggatcatatcgtgtaagcagtcgaggagtggaacagtactctccccccctgcctctgacgtgagaaacggctctatccaacaagaacacagtaccatgtcctcaccgctgggctcatcgaagagcgcgagcaacaggatggccgatccgtcgccgccgggcaaactgtcttgtgcgagagccgagtcgttgttccgcgaggagaaggacatgatcaagatcgaagaaaggcttccttctggagctcgggtcataatccagtccgcgccgttgtgtgaagaagaaagcgacgacagcagcgaatgaatcacattgtaagggtccgtgttacatatgtttttgttttcttttgttctttttttttcatttcgttttgctgaggatgatggcatctgcgtgcgtagcttttggagtagagggttcaaaggtattgattgattctgtaaaccgtgtgaatgtgatagtccgggcgttttctcacacctcgaagaagagaatagtttgcctttgcttatttttttttttataaaaaaggggcccgcttttgtgtatcttaggcatacagttttacttgctttgtttttcttcaagtaaataagcatggattgtttt

SEQ ID NO: 31691 - DNA, 1675 bp, Zea mays
  Clone ID: UC-ZMFLB73206G04_FLI
cccgaatgtggaggagaacctcaagcaccgcaaggaagaagagtccccgcagtctcggggctcgcaggaagggtgctcgtcgtcgtcgtctccttccgcctccgccgctggcaaggagatctcgcctccgcccgccactccgcggccacagcagcaggcgcagtcggcagccctgccgccgccgccgtcgccgtcgccggcttccaccagccgcgaggacgacccgtgccggaccgcgcactcaggctcgtccggcaaccagtcccccgaacccgctgcgagaaacgctccaccgtcagaggctagctccccaggaccgtcggagtacagagtctgcagacccgtcggggctcaggacgcggccacacagacagacgacagcgagagggacgctgctgaaaaccatagtactcgcgtggccggagcgtccaccatggacacgacgtcggatgccgagatccaggaatgccaccggaggagctcgccgctgtcacccaaggtacccgagaccgttcgtgagtcaccgccggccgtgtgctcctccgatgctgcttcgcctggtggcagagtcgagacgttggagtccctgataagagcagaggccagcaggaggagtagcttcaggacattggaggagggacacatgcttggcccggtgggtgtcaaactgaagccggccaacttgctgatgcagcttatcacgtgtgggttcgtgtctgtgaaagaacaccgaggcttcgggttcatcccgacgtacaggcctcggtttacgcaggtcgagttcccttctccggtgttctccactcccgtggcgttgcggcaccttgacagaatcccttgcaatacaaaagcaactgggtcgacgagagctccggagccggaatgtttcagcgggagcttggttgttgagacgaagcagcaggacgagcccgggagagggatcgcctcactcaaacgctcgtcatcttacgacgaggatagagtgtacagagcagcacatcccaaaagcaacacggaaagctcctgtgaggcaggtagtttcaggtgcctcccacagaccatcaggatcatatcgtgtaagcagtcgaggagtggaacagtactctccccccctgcctctgacgtgagaaacggctctatccaacaagaacacagtaccatgtcctcaccgctgggctcatcgaagagcgcgagcaacaggatggccgatccgtcgccgccgggcaaactgtcttgtgcgagagccgagtcgttgttccgcgaggagaaggacatgatcaagatcgaagaaaggcttccttctggagctcgggtcataatccagtccgcgccgttgtgtgaagaagaaagcgacgacagcagcgaatgaatcacattgtaagggtccgtgttacatatgtttttgttttcttttgttctttttttttcatttcgttttgctgaggatgatggcatctgcgtgcgtagcttttggagtagagggttcaaaggtattgattgattctgtaaaccgtgtgaatgtgatagtccgggcgttttctcacacctcgaagaagagaatagtttgcctttgcttatttttttttttataaaaaaggggcccgcttttgtgtatcttaggcatacagttttacttgctttgtttttcttcaagtaaataagcatggattgtttt

SEQ ID NO: 31692 - DNA, 1789 bp, Zea mays
  Clone ID: UC-ZMFLB73206G05_FLI
ggacgacgacgtgaggagggctcctgagaggaggcccagacaggtagagctgcgccgggactgcccatacctcgacaccgtgaacagacaggttcttgattttgatttcgagaagttctgttcaatctccttgtcaaatttgaatgtgtatgcgtgcttggtctgtggaaaatatttccaaggaagagggttgaaatctcatgcatatacgcacagccttgaagcaggccatcacgtgttcattaatcttcaaactgagaaggcttactgtcttcctgatggatatgagattaatgatccatcgttagaagatattcgacatgttctgaatccaaggttcactaaggagcaggttctaaatcttgacaaaaataagcagtggtctagagcacttgatggctccaattatctacctggaatggtgggtcttaacaacatcaaggagactgattttgtgaatgtcacaatacagtcattaatgagagttacacctctgagaaatttctttctaatccctgaaaactatcagcatagcaaatcaccattggttcatcgttttggggaattgacacgtaagatttggcatgctaggaacttcaagggccaggttagtccacatgaatttctgcaagcagttatgaaggccagcgacaaaaagtttcagattggtgtacagtcagatccagtggaatttatgacatggctcttaaacacactgcatgcgaaactaaaaagttcaaagaagaaaaacagaagcataatacacgattgttttcagggagaacttgaagttgttaaggaggttcataggaagcatataatggaaaaaagagaggatggcggtgagctgaatggtgaggcaggttcagtggtgggaactgcagatggaattgttactgaaacatccaaggtcccattcctgatgctcggtcttgacctgccacctccacctcttttcaaagacgccatggagaaaaatatcattccacaggtaccattgtttaacatactgaagaagttcgatggtgagacagttacagaggttgtccgaccttccattgcccgaatgaggtaccgagtcactagactgccgaagtatctgatccttcatatgcgaaggtttaccaaaaataacttttttgtcgagaaaaaccctactctagttaattttcctgtgaagaacttggagttgaaggactacattccattacctaagccgaaagagaatcataagctacgttcaaagtatgacctcatagcaaacattgtccatgatggcaaacctggcgagggatgctacagagtatttgtacagcggaaatcagaagaggcctggtatgagatgcaggatctccatgttactgagacccttcctcaaatggttgctctctcagaaacctacatgcaaatatacgagcaacacgaatgagtaatggacagtggtcatcctatggtcagtctgtttgcttaacagagatcagaatatcacaaactaatccttatctttggagcagctttttttggggcagaattttgtagtatcttcacacatgtccagacttaatttcttgacaagcagagatcgagggaatgtacttgggtcatcaagtcaatgctatggaggctgaaacatcgtgaattgtttttagagctgctttgatagaggaacgatttcccacatatttcatgtttgtagtgcagcactgcagcctgtatctgttgtgaaccggtacgcttccaaccgttatcagcaaacttttgaagctcataaagtataattttttatgct

SEQ ID NO: 31693 - DNA, 830 bp, Zea mays
  Clone ID: UC-ZMFLB73206H01_FLI
cagtgcttcagtttgttgaggtcacgtttgggtacacaccagataatctcttgtacaagaagcttgactttggtgttgacctggactctaggattgcattggttggtcccaatggcgcagggaagagcactcttctgaagctgatgacaggtgagctggttccattggacggtatggtgagacggcacaatcacctgcgcatcgcacagttccaccagcatctggcagagaagctggacctggacatgtcggccctgcaatacatgatgaaggaataccctgggaacgaagaagagcggatgagagccgcagttggtaagtttgggctgtcagggaaggctcaggtgatgccgatgaggaatctgtctgacgggcagaggagccgtgtcatctttgcgtggctggcatacaggcagccgcagctattgctgctggacgagccgacgaaccatcttgatatcgagaccatcgactccctagcggaggcgctgaacgagtgggacggcggtctggtcctggtgagccatgacttcaggctgatcaaccaggttgctcatgagatctgggtttgtgagaatcaggcagtgacaaggtgggaaggcgatatcatggatttcaaggagcacttgagaagcaaggcttgtctatcggattaagggaaggccttggctttccttaccttctctttggagatgtattatcccttgtataattatgtattattataggccctccaagttttactagtagctagctgatcatctgagcaagtacctctgtatctgtatcctgctgagtctcataataagaagcgaaagttttgtagtact

SEQ ID NO: 31694 - DNA, 2487 bp, Zea mays
  Clone ID: UC-ZMFLB73207A02_FLI
ggagtcacttctcaaagtggcgaaagtggcagtgacagttcaagcgaagggagtgaaggaaattctcacaatgattcacatcacaaggaaagtggacaggaacacgatggggatgttcgaagttcccggaatggtgtatcacgtttgcaatctgagggaaaattgaaccaagctatggcaatcttgcccataccatcaagtggcccagcaactgatccaactacaaacctaaatattgggatggactattgggccaacacagcaagctctgctcctgcaattcatggcaaagcgacgtcaacaacagttccaggggctgtggtcccagcagagcagtggacacaggatgaacatgaactcaaaaagcaaagaagaaagcagtccaatagggagtctgcacgtagatctaggttacgtaaacaggctgaatgtgaggaattggctcaacgtgctgatgttttaaagcaggaaaatgcttcacttagagatgaagtaaaccgtatcagaaaagagtacgaggaacttctatcaaggaataactcactaaaggaaaaacttgaaggcaaacaacacaaaactgatgaggcaggacttaacaacaagctgcaacattctggtgatgacagccagaaaaaaggaaactaatgctatcatgcaatgcttgcctacattggtcctaactagattattgggaggtgcaattgtagtatgcacattaactccttactttattgcagttaattgttaccaggttgtgataatgttgatgccaaccttttgtgtgggtgtttcctgtttcagatctatcttggcttatcttttagaagccaagatgtgactgaagctataggctgtgacccaattcactatatctgttagaaatagtggataaagtcaaactttcaaatttgaagtgctgactaatattgttatgtatacctggcaaaagactggtttccttttaattcagtctggttgaacattttgctgggctttcactactgcctagtttatgtacattgttgttcatatcggttgttcctagttattttttgtaataattaacaaatagatgagggacactgtctcaacctctgcaccaatatatatatggacacacacacacacacacacctcttttttgcgtctattttctgttttacttcaaagtttgcaggtttgtttcagccctgtttgattgtgagccttggcgctggcggtattttttttaagtttaaatgatccacctgctgtaggtaagtttggttaaaagacattcctatttttctgtttagtgacactgatattagtaatccttttttttcatccatctatttaagtgtcagcagaatcgtttgttaaacttgctttcctgaacttgctcttgattctggtaagtttttgggctcctggcactttacttttatgatcttattttgatttgctttttacaggaaaatggttctggactatgtcttagatgggaagcatagttcattagtatgtctgccttacaggttcttaagcagggatcgtggaagaacctgtgttgggaggtggtagagaagatgtgccaatgattggtttttggtcaatgtcttctctggtgccgcagaagttggagcggcatagcgagtgcatgttgccgcttttactctgtgttgctgtttgctttatgattccttttattccatggcacctgaataactcccccaagtggtagagatcaggacttgtgagctcgatgccggtgaagtagaacttttgacgcttgatgttggttacggtgatcgtgtcacccaagtggtgggtgggaactggggactatggttccattgggaagcctgatgaggtagttgaacacgaggggcacagtgatggaatgcctggataggaactccagcacctggctcagaaatggacgtgacagcagcctgtcgctgggcatcaggaaggtggtgttacggggtatcttctcctgcaccattctgatgagcatgacgaaggtgaagtagcgcactcgctgcatctcctatgccatggtggcaatgccacagctaaccatctttgtgtaagcaggcggcacacatgtttaaactacatggacacccttattatgaaaataaaaatatagaaaaaaccctctacctggatactgtttacagtctgagcacagtgacaggcttttttgtctactcttcgaccagttcggctctatcttaaggtgctggctgcagaaaatgagcttcatggcttcaataactagctgtatgatcttcagattcttggactgttgaactgtttaacggcagatattaacagttgcagccttacaggtgcttcgtcaaatgttgaggcattgctgcttaataactgtttgggggatagagtttgggttatacactgtaggtgaatcttcacgttgataccacaaacaatgtgtggaagtttcaaaaccattatcatatcaagtgtgcagtgaatctt

SEQ ID NO: 31695 - DNA, 1304 bp, Zea mays
  Clone ID: UC-ZMFLB73207D07_FLI
gtttttattcgtttgtcacataagcagtggtggtcggtcggccggcgacaatgagcggccgtgtgttcgtcctggccgctgtcttcggcgtgctgctcgccgcagccgccgtgtcctcgaggcccgtcctgactccgctgggtactagccgccctgctgccggcgacctgtccgtgtacttccacgcggactcgtgcccgcagctggagacgatcgtgcggtccagcgtggacgcggcgctccagcagaacgtccgtctgacggcgggtctcctccgcctcttgttccacgactgcttcccgcagggctgcgacgcgcccatcctcctggacaacggcgagcgcggcctcccgcccaacgtggggctgcagcaggaggccgtgcagctggtggaggacatccgcgggaaggtgcacgcggcgtgcgggcccaccgtgtcgtgcgccgacatcacggtgctggccacccgcgacgccgtgagcctgtccggcgggccttccttcacggtgccgctggggcggctggacagcgcggcgccggcgtccagcaacgacgtgttcacgctgccgccgccgacggcgacggtggacgagctgctgacggcgttcgggagcaagaacctgtcggacccggcggacctggtggcgctgtcgggcgcgcacacggtggggaaggcgcggtgcagctcgtttggcgacgtggcgggcccggccaccgacgacgtgacgcggtgcgtgacggcgacgtgctcggcccccgggagcggcgacacgctgcgggacctggacttcctgacgcccgccgtgttcgacaacctctacttcgtggagctgacgctgaggaagaacaagggggtgatgctgccgtcggaccaggggctggtgagcgacccgcgcacgagctggctcgtccagggcttcgccgacaaccactggtggttcttcgaccagttcaggacctccatgatcaagatgagccagctcaggggaccccaggggaacgtcggcgagatccgccgtaactgcttccgcccaaacaccaacggcatcgccgcctctgcttgagttgactgaccaggcaccgatccattacttcactttcactgtgtgtaataattaataataataaaacaaaaacaacgccagcccgtacgtgccgtgtgaggggggcacgtggttgtggctatactgtagccgtcaccaccatgtcggcgtcgtccatgcatgtcgcattaccgatttttgttcatgttccgatctcatctcatcatctcgctatcaataacaattataatagtgtttatt

SEQ ID NO: 31696 - DNA, 1167 bp, Zea mays
  Clone ID: UC-ZMFLB73207E08_FLI
tgctgaatcaaaattaagaactgggccgcccactacatatgctgaccgtgtgttttcaaacgagatgaacattgcaatcaaagaaactgagaagagctacaatgctttcatgttcagagacgccctgaagtctgggttctatgacctccaattggctagagatgagtacaggctctcttgtggtgcagcaggcatgaaccgtgatctgttgtggcgatttatggatgtccagaccaggcttatcacccccatttgcccacactatgctgagcacgtgtggcagaagatcatgaagaaagaaggctttgcaataaaagctggctggccagccgcggacaccccggatcccacactgagaattgcaaataaatacctgcaggattccatagttttgatgaggaaactgcttcagaagcaagagtctggttctaagaagcctaagaagggagctgcaccggcacctccgtccgaggaaaagaagatgagcattggcctcatatatgtgaacgagcactactctggatggaaagagcagtgcttgaaggtgctgcagtccaagttcgacagccaaagccgctccttctcacccgatcaggaaatcgcagaagctctgaaggagtgccccatcgggcaggaaatgaacctgaagcaggttcagaagctgtgcatgcccttcatcaagctgaagaaggacgaggcaagggaggttggtcctcaggcgctggacttgaagcttccgttcggtgagatggatgttctccgggagaacttggagctgatcaagaggcagctgggccttgagcaagtcgaggtgctctccgcgtcggacgaagctgctcgcgctaaggctggtgaacatgcttcgctgctggagaagaacccaccatcacccggcgaccccatcgccatcttcctcagcaaacagagctgaaaactgaccttgcatatggcccttttgttatttacttcgccgcacatttgcttcttttttgtttttgtttttgtgaaaccagtttcgtgtctgtaaacatagcatgttgtcctccggtttggtgaaaccagttttttctttttctttttctgtcaacagaatatgttatccattgtctgggtaaaccagttcggctattgtcgacaaagtatgttaaggtgatgcggctttacatc

SEQ ID NO: 31697 - DNA, 2571 bp, Zea mays
  Clone ID: UC-ZMFLB73207E09_FLI
ctcgtctcgtctctgcactggattggaggttggggccgtgaagggtaggtaggtcgcttgatagggacaaggggggagacggcgagaggcgtttcgccgagcagttcgcgtgctcccctccacaggccgacgcggcgacgccgctgtttcaggttctggaatttccagtgcgggtgcattaggctgctatgggcaagtcgccggggaagtggatcaaatcggtgcttttggggaagaaatctaccaagtcaggtcctaccaagtcgaatgaatctgtaaggacttggacttccataaagttggtttgctctttgggttagtttcctccccaaggatttgcagttcatttgtgcaacccttgtttaaggttaccccatgtacgcactgaagctagcttttgcaattctatttagttttttttacttttcataagtagttattatttttgtgcaattcatgtcggtagctgtttttttaatggttactgacttactgccactgaacgcacaagggcattcggtttatattttcagctgcagaggttgagatttcatttactagttactgttccttactgctccaagcgtgcaaactgacgcatgtccttgtagtttctttctctctctctctctctctccttgactcctttatccatattgtataatattttgtttcttccttcctccttcccttgaccgttgaaccatactttttagaaggctgacaacaacagatactcgaccggggaggaccgcacattgtctgagagttctcctgtgatttctgagccggtactagttaacatccacaagaacgtagctatcaatgggaaggctgcagatgccagtgatagggcacggcaacaagatccgcagagccaaagcgttgttgagtccagatcatcggctccagctgctcagctgggagaagatcaagctgcagcgaaggcacaggcagcctttcgtggttacctggcacgaaggtcattccgtgcattaaaaggtatcgtaagactccaggcgctgattcgagggtatcttgtaaggaggcaggctgtatcaacccttcgcgcaacatggttgattgtgaagtttcaggctctagttcgtggaagaaatgttagactctctggcagtcgcatgcagctcaatgtgaagtttggtcagagtaactttgggggtgttagatcgtctgatgcatggaaagagaagctatcttcaaatgcttatgttcggaagcttctgtcttcaccaattgttttagaacctcttcacttccagtatgacaagagggatcccaattcaacctataactggtttgagagatggaccataggttgcatctggaagcctgcttttcaacccaaaagagttgctgatgggaaaccactggtaaagaaggctagttatgcaatggaaactcaatcagccaagttaaaacgcaacattcggaagggttctgctgctatcgctgggagtttccatacatctggtgaatctgataaagtaaaaaggaatccaaagaatttctctagcttccctgctgattcagtaccagatagccagttatctgaacttgaaaaggttaaaaggaacctcaggaaggtaactgattcgatggctgaagcctcaaagatatctagttccagggttgattcctcgaaggtatgtaattctacagctgaggttccaaaggaatctaatcctgtggcagaaatctcaaagatacgtagtctcctgaatgggatctctgaccatcaggatattcaatgtgagaatacacgtgaatcttcatttcctcttggaactcaagaagactctgacaatgatcatctattgcgatattcaaatatggatagcttggacttggtacctggtttgaaaagtgatcaggaaattcagctggattcggtttctataggagaaaatgttgatgatcccactgttgttgctccagcagttgaagaaatgtcaccgcaaaacattgatacggaagacaatgttttatgcaagaaagaggaagcaaggtccaaggaagagcacttgtctaatggaagccttagaactagcaagaggaagtcttcattccccaacaaatcagaatatgtagaaaatgggactcacgctactcctgttcagccaaggcagccaagctatatggctgcaacggagtccgcaaaggcgaaattgcgagcccagaattcacccagtctggattctgattcagcggcagaaaagaatggtttcacccgacgccactctcttccttccagtacaaagagtagagcacttaaagctgaatggaagcgctgaagaggcaacccatcgtccacttgaattgaattgtgcactgctctgaaacttcgctggatgaactcgaccggtcttgtcccatgttcttgctgtattgaacaaccccttgtgaagttgcgattctggttcagtttgtcgtaggttcatgtgcaaccactagtgccttgtgtcgtatattgcatggttcttgtcgaaggaacaatgcctgcgaaagctgatgttaggactgcattaactgaataacatcacccagttgccc

SEQ ID NO: 31698 - DNA, 2325 bp, Zea mays
  Clone ID: UC-ZMFLB73207F07_FLI
gccctcacgcacgcggcccaactagcctaacaaaccctagctagatttagaaaaaaagtttgtccccaatccgaaccgacgaggagctcgccgccgtgagatgtccgagtacgacgagcgctaccagggcaacgccgacatgcccgcagccgaaggcggctatccgcaggccgagtacgccgccgccgccgcgcctgccgccgggggttcgccgcccgcagacagcaagccctccgggttctccgaccacgccgacggccgctcctcccagcaccagcatgagacacaatcacatgacagtggttcctcgaaatctcgagaaagggaccgagaacgcgataagggcaaggatagggagcgtgacagggatcgtggccgagaaaaggggagggaccgagacagggataaggatcgtgaaagaagtgacagagacagagatcgcgatcgccaccacagggaccatcgagagcgcagcgagaaaagggaacaccgtgatcgttctgatgatcgtgaccgtcaccgtgatggtcgtgaccgccaccgtgatgatcgtgattctgagaggagaagagatcgtgacagagatggtcatcgtaggcatcgctcccgctccccttctaagagtcgtgaccgtgaccgcagatctagatctcgttcacgctctcgatcaaagagcaagcgcgtgagtggttttgaccaagcacctccacaacatgcacttcctattgttgctgctggtgctatccctggtcagcttcctggtatcactgctcctattcccggggttggggtgcttccgaacttgtataatttggctgcaggacagttcaacccccttgttattcagccacaagccatgacacaacaggctacccggcatgctcgccgtgtctatgtgggtggacttcctccaacagctaatgagcagaccgttgccatattctttaatggagttatggctgctattggaggaaacacagctggtccaggtgatgctgttcttaatgtctatataaaccatgacaagaaatttgcttttgtggagatgagatctgtggaggaagcaagcaatgcaatggctttagatggcataatgtttgagggagcaccagtcaaggttagaagaccaacggactataatccttccctagcagctgctcttggcccgagccagccaaatccaaatctcaatcttgctgctgttggcttaacacctggctctgctggaggattagaaggtccagaccggatctttgtaggtggtctaccatattatttcactgaggctcaagtgcgggagttgctcgagtccttcggacctctgcgtggattcgatcttgtgaaggatagagaaactggtaactcaaagggatatgccttctgtgtttaccaggatcttaatgtcaccgacattgcctgtgctgcccttaatggcatcaagatgggggacaagactcttactgttaggagggcaaaccaaggagcttcacagcctaggccagagcaagaaagcatcctgctgcaggcacagcagcaggtgcaaatgcagaaactcgtataccaagtcggaggtgccttgccgacaaaagttgtctgcctgacacaggtagtgacagcagatgaactgagagacgatgaggaatacaatgacattgtggaggacatgagggaagaaggacgcaaatatggtaaaccgcacgaggcccatcgagttctcttataccttctttgttttaaaatctcttacattcagctgttatgattatgattgcctaccctcagttactgaattggtttccttttgtgtttttgtcttttgtgtgtcttttttgtagtcccacataatgccattgcagagtgttttatagtccgaccctatgcaatattggcaatcgggctttaacccacagaagacactattcttttgagtttgattaatcattatatcattagcctcttgcctatatatctctactcactaacacttggacaggtaacttggtgaaagttgtaattccacgacctgaccccagcgatgccccagttgctggtgttggaaaggtgtttttggaatatgcagatgtcgagggctcgaccaaagcaaagacggggatgcatgggcggaaatttggcgggaaccaggtggtggccgtgttctatcccgaggacaagttcgctgctgagcagtatgactgaaagttgtagaacctgttctagagttgcaacacacaatgtgtttttttaaaatctttgagggtaccggtttctcttgaatttgaatcttatccagttataagtttggtgcaggaccagtcgataagcgat

SEQ ID NO: 31699 - DNA, 733 bp, Zea mays
  Clone ID: UC-ZMFLB73207G05_FLI
ggaactggcttgcctttgctgactgaagtttttgtacagctgttactagtgttttgcttgacaagttcctaatcaagcttgaatcatttacggtttgttcccatatagttcaattatatttgttgcttaactctttttttacaggttatgtttctaacgcttaatattttcctatgttcttttttgtcttaacatttgttgtatgcaggaccatccaggttctaatcgttgtttgggaaatgttttgttcttttttatataactatattgctaacttaatttaatttgttgattaatttgcttttctttgtttttgcaggtgaacatctctgattccattttcatctgttgggtggcaagaaactaatcaaggattctctctcttctcattctctgcgtggaggactgtttagctgtagctgagcggcatgctttccagaacataaattggtggaagagaagtttgatgctaccactttgcgagaaggaccgaaccagacacaataacatcaaactgagacactgcagtttaccaactttttcaatatggcagattgaagagcagcaagatcagcctcttccatatgcagtttgaagaaatccttttttaaaggtctattagactagaatccttccggcaatcttgccttcaccccaagcatgctgcataccatgtaatgagtgtggtacttgacgactgttaccaaagtagtggatgcttttctttggcacg

SEQ ID NO: 31700 - DNA, 369 bp, Zea mays
  Clone ID: UC-ZMFLB73207H06_FLI
ccgatggcaacaaaacaatgtgttcggcctgtacaagctactgaggaggttgcatcctgaccatgcgtaatcaagggaaatgtggggtttgcttcaatgagcttaatcacgtgatttcttttaacaaacagcttgcagatttttactgccatagattttctgatcccaatgtgtaatggcgtacctatttttgtcccactgatccttccatcatacaaattcatcacgagatgacgaggatgagagtgctcaactgctgatgtagggagggatgttcgaggagaatcatgttgtgaaacggctgcttcgccagttgttacctttttggattgtttgttgaatattagccaatgacagactgatagatct

SEQ ID NO: 31701 - DNA, 2526 bp, Zea mays
  Clone ID: UC-ZMFLB73207H12_FLI
tgaatctcccacggaatagcatgttggacacaaccatatcagcatcctctaaacaggagagtggtgaggggagccgtctttttaaagtcatggcaaaatcattttctaaaagatggcaaagtggagaaattacgaacttccaatatctcatgcatctaaatacacttgctggtcgagggtatagtgatctcacacagtacccagtatttccatgggttctcgcagattatgagagcgatgttttagatctgaggaatccacagacatttcgcaggcttgataaacccatgggatgccaaacggaggaaagtgaagaggaattctgcaagagatatgatagctgggatgaccctgatgtaccaaagttccattatggctctcattattcaagtgctggaattgtccttttctatctcttaaggttgcctccttttagcacagaaaatcagaaattgcagggtggacaatttgaccatgcagaccggttattcaacagtgtgaaggatacatgggtaagtgctgcaggcaaaagtaacacatcagatgtgaaagaactaattcctgagttctattatttgcctgaatttttggagaaccgttttaatctggatctgggcgagaaacaatcaggagagaaggttggtgatgttgttttaccaccttgggctaaaggcagcgccagagagttcatcaggaagcatcgggaagcactggaatcggattatgtatctgagaatctgcatcattggattgatcttatttttggatataagcagagaggaaaggcagctgaagatgccgtcaatgtcttctatcactacacatatgaaggcaatgttgacatagacgcagtatcagatcctaccatgaaggcttcaatactagcacaaatcaaccattttggtcagacccccaaacagttattccagaaaccacatccacagaggcggactgacaggaaagtccctcctcatcctctacggtactgtgcctatctaacacagcaggagattcgcaagacagcatcttcggtgtcccagattgtctcctacaatgataagatcctaattgctgcagttaactgcttgctcaagccgctaacttataatgaatacatttcctggggattccctgaccgaagcttgagaatattaacatatgatcaggatagacttttgtctactcatgaaaaccttcatggtggtagtcaaattcagtgcactggagtgagccatgatggcaacattctcatcactggtggtgatgatggagttgttgcagtgtggagatttgtgaaggatggcatccgccgtctcctgagaatggagaaggctttgtgtgctcacacaggaaagataacttgcgtctctgtcagccaaccttactcattaattgtctcaggctctgatgactgttctgttatcttatgggacctgacaagcctagtctttgtgaagcagctaccaaggttcccggcatcagtatccgcgctacatgtgaacagcctcactggtgagattctgactggtgctggtgttctttttgctgtttggagcatcaatggggactgccttgctgtggtgaacacctcccagcttccttctgacctcatcttgtctgtgacaagcgcgacacactcagactggcaggacacaaactggtacgtgacaggccatcaaagcggcgcggttaaggtatggaagatgttgcactgctcgtctgatgaagcagtaaatagcaagagcaaatcacctgcggtatcgtctggtgggcttagcctgaacggccaagcaccagagtataggctacttctgcagaaggtgctcaagtcacacaaacaccctgtcactgccctttgtataccaccggacttgaagcagcttctgagtggggatggcagcggtcacttgctctcatggtcattgaaagacgacagtttcaagggttcatagctcagagaaatatagggattcagctgcacatatagagaaacactggttaaatcttaccactgatttcttcctcgtccagaactgagcattggcgtgcattgacaaaagagctcggatcagcaagcttctacatggtatatgaaatgttcccttgatgtcccatgcctgggccatacagcagtccgggcaggagagagaatacaacagacacaattggaaggatgaagtggacgtggatgcgctgctgcgctgacatcataatcttatactgtgaattatgagatggttgtaccttctcttgtttttttgaggagaaaaggattcatgtgggctgtaggtgccattgtttgtaaagtctatacagggtaattttggtggtgccggttgaggtggctgatggtgtagtgtctcgatgttttgttcggggttgtgggagcaaggaaagaggtattagtttcattttctccccccacctctggaggctagtttgggagccacaaaaccgaaagtgattggatggactaaaagcttctacatattcaaaattgaataagaacgagattttaatcacttc

SEQ ID NO: 31702 - DNA, 2689 bp, Zea mays
  Clone ID: UC-ZMFLB73208A01_FLI
cgcctactctgttttctgattcactgaaccgagcgagttctcgtcgcatcgtatgcgcctccttctctgattccccaaaaatattccctgttttgctgttcttttcttcctcgtaatccgctcggcttccattgttgccgccgctaccgacggcgacggcagacatcaagtgtcagtcctccttccgccgaagtcttcttttggttggactccgactctccgacaggagttgcgctcctcctccccctctactctactggattacactagcgtggagatccatctctatttgtttttggtctcttctttgcttggggcaaggtcaatcacagttgataagataccacttgtactctaatctgtcagtctccacgtgcggctgcatatatactgtttcaaaatttcggagtaaggtctgaagtctgaaccctcatgctgcttcagagggattgaggctggttgttggtcgcacttgcacatggcgcagccacagcagcgggtgtaccaagcttggaagggggataacctctcctacatgtttgagagaaagaaaatgattcgtgcctcatttgcagaggttcttctttggtgggcggttgatatttggaccaaatgttaaatctctaggtgtttctgttgccctcattgttatcccagttgctgttttttgtgtgtttgtcgcacaccatctccgtcatcagtttcatgcatatgatgcaggatatgcaattcttgtcatagcaatagtgctcacaattagggatgaaaacggtttcggaatttttcggaattccggaaaccgatttcgaaatttttcgatcggattcatcggtaacggtatttttcgaaaacggaatcggttttcggaattttctatcggaatcggtatcggaatcggcgtggtgttttaccgaccgtttccatcggttaccggtttttgtcggaaattaccggatttatgtctcggaaatttccggaattgtgtttcggaatttttttcggaattttccagcatgtgattttttcgcatcgcctgtacatctctggataaggattacttattttgtattttttggacgctttaagatttttttgggttagatggtgttggaaggcagttgagattaacgatttggtctctcgaacgaatccaccattttctatgcacatgttatgtattagtaatatataacgatagagagccgacagtctgtcttttccacacactagattttagggttttcctgtgaggctgtgaaaaaaccttttatgtaaggaaaaaatatttcatgagtaagtatgtcacgtcaactaaatcgagtggatattgtgaattgtgaactttgaatatgttaacttgtgatctttatgaacttgttatactgtgaacttgttatattgtgaacttatgatctttgtaaactttttatattataaatttgtgatccttgtgaacttgttatatcatgaattgtgaacttgtggtatttgtgatgttttgtcaattttgttttattgtgaagtttgatatgtttaccaatcatattttagatttcgaccgttaccggtgtattttccgcaccgaactttcgtttccgatgtttccgaaataccgatatcgtttccgtttccggagttaccgttttcgattttgtttccgataaaaaatatgaaaacggtaatggttttagtgtttaccgaccgtttacgaccgttttcatccctactcacaatctatgtgcttctattactcttaaccactgccgctcgggatccgggaattgtacctcgtgcttcacatccacctgaggatattcactatgataatttgtctcttactgacacacctggaatactacagttcccctgtgtaaaagaagttatagtaaatgggatgcctgtgaaagtaaaatattgtgaaacttgtatggtttttcgcccacctcggtgttcacactgttccatttgcaacaattgtgtggaacgctttgatcaccactgtccatgggtaggacagtgcattggaaagcgcaattgccgttattttttcctatttgttgtctcttcaagtctcctctgcatttatttgtttgttatatcggccttgtacatcaagtttctcatggatggagactatcctacagtttggaaggcattgaaacattcccctgcttctctagcactaatgatatactgttttatctctctctggtttgttggtgggctcacaggatttcatacatatctcatcagcactaatcagaccacatacgaaaattttcggtacaggtcggatggcaggcttaatgtctatgatcaagggtgtctgagtaactttcaagaagtagtgtgtgccaagatagagccttctaaacataagttccgggcgcacatacaagaggaagtgcgaggtccactagctaaccgtgctggagagactgaagaagaacaagttggtggtcctcgagcgtaagcgggggatggcctcgatattgatggtgatctgatgaagatttcacataggcataaccatgaggacatcgatattgaaataggatgtggggatgctaatgaggtggaatgctcagtttcagattccaaagttaaagacaatatggatgcacatatgtgatatgtagagttagaaataaggtaaatggagaacagtcgagttgggttccagcggttt

SEQ ID NO: 31703 - DNA, 1779 bp, Zea mays
  Clone ID: UC-ZMFLB73208A04_FLI
tcaccttccaactaacctgtttcaatttgtattgggagccttgccgtgccggaatattcccctccggcagcctccctggcttcctccccgcgccgccccgccaaccaaacccaacggtggcaccacctcttccttcctcctcctttccttccgcgacaggagaccccctcgcccccgaattaattgcagctgaaggaacccaaggcggcatccatcgatgatgatgctcaccaaggagttcgccctatcgccgccgccaggtgtcgtgccgcgccggaggccgtcggcgagggtcgcacccaccgccgctcgagggggttcgccggtgcccgacctatggctgcggaccgccgcccccgtccccgcttccgccgccgccggcttcgccagcagccacagccacgacggcgactgcgacctggccatgctcgtcaccgacttcctcgagaacggggccaccgccggttccggagactcccgcaatagcagcgacagtgaatccggtctccctgacctcgcccacctcgcggacacgatctcgatgttgaagcagggtggagacgagaaagaaaacgagctgctcgccatggtccactcgctactcctctctatccatgagccgcagcttcagcctttcaaaacaggccaatgtggaggcagctgcatccgccatttgcttgtcaagctcttgagatactcgggaaacgacgcagcagtttgcacatccaaatggcaggggtttgacaagatacctggaggtgactacgagtacattgatgtcataatgcacggtgatactacagctccagagcgtctaatcgttgatatcgacttcagaagccactttgaaattgccagggcagttgattcttatggcaccctgttgaattcgctcccagtggtctttgttggcacccttccgcgactgaagcagttcctgcatgtgatggtagatgctgcaaaatggtccctgaagcaaaactcaatgccccttcctccctggagatccttgccttacctccaagcgaaatggcagtccaagtatgagaggaaagattccattaccgagggaggcttccagagcacatcttctgatcacgcgctgtgcattgggcacctgaagaggctgaaaacgtccctgcagttagagcttgagaccgcaggattactgatgatgccaatcaaggccaacaagaagaggatgccaaagtcatctgagaggcggaggcggcgttcccttctcagctgttgatttatgttccttggacacataagaatactataaaggagaaggaacaacagcttgctgctggctatttttgtttcctcagaaaatggagaaatgagaggcttttttcatccgtccaatacataatggtggagactcttcttacaggtttggagtttacagattaggtaaaacagaaggtggatactaacaggccatgttagtgccagttttttttttttccttttccctttttgaaggcacataagaaaaggacgaagaaaatagtttttttttgtttgttttagtttttgcttctttccggcagagatggatatgctagtggtgaatctgctgcactgcatatgccacgtacaagtgagagttagtattacaaaatcaaactttccccgctatatattgatttttttggtgacccattttggtactccagaaactgatagacacgattgattgccgcattgtaaccgtagaatgcacaagttgggtgatacgcttattgaagttgaagaatattcgttgttcgtttg

SEQ ID NO: 31704 - DNA, 936 bp, Zea mays
  Clone ID: UC-ZMFLB73208A06_FLI
tcgattttcggaggaatttattcgaggaatctagtgtttgaccggctccgctcgattctgcttcgttaccacgcgggtgctatcgaatcttggcggagatggggctcacgttcacgaagctgttcaggcggctattcgccaagaaggagatgaggattctcatggtcggtctcgatgcagctggtaagaccaccatcctctacaagctcaagctcggcgagatcgtcaccaccatccccaccattggatttaacgttgaaactgtcgagtacaagaacattagtttcactgtttgggatgtcggtggtcaggacaagatccggcccctgtggaggcactacttccagaacacccagggcctcatttttgttgtagacagcaacgacagagagcgtgttgttgaggccagagatgagctccaccggatgctgaatgaggacgagctccgtgatgctgtgcttttggtgtttgcaaacaagcaagatctgcctaatgccatgaacgctgctgaaattaccgataagcttggcctgcactccctgcgccagcggcactggtacatccagagcacatgtgctacctctggtgagggtttgtatgaggggcttgactggctttcgaacaacatcgctaacaaggctcgaagcatctaggcaaggcttcaatcagtggaagcaaactgcctctaccattacagctatgaagtatatagtcgtgattgtgtcagacgtggtgtgtttttgggagataaaaggctcttttggtcgaggagctaggtatcagatgttttttatggtacctgtaattttccgtgcttctgttttggttttgtgcaaggtataccatgtctgactgtgtgctcgccactgtctgagtcgttgtactatcccgggccggcctgtccggctgtctcttggcatagcaaaatgatcgcct

SEQ ID NO: 31705 - DNA, 961 bp, Zea mays
  Clone ID: UC-ZMFLB73208A07_FLI
ctgctcaaaccgaagagatatcaataaatgatgatgagtggaatgatggtttactggcaaccatccgtgagaaggttcatatggaggctgataggaaggccatgtccaaccaagttatatattgcttggatggagctaggattggcatacagtatgagacattctttgctggagagccttgtgaaatttttcattgtgttttggaaagcaagtcattcctggaaaagatgattatgattgaacacaccttacctttctttctgcctgtacgtgaattagaaagtgatctgttgtcatctaattcaattaaattcattgatcatcttgaagaaattttacaggcttatattgacaggagagagcaggttcgtcttatcaaggagctctacgggaaccaaattggcgagctgttccatagtcttccttataatatgatagagtttgtattggaggattttgagtgcaaggttacaatcagtatccgatattcggatctactgcagaccctgccgagtcaggcaagggtcttggcttggccacttcgctcggccaagaaaatatctacaagaagcagcagtgcatcagctgcgcaaccagtaccctttcacctttcatatgccgaggaagcactcaaaaccttgtgtctaccagaagcatacgcagacattgtgctggagctaccccatgctttgaagaggattttatcctctcgggacagtgactaaatcgtgacctcaagatgtccagttttgttgtgcataagattcacatctcaatcgtggggcatgtttttgaagatattgttcagaatcttgtggtagtatagcctgcagttgtggactgcaattcctgtgaaagcaaggcagacatttgcgtgggccgctcgaaatattccggctacagttcctgttaaaagaatcaaaatcctaggaaggccttatggtcgaggcataatcttgcc

SEQ ID NO: 31706 - DNA, 1635 bp, Zea mays
  Clone ID: UC-ZMFLB73208B10_FLI
gcgacagataaccaagcagaaaaacgaggctgtacgcggccaggattttgagaaggctggtgaattaagggaccgagaaatggaactgaaggctcaaattacggccattattgacaagagcaaggaaatgattaaagcagagactgaatctggtgatgtcggtcctcttgttactgaggcagatattcaacatattgtctcctcttggactggaattcctgtggagaaagtgtcgtctgatgagtctgaccgtctcctaaagatggaagagacactgcatacacgtatcattggccaggacgaggctgtcaaagctattagccgtgctatccgccgtgctcgtgttggcctgaagaatccaaataggccaattgccagcttcatattctctggaccaactggagttggcaaatcagagctagcaaaggctctggcagcctactactttggctcagaggaggctatgattaggcttgacatgagtgagttcatggagagacatactgtctccaagcttattggatcacctccaggttatgttgggtacactgagggaggccaactaactgaagcagtccgtcgccgcccatacacagttgttctctttgatgagattgagaaggcacatcctgatgttttcaacatgatgcttcagatattagaagatgggcgattaactgatagcaaggggcgcacagttgacttcaaaaacacactattgatcatgacatctaatgtgggaagcagtgtcattgagaaaggaggccgcaagatcgggtttgaccttgactatgatgagaaagacaccagctataacaggatcaagagcctggtgaccgaggagttgaagcagtatttccggccagagttcttgaacagattggatgagatgattgtattccggcagctgactaaattggaggtgaaggagattgctgacattatgctgaaagaagtgtttgacaggctgaaggccaaggagattaatctccaggtcacggagaagttccgagatagagttgttgacgaaggttataacccgagctatggtgccagacctttgcggcgtgctatcatgaggcttctggaggatagtctggcagagaagatgctggctggtgaggtgaaagaaggtgactctgccatcgttgatgtggattcagatggcaaggtgatagtcctgaatggtggtagcggtgttgctgagccactggaacctgctctcagtacctaaccgaggtcaaaatcatcattggtccgaaatatggccttctttacaagtcagctgggtttctcgtgatggtaaaaactagactgacattacttggccgcccattagttgctttatctttcgtttattttcttttttgttggaagtgaggcagtagggttgctatggaaatgaatagatggagaagcatttagcagacatataatatatgctagacttttgagttgccttgttttgggaagaaacttggaattttcagtttgatgcacttgtattattattaggccttggtagcaacaagatacggatgtcgtctctacgtttgctgttgtacttcagtgtaacttgcctcccgaatgtatgagtattatttatcaagtcccaaataacagtgacggattgct

SEQ ID NO: 31707 - DNA, 1785 bp, Zea mays
  Clone ID: UC-ZMFLB73218F02_FLI
ccgccgtcttgaggtagcgcccgttgccgcctttcttgaggtcaaggttgatgatgatcatgccaggcctgaaatcgaagttctccttgacaatcttgaggatctccttgtcggggatcgcgccggtgccgtacgtgtcgacgaacacggagagaggctcgggcacgccgatggcgtaagacacctggacgatggcgcggcgagcaaggccgctggcgacgatgctcttggcagcctgccttgcgacataggctccgctgcggtcaaccttggttgggtccttgccggagaaagcgccaccaccatgggctccccagccaccgtaggtgtcaatgatgatcttgcggaacaaatcaatgggtcattaagaggacatgtactaataagttgggagtaccatttccaaaatgttgccttttcactaatctctgagttttgccccctcatttattcattgttatacttgtgcaggttagtgagggtcttgattttgctgatcgtgctgggagggcagtaatagttactggaatgccctttgctactccaactgatgccaaggttcggctcaagcgcgagtatttggataagcaggggacaccatctaataaaaacacaaagatgttgacaggagaagaatggtatgtgcaacaagcagcacgggctgtcaatcaggctgttggacgtgttatcagacatcgccatgactatggagctattatttattgtgatgaaaggtttgtgtggccaaattatcaatctcagatgtcatattggctccgacctcatataaagtgctactcaaagtatggggaagtagtccaaggattgacccgattttttcgagataaagcttcttcagatcctttgacactagagccaacagattgtaataattgtatagcaccaccagcaaacaaacacatgcttaaagagaagctatcagatttggctgccagtgcacaagatgagtgcccacaaatcacattatcaggaaattcaaccatgagaagaagtaacttcatgaagttggctcagatcactcctgctaatcgttcaacccttactacaaaacacaactttgtgtctacatctacgaagcacaacctcccagaagaccagctgtcacaggataccaatgttgatattactgttgacttggcaatacaagggcatttgaaggaacataccttcaagtctttagggcttaagaaagctaaaacaatggacagatccaaagatgctgttgttttagatgacgtctcttcaaaattgcctcaaaatatagggtcaagagctttggccagataccaatgtggtggacctacacctgaatcaaagaaaagcactatagcaacagcatgcggaaagaatgatggggcctgtgaaaaaactgaaggccaggaatctaactcagggccagccttcttgaagctggttcaagaaaagcttagtcctgcagagtacacagagtttgttgaatacatgaaggccttaaaattgaaaactatgcataccaaggactcacttgaagcaataactaagcttttttcgtccccaggaagacttccacttcttgaagggttcagggtttttgttgcaaagaaccatcttccattatatgagcagcttgttcgaagacacaataatgtttctagtacatgacaaccacttctgctatgttcgcaggcatattcagtttttttgtttgtgccatgtatttcattaagtgataagtacagttttggttgttttcaacacttaactgtttatcaacggaacattagc

SEQ ID NO: 31708 - DNA, 1461 bp, Zea mays
  Clone ID: UC-ZMFLB73222B09_FLI
gcggaatctggcaccggccatcacgtcccctcccgccgcttcctcctccctgccctacctttccccagatccgaatccattaaaccagcggatcttgcatcggggcgcgtccacggcatccgggcaagcgagtggtggagccagcagccatgagatggtatgcatcggtagcctcctgagggcgctggtgctgcgtgcggcgtcgtctgcgggcaggcgccgggggcccaggattctgtgtggccgcgcgacggatgtgcgcgtgacgccacggcacggacacggctggcgcgggttccgggcggtcacgggaaggatgatgctggactcctctgagtctgcctcttccgccgccgccgccgccgcggaggcgggagctggggcggtggcaggccaggcgcagccgcagcgccgcgcggtgggggccgtgccccaggcgcacgatggtggctacgccagcggcggatgggagagagaagatggtaaactgagttgtggatactcaagttttagagggaagagagctacaatggaggatttctatgatgtaaaactaactgaaattgatggacaagctattagcctgttcggtgtttttgacggtcatggtggatcacgtgctgctgagtatttgagggagcacttgtttgagaaccttctcaagcaccctgatttcttgacggatacaaagcttgctataagcgaaacatatcagaaaaccgatacagatttcttggaatcggaagcaagtgctttcagagatgatggttcaacagcttcaactgcaattttggtgggtgaccgtctgtatgttgcaaatgttggtgattctcgtgctgttatttcaaaagctggcaaagctatggcactttcagaagatcacaaacctaacaggattgatgagcgaaagagaatagaaaatgctggtggtattgtcatttgggctggtacttggagggtaggtggtgtattggcgatgtctcgtgcatttggcaatcgtttactgaagccatatgtggtggcggaacctgaaattcaggaagaacagttcagtgatgagctggaatgcctggttctcgctagtgacgggctttgggatgttgtggaaaatgaggaagccgtttcccttggcaaatcagaggacacgccagagtctgcagctcggaaattgacagagatcgcttattctcgtggcagcgctgacaatatcacgtgtatcgtggttcaatttcaccatgacaaaaccggatgagccatgtggcggccaatttcagttgtaccctgcttcaggctattattatcctgcaagccgggtggtggggcttctctcagatttatcgctcttgtagcaacttccaagaactcgtccattgattcttttgttgtcttgtaggaaacatttgttccaacaggtgtaatagatattttcaatgggttaatttctaataaaactatgtttac

SEQ ID NO: 31709 - DNA, 681 bp, Zea mays
  Clone ID: UC-ZMFLB73227F07_FLI
gagatgaacaaggatgcagtcacaactgatgctatcggcagtatcagaacttgatggtgcttgtagactgttcatggtgcttgtagggatgatgtatgtctatggcttactgagctccaaccaactatggcaggagcgttagctaggacagcagtcagtctaacaattgtggacaaagttcagtctaccatacactgaagcgcacccttgttgctaaaggtgtgaacaactttgctcagcagaatggaggatcattgtcactagcagcaagacctcgagcccaggcagttaaccatcagtttctttccttctttctttgggccgagagagcaaagaaggatgatgcactttccaacctgtgtagcacgttgggacaactcaagaaatggcagtggatatggacatagaaattgacaggcaaaacaaagcgctggttcctttcagcgacgacatcactgaactgaattttagactgaaaggcgtgaatcagtgtggacaccagttgctgggcaagtgatatggagccagaattcgggcagttcggagactatcgccttgattgcagaatttaagaacattgttgttttacatgtttttttgcagtgaatcaggccacacatgttgtattagtgagagaatgatgatttattttatattattatggatttcatagattatttt

SEQ ID NO: 31710 - DNA, 1123 bp, Zea mays
  Clone ID: UC-ZMFLB73227F10_FLI
catttgtttatctcacatgatggttctaacaatatgcacaaattctatacgcctctctcgtagtttcataaactacgagagagatacgttttatgaacaaatttatttttattttgtcatatgaagaaatgttcaatatataaattgtacatcatgatgagttatacaaatttatagttgaaaaccttttcatttgaattaatttactatttaaaaatgtgatttttaaattgtttttgcctagtgttggagaaaaaacactcggcaaagagctctttgccgagtgttgtatttgtgacactcgccaaagagcctgccaagtgtcaaaaaaagacactcggcaaagaaattctttgctgagtgtcaaaaataaaacactcggcaaaaagtttctttgtcgagtgttttcttttaccgagggttttttgcgtggcactcggcaaataacttctttgccgagtgcccgaaaaaagcactcggcaaagaatatgacaatcggcaaagagccaaattatgccctccattagtgatgctgcaacacaatccacagggcaaccaggtgatggtggcacagccgcaattcgttgcgtcttgaccaatatggtttgtgatcaacttctagttatgcctgattactattttatttacgtgatatcagtcccatatgtatgattaacaaaagttctaccatatatagatgtattcaagctggtgtagactaggactagatttttacatttatttgttgtataaatctagaagaatagaagataagccatatcaaaaccataggcagtgtctgactggcttgtgtcatttgtgcaagacgacaggagcttttacgattgaggttcttatatgggctgattggaccagctgcccagaaaacaaaagctcatctcatattttgtctgttctgtattttctttccttttcccccttccatcttaggacagatatgcactcagcataagcatttcattaattttgaacctgcagttctctcactctcctcgtatgtgttcacatagtgggtcctaggcactgttttctgcggatctagttttcttctacagcatctcttgaattcctgatatcttgacgtggcaaccttgttcttgct

SEQ ID NO: 31711 - DNA, 1369 bp, Zea mays
  Clone ID: UC-ZMFLB73227G04_FLI
gctgcccctgctgctgctcctccacctcatctcctcgccttcgcctcgacacctccccgcgccccgcacgccctcccagtctcaggcctgcgactactccgccggcgagtgggtgcgcgaccccttcgcgggctcctcgctccgctacgaccatacctgcaaggagatcttcaagggatggaactgcatcgccaatggcaagggtaacgcccgcgacttgctcagctggcggtggacgcccgcggggcccgggtgcgagctcccccgcctcgacccgcgccggttcctggagcgccacagggacaccagtatcggatttgtgggtgattcgttgaaccgcaacatgtttgcctcattagtctgcatgctcaggggagtcaatggtgaggttcgcaaatggcgtcctgctggggcagaccgtggcttcaccttcctacgctataacctcactgtggcataccacagaacaaatctcttggtacgctacggtggtcaaggaatccaaatggaggccctctagaatctcttggatataagcaaggttacagagttgatgtggatattcctgaccaaacatgggtagaggtggtgggcaccctcaaaatttgatccaatacggtcaccaatgctgttctttgagaaggggaggccaattgtacctcctttactgccaccggctggactggatctggctcttcaaaacatgatatccttcgcgaacaaagcaacaagaccaaacacagtgaaattcttccgcactcaatctcctagacatttcgaaggtggtgactggaatgaaggtggatcttgccaatgtaatcagcccttgtcgtcaaaagaggtggaagaaattttctctttggacaataacagcactaatgtagaagcacgcttggtaaaccaacacttggtgaaggctcttcaacagactagtttcagagttctggacatcactcgcatgagtgaattcagagctgatgcccacccttcaacaactggcgggaaaaaacacgatgattgcatgcattggtgtttgccaggaccaacggatacatggaacgatttgctagctttgagtctcgaggcacttgagagctagttgagagagctcaagagctcaccggagaaaatatccctaacttttttttcagggggaatatgagtatgaagcatgaatctactggtagaatagaattttgctgatagctggttttagggcttttgttgcagcttgtttcatataaaggccaggagcattttcccccacttgtttgaccctgtatgttttaatatcactgtagagttccactgacgaatgacgatatacgaatgctataatcggtcggatccattttcttgaccaacagat

SEQ ID NO: 31712 - DNA, 713 bp, Zea mays
  Clone ID: UC-ZMFLB73228B09_FLI
aggatgttcgggctggagaccccccgggtggcggcgctgcatcacctgctggacgtgcccgacggcgacaaggcgggcggcggcgccacgcgcacctacgtccgcgacgcgcgcgccatggcggccaccccggccgacgtcaaggagctcgcgggagcgtacgcgttcgtggtggacatgccggggctgagcacgggcgacatcagggtgcaggtggaggacgagcgggtgctggtgatcagcggcgagcggcgccgggaggagcgcgaggacgccaagtacctgcgcatggagcggcggatgggcaagttcatgcgcaagttcgtgctgccggacaacgccgacgtggacaaggtcgccgccgtgtgcagggacggcgtgctcacggtgaccgtcgagaagctgcccccgccggagcccaagaagcccaagaccatcgagattaaggtcgcctgaggggagaccgttgtcggagcagtgccagtgagctgggtggcaacctgcgggactctggtgaggaagagcaaatggtagaaagcagtagctgtgcttctgaacattgtgtgtgtttgtttcccttgttaccgccaatcatcctacctgatgtgtcgtctggggtttcgtttgaaccatgctgggtttggagctttgtgatgcaaagcagaatgtcctgatgctttctttctccatagaataaatctctcctgttacct

SEQ ID NO: 31713 - DNA, 1088 bp, Zea mays
  Clone ID: UC-ZMFLB73228C04_FLI
gaaaaacagctatgatcagcaactgaggaaagaagaatcacagaaaatgaccccaagatcacgtgctgtctcgcaacagagtggtgtagagtttctctcagaagagtccagacgcatacagtgcactaagtgtggtaatttccatatatggatatgcacgaagagaagcaaaacaaaagcaagattctgtcagggctgcgatcagtttcatcaagccaaggatggagatggatgggttgaaaccagattttcatcctccatcaagatggaaataccacgagcctttgtttgtgccgagagcaaaatatttgatgtgtctgagatgggctacctgccagggaatggagtgtaagcctaacactcacggtccaacttttatggtaaacatggtcggcgcagataggatgcctcagagatcctacagttcccggtatcccttcagcttggacgcagagatgatccccgacgatgaattcgagatgtggcttcagcaggcactggcgtcaggcgtcttcgctgacagcccgaagcgcaggaaaagctggagcccgttcaaactgcctcaaaagggaattaaaagttggcgaaggtcgtcatgagggtgtggcattatgcagcagctggggtctaggcggctacaggattggaaagaaggtgataatacaaggcttcaagggtgtaaatagactgaccaacaatttgcctggatggataactaatttttgttccgaaggagaaagaaggtgaaaaagaaacactctgaacgaacaggtataaccccatgagttgaacttggttccctctgcagcatcccacgagtttagctgtgaaccagtgtgctgttcgtcctatgatcaaaataccggtggatctttggtgtattagtttcagtagtttaggaatctgacctcgaagatttgccgaaacatcgttcctaagacggttgagatatgaagggatgaaaagtagtatttctagcattgtcattctgtaggagggaagggaagaaggttgaaagtgatactggagactggctgtaaatacaccagaagttcccatctgtggaattactgcttgtaacattgtat

SEQ ID NO: 31714 - DNA, 2047 bp, Zea mays
  Clone ID: UC-ZMFLB73228E11_FLI
tgcagcaacatctactacatcaacgaccggctggacaagcggacatggacgtacatcttcggcgcctgctgcgccaccacggtgttcatcccgtccttccacaactaccggatctggtccttcctgggcctcggcatgaccacctacaccgcgtggtacctcgccatcgccgcgctcctcaacggccaggccgaaggcgtggcgcactccggccccaccaagctcgtgctctacttcaccggcgccaccaacatcctctacaccttcggcggccacgccgtcacagtcgagatcatgcacgcgatgtggaagcccgccaagttcaaatacatctacctgctggcgacgctgtacgtgttcacgctgacgctgccgtcgtcggcggccatgtactgggcgttcggcgacgagctgctgacccactcgaacgccttctcgctgctgcccaagacccggtggcgcgacgcggcggtgatcctgatgctgatccaccagttcatcaccttcggcttcgcgtgcacgccgctctacttcgtgtgggagaaggtgatcgggatgcacgacgccaagagcatcttcaagcgcgcgctggcgaggctgcccatcgtcgtgcccatctggttcctcgccatcatcttccccttcttcgggcccatcaactccgccgtcggcgcgctgctcgtcagcttcaccgtctacatcatcccggccctggcgcacgtcctcacctaccgcacggcgtccgcgcgcatggtacgtatacatatgcatgcgtgcatttgcattgcattgcacccccgtcgtttagcaaacaataacaacggcgtcctgtggcctggccggccgtcgcgttgcctaatgcctactggttcgggtacgagtaagtgacccgatccgttcatccccgttgcctagctagagtgcagtagtaccgccaccagtcgcagcagctgtcacgaacagtggcaggactgcaacacgaaatagacagtggagatccgtgcacacgcagcagccagttcacgttagatgcaaagcaccggtcccccacttgggcaaatcccccaatcattgaatggagacaacagccacattcaattcgaagccggccccgcccccgcggcgcccgacaacgatatgggacgacggatcggggatcggaacaccgcatcacccccacgtcatcatccgcgtctctgcccgtcgcctcgccgaatgccggtgcccatggcagatgtaggcttcactgtgccggttccgacagctggcgggggcggtttcggagcgacttttttgcgagtacggcacggcggcgatggcaacgccggcgtgggtcaaggaaccgcttgcctgtgacggaagatctgacgtagcgccgatgcggtgctgacgttgggtgtcgcgctgtgacggaagaccctcctggcgaggcgcgacgcgacggtggtcgcgacgtcgcggcactggcgcgcgtctggacgcactcggccggccaatcgcgctcccaggtcccagggcccggcatcgtgtggcggtgtggctggaacgcgagagatgatggctcctctgtcctccgtagacaacgggatggcgatggagatgtgagatctcggtgtgcgctggagggttcctttcctcgccctccgttttccccagctttttatttccgaaaggaattcgagcagtgaccctgtgaaaatgcctcgaaaaggatagggctaggaacaagctaaggcggggcacgccgcgatgcttatcttttattcatgtcagtgcttctggcgatcgatttcattctgacgactgctgctctgtgtttccctgcaaaaaaaaaattatttgtttttgcaacagaacgccgcggagaagccgcccttcttcctgccgagctggacggggatgttcgtcctcaacatgttcatcgtggtgtgggtgctggtggtcggcttcgggctgggcggctgggccagcatggtcaacttcgtgaggcagatcgacacgttcgggctgttcgccaagtgctaccagtgcccgaagccgccggtcc

SEQ ID NO: 31715 - DNA, 569 bp, Zea mays
  Clone ID: UC-ZMFLB73228F07_FLI
ggcctacaagcaggcgagcacgctgctggcgctcttcgccggcggcgacgggtacagggtggaggagaaggacgggtgcctgaccctggggtggcatacgcgcccgctcatcgccacctcggcgtggcgcgtcgccgccgccgccgctccgtgatcagggaggggtggttggggcttctggacgccgatcaaggcacacgtacgtcccctggcatggcgcaccctccctcgagctcgccggcacgggtgaagctagacgtcattgagcgctgaatcgcagttagcgaccgggccaaggttctcgccggcgtgatgagatggaacactttgactcccgcggccggatcggcctgtgttcgttcttgtttccgatctcccttctctttcccgttgcttcgatcccgtcaagtatggtagaccgtagcctattgttatgtttaaatgtcaattattatgtgtaattcctccaagcgccgatatccaataaggacgaaccggattttcgttagctcgacctcgaatgagaattttgtatacaatgcatcctcgttagctatgttcatctgttc

SEQ ID NO: 31716 - DNA, 931 bp, Zea mays
  Clone ID: UC-ZMFLB73229D02_FLI
gccgccgccgctgctcatctcacatccctcgagaagacgcctgctcctcgccgatcgatacgatggccgtcttctccgacctccacaccgccgacggcctcaagtccctcgaggctcacctcgccggcaaaacctatgtgtctggtgactccattactaaggatgacattaaggtcttcgccgcggtgccgtcgaagcctggcgctgagtttcctaatgccgcccgctggtacgagaccgtctctgcggctgtagcctcaagattccctggtaaggctgttggtgtaaatctgcctgcgggatcagctcctgcggcagctgctcctgcggatgaggctgaggacgatgatgaccttgatctttttggtgatgaaactgaggaggacaagaaggcagctgatgagcgtgccgccgctgccaaggcctcttctaaaaagaaagaaagtggtaaatcctccgtccttatggatgtcaaaccatgggacgatgagactgatatgaagaagctggaggaggctgtccgcagtgtccagatggagggtctgacttggggagcatcaaagcttgtgcctgttggatacggcatcaagaagatgactatcatgttgacaattgtcgacgatcttgtgtccatcgacactctaattgaggaccaccttacgcaagagcccatcaatgagtacgtccagagttgcgacattgtggctttcaacaagatctagagttcagtttctgagtttgggcaacggcagcggctcagctcgtcaagtttgtgctgggatgccagtttatcccttctagtctattacagaaatgttgttcggagctgagtctattataaacatcttggtctgagtttattgttgagtggtgccagtttttttcaatatacatttatcttaaaaacagcggtactgatgtttttttgtct

SEQ ID NO: 31717 - DNA, 2766 bp, Zea mays
  Clone ID: UC-ZMFLB73245F09_FLI
cccgtctggtactcgctgcaggaggtcaagagcctcctccagcggatcgacgagggcaaccgatccaccgggggcctcgccttcgtcaccaaggcatacggcatcgcaggttgcatcaagttcctggagtcatactacctgattttagtcaccaaacgccgtcaaatcggttgcatttgcgggcatgctatatattgtatagatgagagccagatgatcaccatcccacactcatcagtgcaaacagatgttgcgacctctaagaatgagctgaggtacaagaagcttttggctagtgttgatctcaccaaggatttcttctatagctacacatatccaattatgcagagcctgcaacagagtgttacttctgcagggatgaaagaaatgccttatgaaaatttgtttgtctggaacacttttctgacagagccagtacgttcaaggtgccacaatactctctggacagtagctcttgtccatgggcacttcaagcaggtcaagctatcaatttttggcagagagataaatgttgttctcagctctagaagatcccgacacttcgccgggacacggtatttgaaaagaggtgtgaatgaccatggaaaagttgctaatgatgttgaaacagagcagatagtctttgaagaagaggctggttcctggaagggaagaatgagtgccgtagtacagatgcgaggatcaatccctctcttttggtcacaagaggcatctcgacttagtcctaagcctgatatttttgtgcagagatatgatcccacatatgaagcaacaaaattacattttgatgatctcgcccggcgatatggacatcctatcataatacttaatttgataaagactgttgaaaaaaggccacgtgaaatgatgctcaggcgtgaatattgtagagctgttgaatatcttaatcaaaatgtcccagaggagaagaagttgagattcatccactgggattttcataaatttgctaaaagcaaatctgcaaatgtactgggtgttttaggaaaagttgcgggtgaagcactggacctcactgggttttactacagcggaaagccaaaagtccagaaaaaaaggttaattcagcttagtcgaactagcactgcaagggatggctcccttgatataagggccagttctggagatctttcaaggctcagggatggctcccttgatataagggccagttctggagatctttcaaggctctctagtaatgctgaggcacttagttctacaggctttcaagatatgagaaatcaggctaacaaacaagagtttcttggtgatactccctgttaccaaactggagtgctccgtacaaattgcatagattgcctggatcgcacaaatgttgctcagtatgcatatggccttgctgctttggggaggcaacttcatgcaatgggactgacagatgttttaaaaatccaccctgatagcagcattgcttctgctttgatggaaatgtaccagagcatgggtgatgcacttgctcatcagtatggaggatctgcggcacataacacggttttccctgagaggcaagggaaatggaaggctactactcagtctcgggagttcctgaaatcaattaaacggtattacagtaatgcctacactgatggtgagaagcaggatgctataaatctatttctggggtattttcaaccacaagaaggaaaaccagctctttgggagctggatactgattactatcttcatgtgacgacagctggggatgatcttatgtctgatagctaccacttgagttctgcacctggaaataatgtgttcgtggggtctggagctgcattgaaccctgggaccatattgagccctgtcccagcatgcaaagaggatttctcacggaagaagcttacttcgttcgacaaacttatagaaagaacatgtagttctataaggaatgtaaggcttcattgtgacgctgatctaaagccaagtggaggtgttggaacttctggaatggcaccagatgcagctgagatacagcttaaaagccccaactggttgtttggtcaaaggaagcatacggagacaatttcaaccgcaagagttgccccggttgaaaacgtgaacgaggggaacagagacgagtcaaatgtgtctctttgtggggaactaatttggctatcctcctcagttgaatcatgcgaggaggacattttcagaaggtaccttgcattcacgacagcggatgtagagaatggctggtatggcggaacactgctatatgaccgagatgaaaacagcggggcttacaggcactattctgagctctgccagggagctgtcatggatccctttgagcatgaccctgagaaagagcggcactacgcggaggcccttagcgtggatctcggcgatgcacgggtggaggccgaaatgcaggccgcgctggatgactaccaggtcatagggtcggacctgagcatcatcccttcgtgcggagcactcgcagaggacccgagccagctgacgaggtggatcattggagatgagaggctgcttgtgggtgctgctgcgcagtagaccggtggggttctgtcttctactcttctgtggaaggttgtacagagcaacagattgccattcaccgacccagcctttgtgttttatagatacttccctgaaacaattactccatgtatttagcagcaggtgttttatagacacttccctgaaacaattactccaacacgtgcatgcaatttattgttgtgc

SEQ ID NO: 31718 - DNA, 1149 bp, Zea mays
  Clone ID: UC-ZMFLB73245G01_FLI
cttaggcaaaacccatctggtgccatatcaggccgtcaacttggagaggcagctcaccgacttgtcataaacagcttaaatgctcagggtagggggcaacatagtggcacatcaatgccatatcgaactataatgaatggcttgcatcatctggatgtagcgtcccctgtcagcaatcaaggcatgcgtccacaagtggggcagtctgccggacctcctggttggtatgttcctaggggtagtgtatcaaatggtcaaccaccagcttatgcatcatcaggatcaggtcattatcagtatgaaagttcggggcattcacaatatgaacaaggtaaccatggaaggcaacaatctcacccatatgcaagagatggcttccatgatacacgaggaagggttccacctgcatatgggtaccagcagagcaacatgtatccatcgggtcctggattgtatgggcaacctccatcagcatatcctggggttcatggtggaggctaccaaccccctccatatggcggaggccagcagtggcagcaacaatcatatagttcgtatgccgtgcgaggcccctacggaggcaggccaccacccacaagggctgattcagggtcacagcaaccacagaaccgttatggtgctttagacagaagtaacaaccggaggccttcatctggatacagaagataatagtttgtgacccagtttatgttataactcaaagtttgttatcagtaaagcttcgagtaactcagctaaagcataggcggaatagtctgctaagtcttgtgaccttcaagcagttagggggtggccatcaaagatattgggaggcaaaatttgtatgctagtgcagactttcaggtactagcggttttgatcgccattgaagcagctaggtttgcggcatctcagaggttttgtgaagcaagatttgtatactactgttatcaacgggccatcaggtactggtggctggtcgccattctttatctgtagctgccatttgtttagaagatgtcataaacggccctggggtttaaataggtcccattgagaatatttttgaaggacgtttactctgagacttgacaagttttgggggcattttgatatcagataaatgtatgcaggagtgcagttttgatg

SEQ ID NO: 31719 - DNA, 1981 bp, Zea mays
  Clone ID: UC-ZMFLB73245G04_FLI
gcggcggcggaagggagtcttctggcggagatatgagaggattgttttagtgaggtctatgagctggtaccagaactgctcataatattcaggggaaaaaaaaggcaacatggcggaatcgaaggtcgcaagtctggatgcccgaacgacgaagatcagaaacgtccccatcgcagtgaccccagaagggttctggtgctgcccgtcgcaagccgtgctccagaagacggcgaagagccaaaacccgcaggcgaagacgaagcccaaagggggtgcctcgcctctcgcaccaaaggcggcaccaccaatccagagggcacccacaatctcgtccgagagaaggacgcactcgactccgaccagggctaagaccaactcagaggagcagaggtgcttgccgccggcagaggacgctgcggctaataataatgccactaatccgccgaaggcggtgaacgagaggccacagaagcagcacaaggtatctgtggggttcggccagctcgagacgagtgacttgaaggtggtgctgtatggcaaggacggcgttgcggtgaagatgagcgtccacaagaacaccctagctggaaacagtaccttctttgctgacaagctctccgggcagtctccggcgtcgagtatagaagtgactgactgtgaggatgtggagatttatgtcgagacagttgggttgatgtactgcagtgatgtcaagcagaggcttatcaagcaaaccgttcctcgtgttcttcgagtcttgaaggttgcagagctgctgggtttcccagcatgtgtcatgtcatgcttagactacttggaagcggtcccttgggtcggggaagaagaggagaatgtggtctcgtctgtccggaacctgcagagcgagagctatggcgtcagtcctgtgctgaagagggtagcaccatctgatcgaacaaccccaccaaacgatacgttttcacatatcatcgaactggtcttgagaagcagcgaggacagggggcggcgcgagatgaaatctctggtgcagaagcttctgaaggagagtagcactggctgcatgagtgggtcttccgacctgtgttctgcggtcctctacagatcatgccggaactgcctggattccttactaatcctgtttcagcaagcaaccgacagtgatttcgctgagcaggctcttaataccaaagaaccagttttccgacaagttgctctagaagcagataacctgctctggttagctgagatcttggctgacaggaatgccgctgacgagttcgcggtcatatgggctagccaacgtgagctggctgggctgcactctaggttgccagtcaagtcgcgccaccttgtcagctgtgtcacggcgaggctgttcgtgggcatcgggaaaggggagatgcttccttcgaaggacacgaggcggcttctcttggacgtctggttgcagcctctcatggatgactacaactggttgcagcacggctgcaggtcgttcgaccggaaagtggtggaggaaggtgttgggcggaccatcctgacgctccctttggaggatcagcagacgatcctgctctcgtggcttgggagcttcctgaaggttggggacagctgccccaatctccagaaggcctttgaggtttggtggaggagaactttcgtaaggccctatgctgagcagcaaggtaatcgatcgcaatcaggtcggagttgagatgtcaattggttgcagaagaagatagtcttgtttcctagtgtagtatatttgatgagaagttagggtggcggtttcttcttgcgtggtagcccgcgtgggagatccccagtatgtggaggaaatgcggttagtactcttgacctgcgtgaggcttgaggaagttcgcgttgtgcttgtgatgcttcgtatgtatgtcaagatctctgaattctgggtgcagaatttgtatcgtcaggcatctgttttgatgctctgttctgcttc

SEQ ID NO: 31720 - DNA, 1570 bp, Zea mays
  Clone ID: UC-ZMFLB73245G09_FLI
tatcactgtcctgaagaagagattgcatttggacctagttgttggctatgggattatttgaggcggagtcaagcatcaggatttttgcttccactttctggtggtgcggatagttcatctgttgcggcaatagtcgggtgcatgtgccaacttgtcataaaagatatagagaaaggagacgagcaagttaaggcagatgctcttcggattgggcagtataaagatggggcaattcccatggatagcagggaactggctaaacgtttgttttatactgtttacatgggaactgaaaatagttctgaagatacccgatcacgtgccaaaaggctagctgaggagattggttcattccacttgaatgtacccattgatagtatagtatctgcttttctttccttgtttgaaacattgactgggaagcgaccacgctacaaggttgatggggggtcaaatactgagaatctgggattgcaaaatattcaagcccgaatcaggatggtgttagcctttatgatggcttctctaatgccatgggtccacaacaaatctgggttttatcttgttcttggaagctccaacgtcgatgaagggttacgtggttatttgacaaagtatgactgcagttcagctgatgtaaaccccattggaagtgtaagtaagcaagatctgagagcttttttacgatgggcagcaattcatcttaagtattcttccttggccgaggttgaagctgcaccacctactgccgagcttgagccaatacgagcaaactacaatcagttggatgaaatagacatgggaatgacatatgaggagctgtctatatatggaaggttaaggaaaattttccgatgtggtcctgtttcaatgtttcagaacctgtgccacagttggtgtggaagattatctccgtctgaagtggctgacaaagtaaagcacttcttcaagtactacgccataaaccggcacaagatgactgttttgaccccatcttatcatgctgagagctattcaccagaagataataggttcgaccttcgccagtttctttacaactcaaggtggccctaccagtttcggaagatcaatgagcttgtgcaagagatggacaaagatggcaaatggggaacttctgcagaagggaagctgggagcgcagacaggtgcacagggaactggaatgggagtggtggcagcggggtctgccaatcccagtgccggcttctgaagagaaccatactaacgcgtggaagctagttcctccagtttttcggccttgacagaataatgcaccagccgtccagcccccaccccaggacacgggctgctaatgttaatttgtctgcttggttcccttgtactgcatcacttctccctgctagagagctggaatccccacaaaattttaggctaccagttctgtttcttccatttgtcatagtacgatctacaaagtatcaaccaaagaacatgtgaaaaataagatggaatccctttaatcagattgtttgtccgaagtggcatggcgatgaaaaggaaaacatcagtataaagaactagttactcat

SEQ ID NO: 31721 - DNA, 1334 bp, Zea mays
  Clone ID: UC-ZMFLB73245G12_FLI
gtttcaatatttgttgcggtgcctcaaactatgggcaagaaaaagaggacttcattgccatctacttggcttcttcgctggaattcatttggctatccttgctgcatatgtttgccgcagacatccgaatgctagtataaatactctgttgtctttgttcttcgacatttttgttcactggccttggcctcttccagtgagtttgcttgatccgcctgttccttgtcggggtcctgatgggtgctccctcatgcccataatgttgccatgtattccaccagaattttgctcctctagtacaacagaaagtactttcagcaaaatcaaagaagaactttggcgtggctatgctctaagcaaggataccagaagtactgattttaactggagttggctctttgcaccttttccatatggtgcaagatacaaatgctttctccgcatagttctctctgctccgatgggagaagaattgcgtgactgggttggatgggtgaaatcacgattccgcaaccttcttctcaagctggagagtcttggtgtttactgtgaccctgatccctcagaacaagttgatcataccatcactgatccaaatgttgtattcttctggggtctcatctatagaaggaatattcaaatatgtataagttctctcaaagaagatttcatgaaaagtgtctgcaataacatctatggaaaggaaaaatgtgcccattcagacatcacaatgtccattgttgggcctccccagctgccaaaaagtgtctttgatctctcagtttactctgaaaagctgccacaacatatgatggggcaccaactaatgaagcagaactacaatgcagtcagttaggctcagctgtcatattgcgtgcgagcttcatatgtcaatatcacaacagcaagaagctgctgttgaagtcgttttcaacatcagatttgaatttttttttactgccctttttagatgtaggggcttgttcatgcctcgggaacaaggaatatgggagattttttccttgtgaagctggatgtcgatagctggatctcttcaagcatccagcaaaatgagatggaagcatctcttgaagcattcaagcgacttattcctgttatgaggtgtgtgtgcaggtacatgcatattcatgtacacatcatagcaattggtatacaagtgaggaggaggtacggtatagctgtatgtaaactgtagatgtaatgtttgtactcagcagcagaaatgtgtaaattgcttcctgttagcgctgcttctgggcacagatgctgaggttgatatggaggccatgaatggaagctatatattccaggcc

SEQ ID NO: 31722 - DNA, 1117 bp, Zea mays
  Clone ID: UC-ZMFLB73248F11_FLI
cacaccgggcacaccccccgagctcagcttagctccactccagctccaatcacagtcgtgaccagagcgcgagagctagctagagggccgtgaaaatgccgatcaataggatcgccctggggagccaccaggaggtgtaccacccgggcgccctcaaggcggcgttcgctgagttcatctccaccctcatcttcgtcttcgccggccagggctccggcatggccttcagcaagctgaccggcggcggcccgacgaccccggcgggcctgatcgcggcggcggtggcgcacgcgttcgcgctgttcgtggcggtgtcggtgggcgcgaacatctccggcgggcacgtgaacccggccgtgaccttcggcgccttcgtgggcggcaacatcaccctgttccgagggctcctgtactgggtggcgcagctgctggggtccaccgtggcgtgcttcctgctccgcttctcgacgggcgggcaggccacgggcaccttcgggctgacgggcgtgtcggtgtgggaggcgctggtgctggagatcgtgatgaccttcgggctggtgtacacggtgtacgcgacggcggtggacccgaagaagggcagcctgggcaccatcgcccccattgccatcggcttcatcgtgggggccaacatcctggtgggcggcgccttcgacggcgcgtccatgaaccccgccgtgtccttcggccccgccctcgtcagctgggagtggggctaccagtgggtgtactgggtcggccccctcatcggcggcggcctcgccggcgtcatctacgagctgctcttcatctcccacacccacgagcagctcccctccaccgactactaaaagccgaagccgaccgacccaggggtgcgcagcgcagcgcagctagcatccagcgctctctccccgctcgccgccgtttagtttctctcgtgcacgtgcatgcatcgtagactgtctcaggccgccgctgcgccggcgccgctcgcatcgtttgcttccttggaccagcagtcgtcgccgtcaggctgaactgcttgtaaccgtgaattccggacccgtttgcttctgtaagatttgtgcatttgcctgagtacacctcgatctgcagc

SEQ ID NO: 31723 - DNA, 969 bp, Zea mays
  Clone ID: UC-ZMFLB73248G10_FLI
gcctttcctcgtcaagggcgactacagggcgctgtacaagtacttctccacggtggcgaagcaggcgctggacaccgccgagggcctgggcctgtcgcgcgaggaggcctgccacaacctcctcttcgccaccaccttcaacagctacggcggcctcaaggtgctgttcccgggcctgctggccaacgtggccagcggcggcgagaagctccacgagcggctggtggccgagatccgcggcgccgtggccgacgccggcggcaaggtcaccctcgcggcggtggagaggatggagctggccaagtcggtggtgtgggagtcgctgcgcctggacccgcccgtcaagttccagtacgggcacgccaagaaggacctgctggtggagagccacgacgcggtgttccaggtgaggaaaggcgagatgctgttcggctaccagccgtgcgccaccaaggacccccgcgtgttcggcgacacggccggggacttcgtgcccgaccgcttcctcggcgaggagggcagcaagctgctgcagtacgtgtactggtccaacggccgcgagaccgacaaccccagcgtcgacaacaagcagtgccccgggaagaacttcgtggtgctcgtcggcaggctcctcctcgtcgagctcttcctccgctacgacacattcaccgccgaggtcggcaaggagctgctcggcaccagcgtcatcttcaccggtgtcacgaaagctacctccggtccgggcagcgagtaaaccgcccggccggcgcgcgtcgttggatatatgatgagtggacgtgacagagtgtccgactatttcttaatttcgtcattttcctccttccttctaataagatttctctctcaccctcggccccccttcacgtgcgattgtaggtgtttgacgcttttgtaataatgcatgctggcatgttgcataaattgctccccaaaaaaatcttatctttc

SEQ ID NO: 31724 - DNA, 3740 bp, Zea mays
  Clone ID: UC-ZMFLB73256H10_FLI
gccggcgagcggcagtcgacgcggatgcggatccggtacctggacgcggcgctgcggcaggacgtgtccttcttcgacaccgacgtgcgggcctcggacgtgatctacgccatcaacgcggacgccgtggtggtgcaggacgccatcagcgagaagctgggcaacctcatccactacatggccaccttcgtggccggcttcgtcgtggggttcacggccgcgtggcagctggcgctggtcacgctggccgtggtgccgctcatcgccgtcatcggcgggctgagcgccgccgcgctcgccaagctctcgtcccgcagccaggacgcgctctcgggcgccagcggcatcgcggagcaggcgctcgcgcagatacggatcgtgcaggcgttcgttggcgaggagcgcgagatgcgggcctactcggcggcgctggccgtggcgcagaggatcggctaccgcagcggcttcgccaaggggctcggcctcggcggcacctacttcaccgtcttctgctgctacgggctcctgctctggtacggcggccacctcgtgcgcgcccagcacaccaacggcgggctcgccatcgccaccatgttctccgtcatgatcggcggactggccctcgggcagtcggcgccgagcatggccgcgttcgccaaggcgcgtgtggcggctgccaagatcttccgcatcatcgaccacaggccgggcatctcctcgcgcgacggcgcggagccagagtcggtgacggggcgggtggagatgcggggcgtggacttcgcgtacccgtcgcggccggacgtccccatcctgcgcggcttctcgctgagcgtgcccgccgggaagaccatcgcgctggtgggcagctccggctccgggaagagcacggtggtgtcgctcatcgagagattctacgaccccagcgcagggcaaatcctgctggacgggcacgacctcaggtcgctggagctgcggtggctgcggcggcagatcgggctggtgagccaggagccggcgctgttcgcgacgagcatcagggagaacctgctgctggggcgggacagccagagcgcgacgctggcggagatggaggaggcggccagggtggccaacgcccactccttcatcatcaaactccccgacggctacgacacgcaggttggggagcgcggcctgcagctctccggtgggcagaagcagcgcatcgccatcgcccgcgccatgctcaagaaccccgccatcctgctgctggacgaggccaccagcgcgctggactccgagtctgagaagctcgtgcaggaggcgctggaccgcttcatgatcgggcgcaccaccctggtgatcgcgcacaggctgtccaccatccgcaaggccgacgtggtggccgtgctgcagggcggcgccgtctccgagatgggcgcgcacgacgagctgatggccaagggcgagaacggcacctacgccaagctcatccgcatgcaggagcaggcgcacgaggcggcgctcgtcaacgcccgccgcagcagcgccaggccctccagcgcccgcaactccgtcagctcgcccatcatgacgcgcaactcctcctacggccgctccccctactcccgccgcctctccgacttctccacctccgacttcaccctctccatccacgacccgcaccaccaccaccggaccatggcggacaagcagccggcgttccgcgccggcgccagctccttcctgcgcctcgccaggatgaactcgcccgagtgggcctacgcgctcgccggctccatcggctccatggtctgcggctccttcagcgccatcttcgcctacatcctcagcgccgtgctcagcgtctactacgcgccggacccgcggtacatgaagcgcgagatcgcaaaatactgctacctgctcatcggcatgtcctccgcggcgctgctgttcaacacggtgcagcacgtgttctgggacacggtgggcgagaacctgaccaagcgggtgcgcgagaagatgttcgccgccgtgctccgcaacgagatcgcctggttcgacgcggacgagaacgccagcgcgcgcgtggccgccaggctagcgctggacgcccagaacgtgcgctccgccatcggggaccgcatctccgtcatcgtccagaactcggcgctgatgctggtggcctgcaccgcggggttcgtcctccagtggcgcctcgcgctcgtgctcctcgccgtgttcccgctcgtcgtgggcgccaccgtgctgcagaagatgttcatgaagggcttctcgggggacctggaggccgcgcacgccagggccacgcagatcgcgggcgaggccgtggccaacctgcgcaccgtggccgcgttcaacgcggagcgcaagatcacggggctgttcgaggccaacctgcgcggcccgctccggcgctgcttctggaaggggcagatcgccggcagcggctacggcgtggcgcagttcctgctgtacgcgtcctacgcgctggggctgtggtacgcggcgtggctggtgaagcacggcgtgtccgacttctcgcgcaccatccgcgtgttcatggtgctgatggtgtccgcgaacggcgccgccgagacgctgacgctggcgccggacttcatcaagggcgggcgcgcgatgcggtcggtgttcgagacgatcgaccgcaagacggaggtggagcccgacgacgtggacgcggcgccggtgccggagcggccgaggggcgaggtggagctgaagcacgtggacttctcgtacccgtcgcggccggacatccaggtgttccgcgacctgagcctccgtgcgcgcgccgggaagacgctggcgctggtggggccgagcgggtgcggcaagagctcggtgctggctctggtgcagcggttctacgagcccacgtccgggcgcgtgctcctggacggcaaggacgtgcgcaagtacaacctgcgggcgctgcggcgcgtggtggcggtggtaccgcaggagccgttcctgttcgcggcgagcatccacgagaacatcgcgtacgggcgcgagggcgcgacggaggcggaggtggtggaggcggcggcgcaggcgaacgcgcaccggttcatcgcggcgctgccggaggggtaccggacgcaggtgggcgagcgcggggtgcagctgtcgggggggcagcggcagcggatcgcgatcgcgcgcgcgctggtgaagcaggcggccatcgtgctgctggacgaggcgaccagcgcgctggacgccgagtcggagcggtgcgtgcaggaggcgctggagcgcgcggggtccgggcgcaccaccatcgtggtggcgcaccggctggccacggtgcgcggcgcgcacaccatcgcggtcatcgacgacggcaaggtggcggagcaggggtcgcactcgcacctgctcaagcaccatcccgacgggtgctacgcgcggatgctgcagctgcagcggctgacgggcgcggcggccgggcccgggccgtcgacctcgtgcaacggggccgcgtaggacggaatggatggatggatgggtttggttcctcgagagattgatgggtgaggaagctgaagctccggatcaaatggtggtactccatgatcgcaacaatgaggggaaaaaaagaaaggagaaaatacggtggttcatatgattgtacaatttgacgatctgtttgagtcggggttttaggatgatgtaaaccttcactcgccttttttttactcttgtttctc

SEQ ID NO: 31725 - DNA, 2776 bp, Zea mays
  Clone ID: UC-ZMFLB73265G01_FLI
cccaagatggaaggggttacaaactcagtattcattgatccaactggcttgcatcagcatgtgtatgtgcagcagcagcagcagcagcagcaaatgccgccacaacagttgccatctacctatgggtttagccatattcctgtgatttctagcgagaaggacagagtagtttctccaagttctgcccacaatgatgttgcaaactctcatcatcaatttatgcagcagtcgcagcagcagttaccttctggccatgggatgcctcagtatccagtgaagcctactagtcccagtaacccgcttgctggtgaaggtagtgtaagtggcaattcaaggcataatgaggatggacaggtgtatcgtgacaatatgcctccggttgcacctgtggctgtgccaacatacatggcaaatgtggacaggatgatggattcactccgtatgagccccagcgaagtttctggctctactgaacaaaggaaacatgcaatgtctcctgacagtggcttaccccagaatgcagtgccagattactctcaggggcatccagagaatagtatcagtacctggccagatacacgagcaaatgatgttcatccaagcaacaccaatactttttttgatgttagtgaaccaaaggtattgcttcaaactgaatctgcgccaccaccttctgttgccagctcttatctgcataatgtccagcatgttaatatgagtcatatgccacatatggtgagcattgggggaccctattctagctatgttgttgctacagtcggacctggtggattgcctcaatcaacttatggtattgatatgatctatccaaatgccactgttaatccagtgactgagagaagagatgtcccgcctgaagtttatcacaaggaagctccacatgaagtcgtagctcctccaaacacagttcagttgccgacagcagcattggcaaaccatgctacaaatgtggatcaagcagctgcacatgcactgccaccaagacctaagagggtagcaagcagagagaacatcagcccaaaggatccgcacccacacaactctttgttgaactgcaaagggccagatctgaatattccagctgaggatgtttctctccagaaacagtcagatcacaaaggtgatgacatctctaacccagatttactgagtatggatgatgggttagctacatctaaagctcagtcatctgagcctcaacctcctctggtaaatgaaggagttggggcaattaccaataaagtagaaggtgaagtccaccccaacgaggtttccaagagcaggccagcagattggatttcaggatttccagcttcagatggacgtctgcagattataaagaacaatgaccttgaagagctccaagagcttggttctggaacttttggaactgtctatcatggtaaatggagaggcactgatgttgcaataaaaagaatcaatgatagatgttttgctgggaaaccatctgagcaagaaaagatgcggtatgacttctggaatgaagcatctaaacttgctgatctgcaccacccaaatgttgtcgcgttttatggtgttgttcttgatggacctgggggatccattgccacagttacagaatatatggtcaatggttcacttaggacagctttgctaaagaatgccaaaaccctcgatcgacgcaagagattaattattgccatggatacagcctttggaatggaatacttgcatagcaaaaacattgtgcactttgacttgaaaagtgacaatttgcttgttaatttaagggaccctcagcgtccaatatgcaaggttggtgatcttgggctttcaaaagtgaagtgtcagaccctcatctctggaggtgtccgaggaacacttccatggatggccccagaacttctgaatggtagcagcagcttggtctcagaaaaggttgatgtattctcttttgggattgttctctgggaactgctaacaggagaagagccatatgcagatttacattatggtgttataataggtggcattgtgagcaacactctacggccgccagtgcccgactcctgcgaccccgagtggaggtcactgatggagcaatgctggtcaacagaaccatctgagcggccaaacttcacagaggttgtgaataggctgcgctccatggcggcatcccagaaggtacaacaacactaagggaccatcggcacgcagaagttgtaccagggcagcagtcagtcaaacttgcaggttacatccatgggccgccaattcacgccatccgccatatatgcctaggatctgttcataacccttcatttgttcgtatattgtaatcaaaagttacccgccgtgtgtctacaacgtgtcgtcgcaatggacgcagcaggtgcctgcctattcattcattcataccgttttggtcgtcgagaggtgcgttcaataagttactagtccagtgtccgttataggggagtccggtagtgtccgttataggggagtccggtattattattattattgtttcatcttcttcttcgccctttctctgggtaataattgggttacttggaaactgttgatcagtgggtcagttagaatgtgaactggttgttgctgggtaagtatgtggtttgttggtatattgagtctggggacagagagtgaggtcctgatctgcttgtaacagtacctgctttggttttgtgattgctatatactgaaacccaaatccctctgttgctattctaaattctgagttgtttggtgc

SEQ ID NO: 31726 - DNA, 851 bp, Zea mays
  Clone ID: UC-ZMFLB73208D10_FLI
gttcgaagcaaaaagagcgaacacgagcacgaacacaagcgcagagcagccaagcgccacacacacgccgacgcgaaccaaccaaccagctggtagtaggttcgccgcgctgacgatgatgcctcgccgcgcccttctcttcgccgcggtgctcctcgcggcctccgccgccgcggtctccgggttccacctgggaggggacgagagcggtctcgtgaggggtgtgctcgccgcgctccgcgagcgagccgaggccgaggacgccgctcgcttcgccgtcgcccactacaacaagaaccagggcgccgctttggagtttactagggtgctcaaatccaagcggcaggtggtgaccgggaccctgcatgacctgatactggaggcagctgatgctggaaaaaagagtgtgtacagagcaaaggtttgggtgaagccgtgggaagatttcaagtctgtcgttgagtttcgccttgttggagactctgaatctgaacccgagccttctgttgcttctgatgttagttctgggcaagcaattgccaaactctctcttgaagcagatattgtacaagaagaggctcgcctgcacaccattgagaatgatgggctttccggcgatttcacatcatcatcttaggattccaggcaaggatggaaagcgtaaaggtttaaaatgaagatttaggtatttagagtatgtcaagctgaaatgctttgccttgtttattggaatatgtatgtttcgtttcaaacgtgggagcatagaactgtatatttcggtatttcacactgttcatttccatgtctgtatataaggaggttcttctggctatatatatattttgatcctc

SEQ ID NO: 31727 - DNA, 1445 bp, Zea mays
  Clone ID: UC-ZMFLB73208E07_FLI
gcagctgccgcagctctcgtacatcgatgcgatggccttgatacaggggaagagaaagaaggactatctgcctgaagaagccgaagtcctcaggaagttcgatgagcggttaggcaggctgagctttggcctgtgggttgtcggttcgctgctttctgagctcatgatcgctccttcaactctgtttgaggccgttgatcgaatatcgctgaacgagaatctgttccccattggcgccaacgacgatggattctgccgcaacaattctttcttggtgaaggtcttggtcttctgctttgctctgatggaccgagcaaaaggaggaagccttacgtcaaggatggtcatcgctggttcttggttagctccaactcctgtatcgtccacgctactagctgcaaccgcgagcaagctaccgatgaaaggcagtggtatgcacctgtttggtgaatctctcaggactgcatttctatgtggcacacattgtttcctagctccaaacgggcggaaggctgaggtggagtcggcgctcttgcttgtcaaccttgggttggcaaggaaggcaaacaggcatcctggttgctggatccagttccatcctatcacgcagctcttcggcaagatcaggggaggtttggtgcctacgactgcagcagtgaatggagtgatgaggactggaaacccctcggtatactctgaccacttgtgggctagcgcgttcctcgtgtttggtttcaagtccgagccgcccgccgtccagcttaaggcggtcgacatggtcctcttcatcaagaagacggcgctgcccctcgcggtcgactccttcatgtcgttctcgcggtgcggctcggctctggagctgctcaaggtgtgcacgaacgtcctggaggaggtggagaagtcgtacgcgtcgcggatgcaggactggagccgcgggtcgctgtgctggaggaagaagctgcagccgaaccaccgcgtcgacgagctcgtctggcaggaggtgacgctgctcaaggcgacgctgctggagacgagggcgaagctgctgctccgcggcgggctgttcgacacgggcgaggagctgtgcaggacctgcatcagcatccggactgtcatgctcggccacggccacgcccagacgctagctgctcaggagacgctggcaaagctggtcaggtataggagcaaaatatgagatgagatgatggtgtccaagaccctttgcaagcttcttcccccctgctgtttcagaagttttcacgcccccatttttgttcctgaatctgttatgccaccggctacagttttgttagcgatcatcagtataatagccaaggtccatgatgccatgtgtaacttattttagagcaggtgccatatgtaagtggaggtgttatgtacagtgcagtccatctgctatttggtagaactaccattgagcttcc

SEQ ID NO: 31728 - DNA, 1313 bp, Zea mays
  Clone ID: UC-ZMFLB73208E09_FLI
ggaaacgagaatggaaaattaaatcgcatgacatacgatgctgcatgtctcatttttatggtttgtgtcttcagaaaacctcatacgatgcaaatatggacgtgccatctgtagacccttcagctgctatttcggaacggcccagtccagtttctgtgttggactcttcatttgatcaggaggatttgttccctaccagcaggactccaaattcacttgctgttgatgatgagcgcgaaacattagaggaaccctggaaaccatctgtcgctatacagtccaagaacaataaactcgcaaatgttgcgagcttgcttgagaagctccagcagcttagcgtgaacaaggatgaggatgcacctccggttgaccatattgctttcttgtgtgagacagagagcccagaccaccgctacgtgtctgagatactgctggcctccggtcttctgatgaaagacctaggttcaggacagacaggtctccagctccactcctctggctacccgatcaaccctgacttgttccacgtgttggagcaaaggaaggctggatgggtcagtacacctgatggcatccatcagagcagaagcggcacaaaatctgatcccaggagagcgcaccggaagctgatgtttgacactgtgaatgagcttctccttcagaagtttgagaaggaaaccgccgtttatgcgctcagttccttcaccagagcgaaggatccacctgcaaagacttttagcgggcaacagctgccgaagttcatatcttcgggaattgaagaactggatatggagcgatcgtccatcagccagaaggacagcagcgtgatacctgatgcagagatcctgcggaggctgcagggatggacgagcttcagcaaggagctcccggggatggtgctggagatcgaaaggtcgatattcaaggagctggtggacgaggtggtgcatggggagtctgctgacggcccggagatgaaggctgctggcagacggagaaggcggctctttgcttgatacggtttgtttgaccatcgccatccaccatttggatgggcctgatttgtgaagctgtaactttgtttgtcttgccatgagagtgagaccctatttcatctcaagagaagagggagagagagggggtagcgcagatttggtgagagacccgaaaatgggcattcgttcgtgctatatatagatactatgtataccattgtttcttgactccttgtgatttactgtggatgatgctatttcagtaaaaaaaatggacgaatgacagttgttttttgccatgtaaaaggcaaattatat

SEQ ID NO: 31729 - DNA, 919 bp, Zea mays
  Clone ID: UC-ZMFLB73208F09_FLI
tctggtctcgccgggcctggcggcgagggagagatggggaagaaccaggcgtacaaggcgatgcagcgggcgcggttggggtcctcgtccggcgcgccgggcgccgccgacgcccccgaagacggcatgacggacggttcattccattctccagagtggcatgcggcgcgcctggccagccttaacaagacgcacaccctcacctgggaggagttcaagaagaagcagaaggaagaggaactgaaaaggggcgagctggaggctgacaaagacaaaatgatgagagagtatagagctcaactggatgctgaaagagctcaaaagctagcaaacggaagaaatcactcaaggtcaaactcaaaatcatcatcttccaagaaagagaggaaggataaggacgcaaagaaaagaagtaaaaagaggagaaagcacaaaagttcatcagagtcaagttccagctcatcttcagaatcttcaagcagcgacgatgaggataggggttcaaggaagtccagatcacggtcgagatcaaagagaacaaggaaggaaaagaagagccggtcaaggtccaagcgcagaggcagtgaaagcgaggaggaaggcccggtacgcctctctaaattcttcgggaagtaaggagtagacgccgctgtacccaagacgcctttttcattttgaaacgtagattggtgggtttggatgtatcattcaacacaaattacttctgaaggttgagcgagccgtttaccatggtgttctcaatatgatgctcagctgttaagagggtctggtcaagttgtgtggcttctaaaaactttgtaagcaactggtaagtcattgttaaatcgctgtaccttggaggatttgatgccatatatttgagacattgaactgctatatttatgttaagactttacat

SEQ ID NO: 31730 - DNA, 1158 bp, Zea mays
  Clone ID: UC-ZMFLB73208F12_FLI
ggtttctggtctgagcccttcaactgaatacttcttcaaggttttgccttttagcagcgtacaggggtttactgagtgggaggcaaaatgcagtacacgcagcctggaccatggcagcagccagtgctcaactcagaactctgagagcatgtgcctcaaagtggatccaatgcagcatcagaaaaaggatttgaatgtgcagaatcatcagagaactattcaatatgattcacctaaggggtctacaaattcaagtgagaacaatttattgtgtgaccggtattccaagcgggctaaggttgcaaggctagatggtgcaagtgacaatgatgaaagccagttgccgccaacttctgaagttttaccgtttgcaagctccaactactctccttccgaagctccaagtaaacctgacttgcttattggcaccccagattcggcatccaagaactatgtggagcagcagtacgagtactgtgtgaaggtggtcagatggttggagcatgaagggcacatggacaatgacttccgtgtgaagttcctcacttggttcagtctgaaggcaacagcgcaggacaggcgaatcgttggcgccttagtagatgttcttatcggtgatcctgcaagcttggttgcccaactggttgatgcattcaaggatatcatctacaccaaggagaagccctttcaaacacaacagaaggatgcacgctgcaagatttggcactagaaaccttcataactgctctgtgtcgctgtgtgacatcatttttctggtaattttctggcgactgaatgatgaactactgaagttatatcacctagcagattgcgtgcggattctgttgagatggatattgtgcactctcttaaaggttataagatgctgtagatgcttcatttggcattcaggtccatcagatctctcatttgttcattcaaattcagtcggtaggcagactattaatccatgaagacaatcatggtggaaccatgtgctggtaatcatgaatcggttctgagtttaggtttcgactagtaagtagttgaagcttgttagcagacaagcaactgtattcatatgtggaatgctatggtggatctgcaagctaactattgtgaattcatatcatgacttaagagatgtttattattatt

SEQ ID NO: 31731 - DNA, 891 bp, Zea mays
  Clone ID: UC-ZMFLB73208G09_FLI
cgctccgcttcccgctcatcgccaagcccctcgtcgccgacggcaccgccaagtcccacaagatgtcgctcgtctaccaccgcgagggcctcggcaagctccgcccgccgcttgtgctccaggagttcgtcaaccatggcggcgtcatcttcaaggtctacgtcgtcggcggccacgtcacttgcgtcaagcgccgtagcctgcccgacgtgtcccccgaggatgacgcatcggcccagggatccgtctccttctcccaggtctccaacctccccactgagcgcacggcggaggagtactacggcgaaaagagtctcgaggacgccgtcgtgccgcccgccgcattcatcaaccagatcgcgggcggcctccgccgcgcgctgggcctgcaactcttcaacttcgacatgatccgcgacgtccgcgccggcgaccgctatctcgtcattgacatcaactacttcccgggctacgccaagatgccaggatacgagactgtcctcacggatttcttctgggagatggtccataaggacggcgtgggcaaccaacaggaggagaaaggggccaaccatgttgtcgtgaaataagatgatgattgatggcactggatatctggcgaatgctgctgattctggatgcagaattcgatgaggggatttagttggttgtagtatctggcgaatgctgctggttctggatgcagaatttgatgaggggatttagttggatttcaacccatagcatgccgaggacctcctagctctttccaaaccagttgtttaggtatcttttctgggtaagtcagcttcatctagtttagtctgtctgaacaaaagagtgggacatgacccaaacggaattctaatgaaaaacgagctctctatctgc

SEQ ID NO: 31732 - DNA, 1763 bp, Zea mays
  Clone ID: UC-ZMFLB73208H03_FLI
attccaaaacatcactccctcgcgaaccccaagaactgcagcgacggcaatggcgatggcggcggagggcgcggcgagcgagccagagctggtgtcgatcccggcgacgccgcacggtctgtcgacgccggagggcgcggccacgccgaccggagcgggcgggggcggcggcggcaggagcaagggctccgggaccccagggcgtcgcgtggtggagggcctgcgcgggtacctggaggacgtgggccacctcacgcgcctcgacccgcgcgacgcctggctgcccgtcaccgagagccgcggcggcaacgcccgctacgccgctttccactccctcaacgccggcctcggcttccaggcacttctcctcccgctcgccttcccggacctcggctggagctgggggataatttcattgactattgcttatttctggcaactgtacacactgtggatcctagtgaagcttcatgaggctgtgccaggcaggaggtacaacagatatgttgagcttgcacaggcagcatttggagaaaaaatgggaatgtggctggctcttttcccaactatttatctctcggcaggcactgcaactgcactgatccttgttggaggggagaccatgaagctgttcttccaaatagtgtgtggcccactctgctcgccgaatcccattacgacagtcgagtggtacttggtgttcacatccttggcagttattctttcccagcttccgaatctcaattcaatcgctggtctttcactcatcggtggggcgactgcgataatgtactgtaccatgtcatgggttctctctgtcagccaaccgcggccaccgacagtatcttatgacccagtgacatccaattctttcggtttatccctattctcaatcttgaatgccctcgggataatagcgtttgccttcagagggcacaatcttgctctggaaatacaggcaacaatgccatcgactttcaaacatccagcacatgtgccaatgtggcgtggggccaaagtagcgtatctcctgattgcaatgtgcctcttccccgttgcagttggaggctactgggcctacggaaacatggtgccaccaggagggatgctggcggcactctacgccttccacagccatgacatctcgcagggcgttctcgcgacgacatgcctcctcgtcgtgctcaactgcctcagcagcttccaaatttactccatgccggtgtttgacagctttgaggcctactacaccggccgcaccaaccgcccgtgctcggcatgggtacggtcagggttcagggtcttctacgggttcctctcgctgttcatcagtgtggccctgccatttctctccagccttgccgggctgctgggcgggctcaccctgcctgtgaccttcgcctacccgtgctttatgtggatctgcgtcaagaagcccgagaggttcagcttcagctggtacctcaactggggccttggtctgctcggcacagcgttcagtctggcgttctcgctgggtggcgtctggagcatagttaacaatgggatgaagctcaagttcttcaagcctaactaggtacatagattgctcgcttgctccaatctgcatgcaagttattagaagaaattagtcgtggaactgaatgttacatattactactacataattatgctgtatgacgactcctacattggcttggtaagaacaatggcgtgtatgtaagttaatgtctgagaaattcgaaatctgaggggctttgcgt

SEQ ID NO: 31733 - DNA, 1883 bp, Zea mays
  Clone ID: UC-ZMFLB73208H07_FLI
gttcccgagcccccctctctgcccttccgggtccgggcgcccggccttcgcttgcgccactcccgtggcgcccacggccgcgcacgcgtggtcgcctcccctcggcctcgcctgcaaccgttcccgccggcctcccgcgtcgcggcgcaagaggataccctggatttcgtccgtggcgagtggctaccgcttgtgctccttttgtgacagctgaatctttgtggttcgaaggcgattgacttgggttcactgacgcggtgacgcccaatgagctcccacgtctccacatcgcggggtcttcatcccccaggcaagcttgggacgttggactcacccggtgcgtggcagccgccagcacctatggctcagcccgaagcaggccgcggtgatgaccaggaggtcaggctgttgtcggttgcttggaatcaggattgtggatgctttgctgccggtaccagtaacggattcaggatctttaattgcgagcctttcaaggagactttcaggagggatctcaagagcggcgggttcgcgattgtcgagatgctgttccgttgcaacgtccttgctcttgtaggtggtggctccaatgtgctgtacccgccgaacaaggtgattatctgggacgatctcctgagccgttgcattggggagttcgcctttcgctctgatgtccgagctgtaaaattagcaaaggactacatcgtgattgtcctcgagcgcaagatatttgtctacaacttcaccgatctgaagctgctctaccagattgacaccctgtcaaatcccaatggactttgctgcctctctcatcattccaatacttcagtgttggcctgccctgggttgcaccaggggcatgttcgcgtggagcatttcgggctgcagatggtgaagacaatcccagctcacgattcacacatctcttgcatgtcactgacaatggatggtctcctgctggcaacagcgagcacgaagggcactttgattagaatattcaacacaatggatggcactcgtctacaagaggtacgcagagggcttgacaaagcagaaatatacagcattgcattgtcgcccaatgtgcagtggttggcagtgtccagcgacaaagggactgttcatattttctccctgagagtcagagttgctggagtggattcaagcaatgagcaacgcgctcttgaaggtccacggatggatcaccagaactcttccagttctattgatcctcttattcaggcgaacactggatccaatgctagttcatcactgtcttttatgagagggatcctgccgaagtatttcagttcagagtggtcatttgctcagttccatttaccagaagtcactcgttacatagtagcctttggtgcccagaatactgtgatgatggttggcctggatggcagcttctacaggtgcagctttgaccaagcgaatggagggcagatgttgcagagggaacatttccggtttctcaagtccgacagcccacctttcaggactgcagccgcttgacctgcagcacaaggatcatccatcccaccatgtaaatgtcgaaggtccactgtacatatcgccttctcgccggcgaagttataggcagccggaataaggagagctggctgttggatcgaagcctacaggattccaacgttcggatcggcgccccgtccaaattgcaggcatttctttgccgttccctcttctatcttcaaacgagaacacacacccattgctggtacagaacatgacataaaagattcagtaacgtgatatttgaccgtgtggctttgtggtgcctgcaaggccgtgtagcgaatctcagacctgttcttgccggtggcttgttgatgctgatgactgttacgcactacctc

SEQ ID NO: 31734 - DNA, 1110 bp, Zea mays
  Clone ID: UC-ZMFLB73210A05_FLI
aagggttactaccgggatgtttggcctccaacggaagatatagcgaaggtggcaaagtcaagttgtgcttccggacatgttcaagagcacatatgagtccatcacccaaggaactcctatgtggattgagctgccagtctcaacaagcactctctatccttgggatccatcatctacatacatccatgagcctccttacttcaaggatatgacaatgactcctcttggcccgcgaccagtgaaggatgcatattgccttctgaactttggtgacagtatcacaactgaccacatctcgcctgccggaaacattcacccagacagcgcagctgcaacatatctgaaggagcgtggtgttgaaaggaaggacttcaactcatatggtagccgaagaggaaatgatgagatcatggctaggggaacctttgccaacattcgtctcgtgaataagttcttgaagggtgaggttggacccaagacaatccatgttccatctggggataagctttcagtttttgatgctgctatgaaatacaagaatgaagggcatgatactattatcctggctggtgccgagtacgggagtggtagctctcgggattgggctgcaaagggcccaatgcttcagggagtgaaggctgtgatagcaaagagctttgagaggattcaccgcagcaatcttgctggcatgggaatcatccctctatgcttcaaagcaggggaggatgcagacaccctgggcctaaccggccatgagcgctacacggtccaccttccaaccaatgtgagtgagataaagcctggccaagatgttaccgtgacaactgataatgggaagtcgttcacttgcacactcagattcgacactgaggtggagcttgcttactacgaccatggtggcattctaccatatgtcatcagaaagattgcggaacagtagattgagatgattgcgatgcggtgaatcgtaattggtgtaaacgacccatttttgagtacttataataacctctgagtttctcagagtgagctgtctgaacttttagtaaccttttgctttctttaagacactgttaataatatgttaactcctgcaatatctgaatatac

SEQ ID NO: 31735 - DNA, 2893 bp, Zea mays
  Clone ID: UC-ZMFLB73210B04_FLI
tcttcgagcgccggtttgcctcagccgcgaccaggaactcgtacgatgaaatactgacgggcctcgggaggccaggaggcggagaggagtttggcaagtactacagcctgcctgctctctccgatccgcggattgatcggctcccatattctatcaggattcttctcgagtcggcgatcaggaactgcgatgatttccaggtcaccgggaaggatgttgagaagatcttggactgggagagaagtgcaccgaagcaagttgaaatcccgttcaagcccgcccgtgtcctcctccaggattttactggtgtcccggctgttgtcgaccttgcgtgcatgagggatgctatgagcaaactcggcagcgacccgaacaaaattaatcctctggtacctgtagaccttgttattgaccattcagtacaagtcgacgtggcaagatcagcaaatgctgctcaggcaaatatggagcttgagttctatcgtaacaaggaacggtttgggttcttgaaatgggggtcctctgcattccgcaacatgcttgttgttccacctggatctggcattgttcaccaggtgaatcttgaatatctggcaagggttgtgtttaataatggtgggatcctttaccctgacagcgtcgtaggcactgactcccacacaactatgatagatggtcttggagttgctgggtggggagttggtggtatagaggcggaagctgcaatgcttggccagccaatgagcatggtcttgccaggggttgttggcttcaagttatcaggcaagctgaggaatggagttacagccactgacttggttctaacagtaacccaaatgcttcggaaacatggtgttgtcgggaaatttgttgagttctatgggcaaggcatgagtgaattgtcacttgctgatcgggcgaccatcgcaaatatgtctcccgaatatggcgcaactatgggtttcttcccagttgatggaaagacgctggactatttgaagcttactggccgaagtgatgatacagtggccatggttgagtcctacctgcgtgcgaataagatgttcgttgatcacagccaggctgaagctgaaagagtatattcttcttatctagaactgaacctggaagaggtagaaccatgtctatcgggaccaaaacggcctcacgatcgagtgacattgaagaatatgaagtctgactggctttcttgcttggatagcgatgtaggattcaagggttttgctgtccccaaagagtcacaaggcaaagttgcagaatttttgttccacgggactcctgcaaagataaagcatggtgatgttgtaattgcagcaataaccagttgcacaaacacatcaaatcctaatgtaatgctgggagctgctttggttgccaagaaggcttgtgagttaggcctggaggtaaagccatggattaagacgagccttgcacctggttctggtgttgtgaagcagtacttggataagagcgggttgcagaaatatcttgaccagcttggcttcaatattgttggctatggttgcacaacctgcattggaaattccggggagcttgatgaatccgtatctgctgcaattactgagaatgatattgtttctgctgctgtattgtccggaaacaggaattttgaaggacgtgtgcatcccttaactagagcaaattaccttgcttcccctccattagttgttgcttatgccttggctggcacggttaatattgattttgagaaagaacctattggaatctcgaaagatgggaaagaggtttacttccgggatgtttggccatcaacagaagagatagccgaggttgtcaagtcaagtgtgcttcctgacatgttcaagagcacatatgagtccatcacccaaggaaatcctatgtggaatgagctgccagtctcaacaagcactctctatccctgggatccatcatctacatacatccatgagcctccttacttcaaggatatgacaatgactcctcctggcccgcgaccagtgaaggatgcatattgccttctgaactttggtgacagtatcacaactgaccacatctcgcctgccggaaacattcacccagacagcgcagctgcaacatatctgaaggagcgtggtgttgaaaggaaggacttcaactcatatggtagccgaagaggaaatgatgagatcatggctaggggaacctttgccaacattcgtctcgtgaataagttcttgaagggtgaggttggacccaagacaatccatgttccatctggggataagctttcagtttttgatgctgctatgaaatacaagaatgaagggcatgatactattatcctggctggtgccgagtacgggagtggtagctctcgggattgggctgcaaagggcccaatgcttcagggagtgaaggctgtgatagcaaagagctttgagaggattcaccgcagcaatcttgctggcatgggaatcatccctctatgcttcaaagcaggggaggatgcagacaccctgggcctaaccggccatgagcgctacacggtccaccttccaaccaatgtgagtgagataaagcctggccaagatgttaccgtgacaactgataatgggaagtcgttcacttgcacactcagattcgacactgaggtggagcttgcttactacgaccatggtggcattctaccatatgtcatcagaaagattgcggaacagtagattgagatgattgcgatgcggtgaatcgtaattggtgtaaacgacccatttttgagtacttataataacctctgagtttctcagagtgagctgtctgaacttttagtaaccttttgctttctttaagacactgttaataatatgttaactcctgcaatatctgaatatac

SEQ ID NO: 31736 - DNA, 954 bp, Zea mays
  Clone ID: UC-ZMFLB73210D02_FLI
atgatccctgtccatatcttctttccatatggaccccaggtgaaactgcacaatcgatcgatgcccccaagacattctgtgattcaggggagacgggtagactatgtggaagttcaacatgctttagttgcaacaatatacgagaaatgcaggctcagaaagtcagaggaacacttttgataccatgccgaacagcaatgagaggaagcttcccacttaatgggacgtattttcaagttaatgaggtatttgctgaccattgctcaagtcaaaatccaattgatgtcccacgaagttggatttgggacctcccaagacgaactgtttactttggaacctcagttcctacaatattcagaggtttaacgactgaagagatacaacgatgcttttggagaggatttgtttgcgtgaggggctttgataggacagtgagggcaccaaggcccctttatgcaaggttgcattttcctgtcagcaaggttgttagaggcaaaaagcctggagcagcaagagcagaagaataatagtacattgaagaaatataggggtgctaaccagacgaggatggatagcccgaaatgagatgctgacccaataggtcgccaaatcacctccaaattctaacccaatgacttccatctgtaatgaatggcaataccttgaaaacctgtgatggagatgttttgtggcgacatgatctcttaaattagattccgtctttggtaacagcctagctgttcttgttgagtcgcatattctttattctgaagatcaatatagcaaatgggagaaaaaacatagtgcacagtcgagctgttctaattgtacctcttgtgagtggaatcagttgttgtacaacaggaagatggacctatctgtacaatggtcgtacatgttctttgatcatagtataaacaatgtaagcctcatcagccgttatttgattgtttc

SEQ ID NO: 31737 - DNA, 262 bp, Zea mays
  Clone ID: UC-ZMFLB73210E04_FLI
ggaaattttccttccccagaaggtaccggctgtacatattaggtattggttgtttgtgcaggcatttgttggcattttgttgtgcatcgtcttcggtctgtattgtttgggtcgaagctgtaaaatgtaaatggcgttttcaaagatggaagttttttttgatgacgaccgatgtatttgtcaaacaaaacttccatctttgaaaacgccatttacattttacagatggaagttttgtttgacaaatacatcggtcgtcatc

SEQ ID NO: 31738 - DNA, 1293 bp, Zea mays
  Clone ID: UC-ZMFLB73210F05_FLI
caaacattggtctgctctgctttggtctgtgctttaggattctgtttcattgggagaaacaaatgcccttgcttactttcattataactgtgctatttttttgatccaatgttgttctaagatcaagaagtggaatacttgttctaagggtcccaagttgggtggtggtggtgggaagcgttttcaggtcggtcgtgactttggttatccactgaaaagatatgcttggtggtgctttcttgtgttgaagaacaagtatcccacggaaccacaaccgtttgtattatctggtgatttcctacattattagctggcctaactaaaccatgcgctcagaccctaaaccagctgtaagtctgtaacttaaaagcacagtgcactagcggaatggggttccttgctttttggagcgtttccccagtcagatcggcggcagggcaggtcacgtggacggggctccttgttgctggaactaaataccgtggagagtttgaagtgagactaaagaaacttatggaggaaattaagcaaaatgaagacattattctctttattgattaagtgcacacactgattggagcaggtgcagcagaaggtgtaattgatgctgctaatattttgaagccagcattttgtaattttcccaaaataaccacattgctggtgattttatctgtgtagtgcattggtgccacaacactggatgagtataggaagcatatagagaaagatcctgccttggaaagaaggtttcaaccagttaaggttccagagcctactatggatgaaacaatacagatcttaagaggacttcgtgagagatatgaacttcatcacaaactgagatacacagatgatgctttaattgctgctgcacagctgtcttatcagtatatcagcgatcgttttctgcctgacaaagccattgacttgattgatgaagctggatctcgtgttaggctgaggcatgcgcagctccctgatgaagccaaagagctggacaaagagctgcggcagataagcaagcagaaaaatgaggctgtacgtggccaagattttgagaaggtatactgttgtttggcacagcggtgacaaagccgatccgctcccacctctctagcaacgtcgatatggttaataccaagcattatgttgtttccttttgagataaatattttgttactgattttaccttttgtctcctcttcttgttttttgttctagaatctgtagcaaatggctaacgatgaggatatccattactttgtttatgacaataaaactgatatgttc

SEQ ID NO: 31739 - DNA, 900 bp, Zea mays
  Clone ID: UC-ZMFLB73210F06_FLI
gttgtcatctcatatcctgagccagagatcaaagaaaccagagggagcgaggcatggcagcaggcttgcaggtgtttggccagccggcgtctactgatgtctccagggttctgacatgcctgtttgagaagaaactggagttcgatcttgtccgcatcgatacattcaagacgcatcacaagcttcccgagttcatcaggcttcgggatcctaatgggcaagtgaccttgaagcacggcgacaaaactctcgttgattcgagggacatctgccggtacgtctgcacccagtttccaaacgatggaaacaagagcctttacggatccggcgctctagaacgggcgtcgatagaacagtggcttcaggcggaggctcagaacttcgggccccccagctccgcgctcgtcttccagctggcgttcgtccctcacctcactcacctgggcgttcgtcaggaccctgccgtgatcgccgagaacgaggataagctgaagcaggtccttgatgtctacgacgagatactctcgaggaacgagtacctggctggcgacgagttcaccctggccgacctctcccacctcccgaactcgcactacatcgtgaacaccgagagaggaaggaagctcttcactaacaagaagaacgtggccaagtggtacgagaagctctcgaagcgcgagacgtggaagcaggtcgctaagatgcagaaggaacatcctggtgcgttcgagtgattgcttgtcttggggggagctgcgagtgcaccatcatgaatggcttcatcgtctgtgtcggtctggctctacagttcattttgtttttgagtgatccattgtttaatttctcctatcagtgttgtcgtgtgaaccaaaaataatgtgaagcccagctgtgatgtat

SEQ ID NO: 31740 - DNA, 2063 bp, Zea mays
  Clone ID: UC-ZMFLB73210F11_FLI
tgcctcggcccaaatgaaatgcatgcaactgcagcggcattggggataacgcacccgtcccgcatcatatcataattatgatagcattatggctggtacctctgtcatgtttattacatctacagctgagaccgggaaggttcctgaaagggttatgcgtggtgatttggacaaaggccaaacaaattatagattggaggatcaacatgtcatagttcaaccaccacagggaagacttccatggggtattcctgcagaaggaagcgttccaatgaatagagttcagagtcaagcaaaacaacacttggaaaacatggatgcaaagcaagaccataagaaattgctccctgatccaaaaaaatctccccttgacaaattcatggacacatcattgccttcaagaaacatggacatgaggtcacagaggcttgacttcgatgatgtctctgagtgcgaaattccttgggaagatcttgtgattggtgaaaggattggcttaggttcatatggagagatttactgtgctgactggaatggaaccgaagtagctgtaaaaaaattcttggatcaagatttttatggcgatgctctggatgagtttaggagtgaagtaggtgaacttttatctgtttctatcttggagttttcctaaataaactattcaattttcatatttactcagttcaattgttgatttattgtttgatatacggatatactttttgacaagattcgaattatgcgtcggctgcgccatccaaatattgttctctttatgggtgctgttacacgccctccgaacttatctattgtatctgaatatattccaaggtataatagttacttttactacacaatcactgtttatatggaatgtgtgaattaaatatcccactctagacaacacagaaggtatagactcgtgcccgcgcaagaacgcatgggcatattttcatcctttatttctctgacagcgtaatttaagcggtcctctaaatataaagaatgctactagattatctatatagagtttctctgtcatttcctttacctattttaatatttaaaacaacaaacttagcaaaaataaaatatgtaaaatatattttagagtatgacaaatacatatgtatatatatatatatataaagtaaaagtaaaatatgtttctaatatagatatttacatatagagaacaaaatatagaaaacgttattacagctaaaaaagacaaattatagaaccttttagagaagaatgtaaatgacggatttagagaacattgctggagacatagctatgcttcaacactcaacgtctacgagcgatgccctactcgatgggcctcttaccctggtcaaactcatgcaaagaaatcaagtttgttcaagcaaagaatcatttgaatcgtaattcataactagatcgctgcacgaggtcgcatgagtgcagccacgactagcctcataactaaagtaaaacacacaaaccactgtccactgagtacttgtgtattcgtgttgctgtcaatcttgatagtacgtccgcggcgaattcttaacaatatgttttcaccaccaggcggcgaccagaatatgcatcaggcgggaggaatggggcggtcgctggagctgctgctgatccagtttttgatgccggataacgacacacgtcggcaggcggaggagcagatccgacggctggcccgtgacccgcaggtggtccctgcgctcgtccaccatctccgtacggccaagacccccaacgtccgccagctcgccgcggtgctactccgcaagaagatcacctcccactggcccaagcttccccctgactccaaggcatcacttaaacaagcccttatcgattcaatcacactcgaccacaggttctttgctaaatacctatcaccaatccttctacgcatgtctgccttagaatctgcacgctttcaattcactcaaattgtgcatttggccatttgcctaaggaacactttgagtgtattctcaacttattagtttgtgctgatcagaattgaactgagaggtccagctttagtg

SEQ ID NO: 31741 - DNA, 1818 bp, Zea mays
  Clone ID: UC-ZMFLB73210G03_FLI
cggtcgcgcaccccactccgcctccgctccccgctcgccgccgcgattgctggattggctgccgccagcgccccggtgctagctcccgttcctcgcggtggtcactggactagcctggacgccgcggcccgccgcctggtcgaagagatggactcggtcatggccgcccccgactcgccgccgcagactgtcgtgctcgtctctgccggcgccagccactccgtcgcgctcctcacgggcaatgtcctgtgctcgtggggcaggggcgaggacgggcagctcggccacggcgacgcggaggaccggctcgtgcccacggtgcttagcggcttcgacgcgcccgcgatcacgtccgtcatctgcggcgccgaccacaccaccgcctactccgaggacgagctgcaggtctacagctggggctggggagactttgggaggctggggcacggcaactccagcgacgtcttcacgccccagcctgtcaaggcgctgcaggggctcaagatcaaacagattgcctgcggggacagccattgtcttgccgtcaccatggccggagaagtgcagagttggggccgtaaccaaaacggacagctaggccttggaaccactgaagactcgctgctcccacaaaagattcaggcttttgagagtgtttgcgtgaaaatgattgctgccggtgccgaacatactgctgcagtaactgaagacggtgacctctacggatggggttggggtcgatatggaaacttaggtcttggtgaccgtaatgaccgtttgcttcctgaaaaagtatcttctgtggagggtgagaagatggtgcttgtggcatgtggatggcgccatacaattacggtttctgactctggtaatctgtacacttatggttggagcaaatatggtcagctagggcatggtgattttgaagatcatttagttccacataaagtagaagctttgaaagatagcactatatcccagatttcaggcggctggaggcatacgatggcacttacatcagagggaaagctttacggatggggatggaacaagttcggacaagtcggagtcggcaacaacgacgaccacagctcccccggacaagtcagttttccagaggatcagaaaatctcccaggttgcatgcggatggaggcatactctggccctctccgagaagaaaaatgtcttctcctgggggaggggcactagcggacagctcggcaacggtgaaatagtcgacaggaacacgcctgtgctgatcgatgccctgagctcagacggttctgcctgcaagaagctggagtcatccacggcagccccattcgcagccaaagtttgggtgtcgccgtcagaacgatacgccatagtccctgacgagaacgtccgtaaagcaggcggaggcacggcacgaggcaacggcgccgacgcgaacgtgccggagaacgacgtgaagaggatgcgcgtgcagtcgtcgtagtaggtcttctactaccgtccactccaccacccccccgttaaccctactagtagtaagtactacgaagacgaaccggtgccccatctagcggcgcccgatttttgtgcgttacgttctgcctaaaagtgctttccgtcgacggacggacctcctggtgttgagatggtagcggtagcactgcctcgcggcgatggtgtgtgtcgtgacgtgattcacctcttagagtagagaggtggctagcccagtcgacctgtgttgtgtgtgttgttaagatgtgtcctggatcttttgtgacattgcatggagggtacaataagcgcttcgtttctcgtttcttcc

SEQ ID NO: 31742 - DNA, 2783 bp, Zea mays
  Clone ID: UC-ZMFLB73211C11_FLI
caccatggccttctcttcgtcactggcgccgttcttcccaccttctggaaccttccgagcccatcccgctaggaggctgcgggccgatgcacccgggagattcgtggcgtcctgcttgccccctcccgacgtcgtggtgacgcgcgagcagggaaagaacgccaggctcatctccgcgctggaaaagcataatgtacaccctctggaacttcctcttattaagcatgttgaaggccctgatacagataggcttttagatgtcctacgtaatgacaagttcgactggattattgtaacctctcctgaggcagctgcagtgttccttcagggatggaaggctgctggaagtcctaaggtgcgagtagctgttgttggagaaggaactgcaagggtttttcatgaagtgtcagaatctgatgatcaatctctagagcttgcattttcaccttccaaagctttgggtaaagtcttggcttcagagcttccaagaagcaacaggaactcatgtaaagtattgtaccctgcatctgcaaaggctggccatgaaattgaggatgtgctatcagaacgaggatttgacgtgacccgactgaatacatatacaactgtaggtattgtttcacttgtgtggggttattgttttttttctactctatgacaaagttttgctaggcgctaggcggaatctaggcgatgacccttagcctagggactagtccagcctaggcttgcctaggcgatgctaggcgtttttctaggcgttttgccaacttatataataatatatacatttatagataaaaaaatagggaaggaccagtagacatacaaccgtgtaggagagaagcaagcagtgggagagaagcaaacatgagaggagagaagcaggggagagaagcaggggtccagcgtccggtaggggtccggcgtcagccgtgctggagagaagctgcagccgcgtcttcggcgtccggtggagctgcagccgcgtctctggcgtcagccgtgcaggagagaagggagaagcaagcgtcgaaaggggaagaactgaagaagcaagcaggcacttttcaaccgcaaaccctagaccctatcccccgcgcgcgccacccttttccctcccacgcgcgcgtcgcatttttccctcccgcacgcgccgcatttttccctcccgcgcgcgcgcccctttcctgcgcgctatttcccgctcgcgtgcgcggcgcgcgcgtagctcgcctaagcgccgctgagtcgccgcggaatcgccgcccggcgccgcctaggcgctccaatcgcctaggggcccgcctacccccctagtccaggcgggaggccgtagcctagagactaggcgcgcctaggcgcgtcgtaggcgacgattttcaaaaccctgctctatgaccacatattcagaaaaaactcatcatctgcatcttgttgtgccgcttcctgtagtctgtagtgcctgttttgtagcatgaatatttacattactagcatcttgcgatatttatttcatctcagtgttagtcattggtcttcacatggacccagtttttcaacagtttaggttaaaattcctatagtgagctctagaagtcactagttttcaacagtttagtcattcctgttggttaaaattctagtgagcttgacagtcaaaaataataataatcctagtgagctcttgaactcactaccatccatggtcatctattcatttgctagttgcttaacctcatggatcatgatgtactttgagcgtgacatttggtattgatacattcacagcttgccttcttttctttggcagtggcatttagttctgtaagttgattgtgacacacttgaccagagtagagatttttctatcgagaatcagaaagcactgaccatcggtttcatattatttttgacagtttctttacatgaatataacacagtaacatatgaaggtgttgtgtgtgcgcgcaggttcctgtagaagatgtcgacccgctgacattaaaccttgctatatcagctccagttgttgcgttagcttctccttctgcactgaggtaattacacagtgacatttggatatattttttttttttacaaatcgtgttcatgaattgtgcaaggtaaagctgtggtgtgatagatctggagataccagcatgtaagcaccaaatacgttttgatggagcgtagtttcagactactacaaaatagacgcaacgggcattccttaatcaaatcatcagtctccttggatcgtgttccattttgccagtgccagtttctatgtgtggttccatggttcaggtgtgttttttttcttctcttggttatcgcagggcatggctaaatcttatctcaaaatctgataactggaacaactccgtcgcctgcatcggtgagaccactgcgtctgcagcgaagaaactgggcctgaagagcatatattacccaacgacccctggacttgaggggtgggtcgagagcattctcgaggcgctcagagtccacaggacagcatcaaaagaggccccaaaacgttgaaaacgggcggatggcggagcttcttcttggcgttggtagccgtccgcagtgtcgaagaaattctttgcttctttgacgacaattgccccccgttgagggaggtggtggtgtcaagccatggctttccactggcccagtttgtaatggattcttgggccgaaaggcccatctctatatgtcttgactcgcaaggcgattgcatcagtccatccatccatttcatggagggttttagc

SEQ ID NO: 31743 - DNA, 865 bp, Zea mays
  Clone ID: UC-ZMFLB73212A04_FLI
caaccctagctagcaggtcggaggcgagagagcagccatggcgcggtgcctcgcgctcgtctccctccttctcctcggcctcgcctccgccgcctccgctgccgatgcgccctttgtcgtcgcgcacaagaaggtttcgctctcccgccccaagccgggcgtcgagcgcgtcgccgtctccctcgacctctacaaccagggatccgcgactgcctatgatgtgtcacttaatgacgactcttggccaacacaagcatttgagcttgtcactggagagaaatcgaagacattggaaaggcttgaccctggtgccactgctacacacacatatgtcctggagaccaaaacacagggcaggttccagggttcaccagctattattacgtaccgtgttcccacaaagactgctcttcaggaggcctactcaactcccatcttcccactggatattctcgctgagagacttcctgagaagaagtttgaatgggctaagaggcttgtggcgaaatatgggtcacttgtgtctgttgtctcatttgttggattgtttatctacctcgttgcgagcccgtcgaagagcagctcaaaaggaagcaagaagagacgttgatctacttatagttcggcgcagttgaagttgtagctggtggtttttgcctggaggaactcttggtagtttgagctgagcgaaagctttaaattttacatttactcaccacaccatgaactgcaacgaagtgagcatctgttagaaaagtggaccagtaattttggttggttatttatttcctgtttctctgtcagactcttaactcggaggacctgtaactaggaaagttacttttgcttgaaagaacattttggt

SEQ ID NO: 31744 - DNA, 1502 bp, Zea mays
  Clone ID: UC-ZMFLB73212B10_FLI
attttgttctgcaaggccgctgttgaggttccatggtatgctccatgtggcggtactgtctatggtgatggcaacttagttttcattgctaatgattggcataccgcacttctgcctgtctatctaaaggcctattaccgggacaatggtttgatgcagtatgctcgctctgtgcttgtgatacacaacattgctcatcagggtcgtggccctgtagacgacttcgtcaattttgacttgcctgaacactacatcgaccacttcaaactgtatgacaacattggtggggatcacagcaacgtttttgctgcggggctgaagacggcagaccgggtggtgaccgttagcaatggctacatgtgggagctgaagacttcggaaggcgggtggggcctccacgacatcataaaccagaacgactggaagctgcagggcatcgtgaacggcatcgacatgagcgagtggaaccccgctgtggacgtgcacctccactccgacgactacaccaactacacgttcgagacgctggacaccggcaagcggcagtgcaaggccgccctgcagcggcagctgggcctgcaggtccgcgacgacgtgccactgatcgggttcatcgggcggctggaccaccagaagggcgtggacatcatcgccgacgcgatccactggatcgcggggcaggacgtgcagctcgtgatgctgggcaccgggcgggccgacctggaggacatgctgcggcggttcgagtcggagcacagcgacaaggtgcgcgcgtgggtggggttctcggtgcccctggcgcaccgcatcacggcgggcgcggacatcctgctgatgccgtcgcggttcgagccgtgcgggctgaaccagctctacgccatggcgtacgggaccgtgcccgtggtgcacgccgtgggggggctccgggacacggtggcgccgttcgacccgttcaacgacaccgggctcgggtggacgttcgaccgcgcggaggcgaaccggatgatcgacgcgctctcgcactgcctcaccacgtaccggaactacaaggagagctggcgcggcctgcaggcgcgcggcatggcgcaggacctcagctgggaccacgccgccgtgctgtatgaggacgtgctcgtcaaggcgaagtaccagtggtgagcgaattaattggcgacgccgacgccgctcctgtcgcaggacctggacgttatttagaaggctcttctccctggcggctttgatgcgtgcgtcgcatttgcgccgggcggacgggcgacggtggttggcctaccgcctacgtcggctgcgtgccctgggaatttgggcgggcacgatgatgccactgggcaccgggcgcggggtagtatgatatgaaaccgacggcgatggagatgaggcgcatggcattttcccactgataaatggggagttgtatgctactttaatatcgccactcctgttagtatttatattgatgctgtcaagttttccactccaaaaac

SEQ ID NO: 31745 - DNA, 535 bp, Zea mays
  Clone ID: UC-ZMFLB73212D04_FLI
ggcaggcacgtcgaggaggacctgcgccaacgcggggaggagaccctgctggagaccgtgctctgcctcgtcgcgccggccaagtacttcagccaggtgattgagggcgcgctgagggacagcgccgaccaccacgggaaggaggccctgacgagggtggcggtgacgcggtcggaccacgacatggacgacatcagagccgcctaccaccagcagttcggggccaagctggaggacgtcatcgcggccaaggcgcacggacactacagggacgcgctgctctccttggtgggcgccggcaattcatcagtctgaagcgctgctgcctgctcaggagtcgtcaggcccaataagatgtgcaagagtttctttattacgcactttcgcgaggaaaaaaagtcgcattttccactcgatgaggaaaggttgttgcttgttcttttgcttctcctatgcgtttcgtctatcattgactacaggattcccaataaacatttttaatttctactttggtctcaaacgtttttatgaatct

SEQ ID NO: 31746 - DNA, 1157 bp, Zea mays
  Clone ID: UC-ZMFLB73212D12_FLI
aggcgctcagggacgccccgtcgaaggaggctcacgcgcggctctgggccgacgtccgcgctacccttgtcgcctccgggttctccggtgagtatgacgggctgctcgttgccgaggaggacgtgaggagcaggaggggtaatagggggatgaaggctatgagcgtgaggaagtggcccgaagaggcggcggcggcggcccggtttttgggcgtggcagagattggtgcacacagaaatggggatctggcggtttgtcacgaacaccgatttgtatctgctcatgaccatgctgggacgtctggagtggttgaagagtcgtttcatcaaggtgaagatgttgaatgtgaagatgacagtgatgatgactataacggaattctgaagcctgcatttgctgtggatggagatccagattttgagtctggtgagccacttgatggctttgagtaccttcggcgtgtcaggtgggaagctaaccaaattcctagagtcaaggtggccaagatatattcaagtgcagctagaaatgagcaaactccttatatgccagaaattccggatataccaaagtgcttacctgatttgcgtgcgtcaaaacaatgggaggacagatttatcgtcgactttgaggaaaccaggatggtgctctctgagcttgacaattctgatgaaccatctgtatctagtgggacaaaaatctcaacaaaacctggcagcgggacggagccacagactgacccgacgctgacaatgattcgcagcatggatgcagtgtcaagagctgcgacacttcggaactacatcgatatgattcagagcttggatgcactatcaaggaacaactgcatgtggctcttcgcactctgtgttgccgttcacactcccctggacgcggagacatgtgcctcactgaggtccttgctgcgcaagtgcgccagcatccttgccaccaagactgagatggacgatgaagtcgtaatgctgaatatactgatgacaatttcgggaaggtattttggacaggacgaaagctgaaaacagcaattgaaattggagatcaggataacaccattgcaatgctgaattctcaccgatagtttgatgtcagaatatattatatttattattatatatgtgaaagttatgtttcatttt

SEQ ID NO: 31747 - DNA, 992 bp, Zea mays
  Clone ID: UC-ZMFLB73212F11_FLI
gccgccttcgtaacttgttgcactttattttgagaacggacgtccaattacaaaaaacacaagctgtctaataaagatgcatgataaacaaacagagggatgctgcattatgcgtgcgtggacacgactgacgacacaagctttaggatggatgatgcatgcatgcatcgtacatatatagagtactatatagaagccaagaaacatgtaacgtgcaaagcaggaagctagtgcgtgagaataggaccggagaatttagaagcagcggacacgtgtgtgcaagcagtcatgcacgctaagcttcacgttcacgatcacgggtgaaggcagccaccgccgccaccgagcccactgccaccgccaaggccaccgctgccgcccagacccgatcctgagccgccaccaaggccgccgccaccgccaaggccgccgccgccgccgagaccaccaaggccgccgagacctgacccgccaccaaggcctgatccgcctccagcaccaccaagcggtccaaaccctccgagtccaccacctacgacacctccgaggccgccgacaccaccgccaatgcctcccgcaacgcctccgatgcccccgaggccggcgccggcgccagcgaaccctccgacgccgccgacgtagcccggcaggaaggtcttctggtcggcgttcacgccggacgcagcagctctctgaccatgcttctgctggctgtcgttgctgttagtagtagtgccgcctatggccgtcgtggtggtcgtcgttggcatggctctgctggcctcggcgggcgtcagcgccaggatgacaaccaggagcaccaggctcaggctcaggctgctgctgctgcagcacgccatgattccggcggtgttgcgccacccgctaggcataccggatcaataataatgtgccttctccttatctctcggcttttctttttcttttttggtggctagggctcaggtctctctctgcaggtcgcaatgaag

SEQ ID NO: 31748 - DNA, 2264 bp, Zea mays
  Clone ID: UC-ZMFLB73212G11_FLI
gtcaattagaactcacattcagggagatactcaacaattacaaaagagaagcacaatgcaagccagaagttttttcaagtatctatattgggagtacgaaccgtaatggggtattagtatcgcgccatgttggtatcattactttttacaatgaggtatttgttccagcagcgaagcctttcctggtgtcactaatatcatctggtactcatccagaagacaagaagaatgctagtggccaaattcctggatcacccaagccatctcctttcccaaatttaccagatatgtccccgaagaaagtttcagcatctcataatgtatatgtgtctcctttgcggcaaaccaagttggatctactgctgtcaccaagttccaggagtttttatgcatgcattggtgaaggcacccatgcttatcagagcccatctaaggatttggctgctataaatagccgcctaaattataatggcaggaaagtaaacagtcgattaaatttcgacatggtgagtgactcagtggtagccggcagtctgggccagataaatggtggttctacctcggatcctgcagctgcatttagccccctttcaaagaagagagagacagatacttgatcaattataaatggtggcctctctcgtatatagctcacagatccgtgctccgtagcagtctattcttctgaataagtgggttaactggagcgatttaactgtacatgtatgtgttagtgagaagcagcagtttttaggcagcaaactgtttcaagttagcttttgagctatcaccatttctctgctgattgaacatatccgctgtgtagagtgctaatgaatctttagttttcattgggctgacataacaaatctttatcctagttggctggttgttgggaggcattcatcagggttatatttggttgtcaaaaagtactgtacttaattcacatctttcacatttttcactagcaatagcagccccaaattgctttcctgactaggaacatattctttacaggtataagcatgccaactctaaactatatgaatccttttatattctcatttttaagtacttctctgtttctgctacttttgtactgtatatttccagcttctccatcagactgatgatcccatattcagtgtgctgcaagtgatttgacatatgtggcttatccttcaggtatgtctcatgttgtgacttcattgctgattgcttttgtaatggtactgttgagttcatttctggttacaatcagcctttactgctttatattgttctactaattttggcttgcacagccaggatgattggttttctgcatcaatcaatcttttttaggacaagatatttttgtatgctacacttcccaaattgcaattaatccagaagtctaccttgttttattctattagttctcagcaacagtgaatgaatatgaatcagtcatgctgatagatgttcatctggttattccaaacaatctgacatcgcatctctttctgcaagtgagatgaagaaaacctgaaatgctatcaccatttaaaacattggcttctggaagttcaggtgattagcaggagacgttctgacattgccattggcatgtacggtagtgatggcaggagacgttcttaaacagcagctgctccttcagcttgtaatgtctgattgtattgaccgagagcatccaccttgccttatggtactaactgaatgagctggtgacgctgactcatctgcataatggcagatgcttaaccatctttaggagctcatgtcatgattccagctgcaccgtgtgcaaatgtgaaggccctgcaagcgctttccaggccgcaccaatcctgcttgcttcttgaagatacatatggtgccacctaaataaaagccgtttctggttgtctgtccttgacatgtcaacagattagtgttgggttgcaatcatgtggtgtttaagtcttggagaaggcgagaagtcattgctgccagcattgtgatcgtcaggcacagaagtactcaaaagtgagagcctacttgttgcgagcaaatggagggcgatataggttgataatcaatttcagttctctatatacaagcagcggattttgtttagagttagcttttgagatgcatcatttctttcacatctgattctgtgtgttgtaactcggagtcgcgtagaagttagaatgctaactgaccttaattttcaccgaataatttgctagcgtttttcagtatgaaatccttgtctt

SEQ ID NO: 31749 - DNA, 1193 bp, Zea mays
  Clone ID: UC-ZMFLB73213A02_FLI
ttcgaggcgaccggcggctcgccgccccgccacagcgccgctgcgatttcttctgatccctgtggctcagcgcggagttttctttattggcttattacagggttaaatggcaaatagagcaagatggatgatgaagtacgaaaagggtcttgttgatatacttcatgagaacaatacttcacattatcgtacccaaaacggttggagaacggaggggtggaggaaaatcgttagggatttcaatgtaaggtaccccgaagcaaagtttagtaaaatgcaaatccaggaacatgagactcaattgaagaaagattataagttgataaaatctatcctccaacgtgatggtgtctcatgggaccagagtgcatccatggttagaacaacagatgaaatctgggatgatataatcgaggatatgcccaaggcacggaagtaccaaagtaagagctttccattgctcgactcactagaactgttatttgatggtccaattcctgaagggggacagaaatcgccttccagcgtacctcagaatgttggtgaaaatgttgacgatggaggcaacaataccagcacagtcccaggtttgtctgaaagacctagtggaacgtttaacacaagcgttactgaggcatggaataatatcagcctactccagcaaacagcattaggacctcaaggcatagatgatctcgacacgctgcaaaaacgcggcgaagaggtgctggaacggctacagcatggcgcggaccgaaggctaccgagagctgatgaccaggcgcagtcgagttcttgtgtagaactgcagagggacaggcgcaagaagcggaaggccccggacgtccagcagatgatggagacctatttgaatttcaggatgaagcaagctcacgtcaaagaacaaagagcgaaggacgctggccagttcacgatttcaggctgtatcaaggctctgcacaccatggccgatgtgtcagacgaggtcaaggtgttagcctctgatgttttcaaggacgctgagaacagggagatctttctctcctatgaacccaggctgcgcagcttgtggctgaagagggaagttggcaagctactctcctgatagtggtgttttgtttgttacctgtgtcagtgagtcagtctgacattcgattctggagggagctattgaaggtctaggcttcattcac

SEQ ID NO: 31750 - DNA, 1041 bp, Zea mays
  Clone ID: UC-ZMFLB73213A07_FLI
ggggtaacaacaggtggaactggaagctgcaaaatcagaaatcgagaagtggcattcagcatttcagagcattccagctgtaccttctggtaccattccagatcctgtttcagtggtgtcttacctcagtaccctgaagtcatcagaggaatcattgaaggagcagctggagaaagcaaagaaaagggaggcagcttttatagtaacatttgcaaaacgagagcaggagattgcagaactgaagtctgcagttagagatttaaaaacacaattaaggccaccatcaatgcagacaaggagattattgcttgatccagcaattcatgaggaatttacacgtttaaagaatcttgtggaggagaaagagaaaaaaataaaggagctacaggacaatgttgctgctgtcaattttactccatccagcaaactggggaaaatgctaatggctaaatgtagaacattgcaagaggaaaatgaagagattgggacgatggcatcagaaggaaaaatccatgagcttggaatgaaaattgcagttctgaagtctcagaacaatgagctcaggaatcaatttgatgttttgtacaaacacatggatggtgtaacaaatgatgtggagagatcaaacgaactggtgtccatcctgcaagaggagttagaagctaaggatctagagctgactagattgaaggaggtgcttgcccagaaaggagctactcaggacgcaccggtggagaccagtgacgacgctggaaacggtcaggaggcagattcagatacactgcaagtgaaggcggaaagctaagggagtttaggctttgaagtgtgtttgttgggacttgtgggaaaagtaatatcatgttatgcggtctcatagcatgtctaggttattatatagtaggggaatcactgcacaaaaacatcggcaaacttttatctatgatcgtacatatggctttacaaaagattattttgcattgtagacaacactattatagtgtggattttgaaattagatatataataataatatagatgagt

SEQ ID NO: 31751 - DNA, 1204 bp, Zea mays
  Clone ID: UC-ZMFLB73213B10_FLI
gggcgaggcaacgacaagttgcttccatgcttgcagctgctctgctcgttgcaacgacgtttgcgtccattcctacaaccgtgcactccatcggcgtctgctacggcacgctgggcaacaacctgccgtccagcagcgacgtggtgcagctctacaggtccaagggcatcaaaggcatgcgcatctactcccccgacgccaaagccctcgccgccctgcgcaactccggcatcgcgctcatcctcgacaccggcaacggcggcggcgtcctgggccagctcgccaggagcgcctcgttcgcggactcgtgggtgcagagcaacgtgcggccctactaccccgccgtcggcatcaagtacgtcgcggtgggcaacgaggtgcagggcgacgacacgcgcagcctcctcccggcgatgcgcaacctggacgccgccctggcgcgcgccggcttcccgggcatcaagtgctccacgtcggtgcgcttcgacgtggtcgccaactcgttcccgccctccagcggctccttcgcgcagggctacatggcggacgtcgcgcgctacctggccggcaccggcgcgccgctgctcgccaacgtgtacccttacttcgcgtaccgggacaacccgcgcgacatcagcctgggctacgccacgttccagccgggcaccaccgtcagggacaacggcaacggcctcaactacaacaacctgttcgacgccatggtggacgccgtcgtcgccgcgctcgagaaggccggcgcgcccaacgtcagggtcgtcgtgtccgagagcggctggccctcggccggcggcttcggggccagcgtcgacaacgcgcggaaatacaaccagggactcatcgaccacgtcggccgcggcacgcccaagaggaccggcccgctggagaccttcgtcttcgccatgttcaacgagaaccagaagggcggcgatcccacggagaagaacttcggcctcttctacggcaacaagcagcccgtgtacccgatccggttcaactaattaagagtggcggatcggaggaataatacatcttcatcaatcaattaacctaataatatgctacatgaataagctgctgcgtgcatgtggccggccggacttgtggaggagcggtgcaattaacttgtatgcacgtactctatctatatatgatgaataaaaagagatagaattctgatgcattc

SEQ ID NO: 31752 - DNA, 587 bp, Zea mays
  Clone ID: UC-ZMFLB73213C11_FLI
ctcaatgcttgcctatgggatggcgggagaatgtggaccggattgaaccctcgcggaagagcactgatttctttgaaccctcgcgaaagagcacagaccaaaggaaaaaatcaaggtcaactcgagataagacgagaaacactgaacatagatatagcaacgtcgagaaggtagacaagctaaagatatcatttgatcagttcgagaaatccaggagaagtgttgatatcttcgagaggccaaagaggaacattgagcagctggattgtggccggaagagtgtcgacagattggacaggatctgggctagttaattcctttctttcacatgatatacaggttgggcttcggttgttttgggggattttacaggtgtggcgttaagagttgattcaccgacactaaaggagccaagcgtcgttgacgaggcttcgtgtagatgtgatggcttgtgtggtgggagaagtgtatgttgttggtcttcaaaaaaattgttatctggtcttaaactaaatgacactggggaggagtccatggcagcattgtgtataatctaatgctttggatcaacgatgtttttttcttct

SEQ ID NO: 31753 - DNA, 906 bp, Zea mays
  Clone ID: UC-ZMFLB73213D03_FLI
cctcctctcctctcgcatccgcagcttccccagccagctagggtttgcagatgacgaccgcggcgcgccccacctgggcgccggccaagggcggcaacgagcaggggggcacccgcatcttcggcccctcccagaagttctcctcccgcgacctcgccgcgcacacctccctcaagccaagaaaagacggtcaacagacccaagaggagttacagaagaggaatctcagggaggaacttgaggaacgtgagcgcaagcactactcttccaaggataagtcctatgccgaagaaagagaccggcggaaaagctctagccatctactcttagaaggttcaaagagagagacagaggataagatagttccacgagaaatcgatgctgatgactccgatgtggagcctaaaagcgatgacgagagcgatgaagatgatgatgacgacgacactgaagctctaatggcagagcttgagaggattaagaaagaaagagccgaggagaagcttagaaaggagcggcaacaagcagaagaggaggccaagatgaaggaggctgaactgatgcggggaaacccgttgattaatatcaacaatgctggctccttcagtgttaagagaaggtgggacgacgacgtggtattcaagaatcaagcacgaggagagaccaagacaccgaaacggttcatcaacgacaccatcaggagtgatttccaccgtaaatttcttcagaggtacatgaagtgacgcttccgtcgttcacaattcagcctggagcccctcatcgttatcatgtttgtgtatgagcgaaagatcattattgtgttgttgtatgaaacaagagtgtaaacatatgtctactacttaacaaagttatgctgagcaatgcatatcctagttgaatgtgccc

SEQ ID NO: 31754 - DNA, 1319 bp, Zea mays
  Clone ID: UC-ZMFLB73213E08_FLI
cccggaagtggaagactagggttagggtcccagctccgccgttgtctgggcgagtcgagacatggccggccctgcccccgccgttgcagccagtgccgccgcctcacagtcgccgccgatgcagctgccgtcgccgttcgcggagctagtcaagggttcctccggcctcgagaagatcgtgcttcgcggcgctcgcaactgctgtgccgagatctatctttatggaggtcaagtaacatcatggaagaatgacaatggggaagagttgctttttctcagcagcaaggctattttcaaacctccaaaagctattcgtggtggtataccaatttgctttccccaatttggaacacatggaaatcttgagcaacatggatttgctaggaaccggttttggactatcgacaacaacccaccccctttaccagtaaaccctgctattaaggcttatgttgatctgattttgaagccttctgaagaggatttaaagatctggccccacagttttgaatttcgcttgagagtttctcttggaccttctggagatctgagtctcacatcccgaatcaggaataccaacacagatggaagacctttctcttatacatttgcatatcacacatacttctctgtctctgacataagcgaggtgcgtgtcgaagggctggaaacaatggactaccttgacaacttgaaggcaaaggagcgtttcacggagcaaggcgatgctattgtttttgaatcagaagttgataaagtttatcttgccgcaccctctaaaattgccatcattgatcatgagaagaaaagaacatttgtcgtgacaaaagaagggcttcctgatgctgttgtttggaacccttgggacaagaaggcaaaagcaatgcaagattttggggatgcagaatacaagagcatgctgtgtgtggagcctgcagctgttgagaggcctattactctgaaacctggggaagagtggaaaggaaggcttgtgctttcagctgttccttcgagttactgtagcggacagttagatccatcgaaggtccttcagggttgaaaatcctcactttctgcatcttgtacagaagttcattgcccttaatatttgatgctgggctggcgtcaacgccgcatgttccttttgccatttccaccccctatatttctggtcccttttgtatctagaatttgagtgataggttgattccgaataacagtctgtgatttgagcttaggattgggtcatctcatcgatgaatgataccgctggacaaaatgctggcgtacgtgtcagtttcataaatcattcttctcat

SEQ ID NO: 31755 - DNA, 1421 bp, Zea mays
  Clone ID: UC-ZMFLB73213G08_FLI
gcaagctggttgttagtcatgatgactatagcttaacttccaagctgccaagggagagaacatctgttgtaacaatactaaggaacccagttgaccgtgtatttagcacatatgagttttcagttgaagttgcagctagattccttgttcacccaaacttaacttctgcaaagttaatgactacccgtgtgttaaaaaagtctcgtgctgtcagtactttggacatctggccttggaagtacttggttccttggatgagagaagatctgttttccaggagagatgccaggggtatcgacaaagttcatagtagtaagaaggttaatgcatatgatgtggaggatatggttatgccgttacatcagtacatcaatgatccagttgcccatgagatcattcataatggggctacctttcagattactgggttaacgaacaattcatactttgatggagcacatgaggttcgacattgtgccagaaagcatccagatcttggtcgtattgtgcttgaagttgctaagaataggctggaccagatgctgtatgtaggacttacagaggatcatgaagagtcagcgaggttgtttgctcatatggtaggagcacaggtgcttttacaatctgggacattgagtttggatctcaaggaagatctgcacagtgagactgactcacacccatccatggtggagcccggggatgaagaagcaagcgaacatctgaataacacacatggttggcaaaataatgaagccctgaactctaccagcgacgaacaaggaaaaggaaatatgactgtgggtaaactgatggaagcttatgaaacttgcatcgctaaactgcggaagtcccaatctagccgtcgtaaaatatcactaaagaaagtggaggaagcaaacttctcaaaagaggcacggaagctggtccccgaggcaattttgaaacaaattatctcgctgaacagccttgacatggaactttatgaccatgctaagaaaatctttacccaggaacatctgatgctgaaagctcagcaatccatggcggggcagcacagacagttggcggaacaagaggagggctggatcggcacgatgtgcagcgacgggacttgctctccctgggtggtggtcttgctgggtctagggatcaccacgatcctagttttggccacattagctgtaacgacgagaaaaagaacgtctaaacttaaggtttaaccagaacttttcatgagacaggtctctagattttggtgtacagtctgatgaatgccccttagcaatctttcggggcagaggtgctagcgtgcgcagaatcatcatgtactaactcgtgcggtcgtactggtatcttcacacaatttgagatgccgcggtggtagtgtggacgtgtagtctaaattgccactccataag

SEQ ID NO: 31756 - DNA, 895 bp, Zea mays
  Clone ID: UC-ZMFLB73214B05_FLI
tgagatctctgatgctcttgagagaatcattgctggccctgagaagaaaaatgctgttgtttccgaggagaagaagaggctcgtcgcttaccatgaggctggccatgcccttgtcggcgccctcatgccagagtatgatccagtagccaagatttccatcatccctcgtggccaggctggtggactcacattctttgctccaagcgaagaaaggctagaatctggattgtacagcaggagctatcttgagaaccaaatggctgtagcccttggtggcagggttgctgaggaggtgatctttggccaagacaacgtgacaacaggagcttccaacgacttcatgcaagtgtcacgtgtcgcaaggcagatggtcgaaagatttggattcagtaagaagatcggccaagttgcgatcgggggaccgggtggaaaccctttcttggggcaacagatgtcaagccagaaggactactctatggcaacagcggatgttgtggacgccgaggtgagggaactcgtggagaaggcctactctagagcaaggcagataatcaccacgcacatcgacatcctccacaagctcgcccagctcctgatcgagaaggagaccgtggacggggaggagttcatgagcttgttcattgacggccaggccgagctgtttgtcgcttgagatgtcacaaggcttgcggtgcgtatgcttttcggtgttttgtgtcagagcgagcaatcacaaagcaatggagagcccagcttgtaggaaccacatcgatgtatagtagttgatacgcatgtactgactaatttgagcaagtaaaatgttactgctcacaattatagcacacggttcatctgtgaaaacaaatatgctcatctcgtgctaatgggctttatt

SEQ ID NO: 31757 - DNA, 2776 bp, Zea mays
  Clone ID: UC-ZMFLB73214B10_FLI
gtgctccgtacacgctccgctccggccatggccgccgccgcggcctccttttcggccctgccgttccttctacttttgctgctggtgccgtcgctcgacggcgcctccaatgtgacgtacgaccaccgctccctcatcatctccggccgccgccgcctcgtcatctccacctccatccactacccccgcagcgtccccgagatgtggcccaagctggtggctgaagccaaggacggcggcgccgactgcatcgagacctacgtcttctggaacggccatgaaatcgccccaggccagtactacttcgaggaccggtttgacctggtgcggtttgtgaaggtcgttagagacgctgggctgctcttgatcctgcgcatcgggccctatgtggccgccgagtggaattatggaggcgtgccggtgtggttgcactacgtgccaggaacggttttcaggacaaacaacgagccattcaagaaccatgtgaagagtttcacgacatacatcgtggatatgatgaagaaagagcagctcttcgcttctcagggagggaacattatcctagctcagatagagaacgaatatggagattattatgaacaagcgtatggagctggcggcaaaccatacgccatgtgggcagctagtatggctcttgctcaaaacactggtgtcccttggattatgtgccaagagtctgatgctcctgatcccgtgataaactcttgcaatggtttctactgcgatggattccagccaaattcgccaaccaagccaaaaatttggactgagaattggccaggatggttccagacttttggtgaaagtaatccccacagaccacctgaagatgttgcattcgctgttgcacgttttttcgagaaaggtggcagtgttcagaattactatgtgtatcatggtggcacaaattttggtcgcactactggggggccattcattacaactagctacgactatgatgcaccaattgatgaatatggacttcggagatttccaaagtgggcacatctgagggatcttcacaaatctataagattgtgtgagcacaccctgctttatggaaatacaacgtttctttctctgggtcctaaacaagaggctgatatttacagtgatcagtctggaggctgtgttgcattcttggcaaatattgattcagccaatgacaaagttgtcactttccgtaacaggcaatatgatcttcctgcttggtcagttagcattcttcctgactgcaggaatgtggtgttcaacactgcaaaggtgcaatctcaaacttcaatggtgaccatggttccagaaagtttgcaagcatcaaaacctgagcgatggagcattttcagggagagaactgggatttggggtaaaaatgactttgtccggaatggatttgtggaccatattaatacgacaaaggactccaccgactacctatggtacacaacaagttttagtgtggatggaagttactcctcaaaagggagccatgctgtccttaatatcgactccaatggccatggtgtccatgctttcttgaataatgtgctcataggtagtgcatatggtaatggctcacaatcaagattcagtgtcaaattgcccatcaacctgaggactggaaagaatgaacttgcccttctaagtatgactgttggtttacaaaatgcaggattcgcttatgaatggataggagcaggctttacaaatgtgaacatctctggtgtgagaactggaaccatagacttgtcttcaaataattgggcatacaagattggactggaaggggaatattataatttgttcaagcctgatcagacaaataaccaacggtggataccacaatccgagccaccaaaaaaccaacctttgacatggtataaggtaaatgttgatgttccacaaggagatgacccagttgggatagacatgcagtctatggggaaaggcttggcttggttgaatggaaatgccatcgggcggtattggccgaggaccagttctattaatgataggtgcactcccagttgtaactacaggggaacatttattccagacaagtgcaggacaggttgtggacagccaactcagagatggtaccatatcccacggtcatggtttcatccctcagggaacatcctcgtggtctttgaggagaagggtggggatcccacgaagatcacattctcaagaagagctgtgacgagcgtgtgctcctttgtgtcagagcacttcccttccatagacttggaatcctgggatgaaagtgccatgaccgaaggcacacccccagccaaagcacagctgttttgccccgagggtaaaagtatatcttccgtgaagtttgcgagcttgggaaaccccagtggaacctgtagatcataccaaatggggcgctgccaccacccgaactccttatctgttgttgagaaggcttgtctgaacaccaacagctgtacagtctccctgacagacgagagctttgggaaggatttatgccctggagtcaccaaaacactcgccatcgaagcggactgttcttagtggcctacggagtacgaagtgtctcggtgtgcatctaggttccactgcaagtatgcccgtcaaaattctaaaactgtagtgcttgttgcacggcaatgctattgtaacctggatttgaatgtatccatctgagctaggttatgtttcaggagctttcttaaactaacgttgttgctgagcagcatgaaatctgattagcgcaaatatgtttcct

SEQ ID NO: 31758 - DNA, 1180 bp, Zea mays
  Clone ID: UC-ZMFLB73214C02_FLI
gcaaccccaaatctctccttcctcacacacgcgaagctgagagaccaaagaagaagaagaaggagcgagcaagcagaaagttagctagctgctagcgtggaagtgcccaaggcgagagagagagacaagcctaggacggccgcgccaggctagccagccagctgctagctcctgcggacgagccgatggctggcgccgacgtcgacgtcgggacggagctccggctcggcctgccgggaggaggcgccgcggcggccaagaaggacaccatcgacctcaagctgaagctgcccaccgccggcatggaggaggcggctgccgccgccaggccggagccggcagccgagaaggccaagaggcccgccgaggcgccggccgccgatgccgagaagccacctgcacccaaggcacaggccgtgggctggccaccagtccggtcgtaccgcaggaacgccatgaccgtcgtccaggccgtgaggagcaagaaggaagaggaacctgagaagcagcaacagcccgctgccgccaacgccttcgtgaaggtcagcatggacggcgcgccctacctgcgcaaggtggacctgaagacgtacggcagctacaaggacctctccgctgcactcaagaagatgttcggcaccttcgtcaccgcaactgggaacagcatgaacgaggggagattggttgatccggccggcgatgctgatgatgtggtcactacttacgaagacaaggatggtgactggatgctggtcggcgacgtcccgtgggagatgtttgtcgactcatgcaagcgtctgaggatcatgaagagttctgaagccataggtcttgcaccaagaacgaaggataagtgcaagaacaagagctgaagaagatgcagtgttaaagatgttgcccattgtatcagaagaatggtccccttgcagtgcgctgccgttttttttttcctactagaaatataacgcgttttaattactagttggagggagacctgtcttgttcaactcgttcatggaccagaagcaataatatatccgtgtgtagctggattggtgttatgtcatgtcccctaccgtgtctcccagaatctacttggtgattttattccagtgttgttaatcaagtttatgtgattgttaagtaaagggcatcaatgggactattattatttattatt

SEQ ID NO: 31759 - DNA, 468 bp, Zea mays
  Clone ID: UC-ZMFLB73214C10_FLI
caccgccaagatcgagcgcttcttgatccagccgaggatcgagaggtgcctggcggagaggtaccgcgccgcggcggcgggcgacaagacgccgccctggcgggcaatgctcgtgtcggccggcttcgtgccggtgcaggcaagcagcttggcggaggcgcaggcggaggcgttgctcaagaaggtgcccgtgcggggcttccgcgtcgagaagcgcgccggctcgctcgtcctgcattggcaacgcggggagctgctctccgtgtccgcctggagatgctagcaccttgctgctgctcaatctgccattgtttaaggatcctgatatatgtatcttagatagaatccacaagtctgctcgtgctttgtacaatcaaatgggggttatatggtgtatgaaatgttccctgcactcaggcattggatgcttgttttttctgtgaagttcatgatcatgagattcagaac

SEQ ID NO: 31760 - DNA, 990 bp, Zea mays
  Clone ID: UC-ZMFLB73214D12_FLI
cgaccccgcctacgtacactccaagccccaagccaccggctacccaagcctccgacgcccaagccgaccccaccgacgtacaccccttcccccaaacctccgacacctaagccgaccccgcctacgtacactccaagccccaagccaccggctaccaagcctcccacgcccaagccgaccccgccgacgtacaccccttctcccaagcctccgacacccaagccgaccccgccgacgtacaccccttcccccaagcctccgacgcccaagccgaccccgccgacgtacactccaagccccaagcctcccacacacccgacgcccaagccgaccccaccgacgtacaccccttccccaaagcctccgacacctaagccgaccccgccgacgtacacgccttcccccaagcctccgacacccaagccgaccccaccgacgtacactccaagccccaagccaccggctaccaagcctcccacgcccaagccgaccccaccgacgtacactcccacaccgaagccgccggccaccaagccgcccacctacactccgacgccgccggtgtctcacacccccagcccgccgccaccttactactagaaaccgatgcctaccataccacactgctgtcagtctctggagcatttaggtggtctcgatcgatggaagaattgtgtcctagccagccggcaaaggtgacctgctgatgatgatgatgagaggcgagtcctacgccctagtcctactactaccctctttgtgtgctgccatccatccgtccccgctagacgatcgaggagagaataacgcagagctctgtgctcccggcctctgtcttctgccgtcccggccgtttaatttatagtctctactgtgtgttcgtcccatgtgtttagcagcagcagcaggtgtattgtgcgggtatgtaatggtattgcaactatattgggtgtaaaaccataataaatgtggaaaaaatgcaaggaaaac

SEQ ID NO: 31761 - DNA, 846 bp, Zea mays
  Clone ID: UC-ZMFLB73214F03_FLI
gatgatgtctctgtctgggagtggtctggctctgcgtatgatgaaggggctgaagcgtctgaatggttctccacttactttgggaagccaagtcgactagtgcgcttcaaagaagcatcggaaactaggccaaccgatccagattatgcccaaggttataagatcatgttcaccgattgcttcccatttctgatagcttctcagggttcactggatgcactaaatgagattcttaaagaacctgtaccaatgaaccgcttcagaccaaatattttagtggatggatgccacccatactcagaggacctgtggaaaaccataaagataaacaacctaacattcctaggtgtgaagttatgcaaccgctgcaaggtgccaaccattaatcaagaggatggagtacctggtactgaaccaactgaaactctacagacttttcggtccgaccaagtgcttcgtccaagccacaaaaataaacgacaggtgtactttgggcagaatttagtctgcaaggaatctctatcaggtgaaggaaaggtcatcaaggttggcgatccagtttatgttgtgcaggcattcgcttcttctaatgaagccccagcctgattcagggttaaaagtagtgacagggtgttcaaaataagtgagtttgtcttgcacactggataaacaaaaaacagtgggctgttgaaactgttaatgagacaataaaacacttgccgctggacagtaattatgaattagctgtaccttcatcaggggcttatttacttctatgatattacataccttgtacatcagaataatacaaaacaataagaagtgccaaaaaaggaggtgagttag

SEQ ID NO: 31762 - DNA, 1582 bp, Zea mays
  Clone ID: UC-ZMFLB73214G10_FLI
cctacccccgccccattctgcaagccttgctccatttgcgactcgcgagctcaccttccacaccctacctactcctccactctgagctcacaccaaacagcccgtgcaccaaggccaccattcacctccaccaacaacaaacgggaactcttcacagcttcgcacctcgcgtcacaacaccaagacgcacgtaggagggaacctcaagcttcagtcgtccatggctcagcagcaaacaaatcctgaagaggtggtcctcgggcaggaggtcggggccgcgagggtggccactctcaaccgcccgcgccagctcaacggcatctccgacagagtggtgtacctcctcgcacagtttctggagaaatgggagaaggatgagaacgccaaattcgtcatctttaagggtgctgggcgtgcattttctgctggtggggacctaaagatgttttatgaagggaaatcaaatgattcctgcctcgaggttgtgtatagaatgtattggctttgctaccacattcacacgtacaagaaaaccatggttgctcttgttaatgggcttgtcatgggtggtggcgctgcaatggttgcgccactaaagtttgcagttgtcacagagaaaacaatctttgctactcctgaggctagtgttggattgcacacagattgtagcttttcctacatccattcccggctccctggatatttaggcgagtatctggctttaactggtgctagactgaatgcgaaggaaatgatttctgctggtcttgctactcattttgtcagttctgaaaaattggaagaacttgaaaaacgtctactggatttggacacaggtgctgagtctgcagtccgagctgttattgaagaattttcaacagatgttcaaactgatgaagatagtatattgaataagctttcaactatcaacaaatgcttctctgcagagactgttgaggatatcataaaagcatttgaatcagaagcgagcatagacggaaaccaatggatagctccagtcctaaagggtctgagaagatcatctccaactgcactgaagatcaccctgagatcgatcagagaaggtcgaaaacagagtttgcctgaatgtttgactaaggaatttaggcttacaatgaatatactgcggtctgttgtcaatggggatgtttatgagggcattagagctcttagcatcgataaagacaatgcccctaagtggaatcccactacccttgaggaggtgaagtacgaggacatcgaccgtctgttccagccgttcagtccggagctggaacttcaggtcccatctgatgattccaacaggtggagcggcaaatacgagaacacggtctatggcagagcttcccagtgactgtatacaagatcccccagccttttgttattttcatccgaaccactgcattacggaatattcagtttgcggcacgtgtgtatttcgagtgtttgtgtagcgcgacgttccaatgtatgaactgttgcaaaggttacacgatgacatgaagtttgatccaacaccaaaaccatctattagatgggaaagttctgcactttggatgtt

SEQ ID NO: 31763 - DNA, 1497 bp, Zea mays
  Clone ID: UC-ZMFLB73214H10_FLI
cgcgagagtcgctcagggccgcgacgaggagaagcggcagcgcgtcacctctccaatggcatccccgtccctcctccgtgcaacctgtgcgcttctcgagtgctgaggctccctgtccctaagacaagcttgcgcgcgcgatggagggtttttcgagggacttgctgtgcgggattggcaagggggacgcgccgccaccggagaagaggccggggcagctgcgggaggagatggaggaggtggagcttagcctcgggctgtctcttggcggccgattcgggctcgacaggaaggggagcaagctcccccggtcgtcgtccgtggcggccatgctgacaacgccggtggaggtgccggcgccgccctccctctcgcgggcgagctcgctgccggtccaggcggaggcgtcggaagttgagaggaagcaggggctggatggatggggttcttgccgtgagggcggcggtctcggcgtgcaacacgcggcgaggctgccggcgagcgggaacccttcctctgcctcttcggtaggtgaaggacagattttgcaaggcaccctcatgaggactagttcactccctgctgtcattgaggcttctggcaatgatgactggaagaaacgaaaggaagcacagagcctgaagaggctcgaggttaagaagaagaggattgagaggaggaactctctcgcctgcaacacttcaaaagaagctgctgggcagagtccaaaagagatgaatgcaaacactgacaaattagtaagttctgatgaaactattgtcagcgctaacgaaagtcatagcagtggcaagcatctggtgaaggggcttccaccaaagtaccaggccacaattacatcagaagacagttcgtcagcaatgcgaaagaagccaaactcggccttcaaaggaacagccatcactgaggagcagaactcatcatcgtctgttccttcctccggtgaagctataagtagcgtgacggcaccaagtctgcctctgttgtctttggtccccataacagcaacccttggttccagggaagaccaaagcattttaggcagggctggtgcaagggcaaacggcatgggggacgtggaaaggaggatgatgcaggagatgccgggcgtgttcaccaagggcctgtccaacggcagcagggtcgaaggcttcctgtacaaatacagcaaaggagaagtgaggatcgtatgcatctgccatggaagcttccttactccttcggagtttgtggagcacgccggcgccggcaaggtagataacccgctgcgacacattgtcgtcagcgctaccccgaacctgtgactgtgaggccaggcagacccgtgcacaagctatagtgttctgtagactcaggacctgagcctagcgtcagagcaatgtcaccgttagactgtgtggtgcggtgcttatgcccgattaaattggtgggcattgtggtaacataacctgttgataatgttttgacaatgttttgatc

SEQ ID NO: 31764 - DNA, 2671 bp, Zea mays
  Clone ID: UC-ZMFLB73215F06_FLI
ttctgaaccatcgagccatggctgccaagctgactcgcctccacagtcttcgcgaacgccttggtgccaccttctcctcccatcccaatgaactgatagcactcttttccaggtatgttcaccagggcaagggaatgcttcagcgccatcagctgcttgcggagtttgatgccctgtttgatagtgacaaggagaagtatgcaccctttgaagacattcttcgtgctgctcaggaagcaattgtgctccccccatgggttgcacttgctatcaggccaaggcctggtgtctgggattacattcgggtgaatgtaagtgagctggctgtggaggagctgagtgtttctgagtacttggcattcaaggaacagctggtggatggacaatccaacagcaactttgtgcttgagcttgattttgagcccttcaatgcctcctttcctcgtccttccatgtcgaagtccatcggaaatggagtgcaattccttaaccgacacctgtcgtccaagttgttccaggacaaggagagtttgtaccccttgctgaacttcctcaaggctcataactacaagggcacgacgatgatgctgaatgacagaatccaaagccttcgtggtctccaatcatccctgagaaaggcagaggagtatctactgagtgttcctcaagacactccctactcggagttcaaccataggttccaagagcttggtttggagaagggttggggtgacactgcgaagcgtgtactcgacacactccacttgcttcttgaccttcttgaggcccctgatcctgccaacttggagaagttccttggaactataccaatgatgttcaatgttgttatcctttctcctcatggctacttcgctcagtccaatgtgcttggataccctgacactggcggtcaggttgtgtacattctggatcaagtccgtgctttggagaatgagatgcttctgaggattaagcagcaaggccttgatatcactccgaagatcctcattgttaccaggctgttgcctgatgctgctgggactacgtgcggtcagcggctggagaaggtcattggtactgagcacacagacatcattcgcgttcccttcagaaatgagaatggtatcctccgcaagtggatctctcgttttgatgtctggccatacctggagacatacactgaggatgtttccagtgaaataatgaaagaaatgcaggccaagcctgaccttatcattggcaactacagcgatggcaacctagtcgctactctgctcgcgcacaagttgggagtcactcagtgtaccatcgctcatgccttggagaaaaccaaataccccaactcggacatatacttggacaaattcgacagccagtaccacttctcttgccagttcacagctgaccttattgccatgaaccacactgatttcatcatcaccagcacattccaagaaatcgcgggaagcaaggacaccgtggggcagtacgagtcccacatcgcgttcactcttcctgggctctaccgtgtcgtccatggcatcgatgttttcgatcccaagttcaacattgtctcccctggagcagacatgagtgtttactacccgtatacggaaaccgacaagagactcactgccttccatcctgaaatcgaggagctcatctacagcgacgtcgagaactccgagcacaagttcgtgctgaaggacaagaagaagccgatcatcttctcgatggcgcgtctcgaccgcgtgaagaacatgacaggcctggtcgagatgtacggcaagaacgcgcgcctgagggagctggcgaacctcgtgatcgttgccggtgaccacggcaaggagtccaaggacagggaggagcaggcggagttcaagaagatgtacagcctcatcgacgagtacaagttgaagggccatatccggtggatctcggcgcagatgaaccgcgtccgcaacggggagctgtaccgctacatttgcgatacgaagggcgcattcgtgcagcctgcgttctacgaagcgttcggcctgactgtgatcgagtccatgacgtgcggtctgccaacgatcgcgacctgccatggtggccctgctgagatcatcgtggacggggtatctggcctgcacattgacccttaccacagcgacaaggccgcggatatcctggtcaacttctttgacaaatgcaaggcagatccgagctactgggacaagatctcacagggcggcctgcagagaatctatgagaagtacacctggaagctctactccgagaggctgatgaccctgaccggcgtgtacgggttctggaagtacgtgagcaacctggagaggcgcgagacccgccgctacatcgagatgttctacgccctgaagtaccgtagcctggcaagccaggttccgctgtccttcgattagtacggggaaagaagaagaagaagaagcccaggccggagaaccatcgcctgcatttcgatctgtttcaccgcaattcgcattgttagtcgtgtattggagttatgtgtacttggtttccaagaactttggttccttctcgttttttttccttgtttgagcgtttttgggcagcgctggcctggttcctagtatggtgggaattggctgcaccttttgcttcgaataaaaatgcctgctcgttcacc

SEQ ID NO: 31765 - DNA, 1049 bp, Zea mays
  Clone ID: UC-ZMFLB73215H03_FLI
agactcactccaaatgaaaatgcattgcaatggcagcaccggattgggattacgggtccacccacccgtccggctaattgtcacacagaaccaatcccccttgtcctgcaggctgtcattgaccaccttgttctttggcgtttaataccagaaagcaggaaaccaaatagtgtcgtcatcaacttcttcgatgaggatgaacattcgcagccctacttcaagcctccccatcttgacaaccccatttgcactcttctgctgtctgaaaccacgatggcatttggcaggtcacttgtcactgacagcaacggtaactacaaaggacctctcacactttcactaaagcaagggtccttactagtgatgcgtgggaacagtgccgacatggcgcgacatgtggtgtgcccgtcgtccaaccggcgcgtgagcatcacgttcgcaagggtgaggccatcgacgccggtggacatgagcccactcccgtcccccaccaaggccatgacaccctggcagccgcagccggtcacggcctcccaggtgccgtcgcccgtgagcatgacgcagaagcccccggtcagcggtgccataatcggttatgccccgaccccgcaggccgtgctggcgcccgcagcctggggcatggccatgcgcgcgcccgtcatgatggtggctgcagcgcctgcgaggcccatggtgatggcctcatcgggcaccggcggcggcaacatcagcaagcggatgggccgcagcggcaccggcgtgttcctgccttggacggtcggcccgaagcggtacaacaagcaccttccaccgcgcatccagaagcgccggttctcggcgatgatgtcgcccatcgaggcgcagggctgaggacccgcccgacgtcatgtcgccgtcaaaccgaacggccaagatcaagtaggacccggtgcaacgagccaccgtttaattcctagggttcttggagtgttttttttttctctctcgtcgtcgagtcaaaaaaagaaaaaagaaaagaaatggtcaaaacgcgcggacagtgagtttgg

SEQ ID NO: 31766 - DNA, 1810 bp, Zea mays
  Clone ID: UC-ZMFLB73216B09_FLI
gccagcatctcctcccagccggcagcacctaacccgtcacgagcgcaccgccgcacgttccggattccccaccgccgccgggatcccgaccggatccctaattccaaggggtaaacgatgaggccgcacgcggtggggacgggcggcggtggcgtggggaggcggaaggcgggggccgccgctgctgccgcaagccgggagtggatggtggtgccggcgtcgggtccggctcgggtggaggaagccgggaagcacgcggtgatggcgcgtacagggcttcccgcgcgcgatctcagggtactcgacccgttactctcgtacccgtccacgatcctgggccgcgagcgcgccatcgtcgtcaacctggagcgcgtcaaagccctgatcacagccacagaggtgctgcttccaaacaccaaggatcccgcctttgcgcgcttcgtccgcgacctccagacccgtgtcctcgcatcttcgtctgaccaggcagctgagttcactgacatggaaggtgaatcatctaatgttgcttcaccatttcccctaccaagtgcatccaaaggacatgaaatggagatgactaagaagactactgctgttgtgcctgagatgactagtagcagcagtatgcccaatttagctattgcaaaagatggaaacaccaacgttttgcctttcgaatttcgagctcttgaagtgtgccttgagtcagcctgcagatctttggaagatgaaacttctactctggagcaagaggcatatccagcattagatgagctgacatcaaagatcagcacattaaaccttgaacgagttaggcaaatcaagagtcgtctggttgcgatatctggtcgagtacagaaggtgagggatgagctagagcatttactggatgatgaaatggatatggctgaaatgtacttgacagagaagcttactcaacaagaaattagtgaggcttcatctagagctgaggttgatgatccatctcaaacagaagaggatagggatgaagattatagaagtgagccagatggaagcaatgatagctttattggttataagcctaatattgaagaactagagatgcttctagaagcttattttgtgcaaattgatggcacacttaacaagctatcacatcttagggagtacgttgatgacacagaagattatatcaatataatgttggacgacaagcagaatcagctgttgcagatgggagttatgctctcaactgctactgttgtcatcactgctggagtggctgtagttggcctttttggtatgaatattggcatatcactttacgcagacccaacaactgaggaggaaactcgagcagcaaacagaaaattttgggaaactacttttgggaccgttgctggctgcgtgattttgtacatcatagccatgggttggggaaagagaagtggattactgcaatgaggtggaaactcatgcaatgaggtggaaacatgagtgttctgcacccaatgaaaactggtttgacaaaaatctccaagatgagatgttgcattggcatgccgctcaaatacagtacgtcctattccactatgccgggaaagaaacatcttgtgtacgctagtagtaatgtgtgtgaaataaaactattgtacaatttgttgcccctcacctgtcatggcaactcagtaattctgtacctgtttaccacggtagctgcggtttttgctcttgcagttgtaatcatttctgtaactgttgtaactgtatccaccgaactgtaatatgtaaaggaagtatatgagaaagctgcactcttgtctgc

SEQ ID NO: 31767 - DNA, 2817 bp, Zea mays
  Clone ID: UC-ZMFLB73216C07_FLI
ctcctcccagtcccaggctcactgtcgctcctcccaagaacccgcccaaagaatcctagaaatccaagaaagggagcaaccaaaacaggaggaggtctgcaggaggaggagcaggtcagcaggaggaggtggtgctgaaggggaagatctcacaagtgtgtgaagaccacacagtctcgcgcactcgcaaacccagtgcgcgctgcggtcttcctcttcgcccaccttcttggagcggggaggttggccatgaggaggtggtggccggctgccctgctgggctgcgcagtggcggtgtccgttctggtggccgccgtggaatgcgctgtgacttacgacaagaaggcggtgctgattgatgggcagaggcggattctcttctccggatccatacactaccccaggagcacccctgatatgtgggaagggctgattcagaaagctaaagacggaggcttggatgtcattcagacctatgtcttttggaacggacatgagcctacgcctggaaattactatttcgaggagaggtacgatttagtcaggttcataaagacggtccagaaggctggcctgtttgtacatctccgcatcggtccctacatttgtggcgagtggaacttcggcggcttcccagtttggttgaagtatgtaccgggcatcagcttcaggacagacaacgaacctttcaagacggccatgcagggtttcactgagaaaattgtgggaatgatgaagagcgaaaacctctttgcatcccaaggtggcccaattatcctctctcagattgagaatgagtatgggccagaaggcagggagtttggtgccgcaggtcaggcatatatcaactgggcagcaaagatggcagtcggattgggtactggtgtgccgtgggtgatgtgcaaggaggaggatgcacctgatccagtgatcaatgcatgcaatggtttctactgtgatgcattttctcctaacaaaccttacaagcccacaatgtggactgaagcttggagtggctggttcacggaatttggtgggaccatccgccaacgaccggttgaagatcttgcatttgctgttgctagatttgtacaaaagggtggttcttttatcaattactacatgtatcatggaggaacaaattttgggcgcactgctgggggtcccttcatcacaacaagctatgattatgatgctccaattgatgaatatggacttgttagagaaccaaagcacagtcatcttaaagaactccacagagctgttaagttatgcgagcaggctttggtttctgttgacccagcaattactacccttggtaccatgcaagaggcccgcgtcttccaatctccatctggttgtgcagctttccttgcaaactacaattctaactcctatgcgaaagttgtgttcaacaatgagcaatacagcctaccaccttggtcgattagcatccttcctgattgcaaaaatgttgtttttaacagtgccacagttggtgttcagacatctcagatgcaaatgtggggagatggtgcctcatcaatgacgtgggagaggtatgatgaggaggttgattctctggcagctgctccattgctcaccacaactggtttgcttgagcagcttaatgtcacgagagacagcagtgattatttgtggtacatcaccagtgttgacataagctcatctgaaaactttctacaaggtggcggcaagcctctgtctctcagtgtgcagtctgctggtcatgccttgcatgtctttgtcaatggacaacttcaaggttctgcttatggtaccagggaagatcgaagaatcaaatataatggcaatgctagccttcgagctggtactaacaaaattgcactgctgagtgttgcctgtggattgccgaatgttggagtgcattatgagacgtggaacactggtgttggtggtcctgttgtgcttcatgggctggatgaaggttcacgagaccttacttggcagacttggtcctatcaggttggcctgaaaggcgaacagatgaatctgaactccatagaaggctcaagctcagttgaatggatgcaagggtcattgatagctcaaaaccagcagccattggcctggtatagggcttactttgagactcccagcggggacgagccattggctttggatatgggtagcatgggcaagggccaaatctggataaatggacaaagcattggacgctactggacagcatatgcagatggggactgcaaagaatgcagttacacgggaaccttccgggcacccaaatgtcaatcaggctgtggtcagcccacgcaacgatggtatcatgtgccaaagtcctggctgcagcccaccagaaacctgctggtagtcttcgaggaacttggtggggattcatcgaagatcgccctagtgaagaggtcagtctcaagtgtctgtgctgatgtatctgaggatcacccaaacatcaagaactggcagatcgaaagctacggcgagcgcgagtaccacagggccaaagtgcacttaagatgtgcacgtgggcagtccatttccgcaatcaaattcgcaagctttgggacacctacgggaacctgtggagatttccagcaaggagattgccactcagctaactctcacacagtcctagagaagaaatgcattgggctccaaagatgcgtcgtcgccatctcccccgagagctttggaggagacccctgcccgagcgtgacgaaaagggtggcggtccaggcagtatgttctcccgtcgcgtagccttacttctccaagcaatggatttggaaggcggtcgac

SEQ ID NO: 31768 - DNA, 650 bp, Zea mays
  Clone ID: UC-ZMFLB73216D04_FLI
tcagatttgagctggtttcatttgcccccctcctatttgttcatgggtggattctgctgtctccgagactcggaggctgtcgagacgctggcccccaacataagtacaggagaatctgacccagcggcagctgttcctgcggagagcccccatggcatcgaggttggtgttgagttcaagccagtggagcgccccgtggaacctatcaatcttgatgagccagtgaaatgcccgcttcctgagccgtctatactgcacgacgggaggatatggaaggagaaaatgtcttcagtcagcacgagggtgagaacagacttgccggtcgtgaaggaagggtcgcagctggagcctgacggtagcagcgctaggtcacgatctgcagttccaaggcgcgccatactgccctccgtaagcgcgcccgagcacaacatcctagcgctgcttgacgagtgcgacgtctccgggagccgtggctctgctgaatgagctcgagttgggcgtcgccagcacattgtaactaaactgcgtttgccacgagctgatctgagcacagcaaaccttacagtatgtctgaaaagaattggaactacgcaacagatcttttgtctggattgtatctataaatacgagtgaaagcgttttggggaaac

SEQ ID NO: 31769 - DNA, 1959 bp, Zea mays
  Clone ID: UC-ZMFLB73216E03_FLI
ggtcccgcggaccaatcagctagagagctgagtgatgtctcgcaagcgatgagcctcatgagatcggatcggaggccatcattccacgcactggtgatgaaaagctcgcttggtgcccctagctagctagtggcgaagcaaggaagctagccagccaagatcctgcttgtgagaaaaaaaagggagtagatccagtaattttaagaatctggtcaacatacctacggcaagatggctgatattgtaatccgcgacctggagagggtagtcaaagtcgcacttgcgatcaagaaggccgtggaaacagctaagcagaacaaggaggattgcgttaagatcggtgagcgtgcagctgaggtcagtactcatatgaagcggctgaaggagaatacaaaagcaatggaggaccctttgatgagcgatacgctcaagagtatggaagagacactccaacgcgctcttaagctcgtcaacgagtgccagaggaagcacgtcgtgctccattacttaaatgccggcggcatgtccaagaagctgcgccaggtgcaggaggatatatcatataaattgtggaatggggtcttggccaccgttgtcgacacaaggattgctttggaaaagcagatccaatctgctattgatgcccctctgcaccaacaccaacagcgtgcagggcaggtggaaacctcacaaagtagtcattcaagaactgatcaagctagcgagaaaggaaaggccatgttagcaagagtaaaaagggagcagtctgaacttttgtctggtgttcctcagttcagtttgtctcaactgaacgctgctacaaacgaattttcagagggctgtgtggttgaaagaggctactacaagggagtattacacgacggactagatgttgccatcaagaagttagcagtctctgatgatactcaagagaggcgcctgcaacttgagcttaatattcgtgcaaagcttgaacatggaaacatacttaaacttctgggatattgcctcgatgcccaagaaaaagaaaagctatactttctggtcgaagaatacataccgaatgttgaaagcttggagaaatttattaatgtctctcgactcgattggtcctcgtgtttcaagataattcaggggatagcaaagggcttacattgcttacataagcatcatattctctatatggatttgaatccagccaacatcctcgtccgttcagatatgaatcctgtggtcatcaattttggatcatcaatagtgctggatcgtgatgatgataaggtcaccggggatgccgtagcaggcacactgggttatgtcgctccagaaaaacttatggaagcttatgcatcaatgatgtctgatgtgttctcttttggaatcatcatcattgagatcattaccggcaggagagcttcacctttcgttgatttaccggaatggggttcagttgatgagatgattacatcagcgaaagggttatttgatccggcgctagctaacgagtctcagctgatgaagattaataggtgcagagaggtcggactgaagtgcattgagcgggatccgaaacgtcggcctaccatgggaaatgtccttgagatgctaagtagctagagtgacaggcaccgatttgaggtgttctcggttaggagtggattgaagcggattagagataatcaaatctcttgctagtcaaaactgaatagaaatgggtttactttccctcaatcccctcctacctatgcaaccaaacaaggccttatgggtttcaacaatttggtttgatgtattgtcacaaattgatcatttgtaacattcaagatttatgcgcaaatgtattggcgtgtggattagagagtttctatcttataggctggctcttgaatgatatggcaaacataagctagcaaaccagttcaactactgagggtgcacatgaacctcgtgtttactagc

SEQ ID NO: 31770 - DNA, 1781 bp, Zea mays
  Clone ID: UC-ZMFLB73216G03_FLI
ctccctcctcctccctgcaaatcctgcagacaccaccgctcgtttttctctccgggacaggagaaaaggggagagagaggtgaggcgcggtgtccgcccgatctgctctgccccgacgcagctgttacgacctcctcagtctcagtcaggagcaagatgggtgccggcggcaggatgaccgagaaggagcgggagaagcaggagcagctcgcccgagctaccggtggcgccgcgatgcagcggtcgccggtggagaagcctccgttcactctgggtcagatcaagaaggccatcccgccacactgcttcgagcgctcggtgctcaagtccttctcgtacgtggtccacgacctggtgatcgccgcggcgctcctctacttcgcgctggccatcataccggcgctcccaagcccgctccgctacgccgcctggccgctgtactggatcgcgcaggggtgcgtgtgcaccggcgtgtgggtcatcgcgcacgagtgcggccaccacgccttctcggactactcgctcctggacgacgtggtcggcctggtgctgcactcgtcgctcatggtgccctacttctcgtggaagtacagccaccggcgccaccactccaacacggggtccctggagcgcgacgaggtgttcgtgcccaagaagaaggaggcgctgccgtggtacaccccgtacgtgtacaacaacccggtcggccgggtggtgcacatcgtggtgcagctcaccctcgggtggccgctgtacctggcgaccaacgcgtcggggcggccgtacccgcgcttcgcctgccacttcgacccctacggccccatctacaacgaccgggagcgcgcccagatcttcgtctcggacgccggcgtcgtggccgtggcgttcgggctgtacaagctggcggcggcgttcggggtctggtgggtggtgcgcgtgtacgccgtgccgctgctgatcgtgaacgcgtggctggtgctcatcacctacctgcagcacacccacccgtcgctcccccactacgactcgagcgagtgggactggctgcgcggcgcgctggccaccatggaccgcgactacggcatcctcaaccgcgtgttccacaacatcacggacacgcacgtcgcgcaccacctcttctccaccatgccgcactaccacgccatggaggccaccaaggcgatcaggcccatcctcggggactactaccacttcgacccgacccctgttgccaaggcgacctggcgcgaggccagggagtgcatctacgtcgagcccgaggaccgcaagggcgtcttctggtacaacaagaagttctagccgccgccgctcgcagagctgagaggacgctaccataggaatgggagcaggaaccaggaggaggagacggtactcgccccaaagtctccgtcaacctatctaatcgttagtcgtcagtcttttagacgggaagagagatcatttgggcacagagacgaaggcttactgcagtgccatcgctagagctgccatcaagtacaagtaggcaaattcgtcaacttagtgtgtcccatgttgtttttcttagtcgtccgctgctgtaggctttccggcggcggtcgtttgtgtggttggcatccgtggccatgcctgtgcgtgcgtggccgcgcttgtcgtgtgcgtctgtcgtcgcgttggcgtcgtctcttcgtgctccccgtgtgttgttgtaaaacaagaagatgttttctggtgtctttggcggaataacagatcgtccgaacgacaacctttttttgggt

SEQ ID NO: 31771 - DNA, 3319 bp, Zea mays
  Clone ID: UC-ZMFLB73216G04_FLI
gagaccactatccctggtcggattctgtctccatccattatagaattttatcgctagccacctgctcatatcatcatgaatcaacagtaaaagctttgagccaaccaaacaaagaataatgtatagataaacctttcttcattaacaaaatactttacaactagtggtgctggtcggtaagagctctgactgagcaaccatggcggagatagtcaccggggcgatgggcactctcttgcccaagctggccaacctgatcaaggaggagtataacctgcagaagaaggtgaggggtgagatcatgttcctggaggctgagctcaagagcatggaggctgctctcatcaaggtctccgaggcacccatcgaccacccacctgacatccaagtcaagctctggacaagggaggtgagagagctgtcctacgacctcgaggacagcatcgacagattcatggtgcgagttggcgatggcaagccacatagtttcaagggattcattgatagaagcctccacctgctgacaaggggcaggattcaacacagcatcggcatagacatcaaggagatcaggagccgcataaaggatgtgagtgaacggcgtgacaggtacaaggttgatttggttccttccaagcctgttggcagaagcatcgacaacctgcggctgtcggctctttacagaaaggcgacagaacttgttggcgccgaagagaagagcagtgaccttgtgagaaggctcatggagggcgacaaggaggcatccaagcagccagttgtactgtctattgctggctttggagggttaggcaagactactcttgctaatcttgtgtatgagaagattaaagggcaatttggctgtggggcatttgtttatgtgtctcataatcctgatgtcgtcaaggttttcaaaaacatgctctaccagcttgatggagacaaatacagggacatcaatcaaggaacatggagtgaagaacaactaatctgggaactgaggaagttccttctgcacaagaggtacttcattgtcattgatgacatatggaatacttctgtgtgggaaacaatccaatgttctttgatgcacaatgaatgtggaagtataataattatcacaactcgtaatattgatgttgcaaaacaagctggaagtgtttatcaaatggaacctctttctctcagtgactcaacaaagttattctgccaaagaatttttggcagtgaagacaaatgtcctccacataatttagctgaagtggctggtaaaatcttacagaaatgtggtggtgtaccattagctatcattaccatggcaagtatgctagccgataaaactggaaaggaaataaatacacataactattggtcacatgtgtaccaatccatgggttctggtctaaatggcagtactaatgtgaagaatatgagaaggatactatcagttagttattatgacctaccttcacatctaaagacttgcttgctatacctaagtttgtttccagaagactacagaattaaaacaagaggtctcatatggaaatggattggtgaaggttttgtccatgaagaacaggggaagaccttatatgaagtaggtgaggattacatcgaagagttaattaacagaagtatgttggaacctgtagatattggccgtgatggtaagactgtttcttgtcggatacatgatatggtccttgatcttatcagtttcttgtcaaatgaggagcattttctaacaaaagtaggtgagcaacagcccatatctcttgatctgcctaaaaagatccaccggttatccctccaaattagccaggaagaggaagtcaagcagctggctacaatgagtttctcccacgtaagatcacttactgtgtccactaaagtgttccagttgatgccaaaactttcggcctttctggtcttacgtgtattgaatttaaagaaatgtaagggagtgaggaatcaccactttaaagatatttgcaatatgtttcacctgagatatttgagtctcaatgcggaatttattactgagatgccacgggagattcagaatctacaatttttgcaagtacttgacataagtaatcttgggcacaaagtaaagatgccaaccattattcacttgcgacagctactgcgtctttgttttaggccgatgtggggcataagactgccagatggattcggaaaactaacctctctacaagaagttaaagggatcataactatcaagttaccaagcatgctgcataatctggggtgtctgaccaatctccggaccttggccatcgacttttgtgattgggatgagagctatgaggaacctttcatccaatgtctatctaaccttgtcagcctcaaatccatggaaataaaaggtaccatggtgagcagcctatgttccgaatgtgacaaattgtaccctggtcctcaacatctttgctccattgatattgagtcgactgcagtgccaagatggatgtcatcgctctgcttcttgtctagcataaacattgaactattagctctgggagcacaggattttcatgtccttgggagcataccatctctacgttgtctcagtatacatgtgaaggaaaccagagatgaaagattggtcattggcaagtgttatccattccggtgcctaactgagatgcaaatcgattatgaatccatggcggtggtgttcgcaccaggaagtatgcaaaacctcaaagaacttcatttagtgttcggggtgaaagaggtaatgcataagtatggtgattgtaactttggtttggagcacctcatgtcactggagcatgtctctgttaaaacaatgtacagtatcatgcccgaggaggtggaggccgtaaaagatgaatttcagaaatccctggacatgaatcctggcaagcccacgttgatagtagattataagtatccgataaaaaggaagattaggtctcatgcacaagcaataagagcagcaattttgttcgctaatgcaggccgcatccctgctactgaaggattataaacattctctatcgccttgctaataaactgcatattcccttctctaattggcactgcattctcaaggtcgcatgggtactagtggcaaataagctctctgaagtcatgaattttctgcagataatgtaactgcagtaaatgtctacgcgcgtgtttgtaaaaaagagctcaatatctaccttgtaaattcgccatgttcatactcatacagtagtcttaagcttgtagccgacaaaatatttccctttcttgaccgagaaggcgtgattgaatacttttc

SEQ ID NO: 31772 - DNA, 1275 bp, Zea mays
  Clone ID: UC-ZMFLB73216H08_FLI
cacaattgatcttgaccaggatgagttcaagtactggttcaagattttgtcagatcattcgccggacctcgtggacaaggcagttgctagtgaaggtgggactgatgatgccaaaagacggggtgatgcatttgcacatgccttttctgctcatctggcaagattgatggaggagccagctgcttatggaaagtttggtttggccaacctgttggaattgagagaagaatgtctgagggaatttcagttcgttgatgcatatattagcatcaagcaaagggaaaatgaagcttcactggctgttttaccggatcttctgatggaacttgatagtatgaatgaggaagctaggctgcttgcactaattgaaggtgtccttgctgcaaatatatttgattgggggtctcgagcttgtgtagaactttatcacaagggaactataatagaaatctatcgcatgagtcgcaagaagatgcaacgtccttggcggattgatgactttgacatgttcaaaaagagaatgcttactgataggaaggaccaatcatacaaaagagcactgctttttgttgataactcaggtgctgatgtggtccttggaatgcttcctttagctagggagcttttacgccatggaacagaggtagttcttgttgcaaattcgttgccggctttgaatgatgttaccgctaatgaacttccagaagttatagctgaagcctcaaagcactgtggtatccttcggaaagctgcagaagctggtggattgatagtcgatgcaatggctggcatccaagatgatctcaaggatgagacagtgtcagtgccactaatggttgttgagaatggatgcggcagtccatgtattgatttccggcaggttagctcagagcttgctgctgctgcaaaggatgcagatttgttaattttagaaggcatggggcgatcactgcataccaacctcaatgcccgttttaagtgtgatgctctaaagcttgctatggtcaagaatcagcgattggcagaaaaactcttcaatgggagtctatacgactgcatctgtaaatttgaaccagttccttaacaacatggtagcgactgcggaggcaactagcagaagcagcttgattggtgtagccggtgagacagaaacaatcatacagcgtacggcataaccgatccttccatgtacggggtacaagaaacgccctttcaataaaacaataacagtgttttctgaaacgatataataaaggctctaaaggctctttccag

SEQ ID NO: 31773 - DNA, 828 bp, Zea mays
  Clone ID: UC-ZMFLB73217A02_FLI
tgtggaaccccagccaggtggtgttcatggtggacgacacgcccatccgggtgtacgagaacgccacgctgcaccaaggccacggccacggccaccaccggcacggcggcgcggcggcggaggccaacggcaccaacaccaccaccaccacgctggctgctgccccggcgccgttccccgggccgcagccgatggccgtgtacagctccatctggaacgcggacgactgggcgacgcagggcgggcgcgtgaagacggactggtcgcacgcgccgttcgaggccacgttccgggaggtgcgcgtggacgggtgcgcctgggcgggcaacgccacggacggcgacgccgcggaggcgcgccggtgcagcgagtcctcgtggggcaaggagggccgctactggtggaaggagaaggagatgtcggagctgagcgtgcaccagagccaccagctcgtgtgggcgcgcgcgcaccacctcgtctacgactactgcgtcgacaccgaccgcttccccgtgcagccgcccgagtgcgccggccgctgagctcctgaccgacctacgtcgatccgtgcatggcatggcaatggatctcgtcgggcggggtggaaatggaactgcttgtttctctcgctggaccgtgggggtttgtgttcgtgcgtctgcagcaatggtgtctgtctgtctgtagctctgtttccgcttattgaaggtcgcattgttggcgacccatgcgtgggtgaaccggcggtggtgtctcttgtagaaacaagtgaatgggagggattatgggaacgaagaacgatgctgcgctccgtttcagagatttgct

SEQ ID NO: 31774 - DNA, 581 bp, Zea mays
  Clone ID: UC-ZMFLB73217A10_FLI
gtgaagcactaccgaatcaaaccaaggagtcggtgactgttgctgcaggctattcatggattaatttgctgctgctgatgacatacatcaagtgacttactgacttgtatcaagcatgctgttgtttcttaagcttcgtcaacttcccaatttgcagctgcacaactataggtcttgttgcccccctttgtcctcatggatttccttaacggcaaaattttgggcaatattggagaaaggagtgaagaacggtctcatgaattgaatgtaatcggtgcatgatttgtgcggtaggcctctggccgtcctcctgtagctgttaagtcgtggtgactacttttgcctagttttggcctaaagtgtccatcaatttgtcagagatcaaactagccgaacctttgccttttgctttgtccagacacattagctatattgcaggtgtacatatgtacttcagaatacttgaacttggcaaatggcgatcgctaggtgatatcacgcttccagatgtctgcaggttaaatgcatttacaactatgttcatgcatcaatgcaactgtttagcagggcttttttatgag

SEQ ID NO: 31775 - DNA, 317 bp, Zea mays
  Clone ID: UC-ZMFLB73217B04_FLI
cgacggtcaagcttcggcgaccaaatgatccaattcttcaagttctacgagatcgaataccctgagcatctgtttggtgaagcgtgaggacacgtgtcatctgaagagcaagttggtacctggaatctcaagtgccaggtcaagaacaggtaccgcaggatgaggtgcatggaggatgctgtgatgagttcgtgagaggtctaggccgtcgtctcccagtcaactttgggttgctggaccgttgtctccttataatgtaattatttacttatttgtatagaactcctgttatgtagtaaagatgtgacattcgatcc

SEQ ID NO: 31776 - DNA, 1384 bp, Zea mays
  Clone ID: UC-ZMFLB73217C06_FLI
agcgattgaaaaatctgcctccgacaattcctagcgcgatccagcagctgcctcggatcggatcggattggaccggcgccggaagaggagaggaggcgtggggggttcggggcctgcctcgctgccgcccatgtcccgcatgaaacacctgctacgcaagctccacctcgccgggggccccgccggggccgggggcgcagcgcccgaccaccaccgctcgaggcaccgccgctcggggcatccgacgccgacgccgacgccgggggcggcggcggcggcccccgagccgccgcaaccggcggttactcctgccgcggctgtgtcgatcgcccccgtggtggaggagcctagaggcctcggggcggaggcggccacgacgcggctggaagaggactaccaggtgcgcctcgcgctcgccatctccgcgtcagaccacgcggggctcgtcgacgcggactccgtccagatccgcgcggcagagctcatcagcctcggggccggcgcggggtccggacacgaccggagccccgcggaggccctctccgcgaggtactggaaccacagcgtagtcaactacgacgagcagctccccgatggcttctacgacgtctgtggcgcgcagctgcatcccggattccaggccaaattcccctcgctcgaatacctcagggctgtcccgcttgggcgcgatgccccgttcctggccattttggtggatcgggagcacgaccctgccctaaaacgactggaagatagggctgcacagattgctgcgcagactagggcaggacatggtgctgctgcttcagctgagcttgcgcagaggattgtgggtctcattgttaatgcgatgggcggtctggttgaggatgctgatggtatgaacagggagtggagcatcaagagccgcgagctctctctcaagctaaacagtgtcgttcttccacttggctcgcttcgggttgggctgtcgcggcacagatcactgctatttaaggtacttgctgaccgagttaacctaccatgtaagcttctgaaaggaatatgttataccgggacagatgaaggagctgttaacttggtcaaagttgattttgacagcatggaatatattattgatttgatgggagctccaggcaccttaatcccttcagacatttctgggagtcagtttcaggactccaacaatagccaattgagcagtgatgccattgaagagagtgtagcagaattgtgcttagcccttgagcagattaatggtggatatgagaacaaaaatactattggaggatgctcatctggtcacagttctattttagcgctcactagttcacacctgggagatttatctcagacagagcttaaacaaaatgttgtttctgag

SEQ ID NO: 31777 - DNA, 1037 bp, Zea mays
  Clone ID: UC-ZMFLB73217C11_FLI
gtccatcccatcccgccacgaaattctccacgctccgatccaatcgcaacaatgaagttcggcaagagcctcaacaaccagatcgtggagacgctcccggactggcgcgacaagttcctgtcctacaaggacctcaagaagcggctgaagcagatcggcgccggctctggcgagcggcggagcaagcgccagcgggtgggggacgggcgcggcggatcctcgccgcctgcgatgaccccggaggaggccggattcgtcgcgctcctcgacgccgagctcgacaagttcaacgccttcttcctcgagaaggaggaggactacgtcatccggctgaaggagttgcaggacagggtggtgagcgccgcggaggtggggtcggcggaggagctgctgcgggtgcgcaaggagatcgtcgacttccacggcgagatggtcttgctggagaactacagcgcgctcaactacaccgggctggtcaagatcctcaagaagtacgacaagaggaccggcgcgctgatccgcctgcccttcatccggaacgtgatgcaggagccgttctgcgccaccgacgtgctgtacaagctcgtcaaggggtgcgaggagatgctggaccagctcctcctgccccggaaccagcagcggcccgtgccgagcgacaacggcggggaaggagacagcgacggcgacgacgacaagcaacgaccggcggagccaggcgcctcatcgctgcccagcggcggcggcggtggcgctggcgacatggagctggaggagatcgaggacatggagagcatgtacatgaagagtacggtggccgcgctcagggcgctcagggagatcaggagcgggagctccacggtgagcgcgttctccctgccgccactacggtgattgacacgttgtgttcggttcagtagcgaagcgagacagaacggggccgactgcgctgttgctgtaggtagtgtttggttcaaagaagacacgaacaaaatgaaagaaaatctgtaaaatgatagtaatattcatctagtattctc

SEQ ID NO: 31778 - DNA, 1474 bp, Zea mays
  Clone ID: UC-ZMFLB73217E02_FLI
gtcttcgtcccgccatctccgtctcctcctcggcctccccgcaccccatcttcgccgtattcgctatacttgatggccataatggtaacgcagccgcaatatacacaagggacaatttgctcaaccatgtccttagtgctatgccacgggggctgtccagggaggagtggttgcacatgttgccccgagcactggttgcagggtttgttaagacggacaaggagttccagagcaaagggcaaacttctggcaccaccgctacatttgtgataattgatgggtggactatcactgttgcctctgttggtgattctcgctgtattttagatgctcagggtggggctgtttctttgcttactgtggatcacagactagaagaaaatgttgaggagagggagcgcgttacagcaagtggaggtgaagttggaagactcagtgttgttggtggagcagagattggtccgctacgatgctggcctggaggtctatgcttatcaagatccattggagatatcgatgttggcgaatttattgtccctgttccatatgtgaagcaagtgaagttgtcaaatgctggaggaagacttattattgcttcagatggcatttgggatgcattatcctcagaagccgctgctaagtcttgcagaggtttgcctgctgagcttgccgcaaagcaagttgttaaggaggcactcaggacaagagggctaaaggatgatacaacttgcattgttgttgacataatcccacctggtcaaacaatacggcctctgtctcctcctaaaaagacgagcaagctgaagtcttttatttttagaaagaaagcgaaggacccttctcagaagttgactaaacagcattcagctgttggtatcgttgaagagatatttgaagaaggttcagcgatgctatcagaaaggttaggtcctgatttggatggcaggagaacctcaagcctgtttacatgtgccatctgccagttagacctggagccaagtgaaggcatttcggtgcatgctggatcgatcttctcttcgacctccaggccatgggaaggcccattcctctgctcggactgccgtgagaagaaggatgccatggaaggcaaacggcccagtggcgtcaaggttctgtagtatacagcaaccgatccttgtagctgcccgaaaaatcccacccttcttatttccttttctcgtgaggaccctttcaaagttttacaatttgtttcctttaaattcggatgattttaggatgcgtcttattttgcgaggaaatagccaactatgtaagtagctgttggcaaaaggaaatgtgaagcgagcgaatagggcatcccttcatttttctttctctcttccattcggaatggatgaatagggttgccttcaatttttgttctcttccattcggaatggacagacagtaactcagctcacgagtaatgacagctaacatattctttatttgt

SEQ ID NO: 31779 - DNA, 1029 bp, Zea mays
  Clone ID: UC-ZMFLB73217G03_FLI
aatgccggcacagatgttggccgaagcaggacgccacgaggcgaacaaccaactgcttccttccccgccggccgccgccgcctacaactaacacttcacgtgcccccatccttttccgcctcaagtcaagtgttcacggtccatcctctcgagagtctaggcccttctcccgaagccgcagacgcagaaaacggctctgcatatggaggcgaagaagaagccgtcggcccccgccgccgtcggagccgcgccgccgccgccgggtaacgggtacttcagcaccgtcttctccgcgccgactgcgggaagcgcaagtgacgcaaagcatgcggacttgtacacgatgctgaacaagcagagctccagagggcagaatggcagagatggcaaatcccacagccgccctacttacaaggatggcaaacatgctcatccaaatgagccatcagaatctccttactttggctcatccgtgcattacggtggtcgggagttctacagcagcgttttacggaagcaaccagccaatgaaccccatacggattacaagggggacaacccggatggctctgctaccagaggtgattggtggcaaggttcactttattactgaataatctgctgggacctctcccttttgtgaacaaggaataaaaggggtagagctgagaatggtttgttgtagtgttggaagtgttgacgcgagccgtcaagcatcgatcaatagtaatagttgtaatagttgaaagctgcgtcgtgactacaagcatcctgttggtggaggcagtattttagatccatcatcacgcctggacagatgtgggtgtccttttgtattcctgtttccctggtttaggtgcaggtgctgtactaaaatgatgaaactcgcagttcgataaaagcagttgccaaagagtcgcagctggcaggattacttgtctacaagccagctatatggcatggtttggcagccaccgtatctgaataaaatcatagtacaaaatctctgaatatatatgtcatacgcat

SEQ ID NO: 31780 - DNA, 3044 bp, Zea mays
  Clone ID: UC-ZMFLB73217G06_FLI
gctggttattcatactcgggccgatgtgcagcttatgcttttggcaacatcgatccaactaacatttctcgggtgtttctgcttggcccttctcatcactactacactccaaaatgtgctttaaccagggcttctgtctactgtaccccaatcggggatttgccagtagaccaggaaggtgagtgtttactcaatttggatggttgaatgtttttagcctagttctgtattatgtactctactgtcaagggttttgggattcaaggtagctggacctcggctacagagttcgtagtctcagacaataatggtgtgggaatttccccccggacaccctatggtgaagggggtgagattaggaagaagggagattggggaaatgaatctgttattgcttaatccttaaatgttcccatacatcatgtgtaagtttgaatctgtatatttgtttttgttggaatataatataagtgaattgtccatatcttcttatcagtttaagctttttggattgaactggttgatgcatgcaacttaatatgttactagccagttgaccgtgctttgctacgttggtatatagcatataaataggtattgaaatatttattcaaatataattattatttatttctaaacattaagatacgttggtctggtggttaggcccaaatttctggagcagggggtgcgggttcgagtgctcgttctacactattttttgctcggtgtgatagctgcgcgtgtggggtcggttgctgggcagatgcagtagctggttgcacgggtgttggggggtccccacagggcagtagttgagagagcgttgcgagggcaatgggcgtggggcccacagggcacggcgccgaggcggggtgcgtggggctatgttttctggtcgctcgaccagctagtcgaactgggggaccgaccagcgactaatctcgattagtcgtcgactaggtccgactaatcgagctctggtcgacctggtcgtttactggtcgtcctgttcatccaggagaccaggacctatgtatatactatataatatatactattatactatatagtaaataattatataactatatagtatatatgagcttcatatactatattatgaaggatatggtaaacatgacatgaattcagcaatactgaaaagtgaaaacagcagagaaacacttctagttattaatactacaagtcccagataccagtaccacacaacacacattaatactacaagtccaaaaaaaatctaggtcctaaacctagtcgcccagaaccggctaatcgagcgactaatcggccctaatcgtcgactagtcggacgaccagggcgaccaggtactctagtcgagttggctgcctaatcgagctctgctaaccgactagcctgactaatcgcgactaatcgcgattagtcggacgacttgaaaacacaggcgtggggcgggagaaccagtcgggacgtgtgggcgggcccagagtgtcagcgcggagggtgaagccgtggtagcaccagatgcccacattagggttttaaaagagtagtatagatcaaagccagatgtctcgagttcgaatcttggttagtgcaaataaataaaattattgttgctcggttctattccacatctgagagccaagagagctggaatataatatcagtgaattgtccacctctttctatcaacttaagcttttgggttgaactggttggtacatgcaaacttaatagttttgtaccggtacgtattgatatctggttctaatacggatgcaatatgttcagtattagagggatgcaaaactacattgtctgcataatctgggatgcaccactgtaagtacagatactagtcaggttaatttgcattctgagacatttctagatctttatctgtggccagtaggtgtcgcctgagcttgtgacaacccggaatatcttgtttagtccgctctgttgattgagcttggcatgatgagttttccttcaattgaggccgttcctcccctttctgaatattgtagtgttccctccatccttaattacatgttgttttggcttttctatatacctagtttttgctatcgacctagatatacgatatgtctagatatttagtaaaaactatgtatctagaaaagctaaaatgatgtacaatttggaacagagggagtacattattattatagttattttccagatactgaggaacccaagctgcatgaaaggttgaatttaatatatttccatcttgctctactgatttccaccattccagtcattgaggaactcagtgctactggaaagtttgaatttatggaccttaatgtggatgaagctgaacatagcatggaaatgcatttgccctaccttgctaaagtatttcaaggacataatgtgaaagtcgtccctatccttgttggtgcacttagctcccaaaacgaagccttgtatgggcagctgctctccaaatatgtggatgacccaaaaaacttcttttccgtgtcgtcagacttctgccattggggatccaggtttagctacacatactacgaaaagaagcacggtgccatccataaatctatcgaggccttggaccgtatgggcatggagatcatagagactggcgatcccgtagcgttcaaagaatacctgcaggagtacgagaacaccatatgcggacgccaccccatcagcgtcttccttcacatgttgaaacattgctcgacaaaaattaagataggctttgtccgctacgagcagtccagccagtgcaagaacatgagggatagcagcgtgagctatgcatccgcagcagcgaaggttgctggtgcatccggggaagaagataaacaagactgagcgagctacagctctgtttgatatactatatataagccgccaaaccttggtgcggaatgtgtgactggtttcccataagaaaaagaacatgtgatttggtaaaacattttcttcttcagtaaaataaataaatatgcagactgctggggatctgtactaattaatt

SEQ ID NO: 31781 - DNA, 925 bp, Zea mays
  Clone ID: UC-ZMFLB73217H10_FLI
ggagtagaactgtttgatcggctcttcataccagttctgttttatagccatcaattcatgaagactaatgtcacgacttgctttctcaacaaattgaccttctggatggtttgcggcgcggaggccggctgcggggttccggggcagcgcgtctcgcggaggtgcgtagacgacggcggagcggcgtcctcacctccatggcgtcgctgtcgagcaagcaccacgtcctaatccaggtgctgctcgcccgcggcccgctctctgagcgcgacttccacgctttcatcgatggcgcctttggcaagaacaccgcattaggaactaagcggttggcttcagaggacctggccaatgactgggataataaaaggctaaatccaggaaatgacaattatccactttcaacaggagctgcaaataatttatttttgggtattgagcaaggagctggaagcagcaatggccagtctgcctttcccaagtttgacaatgggagctcagtggcattaccatctgggcagggaatgtctggtcttatgggaaaaggggcaaaatggcgtgacggggactggttgtgcaacaactgcaacaatcacaactatgcatctcgtgcgttttgcaacaggtgcaaaactcagaaagaatctgcagttcaccctggtgtgttatagcttgctgttggattattttgttccaggatatgttgctgcctgttctagctccttcctcaaggctgcggtttgagttttttcgattctgcagtgtttttgctgctctaaaatgtttgtctcgatatttcattagtgcttgttgaagttccccatttgtttatggtataagcgcttgaataaaatgtttctggaaagtaccggcctacaatctggattttggcaaaataattgaattagttgttgtacaatgaggc

SEQ ID NO: 31782 - DNA, 864 bp, Zea mays
  Clone ID: UC-ZMFLB73218A01_FLI
tgactttgtataagaaaatatcaaatgcagaatttacatttccaccatggacatcttttcctgccaagagagaataacaatcccagaaatattagaggatgagtggttcaaaaagggctacaagcgcccagaatttgatgaacaatatgacaccacattggatgatgtggatgccgtcttcaatgattcagaagagcaccatgtgacagaaaagaaagaagaagaaccagtagctctgaacgcattcgaactgatttcgatgtcagcgggcctaaaccttggaaacttatttgactcagagcaggagttcaaaagagaaacaaggtttacatcaaaatgtccccccaaagaaattgtccgcaagatcgaggaagctgcaaaacctctaggatttgatgttcagaagaaaaattacaagttgaggctcgaaaaggtaaaggcagggaggaagggaaacctcaacgttgctactgagatactgcaagttgcgccctctctccacatggtagaagtccgaaaagcaagggtgacactctggaatttcataagttctacaagaacctttccaagaccttgaaggacgtcgtctggaaatccgacgatcttcaaacgcaacatgcttcttagcagaacctcagagaggaggaatggcaaactattttgtgcaccatcctttcaagcaaactattctgcatgtaacggtgggtgcccaggaaattgcgctggtgctccaccatcgttgtatatgctgcgtcttgagttgcttgctgtagctgaagggaagttcattcagtaggttttgagtatgagttttgtatatccgtatatgcctatgactatgagccgtgctggaacactatgatc

SEQ ID NO: 31783 - DNA, 1706 bp, Zea mays
  Clone ID: UC-ZMFLB73218A06_FLI
ggtgaggtacacaccatcggcgacgaactcttcggcagtcccacccgtggctgtgccgccgaagccaacggcggacacgattcttggcaagcagtacgaggacgtgcgctctgtctactccctcgggaaggagcttggccggggccagttcggggtgacatacctctgcacagagattgcctctggtaggcagtacgcctgcaagtccatctccaagcgcaagctcgtcagcaaggcagacagggaggacattcgaagggagatccagatcatgcagcacctgtctgggcagccaaacattgttgagttccggggagcatacgaggacaagagcaatgtccatgtggtgatggagctctgcgcaggtggggagctcttcgatcgcatcattgcaaaggggcactacacagaacgtgcggctgctacaatctgcagagcagttgtgaatgttgtcaacatttgccacttcatgggtgtgatgcatcgtgatctgaaacccgagaacttcttgcttgcgaccaaggaggagaatgcaatgctcaaggccactgattttgggctttctgtcttcattgaagaaggaaagatgtacagggacattgttggaagtgcttactatgttgctcctgaagtccttagacggagctatggaaaagagatagatgtttggagtgcgggtgttattttgtacattcttctcagtggcgtgcctccattttgggctgaaactgaaaaggggatatttgatgctattctgcatgaggagattgactttgaaagtcaaccttggccatcaatttctgagagtgctaaagacttggtgagaaagatgttgacacgagatccaaagaaaagactgacttcagcccaagttcttcaacatcagtggctcagagaaggtggggaggcatctgataagcctatcgacagtgctgttctttctagaatgaagcaattcagagcaatgaataagctgaaaaagatggccctaaaggttattgcttcaaaccttaacgaggaagagatcaaggggctaaagcaaatgttcatgaacatggacacagacaatagtggcacaatcacatacgaagaactcaaagcaggattagccaaacttggatcaaagctgtcagaagctgaagtaaagcagttgatggaggctgctgatgttgatgggaatggatctattgactatgttgagttcatcactgccacaatgcatagacacaagctcgaaagggacgagcatttgttcaaggcattccagtactttgacaaagataacagcggcttcatcacaagggatgaactggaatctgctttgattgagcatgagatgggcgacacgagtacaataaaggagatcatatcagaagttgacacagataatgatgggaggattaactatgaggagttttgtgcaatgatgagaggagggatgcagcagccaatgaggctcaagtagcctgttcccttaatagaaacggtgtaccactagttactgttcacttttttttcttcatgtttggtacttggtagttggataaagcttacaatgggtgttgcttttgtattgttgagagatgattgtctatacctttttttcccttttgctcgtgtttgttgcattgtagtatcttgaacgtcccttcctttttttaagtttgtttatgcaagtacatctaataaaaagtgcattctgtctt

SEQ ID NO: 31784 - DNA, 2349 bp, Zea mays
  Clone ID: UC-ZMFLB73218F09_FLI
caccaggtcctgggacttcctgcagcagacgacgacggccgtcaagatcgacgacgccgccggcgccggccctgctagacgcagcggcaacaagaagggtaaggccgccgcacccgccaacgacccgtcgtcgtcgtctccggcggcggacactatcatcgggctgctcgactccggcatctggcccgagtcacccagcttcaacgacgccggctttgggcgcccacccagccggtggaagggagtgtgcatggctggggatgacttcaactcatccaactgcaacaataagctgatcggcgcgagatactacgacctcagcagcgtaagggggccggcaccgagcggcggcgggtcgccgcgggacgacgtgggccacggcacgcacacgtcgtccacggccgccgggagcgcggtgaccggcgcctcgtactacggcctcgccccggggaccgccaaggggggctccgcggcctccagggtcgccatgtaccgggtctgctcccaggcgggctgcgcggggtcggccatcctcgccggcttcgacgacgccatcgccgacggcgtcgacgtcatctccgtctcgctgggcgcgtcgccctacttccgcccggacttctccgcggaccccatcgccatcggctccttccacgccgtcgccaagggggtcacggtcgtgtgctcggcggggaactccggcccgggcgccgccaccgtcgtcaacgcggcgccctggatactcaccgtcgccgccaccaccatcgaccgcgacttcgagtccgacgtcttgctcggtggaaataacagcgccgtcaagggtgtagctataaacttctcgaacctggacagatcccccaagtatccattgatcaccggcgcagcggcgaagtccagctcagtttctgacaccgactcagcaagccactgtgagcccggcacgctggacagcagcaagatacgagggaagatcgtgctgtgccaccactcgcagagcgacacgtcgaagctggtgaaggcggacgagctccagagcgccggggcggcggggtgcatcttggtgatgaacgacaacgagagctcggtggccaccgcctacctcgacttcccggtcaccgaggtcacctccgccgccgccgcggcgatccacaagtacatcgccgccgccagcgaaccggtggcgacgatcacggcggcggccaccgtgacggagtgcaagccggcgcccgtggtggcctacttctcgtcgagggggccgtcggggcagaccgggaacgtgttaaagccggacatcgcagctccgggggtgaacatcctggcgtcgtggatcccggcgtcgtcgctcccgccggggcagaagcagccctcgcagttcaacctcgtgtccgggacgtccatggcctgcccgcacgtcgccggggccgccgctaccgtcaaggcgtggaaccccacgtggagccccgcggcggtccggtcggccatcatgaccacggcgaccacgctgaacaacgagcgcgagcccatgacgacggactccgggtcgccggcgacgccgtacgactacggcgccgggcaggtgcacccggcgggcgcgctggaccccgggctggtgtacgacgccggggaggacgactacctccgcttcctctgcaactacggctacaacgcgtccactgtgaggctcgtcgcctccaccctccccagcgggttcagctgcgcggccaacgttagcaaggacctcatctccgacctcaactacccgtcgatcgccgtgacggggctcctcggcaataaatcggctgcggcgggccgaagccggaccgtgacccgcaccgtcaccaacgtgggggcgcaagaggcggcctcctacacggtcgccgtcagcgcgccgcccggcctggacgtgaaggtcacgcccagtaagctcgagttcaccagaggcgtcaagaagctggccttccaggtgagcttctcccgtagcgggaacgacgacgacgcggcggcggccaagggcgccctttcgggctccataacatggtcagacggaaagcacatggtccgcagcccgtttgtggtcaccagctgaaacatcatggcaatacctgacgcgcaggcacgtcaagaaatgctgtgatctcagatataaagtataggatacgatgttgaaagccactgctagtggcaaactcagaatcatcgaagattctgaaactgggccttccaaaacgccttggtcagaaatgacggttaaacattctaatataatgtcgaaaccttaggctcatgtacaatgggaaatagtaagcatcatgacagctggaagtattcagtggaactcgatgcacagtttgc

SEQ ID NO: 31785 - DNA, 1270 bp, Zea mays
  Clone ID: UC-ZMFLB73218G08_FLI
gcccctgggtgctgagtgctgactcgctcccgtgcttctgctagccatcgttggccgcccccgccgcgccaatggcgacgaggcgcgagctgtccctcgcgctgctgtgcgtgtgcctcgcggcctgcgcgctggcccccggccccgcggacgccagcaagatggtcggggtgtacgagctcaggaagggggatttctccgtcaggctcaccaactggggcgccagggtgatgtccgtcgtcctcccagatcgcaaagggaatttggctgatgtcgtccttggcagagacaccgtcgctgaatacgtcaacgatacctcttacttcgggccgataacggggcgcatagcacagcgagttgcccggggccggttcgtcctcgacggcaaggtctaccacatgcacaggaacgacggcaggaacacgatccacggcggcgacagagggttcagccggagcatctggacggtgaaggagtacgtcgccggcggcgaatcgccgcacatgaccttctactaccgcagcttcgacggagagcaaggcctgccggggaacgtggacgcgtacgtgacgtaccgcgtgtcgggcgcctacacgctgggcgtgcacatgaacgcgacggcgctggacagggcgacgccggtgggcctgctgctgcacgtgtactggaacctgggcggggagggcagcggcgacgtgctgggccacacgctccggatccgcgcgtcgcggcacgccgtgctggacgacgagctcctgccgtcgtcggggcgcgtggagcccgtggccggcacgcccctggacttccgcgcgcccgcggcgatcggctcgcgcatccgccgggtcgtcgtcatggggggccgcgccgtcgggtacgacaccaactacgtcgtcgacggcgaagggatgcggccggtggcgcaggcccgggaccccgcgtccggccgggcgctggagctgtgggccaaccagcccaccctgcagctctacacggggaactccctcaaccgcaccgccggcaagggcggcagggtgtacgacaggtacgctggcttctgcctcgagaccatgggctacgtggacgccgtcaaccaccccgagttcccgtcgctgacactcaggcccggacaggtgtacaggcacgacatgctctacaagttctccttctaggtgcgtcgtcgttaggtttgatgaagtgtgcgtaattaagcacgaggaagtcatgtcatgcgtccgttggttttgatcggaagaaaaagactatgcatgct

SEQ ID NO: 31786 - DNA, 2048 bp, Zea mays
  Clone ID: UC-ZMFLB73219A02_FLI
tcagcgcctccaccttcctccccagccgcaagcagagcaagaaccggagctggggatcgattccgcgccgcctgatctgcgatcgggactcgatcgtgcataatccgaggttcttcctctctgtcgtctccgatccagacgggtgtgcctggtctgcatcttcatcctctgcaagaaatcacacatctcgtggcgcaccttgcatcagccgcggccggcacctctactctcgcccgccccctatgtcgtaagcgcgcaatcagaactcccgatcacccgcacgctggtgcgccagtgtcgtcttcgccaccatgaactccatcgagcccttcaacaggctggtgaagctggcggcccgcgccttctacgatgacgtctcaatgaagggcgacaaccagcccaagacctcccgcggggacaaccgcggcatggccgtcgtcgtcctggacgcgctcaccagacgaccgtgggtccgagaggaagatttggctaaagcattgaagctccactcgaaacagctgcgtcgcattctccgtttctttgaagaggagaaactagtcacaagggatcatcggaaggagtcagcaaaaaatgccaaagcacataatgctgcagctgctaatgacggtcaaacagttgctaaggagggagaagagaaagtaaagatgcacacacattcatactgttgcttggattatgctcagatatgtgatgttgtcaggtatcggattcaccgcatgaaaaaaaaattgaaggatgaattggacagcagaaatacaattcaacactatatatgtcctagctgtaataaaagatactcagcctttgatgcactacaactggtaagctacacggatgagtacttccattgtgaaacttgcaatggtgaactggttgctgaggatgacaagcttgcttctgaggaaatgggagatggcgatgacaatgttagaaagcgcaggcgtgagaaattaaaggacatgcagcaaagaattgaagagcaattgaagccattggttgcacaacttgatagagtgaagaatctgcctgcgcctgagtttggtagtcttcaaacatgggaaagagcacatattggtgcctttgcaattggtgaccctgctgcagctgattcttctaggaattcacaagggcagtatggtacaccaatgccataccttggacagacaaaggttgaagttgatatattgagtgatggtgaaaaagaaggtgctgaatcaggtaaagatggttctgaactcaaagtcatacctccatggatgatcaaagatggcatgaatcttacaaaggaacaaagaggagagaaaattgagtcacaaaaacttgaaaaatctgaagccaaagatgataagaaacaggacttgaaagatgatcaaagtgtacaggaagaatacataaaggcctattatgaggccttgaggaaaaagcaggaagaggaagaagcaaaaaacagaatgcagcaggaaggcaagatttctgtccctgattctcaaactgaacgccaagtgggcaagaaatacaagcgggacgacgatgatgatgaagacattgaatgggaagagcatcaacctacagctgcagggaatgcaaccgaaacatacaaattggcagatttgaatgcggaggcccaagaatctggcgatgatgaagatgataatgtgtgggaagagggctaatgctaaaaagataacagactattcctgtgcggctgcgcccttaggattttggtatcccaccagaggtcgagagtatttcactaatgagcttagttatgttgaacgcatgatcccgagaaacttgtcaagtgaaaagccagcccctatgcatttttagttgaagatgtacaaattatacttaaatactttatgagccggtcagcagtttcccctgttacttcgaagagctgttgtagtcttgtagactgttaatgtgtgggcaacttgcatgcctttgtttcgctgaaaggaattacacgtacatgcacgtttatgtcctgaaagtgaaaatgcaatcgttgtagttgcccttcc

SEQ ID NO: 31787 - DNA, 2329 bp, Zea mays
  Clone ID: UC-ZMFLB73219B01_FLI
ggcacatcctcttgggtgatgattatgagaaacttgctgcaattgaagcatatgatgcatctcgtactcgagaagtgcaagacaagaacgtggctcctaatgtttcgtctactgatgctaccactgatccctcaagtgtacgggttcctcctgcagcacatatccgaaggcatgctgggaggctgcttaccattctctctcttctacctaattcaaagaaggaaattatttctgatgctgtatggtgcaaatggctcgaggattgtgctagtgggcgaattccctgcaatgatataaaactaaaaagttactgcaggttaacattattgaatatattatgttctgagagtccaaatacaagaaaagcctctgatgaatatcctgactcagaaagtgagtataaaagaaactgtccccagtttggagatgcacttttcttgctaaatccagagttacctcttgaagttcatgtggacaacagtggttttgggattttaagagtttcaagagataattgtaaggaagatggaggtattggaggctctggctctgaaactgtgaactctgtagatgatgctgaagctgcatccaaaagtgtccctttgatggatgttgtgtttgttcatggccttcgtggcggcccattcaactcatggcgaattgctgatgacaaatcatcaactaccaaagctggtttagtggaaagcattgacgaggatgctgggaaagagggtacatgctggccaagagaatggcttgcggcagattttcctcaagcacgtttttttacagtaaaatacaagacaaatttgacccaatggactggagccagcttgcctcttcaggaggtgagctctatgctgctgaggaagttggtggctgctgggattggtagtcggcctgtcattttcgtgacacataggtaagggttgttgtttggtctatgatgctactcggccatgcaattgttatgacatgttgctatatttgttgtgctaactcctcacctatgtaactgctagttactgaaataacttatgacttgctttctccccattttcatactcagcatgggaggactggtggttaaacagcttttatatcaagcaaagctgaataactatgacaagttcctgaataatactattgggctagtatgtatatttatgtgttgaattttgtgattatctgtgtgcgcgttaataagatctaactctttctgcatcacaggttttctatagttgtccgcattttggcagtaaacttgcagacatgccatggcgtatgggtttagtgtttcgtcctgctccttcggtatggtcttccattgttatggtcgctagatcggtgagggattggagagagatatcgatggacagaaacgccggtcgggggcctgtgcccacggccgagcaagaggagggtttctcccttctaattcttgcatgctttatttctcatccattgattacataaatatgccggttggccgtccctatctagctagagatccttatctcctaaaaactctcaacaaactactaactgataaccttcctagataatctcaactaatctcctaaataatctcaactaatcttctaatcttatctctaactatccttatctaatcccccttgagggcccatggctgctgctatcgcagcccctccgtgggcctccttacgccctaacatccattccccatctgataagtttccttacaaattgatagttttcatcttctctatatgttctgacatttaatttttgatagattggggagttaagaagtgggtctccaagactagttgaactgaacgattttgtgcgtcaacgacacaacaaaggatttcttgatgttcttagttttagtgagacccaggtcacaccgattgttgaaggatatggcggttgggcacttcgtatggagatagtgccaattgaatctgcatacccaggctttggggagcttgtcgttctaccgtccactgatcatataaattcatgtaagccagttaacaagaacgatccttcttatgcggaaaccttggcatttttggagaagaacttcaaattatgcctggaaagagcagagtcctaggtcttgtcaatggcgccgtggagttttcagcaatctgaaggcttcattttccatttaccgccagagacttttctcccgttaacgacgaatggtggttgatctgaccaaatgatctgggcgtgctgtggtttatgaagctcgcaccgaactttgtagtaacattgcacatagcggttaggctgtaaatagctgtcttttaccttttagttgacatgagttgccccc

SEQ ID NO: 31788 - DNA, 2841 bp, Zea mays
  Clone ID: UC-ZMFLB73219B02_FLI
tgccagcgtgagcaaggctatgtttgagaccattgcccgcaacattttgttggaaaggactgactgtacattggaactctatgagggaagtgggtcaaattggaggttaacaaagtccggaacacctggaaatattggtagttttgaagacattctgtttgcaaacaatgacatggaagattcaccagtgattgttgctttgtttccagcgtgccgggaaagtcagctgtatgtagggcttagttttttggatatgaccaataggaagcttgggttggctgagtttcccgaagatagccgattcactaatgttgaatcagctcttgttgcattaggttgcaaggagtgtcttctcccagcagattgtgaaaaatccattgacctaaacccccttcaagacgtcattagtaactgtaatgttctgttgactgagaaaaagaaggctgacttcaaatccagggatctcgcacaagatcttggtagaataatcaggggttctgttgagcctgtacgtgatctactatctcagtttgactatgctcttggtccccttggagctcttttatcttatgccgagttgctagcagatgacactaactatggaaattacacaattgagaagtacaatttgaactgctacatgcgacttgattctgctgcagttcgagcattaaacattgcagaagggaaaactgatgtaaacaagaacttcagtttgtttggtttgatgaacagaacttgtactgttgggatgggaaaaagattgctgaacagatggctgaaacaacctctattagatgttaatgaaattaataaccgactagacatggttcaggcttttgtagaagacccagaacttcgtcagggactccggcaacaacttaaaaggatatcagatattgatcgtctaacacatagtctccgaaagaaatcagctaatctgcagcctgttgttaagctttatcagtcctgtagcagaatcccatacatcaagggcattcttcagcaatataatggccaattttcaacattgataaggtcaaagtttcttgaaccgttagaagaatggatggcaaagaatcgatttggtcggttttcttctcttgttgagacagctattgatcttgctcagctggagaatggagagtacagaatatctcctctatattcttctgacttgggtgtactaaaggatgagctttctgtggttgaaaaccacataaacaatctgcacgtggatacagctagtgatctggatctttctgttgataagcaactgaagctagaaaaaggatcccttggacatgtgttcagaatgtcaaagaaagaggaacagaaagtcaggaagaaactcactggcagctacttaatcatagaaactcgtaaagatggtgtaaagttcacaaattctaagctgaaaaatctaagtgatcaataccaggcattgtttggtgagtacacaagttgtcagaaaaaggtggttggtgatgtagtgagggtttcaggcacattctcagaggtatttgaaaattttgctgcagttctgtcggagttggatgttttacaaagttttgctgatttggcaactagttgcccagttccttatgttaggccagacatcactgcgtcggatgaaggagatattgttctactgggtagcagacatccttgtctagaggcacaagatggtgttaactttatacccaatgattgcactctggtgagagggaaaagttggtttcagatcatcactggaccaaacatgggaggaaaatccacatttataagacaggttggtgtaaatgtattgatggcacaagttggttcctttgtaccttgtgatcaagcaagcattagtgtgagggattgtatttttgctcgtgttggcgctggtgattgccaacttcatggtgtatcaacttttatgcaagaaatgcttgaaacagcatccatcctaaaaggcgcctctgataagtctcttataattattgatgagctggggcgtggaacttccacatatgatggatttggtcttgcatgggctatctgtgagcatcttatggaagtgactcgagcgcctaccttgtttgcaacccatttccatgaactaactgcattagcacatagaaatgatgatgagcaccaacacatttcagacatcggagttgcaaattatcacgtgggtgctcacatagacccattaagtaggaagttaactatgctttacaaggttgaacctggtgcatgcgaccaaagttttggtattcatgttgcagaatttgctaattttccagaagctgttgttgcccttgcgaaaagcaaagcagcagagttagaagacttttctactacacctaccttttccgatgatttgaaagacgaggttggatcaaagcgcaagagggtatttagcccagatgacatcaccagaggagctgcacgggctcggcttttccttgaggaattcgccgcattgcctatggatgagatggatgggagcaagatcttggagatggccaccaagatgaaagctgacttgcagaaagatgcagctgacaatccttggctccagcagttcttctgaagctaattaatccccgcgtgtatggaggcaagaccatgagagaacctcgctgatgctaggatctcctgatccattttgttaatacgcatcagcagatgtactctagtctttaggcttagccgacagtgcaacagggaaaaccatgtgcatatttaacgcggcggtagtgctgctactcctgcataccgttcgggtgcagctactctgctctgccgttctgccccgtctgtgattgcacgccgtcctttacagccgtg

SEQ ID NO: 31789 - DNA, 1635 bp, Zea mays
  Clone ID: UC-ZMFLB73219B07_FLI
cccctccctccgtctccaccgcccaccactgatcggatcacgtcggcgtcccatctcctcctccacgacacagaacgccgctccctttccgggattctcctctccaatcgcagctaaaacgcaacgcactggatcggacgtcgccaaaaagatcggtggcgacaccataaagaaagaatccgagaaaaggcgaaaggggaggagagaaaggggaggtacaaaatttctacccgctagaggttagctagctcggcggcgagggaacgagagacgccctaccgtcgattccatatcgtcgctccgatattctgatgccggaatcctgcttttccggctagcttaccgatacctcctaggtggtttccagtcctcacccttccaacctctactatctttttttgtgaatttacctccaccgaattcgggcagctcaccatttcttggagtttggtgtcctttctcgagtgtttccttcctccctcccgggttctactgctgagtggtgaggtctactgccctgcacctgcaagtttgtttcatttgtgatgtgatccgttagtttgccccccagcaaccgttgctcagaaattcagttcttattaaagcttcaagacccttcaaggaacatcttttagacaagctcttgattccttcacctctctctctcttttcaggcatctttcttgtgcgacttgtccgttgaccacaggcggagaaatttgttctcggcacacattctctgccacaatggacgatggagctgacctcccctgccaactgctcttctcccacccggagatgcctgacagcttcgacgagttcttcaacagcgccacgacgacctgcacccacacgcacagctgcaacccgcccggcccctcggtcgccatgcacacccacacgtgcctgcacgcgcacaccctggtcctgggcagcggcggggaggacgacgacgacgccagggaggactcggcgaagccgcgcagaccgctggggaacagggaagctgtgcgcaagtaccgggagaagaagaaggcgcacgcggcctttctggaagaggaggtcaagaagctccgcgccgccaaccagcagctccagagacggctgcagggccatgcagctttggaggcggaggtggcgaggctccggggtctcctgctcgatatccggggcaagatcgacgccgaggtcggcggcgtgctcccttttcagaagccgtgcagtgtgggctccgtggcgtgtgccgatcctgctctgtgcttcaacggcaactcggaggttggaggcggctgggaggagagctcaagaccggcagccgcggactgcaggatcgatgaagtgcgagggatgtcacgggaaattgatgtcccagaaggcttgcgtcattccatggatgttgttgcgagcttcgtgagttctgatcccctggctgaatgagcgcgtttgcctgattggcagttttttttttttggggcctctgccagtgccagcttcttttggcttgcttgaaaggtcaaattttcatgtaattagaagaattgaggaactgataatgagtggaactacctccactgtggtccatgcttcttgtgctggtgttcagtgtgtatagctgagattatattgaactaatat

SEQ ID NO: 31790 - DNA, 2065 bp, Zea mays
  Clone ID: UC-ZMFLB73219C11_FLI
gccgaccacccgccgaaggccagagagaaatatctcatcttctctccaccggatcggttcaatcgagagcgagggagaaagggaggtggtgcgtcgaggggggccgagattttgccggtttggagccagataggggtatgagctgcttcgcgcaccgccgccgctccgacgtcgcccgccgccaggacggcctcctcgtcttcgtcttcttcctctcgattcccatacgtaccagtagttttaatttaagtagtagtaattgtagtagcaatctcttgtaaactgcgctcgcctttgcgtgttcgtggtccttttgcgctttctcgtccctctttctctcaatctctccttattcttctccttccacggcgaagccggcggctggtatggatcccaatggcctcaaaactggaggccttttgctcccgaccatcgagaggcggtgcacgtcgcctccatccgtcattgtcatcggcggtggcatctcgggcgttgcagctgcccgtgccctctccaattcttcatttaaggtgactgttttggaatcgagagatcgtattggcgggcgcattcatactgataactcgtttggatgcccaattgatatgggagcctcatggctacacggcgtgtgcaatgagaatccactggcaccattgataagctatcttgggctgaggttataccgcacaagcgatgataactcagttctgtatgatcatgatttagaaagctatgctctctttgataaggatggtaatcaggtcccaaaggagacagtcgataaagttggagaaacattcgagagaattcttgaagagacggtgaaagtgcgcgatgagcaggaacacgacatgccactgctacaggcaatttctattgtgtttgagaggcacccccatctaaagcttgaagggctagatgatcaggtcttacaatggtgtgtctgccggcttgaggcatggtttgctgcagatgcagatgaaatatctctgaagaactgggatcaggagcgtgttcttactggtggacatggactgatggtaaatgggtactatcctgttattgaagctcttgctcaaggtcttgacatcaggcttaaccaaagggtcaccgaaattacccgccagcacaatggagtcaaggtcactactgaagatggcacaagctacttggccgacgcctgcataatctcagtgccactcggcgtgctcaaggcgaacgtaataaagttcgagcctgagctgccccagtggaagagctccgccatcgccgacctcggcgtgggcaccgagaacaagatcgccatgcacttcgacagggtcttttggcccaacgtcgaggtgctgggaatggtcgggccgacgcccaaagcctgtgggtacttcctgaacctgcacaaagccaccggcaatccggtcctcgtgtacatggccgccggaaggttcgcccaggaggtggagaagctgtcggacaaggaagccgtcggcctggtcgtttctcacctgaagaagatgctcccggatgccactgaaccgacgcagtacctggtgtcgcgatggggctccgaccccaactccctggggtcctactcgtgcgacctggtcgcgaagccggccgacgtgtgcgcgaggttcgccgcccccgtcgagaacctgcacttcgccggcgaggcggccagtgccgagcactcggggtccgtgcacggcgcctactcgtcgggcatcgccgctgccgaggaatgcaggaagcggctcctggcgctgaagggcatcccggacctggtccaggtcgcggcgtgggaggagatggccggagctgtggctcctctgcagatttgcaggacctgagtgagattggatcactggctgcctttggacattggagtggatcgtggatcgcttcgctgctccctgatggttgccgagtctttttttatatttaccttaccttgaaggccgttgtgtcttgtctggaataaatcaagattgactggcactgaaagtgtcatcgcgtcactctttcatacttattaataaatatcacaagtctgtcctgagatctc

SEQ ID NO: 31791 - DNA, 858 bp, Zea mays
  Clone ID: UC-ZMFLB73219D12_FLI
cacaccacacataaagcacttcacgagggaagtggcaaggcggtcttatgacaccgatttgattgttgatggctatgaagattacattactgaggctatagagttcaaggaagagtacgatttcaggctgggtaatcttatggaccactatggcataaaaagtgaagctgagataataagtggatgtattctaaagatggcaaagaatttcaccaagagtagtgatgctgatgcaattagaatggcggtgagatctttgaggaaagaagctaggtcgtggttcaatgagatgagcacaggagaggatggccaagatgccatggaggccaaggcctctgcttggtaccatgttacttatcatcagcagtactggggcagctacaatgaagggtatgatcggccgcatcttattagcttcccatggtgcgtatatgacaagcttgtggccatcaagcaggggaggaatctcctcacgcggatggatcgaaacttgaggttccgttgagcattgccagcaggtttgctcctgtacatatccctgatcgtttgcactcagcactgccagcaagtgtgcatgaacgatctgatgaattaagacgggcaaactgccgcaagctgacgctctggcctacgtgcgtcttgaaactttcggatgctgccgtctaactaaatgcatgttccttgatttccactgggaccttgagtttgaagtgtgtaaatatgctgcttatgatgtttttagtattggacctctatcaactgccgttctagttagtaacaatggttgccagtcatggattaccaggtttcgccgagctcctgtatggacgaccacgaaggtctatttcttccattacc

SEQ ID NO: 31792 - DNA, 1654 bp, Zea mays
  Clone ID: UC-ZMFLB73219E12_FLI
ccgatccaacgggaatgtcaccgacgcgacgcgctccagtcccctccatcgctgcgtccaccttctgtagtccagttgtagccgcttgccgatggcgcggccggcggcgaaggcgcgggtgccgaagcacttggtggcgctcgccgtcgtcgccatcctcggcctcgtactcgtcgctgactacctctgggcttcgtcctccgcgtcgtcctcggccgtctggtcctccaggcttaatctccacaccggacccgccggttcgacgccgcccgtcgcgaagaagattaaggaggacaagaaatctgtaggttcgactggcataaatgcaacttttgcggacttgccagctccagaactgaaatgggaggagatggctgaagcacctgtggcccgtttggatggcgctgctatacagattaagaatctcttatatgtatttgctgggtatggcaccattaaccatgtgcattctcatgttgatatatacaatttctcggataatacatggggtggaagatttgacatgcccgaagacatggcacattcacatttggggatggttactgatggaagattcatctatgtggtaactggacagtatggtccacaatgtaggggaccaacaactcgaaattttgtattggacacagaaacaaaagaatggcgtggcatgccaccattgccagttcctagatatgctccagcaacacaactttggagaggcagacttcatgtgatgggtggcagcaaggaggataggcatgaacctgcgcttgaacactggagtctcgcggtaaaggatgggaaagcattggagaaagagtggaggagcgagaaaccaataccgcgtggaggtcctcatagggcttgtgtagttgcaaatgataaactccttgttattggtggtcaagaaggtgatttcatggccaagcctgggtctcctatatttaaatgtgttagaagaagtgaggttgtgtatagtaatgtttatatgcttgatgatggaacgacttggaaggaacttccacctatgccaaaaccagattcacatatagaatttgcttgggtgaatgtcaacaattctcttgttattgctggaggaacgacagataagcacccaataactaaaaagatggtgttggttggtgaagtatttcggttcaatctgggtacgctggaatggagtgtgattgggcggttacctttccgaatcaagaccacattggtaggatactgggatggctggctgtatttcacttctgggcaacgagacaaaggaccaaaagacccgtctcctaaaaaggttgttgggtgcatgtggagaactaaattgcacttgtgatttcctttaaaagaactaagccgttctttggttttatggtttacaaaactgtttcaatcccctcatgggcgagttctttcttggttatatatcgtaggtgaaatgggtggcgttggggactgtctgccattgccaccggtgtgttgtatgtttattcttttagttaggatcaccaacttttgcaccattttgtacagagagaatcgatctgtccaggtgctgtcgcaatcttgtaagttgtagcgtgtacctttttttttattgagctcttacactcatcttctaaaattaatcacaacttcaacttgagcc

SEQ ID NO: 31793 - DNA, 1252 bp, Zea mays
  Clone ID: UC-ZMFLB73219F07_FLI
tacaacctggggggcatgggctgcagcgcgggcgtcatcgccatcgacctggcccgcgacatgctccaggccagcggcgctggcctggccgtggtggtcagcacggaggccgtctccttcacgtggtaccccgggaagcggcgctccatgctcatcccgaacgccttcttccgggccggctgcgcggcggtgctgctgtccaaccggcgccgcgacttccaccgcgccaagtaccagctggagcacgtggtgcgcacgcacaagggcgcggacgaccgcgccttccgctccgtgtaccaggaggaggacgagcagcggatcaagggcctgtccatcagccgcgacctgctggaggtgggcggccacgcgctcaagaccaacatcaccacgctggggcccctggtgctgcccttctccgagcagctgctcttcttcgcgggcgtgctgttccgccacctgttcccgtccaaggcctccacgccggcgccgccgaccaccccaggggacgcctcggccgccgcgccctacatcccggacttcaagcgcgcgttcgagcacttctgcatgcacgcggccagccgcgacgtgctggagcacctgcagagcaacctgggcctgcgcgacgccgacctggaggcctcccgcgccgcgctgcaccgcttcggcaacacctcaagcagcagcatctggtacgagctggcgtacctggaggccaagggccgcgtccgccgcggcgaccgcgtctggcagctcgccttcgggtcgggcttcaagtgcaacagcgcggtgtggcgcgccgtccgccgcgtgcgccgccccgcgcgcagcccctggctggactgcatcgaccagtacccggcgcgcatggacgcctagcacgtacctgcaatgcaatggctgctatctatctatcgctcgcttcgctatctaccagtgcagtgctgcacttcaccgatgcatgatggatcggatatgatatggtataggacgcagtcggtcgatttgcatgcatgcaccaagtgttactataccgttctgaaggtacgtttgaactttgttcgtttgtattgcactattgcttgttgtttaagtagcggttaagggagggagtcgtacgctgtgctaccataatggaagtactccggtccggtccggtcctgtgtgagccttatgtacgtgcaattttaatgtcttttgatattacaagactcgacggttggcaatagatgttgctgttgtgtttcgattgatc

SEQ ID NO: 31794 - DNA, 888 bp, Zea mays
  Clone ID: UC-ZMFLB73219F09_FLI
caaatcctatcttgtccgctgcccccgccgccccgcggttgggtcgtgtcgtgtccccacctcgtcttcgttctgctcctaccaattccagtcccagccatccgcccgcccaactatggcggcaacggctctgctactccccagcctcgcggcgctcacggacacgccgcgccgcgcccacaggttgctgcagccgcagctccagctccagcgcggctcccttgtctctcggtccctccggcctccgcggcgtcggcggctcgcggtctcggccgtgcaagagacgaaggagggggaggccaagacggccgacgagataaccgagaagtacgggctcgagttcggcctctggaaggtgttcagctccaaggaggaagagggaggcgaggggaagaagtcgcggacggaccaggccaaggaactcctggccaagtacggcggcgcgtacctggccacctccatctcgctctccatcgtctccttcactctatgctacctcctcgtcagcgccggcgtcgacgtgcaggacctgctcgcgaaggtcgggatcgtgacaggggaaaccggagggaaggtcgggaccttcgcgttggcctacgccgcgcacaaggccgcgtcgccgatcaggttcccgccgacggtggcactgacgccggtggtggccagctggattggcaagatcaggaagggcggcgactgatgcgccgccactcaagtacacttctcactgaatcatgtagtctatgcaaatagctatacataagcttatataggtgttctactagccggtgccagcgaatctatctggtgctgcttttgtaaaagctgttcgatgacgattttgaacaaccagtaatgaatgacgagtggagagagtttttgaactag

SEQ ID NO: 31795 - DNA, 2304 bp, Zea mays
  Clone ID: UC-ZMFLB73219G02_FLI
gccgccgtgtgtttgctgtgctcgttttctgtctgtcttgatcgttgtggattagttctttcgtttttttttttgttgaattgctcactctgcagcctgtttttcttgcagaaccttttgtagttctattgctaacgtggccaattgatctttcagatcaggagctggggattgccctgccactctgctgaaagttttggagaagttgtggtgtttccctgcctattagagtctgcgcttctgtgttcctgatcaactgctactacgcgattgttgtcttctcaatctgtctggccaagcatggctggccagacgtcaaaggcaaaggaagcaggaaaagatgacagagaagaacccggagctgaggcggcgaaagagaagttagtgccgtctcaccagcagcaagagtctccagcttctgtggtggacaaggattcttcaggtgtgtcttcagttcctggtgatgagtcaccggtcctagaaggggattctgttgagttgaaagtggaggaaaacttggatggtaatgggaataaggaaaataaaacgtcccagaagagcagtacaagtgatggctttgcttctgctaaagtgagtgatgggacaagtagtttgaggaagaccagtggtagtgtggccatgagtactcgggctgatttcactgagagtgggaagagcagcatgtgccgtgcgagcaccgccagtgacattagcgatgagagctcctgcagcagcatgagcagtgccaccacgaagccacacaaggggaatgattcaaggtgggaggctatccatgtggtgaagtccagggataaagttcttggactgaatcatttcaggctgcttaagaagttgggctctggtgatataggaagtgtgtacctatctgaattgagtggtacacggagttactttgccatgaaggttatggataagacttctttggcaagtcggaagaagctgcttcgagctcagaccgagcgggagatcctgcagtccctggaccatccatttctaccaaccctgtatactcactttgagacagataagttttcatgcttggttatggaattctgccctggaggggaccttcacactcttcgccaaaggcagcctggaaaatatttttcagagcaagcagcaaagttctacgtagctgaggtgctccttgcattggaatacctgcatatgcttgggattatataccgtgatctcaaaccagaaaatgtcctcgttcgggaagatggccacatcatgctgtcggacttcgatctatctcttcgctgttcagtgagcctaacggtgatcaagtccgcaaatcctggcctagatgcattgcagaggaacaatgcagcgtactgtgcccagcctgcttgcatcgaaccatcctgcattcagccctcctgtgtagctccaaccacttgctttggcccccggttcttctccaaatccaagtccaagtctaagtccaagcccaagaaggagaagtcgaagcctgatggtccaaaccaagagaacctcttcccggagctgattgctgagccaactgatgctcgctcgatgtcctttgttggcactcatgagtacttggccccagaaataataaaaggggagggccatggaagtgctgtggattggtggacctttggcatattcttgtacgagctgttgttcggcaagacccctttcaaaggttccggcaaccgggctacactcttcaacgtcgtgggccagcccttgaggttcccggagtccccgatagtgagcttctctgcgagggacatgataaggggattgctcgtcaaggacccgcagcaccggctcgggtacaagcgtggtgctaccgagataaagcagcaccctttcttcgagggcgtgaactgggctctcataaggtgcgcgagccctccggacataccaaagcccctcgagctcgagtgtcgcccaaagcaagtgccatcagcaaacggaaaggtcgcgccggtcgctaaccaaaagggcccagataattatctagagttcgaattcttctagttttttgttttgtttttgtttttgtgatttctgaactgcaagagtgcgtctgggctgatgctgtgaaagaaagtgaaagatgataacctactctaggcatgcgcttcgctggatttttttcttcttctgccattagactgtactacgctcgtttcaggatatccgagttatttttttttctctgttgaactgcttaactctaaggtgtactcaatccatcatgtatgttgcaattttcagaacctgcctatggtacttgaaatgtatttc

SEQ ID NO: 31796 - DNA, 1766 bp, Zea mays
  Clone ID: UC-ZMFLB73219G09_FLI
tcgccggtggccagcgccgctgcatcgcccttcctagcgtcggccttggcaccgcttccccgagcgccccagtcgagctcgcccatcctctgctctagccctttctccacgccgtcgctgagctcgcccctcccctcagccatggacacgacgacctgcagcccttcttggtggccaagcccatcttcctgctcgcgccccctcttttccacctctgcgcgtatcagctcgtccaacccccatggtgtttcctccctctcggctcccttgctccctccccatggcgttccccctggatgttggtgatctgttccccacggtgcaggcaaatgttctttccctccctgcagcagcaccttggtggttgtcgagcagcacgtcgcgcttgcgcagcctcggtcacgacgttgttcaccccgctaaccattggtgtcatacctcacgtgtcatgtgttcgccgaaatgcctaaacatgtagtctgtcgtcgtcgtatccacagtcaattttagtcatggggaacttggtacagccatccatggtatcagaatatgacctgggaggagaaggggacctgttcaaagctccagaagccatcatcgaggaaccgctgctcctgaactgtctgtctgattctgttcatttgttgttgtgtaggctgggcttgtgccaagcttgaatcctcttgtgaaggagtttctcaatgctgctgatgacaagcggaaggaagtcctctctaaaatagaagaggatgttgctaagctcagcggttctgcagccaactaagaagctacaagtgaatgccgaggagagcagcgatgacttggctaacccaccgaaggtagaggagaagcttggtgctgtccctcatggcctgtccaccgactctgaggttgcccagagggaagccgagtctatctctaggaagactctcaggagctcagccgagaagtttgagttccaagctgaggtttccagactcatggacatcatcatcaactcactctacagcaacaaggatatcttcctgagggagctcatatctaatgcctctgatgctggataagattaggttcctttcccttactgataaggaagttctgggtgaaggggacactgcaaagcttgagattcagattaagttggacaaagagaagaaaatcctctccattcgggataggggtattggtatgaccaaggaagatcttattaagaaccttggaacgattgctaaatctggcacttcaggaacaggagctgctcgagtctcttgtcgaagctgatacgagaaggcaggaaagagctaaaaagatggaagaaaagaaagtgtatctgcaactatacgaagcaatggaggcgttggtcaagatcaatctggagacgaacaagatcatggacttcatcaagtttgacgtcggcaacgtggtcatggtgactggcgggaggaacaccgggcgtgtaggagtcatcaagaacagggagaagcacaagggcagctttgagaccatccacgtgctgcttggagctttttgctatgtctagttttctcctatttgttgtacaggaaaacatagaatagaattcaaatttggtggtcgcaaaagtgtggagactttaattcatataaagttaggcttaacattagtgcaaacagttgtattttagtttagatttagagtacacttatgtatgcattgtttgacaatgtttatttatgatatattaaatggtacttatttatattatattaattataatgttgttcaat

SEQ ID NO: 31797 - DNA, 3032 bp, Zea mays
  Clone ID: UC-ZMFLB73220A11_FLI
aaaaagcaagggtctcatggacatcaacgaatcgcttcgagtgctagccaagctcagggaagcctcgtggactcctcctgaatctgttcatcatgcaagactctcatatgatgctcctcggttctcatacgatggaaaggaagcaacatcaaaattgagggaggtaccgaggttgtcattggacatcaaggaaggtcacctttggaatcgtgaaattgactctaggttggacccaagcttgagttctgcagacagaaacagcaacactgttactgggtccaatgcagctttcgagacccagcaggaacagcctgcctgcaagcggcttcctagcgttgttgcaaagctcatgggtttggaagagttgccagagcataatcaaagtacagcatcatcacatgcatgcaataccgttcaagagaacaagcaagatgccatgttgaactccttgagcatctcctaccagtacgagcatgctcctcaacaagaaaggaatcctgattcaactgtaagaaatttacccaactctaagttccctgtccaaactgcaccatggaagcaacaagaaaggattgtccttccacgaaaactgccaaagggatcaaaaggagcccacggaagagaacctgctgcaccatggaaccagctgaaggatcttgattttcagcaaccaaacaaagaccttagagcacttaaacagattttggattctgcaaaaggactattagaaaataagaaacgggaggaagcatttatgccaaagctatataatggaaaccatgatgaccaagagatggccagtgcgaacatgagactgaaccgtaacaccaacaacatgtggatgcctgaagagagcaacgctgaaagctctttcaaatcgcctattgtgataatgaaaccttcaaaatctgcaaacctttacagcaaagtggattcttctgtcttcccattaggaggttcatctgatctcccacagccacaaacaagcaatagcactgatagaaggaaagcttcaacgattaatagaaccgccaaagggcaatatgcgaaattgagtccaagggtgcctacttctcaaccccttgtttcttgtgacaggagatcatatggaaggaatgatgatagcagcaacaaccaaaaatctagttcactgctggtcactgagagctcaaccagaagacagcagctgccaaggaatagtagcgtaagtatgcaaaagaacaaaaattccactagcccaaaattactacagagaaaacttgatccagagcggagggctagaccacctattccttctgctgagtctaacaaaagcgaaaggcaatctggagataggaacaattcagaaacagtgtcaccccgaagcaaattcagaaggaaacttgtgcgcccacaaggtgatgatggcatgcccattggattgaacaacaggacaaggagcctgtatcagcatgacaatgatatgtccataaggtcagatggcagtataagtgttgcttcagagctggatattataagcaatgacagatctacaggagttaatatttctaactttgagcaaggcattggaactccatctggaaggaacccacagaaagtggtaaagaatttccttgcaattatgccttctttctaaagcttcactaatttaagatgataatgtatatttccaatacttaactactatggagaaaataataatatgtaatggaaatagtatctgtttttggtcttgtattaatctctctccaaatgctagttgttgttgggccaggaaacgagaatggaaaattaaatcgcatgacatacgatgctgcatgtctcatttttatggtttgtgtcttcagaaaacctcatacgatgcaaatatggacgtgccatctgtagacccttcagctgctatttcggaacggcccagtccagtttctgtgttggactcttcatttgatcaggaggatttgttccctaccagcaggactccaaattcacttgctgttgatgatgagcgcgaaacattagaggaaccctggaaaccatctgtcgctatacagtccaagaacaataaactcgcaaatgttgcgagcttgcttgagaagctccagcagcttagcgtgaacaaggatgaggatgcacctccggttgaccatattgctttcttgtgtgagacagagagcccagaccaccgctacgtgtctgagatactgctggcctccggtcttctgatgaaagacctaggttcaggacagacaggtctccagctccactcctctggctacccgatcaaccctgacttgttccacgtgttggagcaaaggaaggctggatgggtcagtacacctgatggcatccatcagagcagaagcggcacaaaatctgatcccaggagagcgcaccggaagctgatgtttgacactgtgaatgagcttctccttcagaagtttgagaaggaaaccgccgtttatgcgctcagttccttcaccagagcgaaggatccacctgcaaagacttttagcgggcaacagctgccgaagttcatatcttcgggaattgaagaactggatatggagcgatcgtccatcagccagaaggacagcagcgtgatacctgatgcagagatcctgcggaggctgcagggatggacgagcttcagcaaggagctcccggggatggtgctggagatcgaaaggtcgatattcaaggagctggtggacgaggtggtgcatggggagtctgctgacggcccggagatgaaggctgctggcagacggagaaggcggctctttgcttgatacggtttgtttgaccatcgccatccaccatttggatgggcctgatttgtgaagctgtaactttgtttgtcttgccatgagagtgagaccctatttcatctcaagagaagagggagagagagggggtagcgcagatttggtgagagacccgaaaatgggcattcgttcgtgctatatatagatactatgtataccattgtttcttgactccttgtgatttactgtggatgatgctatttcagt

SEQ ID NO: 31798 - DNA, 1491 bp, Zea mays
  Clone ID: UC-ZMFLB73220F05_FLI
cccggccgaccgtgtgcgagctgtccggcgacgtccgcgtgagcccgaagcagaggacggtgtacctggtgaacccgtcgggcggcggcgggttcgacgagcgcggcgagaagcgggtccggccgtacgcccgcaaggacgactttcttctccccggcgtgacggaggtgacggtgaagtcggtgccttcggccgcggtggcgcccaagtgcacgaggcagcacaccgcgccggcggtggtgttctccgtggccgggtacacggacaacttcttccacgacatagcggacgcgctgatcccgctgttcctgacgacggcgcacctggacggcgacgtgcagctgctggtgaccaactacaagccgtggtgggtgcagaagtacacgccggtgctgcggaagctgtcccggcacgacgtgatgagcttcgacgccgcggacgaggacgacgccgtgcactgcttccccgcgggcgcgttcctggggctgtaccgcgaccgggacctgatcctgtcgccgcacccgacccggaacccgcgcaacctgacgatggtggacttcgcgcggttcctgcgcggcgcgctggcgctgccgcgcgaccggcccgcggccctcggggagcagcccggggcgcggccccggatgctgatcgtctcgcgcgccggcacccggcggctgctgaacctggacgaggtggcggcggcggcggacgagctggggttcaacgtgacgtcggcggaggccggcgcggacgtgccggcgttcgcggcgcaggtgaacgcggccgacgtgctggtgggcgtgcacggcgccgggctgacgaaccaggtgttcctgccgacggaggccgtggtggtgcagatcgtgccgtggggcaagatggactggatggccaccaacttctacgcgcggccggcggcggggctggggctccgctacctggagtactacgtcggggcggaggagacgagcctcaaggacaagtacccgcgggagcacgtggtgttcagcgaccccatggcgctccacaagcaggggtggcaggcgctcgcccagaccgtcatgaagcaggacgtcaccgtcaacctcactatgttccggcccgtgctgctgcaggcgctcgacaagctgcagcagtgagggaccgtgattcctgctactgttcgtcttcctcgaattcgccattgccgaccggccatcccgagactgtggaggctagctagctgctgctgctcctgccaagtacagtactatcgctagaaaaaaagaaaaatgagagatagagagggaatgaaggaggcttcaaatttgcaatcgagttggtttgtattttttttggtttcaaccgtagcagtgcagcagaaacaccagcttggatagtgcgttttacatacactacagtctacacgcgaacaagaatcatgttcattcttttccttgacgagttgactccacctggcaatggcattcttcttctactgatgaacacatc

SEQ ID NO: 31799 - DNA, 1877 bp, Zea mays
  Clone ID: UC-ZMFLB73220F11_FLI
tagtcccaaccataaaaaagagcccagtgttggacaaaatgttgaaactggacgtgttgtcgaatggttaagaaaccttgggttatccaagtatgaggaagtttttatcagagaagaagttgactgggaaaccttgcagtggctcactgaagaggacctgttgggtattgggatcagctctcttggaccaagaaagaaaattatccatgctctaggagagttactgaagaaacatgatgatcccagtgaaatggaagctgtgttaaattcaggaaatactaagaagactaaacttccgatgaatggtaataaattaattaccgaatactttcaatgttcctcatttgatcaaagacaaagaagggtatgcaaagcaaacaagccatctaatctgaacgagaagaaaatttctagtgctaaagtacccactagaagaactgctggtaaaggaaagattaaggatacgcctctttggtgttgcatcccagggaccccttttcgagtggatgcatttcgctacttgagaggtgattgttctcactggtttctcacacactttcatgtggatcattatcaaggcttgactagaagcttttgtcatgggaagatatactgttcgtcaattacagcgagtcttgtgcatcataagattggtatcccatgggatagattgcatgtattgaccctaaatgaaaagctcaatattgctggagttaatttgatatgttttgatgccaaccattgcccaggatcaatcattattctctttgagcctccaaatggtaaagctgttttgcacactggagatttccgtttttcttccaagatggccaacaatcctgttttgcagtcttcctgtgtccacactctaatacttgacacaacctattgcaatccacggtatgatttcccaagtcaagaaatcgtaatacagttcgtcattgaggccatccaagcagaagctttcaatccaaaaacattgtttttgattggaagctacacaattggaaaagaaagattgtttatggaggttgctcgtttgcttcagaagaaagtatatgttggagctgcaaagctgcaaatactgaaacatttagagcttcctcaggagattatgcactggtttacagccaatgaagcagaaagtcacatacatgttgtccccatgtggactctagcaagcttcaagcggatgaaatatctatcgaatcaatatgctggccggtatgaccttatagtggcgttttgtcctactggttgggcatttggcaaaggtaggaaaaagacaccaggcaaaaggtggcaacaaggatcaatcattagatatgaagtgccctacagtgaacacagcagtttcacggaactgcagcagtttgtcaagttcatatcaccagagcacataatccctagcgtaaacaacgacggccctgagagtgcaaacgctatgcttgcccagctgttaaacgagtagaggaattcgttcgtcgcttcaatatcttcggcttggctacagttttctcttcgaaaaccatttgatgaaagggatggacgctggacgagctaacttccaaggactaatacagtgatggcggaagcattcctgatggtgccacccagagttctgacgtggaaatccagagatacagggtgcatagatgcgcacgcagacacccgttggcgccgtggaggtgctggttgacaaatcgtcagccaagattctgtactggaatgggtaccggcgatagcgtgtattgccgaaaccatgtgaaccgtgatttgtgactgtcaagccaagcgagtgaacttgcatgtcattatgagcccatttgtacacgaacttgtccagggtttttctagtgatggtgaaaagtcctgcc

SEQ ID NO: 31800 - DNA, 1705 bp, Zea mays
  Clone ID: UC-ZMFLB73220G06_FLI
gccacaagctctgacgccacctccgaatccacgtggccggccagacgatcgtcggggaccaaccagcgctccaactgtcccggagactcccattgacccggacgacaagaagatgcaaacgggacctcttgtagggatagctgttggctcaatagctgctgcctcgtgcgttcttttcgcgctggtgttgtgcctccacaacgcacggaaaaaacccgatgatgggagcagtgaagcgaaagcgtctagcagggaagtcatggacagtagccatgacaacgctgctgtggcaacttcagacctccaactgatccagcctgctggaaagatgactccggacgacagagcgcatggtccaaacggttgtaccgccaaaaggccaaagcagcaggttactgtgacgacagtgagttcctacacagttgctgctctccaagtcgctacgaacagcttctgccaagactctctcctaggcgagggctcgcttgggcgtgtttacaaggctgtttttcctaacgggaaggtacttgctgtgaagaagatagacagcgcttcgctgtctctgtacgaagaagacaactttctcgcggttgtgtcgaacgtgtcccggctcaggcatccaaacatcgtgccccttgcaggctactgcgtggagcacgggcagaggctccttgcgtacgagtacgtcgggaacggaacgctgcatgacatgctgcacttctctgacgacgacgggatgacgatgccgggcaagactactaggctcgcatggaacacccgcgcgaggatagcgctaggcaccgcgcgcgctctagagtacctgcatgaggtgtgcctgcccccggtggtgcacagggccttcaagtcatcaaacatcctgctcgacgacgagtacagcccgcgtctgtccgactgtgggctcgctgctctgtcgccgaaccctgagactgagagggaggctttcgctggagtggttggctccttcggatacagcgcccctgagttcgccatgtcagggacgtacactgccaagagtgacgtgtacagtttcggggtagtgatgctggagctgttgaccggccgcaagccgctagacagctccagggagaggtcggaacagtctcttgtgagatgggcgaccccgcagctccacgacatcgatctgctcgccaagatggtcgatcctgcactggatgggctgtaccctgccaagtccctctcccgtttcgccgacataatcgccatctgcgtccagtcggagccggagttccggccgccgatgtccgaagtcgtgcagcagctggtgcgcctgatgcagcgggcgagcatcgtgaggcgacaatcggacgaccagctgggctactcgtacagggttcccgagcgcgacggcggcggcacggtaggcggcgacgtcgtcgtcgcctgagctagctagctagctagaggccgcgacgagaccaaagctggcgtacactcctactcctacacaaagcgctgcacagtttatatatattcataaacaaaagagcgagcaaaagaaaagaaaagcagttggatatggatggatccttcacgttttgttaaaaagtcacccgtaaacgacatatatgtatagggtttgcagcgtactgggacgtttcttcgtgagctgcgagtgtcatgtatagtgtgcgctcttgccagtggtagatatataggataggag

SEQ ID NO: 31801 - DNA, 1793 bp, Zea mays
  Clone ID: UC-ZMFLB73220G07_FLI
cttctctccttttgctcggaacgcacacaccgcccggtctccgatctccgatccccgatcccctcgtcgatccaagatgcagatcttcgtcaagactctcactggaaagactatcaccctcgaggtggagtcctctgacaccattgacaacgtcaaggccaagatccaggacaaggaaggcattcccccggaccagcagcggctcatcttcgctggcaagcagctcgaggacgggcgcacacttgccgactacaacatccagaaggagagcaccctccaccttgttctccgcctcaggggaggcatgcagatcttcgtcaagaccctcactggaaagactatcaccctcgaggtggagtcttctgacaccatcgacaacgtcaaggccaagatccaggacaaggagggcatccctccggaccagcagcggctcatttttgctggcaagcagctcgaggacgggcgcacgctggccgactacaacattcagaaggagagcaccctccacttggtgttgcgtctcaggggcggcatgcagatcttcgtgaagactctgactggcaagactatcacccttgaggtggagtcttctgacaccattgacaatgtcaaggccaagatccaggacaaggagggcatccctccggaccagcagcggctcatttttgccggcaagcagctcgaggacgggcgcacgcttgccgactacaacattcagaaggagagcaccctccacttggtgctgcgtctcaggggtggcatgcagatcttcgtgaagacacttactggcaagactatcacccttgaggtggagtcctcggacaccatcgacaatgtcaaggccaagatccaggacaaggagggcattccaccggaccagcagcggctcatctttgctggcaagcagctggaggatggccgtacccttgcagattacaacatccagaaggagagcaccctccacttggtgctgcgtctcaggggtggcatgcagatcttcgtgaagactcttactggcaagacgatcacccttgaggtggagtcctcagacaccattgacaacgtcaaggccaagatccaggacaaggagggcattccaccggaccagcagcggctgatcttcgccggcaagcagctggaggatggtcgcaccttggctgactacaacatccagaaggagagcaccctccacttggtgctccgcctcaggggtggcatgcagatctttgtgaagacattgactggcaagaccatcaccttggaggtggagtcgtctgacacaatcgataatgtcaaagccaagatccaggacaaggagggcattccaccggaccagcagcgcctgatctttgctggcaagcagctggaggatggccgtaccctcgccgactacaacatccagaaggagagcaccctccacctggtgctccgcttgcgaggtggtatgcagatctttgtgaagaccttgactggcaagaccataaccctggaggttgagagctccgacaccatcgacaacgtgaaggcgaagatccaggacaaagagggcatccccccagaccagcagcgtctgatcttcgccggcaagcagctggaggatggccgcaccctagcagactacaacatccagaaggagagcactctccacctggtgctccgcctccgcggtggtcagtaagccatggttcatttaagctgctgctgtacctgggtatctgcgtcgtctggtgccctctggtgtacctctatatggatgtcgtcgtctaataaacatctgtggtttgtgtgtcatg

SEQ ID NO: 31802 - DNA, 868 bp, Zea mays
  Clone ID: UC-ZMFLB73220H06_FLI
gctagcgccggcgcctccacttcgttttcctcactctctcctccagctcagggtccggcggcgaagggaaggcaagatgtacaccgcgaggaagaagatccagaaggagaagggccttgagccctccgagttcgaggactccgttgcccaggctttctttgatctggagaacgggaaccaggagctcaagagcgacctcaaggacctgtacatcaacaatgctatccagatggatgttaccgggagcaggaaggctgttgtcatccacgtcccataccgcctgcgcaaggccttcaggaagatccatgtcagactcgtcagggagctggagaagaaattcagcggcaaggatgtggtaattgttgctacaaggaggattgtgaggccacccaagaagggttcagctgttctgcgccctcgcaccaggactctgactgctgttcacgatggcatcttggaggatgttgtctacccagctgagattgtggggaagcgtgtcagataccgtctggatggttccaagattatcaagattttcttggacccaaaggagaggaacaacactgaatacaagctggagacctgcactgcggtctaccgcaggctgtgtgggaaagatgtggtctttgagtaccctatgaccgaaaatgcataaatatgatgccctctggatatctccactctatttcgttgattctgaatgttatgttgggtctccctatgtacttcaaaaacatagttttgatgctaaagttgcctagcaatttggtacggggaagtggcagtggacgtgaacaatgttaagttttgagcatttaaattaaacctttgccctgataacgttgctgagttatttaatttcttgctt

SEQ ID NO: 31803 - DNA, 1984 bp, Zea mays
  Clone ID: UC-ZMFLB73221D04_FLI
ccggccgttacttgctctgagccaacaacagtatcaaaagccccgacccccccatcctccggcgacgatgccttccggcgacgattccgaccccctgctggcgcccgccgacggcatacgcttcgcggcgctggactaccgcgaccaccccgccgaccgcggcgccaccggcggctggcggtcggcgctcttcatcatagcggtggagatctcggagcggttcacgttctatggcgtgtcgtcgaacctgatcaactacctcacgggcccgctcggagagggcaccgcggcggcggcggcggccatcaacacgtggaacggggtggcgcagctgctgccgctgctgggcggggccctcgcggacaagtggctcggccgctaccgcaccatcgtcgtcgcatcgcttctctatgtcatcggtgcaggcatgctggccttctcgaccttgctctcctccggcagcggccaccaatgcaccaccgccgggggccagacctgtgcgccgtccaccattaaggtgaccttcttctacgtctccctctacatcgtggccgtggcgcagggcggccacaagccgtgcgtccaggcgttcggcgccgaccagttcgatcagagcgaccccaaggagaccgtctccaggagctccttcttcaactggtggtacttcggcatgtgcgccggcaccgccgtcacgctcctgttcctcaactacgtgcaggacaacatcggatggggcctcggtttcggcattccgtgcgccgtcatggcagctgcgctcgccgtattccttctcggtacaaggaggtaccggtactacgtcactgccggggagcggggcctgttcgctcgtgccggcgaggcttttgttgagtggcggagcaggcgaaaggctcttcagcatggtgatcgacctgtagcagagggggcgccgggattcagcgctggtgtcgacgaggaggagcaggctgcagtcagccatgacgcaggcctcgtcaaggagaccaaggacatcctccgtctattcccgatatgggcgacgtgcctgctctacgcggtggcgttctcgcagtcgtcgacgttcttcacgaaacaggcggcgaccctggaccggcgcgtcgggcggcacttgcaggtaccaccggccgcgctgcagagcttcatcagcatcaccatcgtggtcttcatccccctctacgaccgcgtcctcgtgccggtggcgcgccggtactccggcaacccatccggcatcaccatgctgcagcgcatcgggacggggatgttcctctcgctcttgtccatggtgatcgcggcgctcgtcgagaagcaccggctccgcgtggcagtggacgctggcctcgtggacaagccaatggtccccctgccgatgagcctatggtggatggtgccgcagtacgtgctgttcggggccgccgacgtgtacaccatggtcgggctgcaggagttcttctacgatcaggtgcccgacaagctgcgcagcctcgggctggcactctaccttagcatcttcggcgtcggcagcttcatcagcagcacgctcgtgtcgatcatcgacagtgtgacgacggccaggggcgggagctggttctccaacaacctgaaccgtggccacgtggactacttctactggctactcgccgcgctcagcgccctcgagctcctcgcctatgtcttcttcgcggtgacatacaagtacaagaacaaagcaaccgtgcatgcaactgttgttggtcagtcgctttagttcaaaaatgaattagcggcaacaaatattcgagaatggagttagtacatcatcctacgacatagtataggtgatatgacacacaactaaatgtaaatggtaccttttctccgttagggtttgtggtccatacttatctttgattttgattcccatttgtatctgttgggacttgggagggtcaatgctatcattcaattcttaaggcaagggttcatccgt

SEQ ID NO: 31804 - DNA, 2222 bp, Zea mays
  Clone ID: UC-ZMFLB73221F02_FLI
cgtcccaccgccgctgcacaagacgaggaagaggttcccggtcccggcgccgccactatgtcgtcgatgatgaacgcgctgtcaaactggctggtgaacccgcgccgcaacccgctcgcgcgcctccacatgcacaccgtctcctcgcgcctcaggaaatacgggctgaggtacgatgacctgtacgacccctacttcgacctggacatcaaggaggcgctcgggaggctgcctagggaggtggtcgacgcccgcatccagcgcctcaagcgcgccatggacctctccatgaagcatcagtacctccccgaggacctccaggcacagcaggtcccattcagaggatatttgagtgacatgttggctctggtaagaatctttttacttcattccattggcatttcatatgcctttgaattagagtcactccattcccctttttttaatgcgtgcaagggacctaatctacatgatatgaattatgcttaggagtgtactgcctatcaatcgttgctagatttaatatgggtacaacggacaagtttacagcattgttagttagcatttaagtagggatagacatggaagagtcagggaaaatgtgcattgctgtatattttggactgagtattaagccattgtatcaggtaggtcattaatcactattaccatatcatgtggcatctaattatgaagtttgtctcagcctatatatcatgccttgttcttgtgttgctccatggacttcacttctctcttactgttatttctctagggtttcacttcttttcatgttcactatcatattgatgccttttttacttttgcaaaccaatattcagtgaaagacagagatcgtagcttctaaaaatgcttagacaacttatatatggtgtgcttctaatattatttgtaaataacattgcaacttaacatgatttatttttgtgattctagtagtagaattttaactgcagacatgtgattggatggagataattggatttttgccactcacaatgttgtcttcttgttataattatcactgtgtctatgaattgtgggttcagctgggtctatgaaatgtgggtctgatgacaattttataaacatgtttattgctgatggcaaatatcaaaatctctcgattggatgtgtcactccttaaggaactccttagctcaagctgctgattagcactagagatggcaatagagatggcaacggataaataccttatgggtattgtcatcccatactggtatccaagaataaaacttgtgcttgcagttgggtacaaaatcatgttcgtattcgtgtccatgatgcagataacaggtactcttgggttgcccgtgcccgacatttcataatagattctttattactagacacatacgattctaattattcaatatctaattattcaatagattaaaccaggaataagacaatagataagcaaattatatatggccacaatacaagtaagttgaagttaaaactccatagttcactagcatatcacaatcacaagttcactgcctaatcatattactagcaagttaggatttaagaggcacacaatataattgagccgggtatattttacccacgggtttgcgagttcttggtagcataagaacgtatccgtacccgcaaacccgacgagtacgactttgttcccattaataaaccaatgggtaagcaaattaacctttatccaagccctggtagagtaaaactcgtcgggtttcaggcaacgggtacttattgccatctctaattagcactatgctgcaaagttctttcccatttttattttgcctgaattcatatgagaagtggcttttgtttgacacctggcatttcttgcaggtgaaaaaggaaaacgctgagcgtgaagcactgggagcccttccactctaccagagaacgcttccctaaatcgctggctaaacatggttgcaagtcttctctttacggcaaatcagaatgcatgcaataaaatgcagtgggtgttttttttggttccaaccaaagttacattttacttgtccacgcagtggtgcattgaccatgcgctctacctgtttttttttcttccgattaatgggagcaaattattgtaacactataattaacttgtgaatcttcagctgcgggtggctgacgtagtgttctttgatcgtgattttttgtatccattgagctttttttcg

SEQ ID NO: 31805 - DNA, 1448 bp, Zea mays
  Clone ID: UC-ZMFLB73221F04_FLI
tctccacttcacacctgtttgctgtttttcatctcccgttcacctcgcgtgccgcatgcgcgacaactagagcgaccgccgccgctctacgcccagctgcccatgtcttcgtcgggcccttcgccggcgacgggaacccaccacaccaggtcaacaccgttgcaagtaattcatgttttgggaaacttcatgagaatttggtctgtttactccttgtatagctacctatccaacagtggagattcaatagttggctttatcttcagttgtcttgtacccacttcagtcatattcttggtcttacagaagccttggaaaggccgacctttgcccaactcacaggttgttcctacagttgtcaatggaggaatcctggcattctactttgtattatggggtaaaggacttcttgcttgtggtccactagttgctctactggcagagtatgcaggtgctgttcttggagttctctctgctgctttatatggaaggaaatctaacatctggaaaaagattggtggacttgctgctatgttggcagcatattatctcttgtcaaatggatggtctacaagaacccattctcctctatatagctttggaagtgaaccagtggagaaggcagcacaaactattggagtgaaagcaatgatggtgccaattactgctgggatcttgtctgctttaaggagagtattagctcggcgtgtttctctcaagaatcaacttaaaaggcggctccatgctataactattgcttctgctacttgtttcctttttccgtttgccatgtgggatacgatcctaggttcggcatctgacagcattgttaaattacaactaccaagttgggcatactttagtactgttttatttggaatggtgcttatattctatgttgacaatgttgctgaagaaaagttgcatctggtcttctcttctccaaggcacttaatggtctcaacaggttgcatcatcgtgttggaaacagtgtaccaaatggatttctcccttttaggatttctggtctgttctgttattttgggattcggtatttctgaagcaacctccttggaacgctcaaagaaaagccctttagagacccatgaactatcgaatggggtgttccacaatcaattgcctatttcagaacttccaagctgaagaatatatgacctagctacgacgttgtgaatggctgcggttgcacacctcaagctcaatggttcgattctttgcgtgaaggttttaacgagacagaaaacacggatgtttttgacctgccaatgcccaatgtgtctttgtaatcctccattattgttggccacctgcatcctgtacatgtgaacaactcaagtagatgtgtatccgtattccccttgcagatattgcaattgtcacagcatcctgtttaactgcttgggtagtttcgaaaatttgtttttctc

SEQ ID NO: 31806 - DNA, 263 bp, Zea mays
  Clone ID: UC-ZMFLB73221F08_FLI
agcgacgatgaatgtaatttcaagaggagatggggtcgcagatcatcaggaggcgtggacacaaggcactgaacggaagaatgtggactacggcggaccgaccaagtgcagcaatacattgctggtcaccagtgctcacctatccattttcttttactcgtaattgtatgtattcccctgcaaacaaaggggaacttccggttccctggcgaaatgtaatggtattaccatgcgatctctccaaatataaatggaagtttgct

SEQ ID NO: 31807 - DNA, 721 bp, Zea mays
  Clone ID: UC-ZMFLB73221H10_FLI
cgccggtgttcgacgtcctgcgcctcttcccggacgactgcgcgttcccgacggtgtgcggcgcctacggcgtgtgcacggacatgcagtgtagctgccccgacgcggccaacttccgggcggtggacttccggaggcccaaccgcggctgcgtcacggtggcgccggttgccggctgcggcggttcgcaccccccggcgcggctggtgtcgctgcccgggctggcctacttcaacgaccccgccaccagcctcagggcgctggagagggtgagcgacgccgcgtgcaggaaggcgtgcctggacgactgcgcctgcgcggcggcgcagttcgtctacggcaccgacgccggcgacggcttctgctacctgcagtcggaggtgctgtcgctggagacgtcgcggccggaggtggtgcactacaactccaccatgcatctcaaggtgcgggccacgcggcgtccgtcaccgtcagccagattttagttggattggaccactcacaaggacaaggtcacacacagccacacagagcagtacaccacttctatattatcagtctgttgtcttccaattttttttgtatcagtctacagtccaaacacttgttgatccaccgatgtcaaaatgaagtccttttctttttctgtgtctgttatattcttagtgcgagttgaaaatgacaacgtgcagaaatgacagaataaaagtcgttctaatgc

SEQ ID NO: 31808 - DNA, 1261 bp, Zea mays
  Clone ID: UC-ZMFLB73221H12_FLI
gttgagagcttgccgtccagcgttcatcggatagctcctgagctcgatctcgggtcgcgcacagctgctctccccttcctcccgctcagctcgctcttcggtgctgctctcgatcgtcgtctcgctccatcaccggcggtcgcttagcctccgcgatcccggccggtggtcttcttcgccgcattatctctctctctctctctctaacacaaggacgatgtcgagccggaggtcccgcgcgtcgacggtctcggaggaggagatcaacgagcttatctcgaggctgcagacgctgctccccagcgcgcgccgccgtggcggcagccaggtatgaatatacgatacaacgcatgcgcattcaaaccaagatgtgcatgatctagctagctagctaggtagttttacttctctgatctcacagtattgagtagtgacactgacaccatcacaccgacacgacacacatgcataaattaaagagtgctatacactgcggtgccagtgccaccgtaccgcttattgcaagtatgcataaagagtgctattggcagctggtagctcactcgctccaagccaagagatcgtcgtggatcgtctgatgatgtaaacaaaacaacggtggtgtgcgtacgatgtgatatgcaggcgtcgacgacgaagctgctcaaggagacctgcagctacatcaagagcctgcaccgggaggtggacgatctgagcgaccgcctgtcggacctcatggccagcatggaccacaacagccccggcgccgagatcatccgcagcctcctccgctagcccaagtccgtccgtccggccatggcgtgacggccggcctctcgccatcgccagatctcagcgcattgccgagtgtgtgtgtgtgtaccacatatagcagctgaatatacccaaggacgacgtacgccgacgacaggctaaggctggtttattaattggtagggcattattaagtactactccgtattaactagggctgcctagcttaagtatggtttctctctcttccactcttggctgtttgtttccttgctatactctcctagtagcttagctccttttccatttgtttgtacttggctgcttcgtcccatgttcgtcgtcgtcgtcgtggtggtggtgtaaacctatgtgtgtggtctggatcgagttgtttcctccttgacagacaaccgaccaaccccgatcgatctgtcaacttgtactacgtacgtactggtaatatatcaatatctatatatat

SEQ ID NO: 31809 - DNA, 1013 bp, Zea mays
  Clone ID: UC-ZMFLB73222A06_FLI
ctcccgcagctccaacgcgccgctcatgaccgacctcgacggcaacatagtcgccgtccccaacccctcgggtcgcggaccggggtaccgctactttggcgcggccaggaagctccctggcgtgcgggagctcttcgacaagccgcctgagatgcggaagcgacgcacccgctacgagatccacaagcgcatcaacgccgggtactacggatactatgacgatgaggacggcgtgctagagcgccttgagggccctgccgagaagcgcatgcgggaggagattgtttcagagtggcaccgtgtggaacgggtgcggcgggaggccatgaagggggtgatgagcggtgaggtggctgcggctggagggcgcagcggggaggctgctagagaggttctgtttgagggggtggaggaggaggtcgaagaggagaggaagcgcgaggaagagaagagagagagggagaaaggcgaggaagttgggagggaattcgttgcacatgtgccgctacctgatgaaaaggagattgagcgcatggtattagagaggaagaagaaggagctgcttagcaagtatgccagcgattccctgctggttgagcaggaggaggccaaggagatgctcaatgtccgacgctagaagacgactgaccaattgaagctttcattgtgagctcaagacgagcactgaggtacaagaaggaacatcttttgaagtgctggcaccggggggaccaaagacattgttatgtaaaagaaaacaggtttgcctgaaatcacattttatgtgtttaatcagacttgagcgagtgatactggtgcctgttgacaaattttgacgaatgctaagcttgtggtattattggtgtgcctgtgtgccctgaacgaaggctagacttgtggtattgatgtgcctgtgtgcactgtaacttaactcgtatcatgtacagccattggctgcaatgcactgatcattgatcccttaaaatttcagtgatatagcaaaatctgatcgt

SEQ ID NO: 31810 - DNA, 1781 bp, Zea mays
  Clone ID: UC-ZMFLB73222B01_FLI
gcgcgcaggtggcggccccatctttcgcttcctcccttcctccgccaccactcaccccttgatccgttctgcctcctaaatttggcgtcaccaagcaaccccactcatgccgttctcaaaaccctacccgaccaatccgtccaattccaaggctgtcggctttgcgttatgagcgccgggtcaggggaggggcggaggatcagatcagcagccgcacgagcattgagcgatatggcttctatgtaggatgcaactggacatcgccgtccactcgtctagctattgatgctgaagtcccgatgcttcatgccaccgcgatggtggctggttgatctccgtgagtttcaggcatttgctcaggtgttttcatttcataatataactactactactttaatgatgggtaagagattaggtggttgtactgtacaaaagattcatgtgttttactggccgtcaagtttcccttaaattaatgcctaattgcattttttggagttacgtactaatgccttgaaaggattgtgtaatattccggaatattgtgttcattttcataagtaaaatttgtttgggtgaagttgattttcacatatatttgagatctgtttagacaagccttgatgaacttggttgtttagcatagttcggctttcacaaatcacaatgtttagaatctttttatacgcatggggcttatatgatgaagcttcactgctccactactatttgacatacaatatgtttataatgttttttataattgatttttcacaatgtttagaatcttttattcttataatgtatgtttttatgccacgtactcatagtttttaccatcagttgcttatgatccttcagttcattaacgaacttttaggtggttgtgcttgatcggtggtgttctcaggccttctgttttgtggttgtaggatatcaagaggagggaagaggcactgaagaatggtgcagatccacatttgtttttgcataattgctgccttagctccaccaattgtatttcatgggaaatcattaacgtaagtttgccactccttttatctaaagtaatcaaagtcattagttattatgggcttgggtaatgtgagtaagcaccattgcatagatagccagtgatgttggctgctggaaaaggagaaatcaatgaattatagattgggatcacagaacttcatagaggaaactaggttgattgttcaatatctttttaagaacacttagtatcctggataatatgtgaaacaaacaatatgtgaaacaaataagtatttaaccagccgcatagaagcatgtttgctttgtgaccctagaaaccagccaggcacaagcagcacctcgaccccctcctcgaccagatgactactgtctcgaggcgtacagtggccactcacctagcgggtgtgtctagctcgtcatcggtctccaatgccacgttcgcgctactactccaatcattgctgacccgtatgatctccactgacttccacaaggagtgcaggcaccttcggtcccatccgctgttaaggagaacacatggttatggtgttccacagactggcattttattcattcattgaaaggcttacctcgcttatggtgttccacagagtgacatgaaactattttcacttatgcaaaagatttgtgcattaagaatattttttatcagagttcactcgaggaatgcaagaattaggataggtagattagatcttttttattggtgtatcctgagtttcctctaataagaatcatgtgtc

SEQ ID NO: 31811 - DNA, 1541 bp, Zea mays
  Clone ID: UC-ZMFLB73222B12_FLI
cattccaccatctgttctgtgccggaattttcgttcccaggaatttccacaaggccaacttctacgcttccgcgtcactcagcccctaaatatcgatttggttggctagttggtacctttgctgcctgctgcaatcagtgatctgtgccgcctggggtctcggaccatcagatctccagctagcttccttgctacttactcccctacccgctgcaccctcgccatggatccgccgagctccgatatcgtagtcgacactccatacttccgcatctacagtgaccggcgcatcgaccgcttggtcggcaccgataccgtgccggcgggctttgatcccaccaccggcgtcacctccaaagatgtcgttgtagacagcgacgccggcgtctacgttcgcctgtacctcccggacacggctacggggtccgatgattccaagaagctcccggtgctagtctacttccacggcggcggctttgtcacccactcggcagcgtctccgccctatcagtccttcctcaacaccctggccgcgaaggccggcctgctcatcgtctccgtgaactaccgcctcgcgccagagcacccgctgcctgcaggctacgaggactccttccgcgcgctcaggtgggcggcctctggtagtggggacccctggctgtcacatcacggcgacctggcccgcatcttcctggccggcgacagcgccggcgggaacttcgtccacaacatcgctgtgatggcagccgcgtcggaggtgccagtgcgaatcaggggcgcggtcctcctgcacgcggggttcggtggcagggagcgcatcgacggagagacgccggagtctgtggcgctgatggagaagctgtggggggtcgtgtgcctcgcggcgacggacggcctgaacgacccgcggataaatccgttggctgccgccgcggcgccgagcctgcggaacctgccgtgtgagagggtgctcgtctgcgcggcagagttggacttcctgcggccgaggaacagggcgtactacgaggccctcgcggcaagctggcggagcggcacggtggagtggttcgagtcgaagggcaaggagcacgtcttcttcctctacaaccccggctgcggcgaggccgtggagctcatggatcgactggtcgcgttctttgctgggaactgaaattcgtcatgtgtggatgtgaccgcgaccacatccacatccagtgcagtgagacggatggatcaaacgaagatgcagctcatcgctgaatcgaatgattgagctgggtccaggaaaagaaaactaaaagtgactagaataattgagatcggagccttggattgatcagtttgtgctatcaatttactgcacgggtcagcgtctcttgttttctttttcatcgagaataatatactagtaggaccgaaactatctcagcatccgaaagtatcagcttatgtcgatcctttcgtgtaggcgtttttttcctttgcatatattattgtataactcttctgtgtcaatacatgtccaattaatttagaggctc

SEQ ID NO: 31812 - DNA, 1371 bp, Zea mays
  Clone ID: UC-ZMFLB73222C08_FLI
cgcgcgccgctcccgccgcgcgcgccttcgggaacgttgatgtcgtgggcaggcccaccgcgggcaccccaatgggctcctccggccttgccgccacgctccgcgccgccgccgcgatgctccggctcgatgcggagtgggactggttcatcacgcttagcgccgccgactacccgcttctcacccaggacgacttgattcatgttttctcctctgttccaaggcacctcaactttatagatcacaccagtgacattggatggaaagaatctcagagagtgcaaccggttatagtagatgctggaatatacttggcagggaggaaccagttcttccaagccacagagaaacgtgacactcctgatggtttcaaatttttcacaggcatttgtcttaacttgcactttgtttttcacccggttgatgaaaaatggtttcttaacacatgcactccctttctgttaggttctccatgggtcattttaaacagacactttgttgagtattgtgtttttggttgggagaatctccctaggacactcctcatgtacttcacaaatgtgatgctacctctagagggttatttccattcggttgcatgcaactcggacttccacaatttcacagtgaacaacgacttgcggtatgtggtgtgggacgatccacctcagatggagccccatttcctaaatgttacacattatgatgagctagtagggactggggttccttttgcccggaagtttaaggaggatgaacccctgttggacatgattgatgataaagtgcttcgacgctggcgtcacaggcctgttcctggcgcatggtgcacaggcaaaaggaggtggttcagtgatccttgctcccagtggagcaacgtcaacattgtaagacccggtcctcaagctgagaagttccgaacatatataaaccagattatggaagaatcaaagtcaagcaacaactcttgcaagcaatagcggtagaatccgagcacgaggcttcacttcccgcagttgaagcgttgagcttgtctcattttgcgccgaggagctctccatgtctcgagcacttcctggcatctgcttcaggagcaagcatttttgcacctgttgtatgaactgaacacacggccaaggtgatagatggatttattctttccagaatttttttgggtgacatggcttcaagggcttagtgcacactagtgttgttggaagccaagaaagcctactgtgggaatacagaagctaatagtcattgtaattagtagcagcgagttgaatggcctgtgcctttgttcatagatctgatggaattgttggtgcttccatacaaaattgcgaaaatgaagagcgggggaatgttatc

SEQ ID NO: 31813 - DNA, 1579 bp, Zea mays
  Clone ID: UC-ZMFLB73222D01_FLI
tgaatttgtgctagctagccaacagacattaccatcgttcaccccgccaggttcctacaccctcacgatgaagttgctgggggacagcaacgaggaactgacctgcatctctttcgggttcagcatcgggtttgttgcgccgaatcccgtcatctgaacccagtatcgaatgtcatggatgtactttacatgaaccttgtagtgcaacattctccagtaagactcggaactcccaggctgggcgcctggaattggttaattcggtcttctcagccttaccaatgttcatcatgtgcacgctcaagattcctaaaaccatcattaaggaaattgatattttcagaaagcactgcctgtggagaggaaatgacatcaactccaagaggccacctttgattgcttggaattcggtcactcaaaggaaagtgaatggtggcctgggtgttcttcgattagaaacacagaacgaggctcttctaattaaatttttgcataaatttttcaaccacagcgacttaccttgggtccatctgatctggaacaattactatcttactcgaggtctccctggtaatagaagcgttggatctttctggtggaagagcattgtaaagcttctgccaaacttcaaaggactggctacccccgtcattggcaatggcagattaatttcattctgggatgatcagtggagtcagggcatcccgaggcatattttcccagagctcttctcctttgccaagaactcaaaaatgaccatcaaagaggtcaaggatcaagagcagttccatgatctttttcatttacctgtctctgatcaagcgtttgatcaatttctggtactcaaggggtcttgggagcaaattattcttaataatgttcatgaccgctggaagtatatttggggatcggacaaattctcgtcccaaaaagcttacagatctttcatgggccagatgcagactcatcctatctacaaactagtttggaaaagtaagtgtcagcctaagcatagagtcttctattggctgtggcttaagaacaggctaaacaccagaaatatgctgagaaggagaaacatggagctagattcctattcttgcgaaaactgtctttggcaaagagaggagaccctttatcatcttttcctcagatgcaacttcgcgaaagcctgctggaactcaattggcattaccccacccagaatttccaaccctgaagaggcatctgtaaacctcaaacaccagctcaacgttcccttctctatggagatcactattcttatgacttggagcatctggaaaagccgaaacgagtggctgttttcaaacagagatccctccgtgctccgctgcactcaggaatttagtagagaattgcgactaatcattcacagagcacggggagaattcgacacctcaatcccgaactggctaaatttgtggcaaatatagaaatagctcttcttttttctttctttctctcttctttttattgattgtaaaaggaacagggcctaacctttaatattcgctttctaataaaatgcgcagtaggggtttccccctcctgatccttc

SEQ ID NO: 31814 - DNA, 444 bp, Zea mays
  Clone ID: UC-ZMFLB73222E06_FLI
caatcgctccgagagaagggctgcagcacttgctaaattcaggcagaaaaggaaagagcgctgttttgacaagaaggtgaggtatgtgaacaggaagaaacttgctgagacgaggctaagggtgcgaggtcaatttgttaggcatgcaagcaatatggatatcataagcaccggagatgatatatctgaagacgaagatgacgatccaacctccagggaggtagatatgatttcttctccagagtagtggagaggtcctcttgtgtgaaaaattagagtgcagatggttactgctcactttgttacaactcagtaggactagacaatacattattctactggcaacaaggcaatacaccctttttgctcacacagtataaacttttgtccccaaatatctggctgttactccggttgctttaatcgagaaatcatctttttgat

SEQ ID NO: 31815 - DNA, 1763 bp, Zea mays
  Clone ID: UC-ZMFLB73222F01_FLI
catcgcatgggcgaacggcggcccccggttcggcgacatggtctgggccaaggtgaagtcccatccgtggtggcctggccatatctacagcgtcagcctcaccgacgacgaggaggtacaccgcggccaccgcgacgggctcgtcctcgtcgccttcttcggtgactcgagctatgggtggtttgaccccagcgagctcgtccccttcgaggaccacttcaccgagaaggcggcccagggcggcagctcccgcagcagctttgccgccgccgtggccgaggccgtcgacgaggtagcccgccgcagcgcgctggcgctgctctgcccttgcgacattcctgacgccttccgtccccaccccagcgacggcaacttcttcctggtcgacgtcccggcattcgacaccgacgctgactaccaactcgaccagatccgggccgcacggcagcgattcgtgccgcggaaggcgctcaactacctgctggacgccgccgtgactcagcgagacgcggcggaaaaagccgcgcgcaccgtgcctgggatggagatggccgcgctgttcttggcgtaccgccgcgcggtgttttcgccgatagacaacacctacgcccaagctttcggggtggatcctgagctggctcttgctgccgagcagaaagccgcggcagagagagctcaacgaggtatcaacaacactcacatgctcaattctagctgtactgttgttcttgttactgtgtacttgaaattgatgggtaaacaatgttcctactgcttttatagatcaagcaacaattattttgatgtgaataacggagtggatctgattcaaatagtttctatttcacttctgtttaactgttggttgcattttttttatcaacgagagtgattattgaatttgggatgatattcatgcagaaacttgttgaataaattgtttgtttcacgggattcagtccatctaacctagtaaaatatgagacatgcatattcacagatcaatctgcatttgttctagaaattgaacggctgtgtgatatagtatcatatacgtgtctatacgatactatcctgatatgtatgctgagttaggtcttttctcattctagcttttctctaggaaaaaaaacaccatccatgatcttgttggcatgaaatgtttaaagttgtgactagtttgtatcatgaaggtttaaagccatgactagttagcatgagcctgttattggagtcttgagatgttttatttctatatgtccatacacttacatgactaggaagttttctctgcagtatatttggttcttttgcactatggtgacaattattatacatttggaacttgtgtttccttcctattttagtttttgttgttgcacatcagtttcctgtccatattaagttatgggttcacatataaaagctgcattttttttatcaaattgttaagtttgcttgtcaaggaggatacacctagattagacaagttgatccttacgcatgtagccagtacagagcaatgaaatccatgttttgtaaacagaagtgcgataaactgtgtgaaactgattctgaatgaacgcccatgcatatccaacctagtaaaatattagacatgcatacccacagatcgatctgcacttggtctagaaactgaaggcctttgtgatatagtatcatatatgtgtcattttttctttatgatgccatcctaatatgtatgatgagttagttcttttctcattctagttgtcttaggc

SEQ ID NO: 31816 - DNA, 1095 bp, Zea mays
  Clone ID: UC-ZMFLB73222F08_FLI
cacaaccccgcgcgcgggggagcgataaaccctagtcttcgccgtcgtcgcaggaggacccgcgatgtcgcacttcgggaggtcaggcccgccggacatccgcgacaccttctcgctcctcgtcctcaacatcagcttccgcaccacggccgacgacctcttcccgctcttcgagcgctacggcaaggtcgtcgacgtcttcatcccgagggaccggaggaccggggactcgaggggtttcgcgttcgtgcggtacaagtacgccgacgaggcgcagaaggctatagatcggctcgatggccgtgatgtggatgggagaaacatcatggtgcagtttgcaaagtacggccccaatgctgagccaatccgcaaaggaagggttaaagagggggttgagaaatcacaagacagatcaagaagccgcagtccaaggccaaggcacagagatagagatcatagaagccaaagtcgcagcaggagcagagaaaggcatgtccgtgatagagacaggggctatcgtcgtcggagcagaagtagaagccgaagtcttagttcaagccctgacaacagaagtcatcatagagcaagagatgatgataagcgcaagagcatgagtaagagcaggagcaggagcaggagcacaagtagaagccgctcatactatagtgcttcacctgcccggcacagtgctagccctcgcaagagcccaccgccacagaggagccccactcctgcaaagcatgccaatggaaaagtagcacctctgtcacgctgtgtttctccattaccgaagcgtgcaacctcccgcagcccaggcagtgatggcaaggagtaaagcttgctgatttggtgatgcctagaaaacagccttctcacggagtcacgggattgcagaaccttgagaaggttgattgagcacaatggaagtagcagtctgcaatcaaccgcgatccaaggttgctagttcttttaatggcttatagaattgtgttttccagttgtcaaaaatatgctgctggtttgtatttttggcatatactgtgtttttatacccttgcactgcatcatctactttatatatgcatcagtttctcg

SEQ ID NO: 31817 - DNA, 1326 bp, Zea mays
  Clone ID: UC-ZMFLB73222F10_FLI
cttgcttagctgttactcctagtaccccaccaaattagcttttggtggcgtttgcatattaggatatgtgggtgggaacgggaattgttgtggaggaatgggaaatataagggcatgtacaatctagacactgctgcacggtactataagtataagacacaactaaaacacaacataatacagtggtcatgtctaaaacatgtgtcttaccatattcattctaccaatcagagcattcaataaattaaagtgacctatcagctagtctcctgtctccaacatagagctaagacattgtgtcttcgtcaagatacatgtcttgagtttttttacattcaccccttagacacactttaagacacaacttaagacacatattgtacatgccctaaggggagtcggggtacggaaatggctatcctgccaattcaatcccagcgggagagttgggccttgtcatctgatggctatggcggcgatcttcaacttttggctccagcacctgcggctagccactcctgtactcaagaaagggagcagcagctggacctggctatcaacaaagcctagcatttttggttggatgcacctctcgcctcgcgcagcaacgctgtggagttgagggtgggtgggggacacggggacggagccattgctaaccctgcttagtgccttttatcttgactttcaaaagatatggtcccaatcaactcaaagataatgagtatccagcatgtcaaggacatggctatccgctgcacaagggctgtcaaggctttcaaggtttaggatgccaagtctccatggtgctctggttggcaaccagttgattcttgaatgtccatgtcctggaccatttcttctatcatgcaaatcactacacctttaaagtgggagtttcgtcgtgcatcgtcggcctccccatgcgcgtagcgagcgtcgctagatttcccccacgcgctcagcaaaatataaaaaagtgtgcttgctgggatttgaaccatgggtctctaggaagagagacatcgcctctaacccctgtaacttgtgttgatttatgttatacaaagaaaccatatatgatatatagaaaccgtagcgatgcacatgcaactaaatagtccaagtcatgtagcactactatgtgtttgaatagagtgcttggaaagcagctattgatgtttctaaaccgtgactcccctcatgttgggtttcaactctagcctacccaacttgcttgggactgaaaagctttgttgttgttgttgttgctgttttcatctctccatcatcattaagtaaatggaaatagacctgttatgagtt

SEQ ID NO: 31818 - DNA, 277 bp, Zea mays
  Clone ID: UC-ZMFLB73222G03_FLI
cttcaatcagtggaagcaaactgcctctaccattacagctatgaagtatatagtcgtgattgtgtcagacgtggtgtgtttttgggagataaaaggctcttttggtcgaggagctaggtatcagatgttttttatggtacctgtaattttccgtgcttctgttttggttttgtgcaaggtataccatgtctgactgtgtgctcgccactgtctgagtcgttgtactatcccgggccggcctgtccggctgtctcttggcatagcaaaatgatcgcct

SEQ ID NO: 31819 - DNA, 1017 bp, Zea mays
  Clone ID: UC-ZMFLB73222G10_FLI
gcaagccatgtggaggagggctttagcgatggtcctgttcatggctggcgccgcgctgctcgccggggctgccggcgccggcgcgcagcagggcgtgtggagcatcatcacccggcccatgttccagagcatgctgagccaccgcggcgacagcgggtgccagggcgccttctacacctacgacgccttcatcgaggccgccagcaagttccccggcttcggcaccaccggcgacgagcagacgcgcaggcgggagctcgccgccttcttcggccagacgtcccacgaaaccaccggtggatgggcgactgctccggatggaccgtttgcctggggatactgccgggtgaaggaacagaaacagacggacccaccctactatggacgaggacccatacagctaactcataagtacaactacaggctcgccgggcaagcgctgaacctgaacctggtgggcgacccggacctggtggcgagagaccccgtggtagccttcaagacggccatctggttctggatgacgccgcagtcgcccaagccctcgtgccacgccgtgatgaccggcgactggaggccctccgccaccgaccgcgccgcggggaggctccccggatacggcctgaccacgaacatcatcaacggtggtctagagtgcggcgaggaccgctccaccgacggcgccaaagccgccaaggaccgggtcggctactacaagaggtactgcggtatgctcggagtggggtacggggacaacatggcatgcgggagccagaagccttacggaggatgatgacactagtagctgatctatggttgctgcaatgcaagccttcacgtgtgtttgcctctctacctaaagaataaatcaagctagcagcaaacctaccttcggcgtgtgtctacttgcttatcatagtgtgtgtccgtgtatgagagatgatgtactgtcacgaactcacgtgtgtatgagagaggatacatggtaagactatcactactagaatccgcctcttt

SEQ ID NO: 31820 - DNA, 833 bp, Zea mays
  Clone ID: UC-ZMFLB73222H01_FLI
ttgaaatgatttttgataatgctcatgaacttggaaagaaatttcgtgttgtggtggtcgactctcgtccaaaccatgagggacaaggattgttgcgccgattagttgcaaagggtatcagttgcacatatacacacataaatgctgtatcttacatcatgcatgaggttacaagagtgtttttgggtgcctcttcagtactatcgaatggtactgtctactccagagttgggacagctttggttgcgatggttgcacatgcttttggagttcctgttctagtgtgttgtgaagcgtacaagtttcatgagagggttcaactcgattctatatgctttaatgaacttggtgacccagatgctatttcaagagttcctagggatgaaagtttgagcaatctcaaaaactgggctgagaatgaaaatcttcatcttctgaatcttaagtatgatatcaccccttccgattatgtttcaatgctcataacagattatggaatgctcccacctactagtgtaccagtcattgtaagagagtaccggagggagcacgtttggatatagaagccaccgttttcctttctggttttgtttgaggtatgataatctgaacagcttttgctgcctaagtgttagtggaatggtaagggggtggtgtgagcataccagcaaatgtttatatctcagttttgcaaccatcaaattggttgttttctcctgtagttcatttctatgttgatgcgttttgcatttacctataccgttgctaatgggggagtatatagcctataaatctgccctccataattgacttctgatatgctcttttatgtt

SEQ ID NO: 31821 - DNA, 1367 bp, Zea mays
  Clone ID: UC-ZMFLB73222H09_FLI
atcaaaccaaccgcctcctcctcttcttcgccgtcgcctgcctcgtcctcgccgctgcctccttcgccttcgccgtttccaccagccgcaaccgtcagtccctgccgcagcctccgcctactgtcgccttccgctgtggccgcgccgaggattcgctccgttccttcctagcggcctcctcgcacggcaacttctctgccggcgacagggagaaggtgctcgctgtcgttggcgtacacacggagcatgggaatttctccgctgcccgacgcgctgcgctccgcgctacctggttcccgctcaaccccgaaggcatcgtaagtttagaacatggaactggattatcatttaggtttgtcgctagacggccaaaggacaaagataaaatggaagatcttcagaaagaggcggatacttatcatgactttttgtttattgatgctgatgaggccacaaagcccccacagacgatgttagcatttttcaaagcagcttactacatgttcaatgcagaattctatgtcaaagctagtgatgatatctacctgcgcccagatagacttgctgctcttcttgcaaaagaaagacctcagcacaagacatacatcggttgcatgaaaaaaggaccagttgtcaatgatccaaatttgaaatggtacgaaagttcttgggaactgttgggtaacgagtacttcatgcatgcatctggttcactatatgctctttcttctgaggtggttgaagctctagctactgcaaagagtgatagcttaaggatgtttgattatgaagatgttacaatcggcgcatggatgcttgctatgaatgtaaagcatgaagacaaccgagcaatgtgtgattcagtatgtacccctacctccatcgctgtatgggacagtaagaaatgctcaggtacttgtaacgtcgctgacaaaataaagcagctccataacaccactgtgtgctcaaagagcccaacgttgccacctgaggtggaggaggaagaatagaaaccgaaacagttttggcccttgaaaaagctatggcggtgatactccaattagagcactggttttgtcgtcgactgcatttccatactgctgtatcattagtgacctttcaacaccagcgatggagagttcttggagaatcgacaccatcacattacatgtagtatttcgagtctacccaatatgggttcagatgacgtgttgtacttgtaccttttactaatcggtggaaccaatgagggcacagagacattcttggctgtatgatgtagtataaattgtacacagagtgacctatgtggtttcattcttcgctgaccagacggtgggcattccatggtttgttttctgagactc

SEQ ID NO: 31822 - DNA, 632 bp, Zea mays
  Clone ID: UC-ZMFLB73223A01_FLI
catcgacgggcccatgctcgtctaccctatgctcaagagcaagtgggaccccaacacgtcggtggcgctgccggagggcgaggtcttctacctggtggcgctgctgcggttctgccggagcggcgggccggcggtggacgagctggtggcgcagaacggcgccatcctccgcgcctgccgcgccaacggctacgactacaaggcctacttcccgagctaccgcggcgaggccgactgggcgcgccacttcggcgccgccaggtggaggcgcttcgtggaccgcaaggcccggtacgacccgctggcgatcctcgcgccgggccagaagatcttccctcgggtcccggcgtccgtcgccgtgtagagcaaggggggaggaccagccagctgccagccaagacaggaggaggaggaggaggggaggctgatggatcgccgctgctgttgccggtaatgatggcgattacgctgctgatcctggtgatgatgatggacgatcgaggaagccgcagggccgggcaatgatggcgatagggccaccgttaggtgtgcatccgggggcgcaaattaaagggattgctgtgtggagatctgcacgagtttttgctccatgcatgcttgccgttcgtgtc

SEQ ID NO: 31823 - DNA, 1607 bp, Zea mays
  Clone ID: UC-ZMFLB73223A09_FLI
tctcgctctacctccccgtcgtcacgcgctcgcttgtgcccctagcgtttcgccacctcctgctcccgcaccgcctccggctccggctccggctccgcctcgtctccgccgtctccccatcccgggcgcggcccctcggcctcggcgcccgcccgccccgcccccacgccgcacccctcggctacggagggagaaggccgagtggtggactggaccacagagccatgtcaagttccacaaattcaacagtggccacggagttgtcggtgtctgagaatagcagggaaattgagccgctaccttttgtgaatgacaaacatggaggcgtcatcattgagatgaagactccaatggatcctggagtgttttcagcttacttgaaagcagcgctggcaaaatggagggagcaggtgacccccccccccttctctcagcatcaatgttaccatttatcctatcatgccaagtaaatatcccaatatttaagttttgaactgtggacgacatacctcaaagatccatcaatccatgcaagcatctttatatggtaggtttggtaggtgaaaaaaatggtgctgtgcatgacaactattttaaaggtttaaatacactgtatatcttctatgagccttgaagagccaaccatattgcaaggcatgtgacaatagacatgtggagattactgtacatgtacatcattattttcaatctcagttattcatgagtacctcaaggagagatgtggttacaaatgcatagcctgcacttgtcattgaaaagagctttacatctattactgtactttcctcattgtagggaataagaggtgtctggatcaaattacccatcaccctttccaaccttattccaacagttgtagaggtttctggtaccatcatgcagaggaaacttacttgatgcttgcgtactggcttccaaatacaacacatacactaccagtaaacgcaacccaccgtgttggtgttggagcttttataatgaatgacaaaagagaggtcttggttgtacaagaaaagagtggtgtacttcgaggcctaggtgtgtggaaatttccaactggcgtagttgaaccgggggaagatattaacgttggagccataagagaagtaaaagaagagaccgggattgatgcagaatttgttgaagtgctggccttcaggcagagccacaaagctttttttgataaatcagatctatttttcgtgtgcctgctacgaccgctgtcatatgacattacgaagcaagactcggaaatagaagcatgccagtggatgccagtagaggaatttgcagcacaaccatttgtccagaaacatgagcttgtgaagtacatcctcgaagtaggcctggctaaagttgacaagaaatatgcagggttttcgccaatctccataaaatcggcgtttacagacaaattgtccttattttacatgaaccggagggacctggacaaagcctcaggatagagtaatatgtaattaaacacagggaattcaagatagttgaaatttcagttctggtatgtaaaagcaggccaagtcatattcatacttgattattttgttaacaaattggaagtttcgggc

SEQ ID NO: 31824 - DNA, 1432 bp, Zea mays
  Clone ID: UC-ZMFLB73223C01_FLI
aaaacactgctcattgctagcatgtgctcgtcttaaacagatgtactttgcttggaggattatgtaaactgcaattcagttcttattgtgataaagcacagtagtaagcatccaaactgaaaattcaaaaggatgtctcacctaatggatgcccactgatggttattaagtggttttataagaagagaacatagatgtggggaactgttcaaatagctatgagtatacaggatgccatatgcttttcataaattgctagtttggttaatgcttctcatgtatttatgctttgagtacatgttagtctatgtgcacgagaaatttcaagaaacaccatccttccctcttgtgtttgcaaacaataataaatggtcaatttggactggtgatacttatcttacatccctttttagattcttactatgttctatagttgtagactcgcatttgctaatgtgagttttacattttaggcggggtcaatagaaggcaaggtggttgaaataggactcacttctacttcattgatcaatccagaaaagctccctgtcatagtacccaactctttgttctccagtcagatgatagttaacagatcacgagctaattggcgagctagtgtgacaaagattcctattcgaattgaggatattgagaaggttccttctgcatcagaggagataaagactatgttaaggtctaatcaaaatgtgtcctttgatagtgatgttccttactgctatctctcgagattggaaagttcatatggagagctcatcattggatgcaacctaaaaaacatgaggaaagatgagtggctatctgcccaacaagaaattcttttgggagctgctaggattatcaaatcacatggcattgaactgggaagcaccatgcagtgctgttaattcacgcttccggcacttttaagtagggtaaataccgttagcctgcagaagtgcagaacttcatacagacgctacctagccgttttgttcttcaacgttttatgtcttcagaccatggacacccactaccaatactattctgttactgccgttttctttggaactaaggtcttgtttccttttgtggtcgtcccttttggttggtgcttggatccgtttctgggagcttctttgtctatgtatactggtgaacgtttgcaccgcgcccacgcctgccctgtggatgaaccctgagcgttttattggtcaattctgtgaaatattgggttttatcctcgaaattctagtgttttacgtagtactcgattaactagactaataggtgaccatcttgaagcaattcgtgtttgacactgaacattcctgaggacttggacttgcatgccccaggatagattccaccgctgttttaccatgctgaacgtaagagtactgacaggctgccatgatcagcatgtttctac

SEQ ID NO: 31825 - DNA, 1741 bp, Zea mays
  Clone ID: UC-ZMFLB73223D11_FLI
agacgaacttgacttgagaatcgcaagcgtgcttcaaagttctggttatcatgctgatgatggtttctggagtgaacctacaaagtctgaggtctcagacgataaaagacatgtggctatagtcaccacagcaagtttaccatggatgacaggaacagcagttaatccattgttccgtgcagcatatctcgcaaaaggtactagacaagatgtgacactggtagtgccttggctttgcaaatcagaccaagaactggtatacccaaatagcatgacgttcagttcaccagaagagcaggaaacttatataaggagctggctggaggaaagactaggatttgaatcaaacttcaagatatccttttatcctggcaagttctcaaaagagcggcgtagcatcattccagctggtgatacgtctcagttcataccgtcaagagaagctgatatagcaatattggaagaaccagaacatctcaattggtatcatcatgggaaacgctggactgacaagttcaaccatgttgttggtgtagttcatacaaactacctggaatatatcaagagagagaagaatggagctcttcaggcctttctagttaaacacatcaacaattgggtgaccagagcatactgtgacaaggtcttacgtctttctgcagcaactcaagatttaccaaagtctattgtttgcaatgttcatggtgttaacccaaagttcctgaagattggagaagaaataactgccaatagggggagtggggagcctccattttccaagggagcatattttcttgggaagatggtttgggccaaaggttatagggaactcatagatttgatggctaaacataaaagcgacttagaaggattcaagttagatgtatacggaagtggtgaggactcgcaagaagttcaatccactgccaggaggttagatttgagtctcaattttttcaagggaagggatcatgctgataattcactccatgggtacaaggttttcataaatccgagcattagtgatgtcctgtgcacagcaacggcagaggctcttgcaatggggaaattcgtgatctgcgcagaacatccatcaaatgagtttttcatgtcatttccgaactgtttgacatacaagacttcagaggagtttgttgcgagagtgaaagaggcaatggatagagaaccccaaccgctaacccctgagcaaagatacaacctttcgtgggaggcagcgactgagagattcatggagtactcagaccttgacaaggttctgaacaatgaggctgctcagcctggacaaggtaggaaaagaaagaataaaagaacctcacagcctaatttgtccgacataatggatggcggtctagcgttggcccatcgatgcttaactggcaatgaggttctcaggctggcaaccggagccattcctggtacccgggactacgataagcagcactgtgtggatatgggtctcttgcctcctcaagtacagcaccctgtatatggctggtgatatggccggtgatgactgatgagcacccaaagctaatcgtaggtatatatgtacataatacaccatgtcgcccttatgtcgaccaatgtttggagtattgtaattgtagcatgcatgacgacctttgcccattgttttgtactctgtaataaggttctctccttaaattggagttttatcgcagaaatgtgtagtacatggacatcaaaagttcatgactcc

SEQ ID NO: 31826 - DNA, 2191 bp, Zea mays
  Clone ID: UC-ZMFLB73223E06_FLI
gaaggcacagtcagttgtattttttaacccattagagcagacaagggatgagattgttatggttgttgtaagtagtccagatgtttctgttattaattcaaatgggtcctgtttgccaagtcaactttcccctgagtggcagtttgtcagcgatgaaaagatttcgactggtcggcaccgcctttattggagagcttctgttcctccactaggtttggagacctactatgtggttactgggcaggattgtgaaaaggctattcctgctgtagtgaaaacatacacagctgcacaggaatttccttgccctgaaccatatgaatgttcaaagctggaaggcaaaacagtggagatgaagaactccaattacactctttcttttgatacatgtcatggtctcctccagacagtaactcgtcacaagtatggggaacaaactgtggtaggtgaagaaattggcatgtatagaagccatggaagcggggcatacttgttcaaaccacttggggaagctcgctcaattgttgaggaaggaggatatttcatccttactgaagggccattggttcaagaagcccattctctaccaaagacagagtggcctaagtcacctctctcacatagtacacgcatgtacaattgtggagattctatacaggacatgctgatagagaaggaataccatgttgatcttgttggccatgcttttaatgatagggaactgattgtcagatacaagacagatattgacaaccaaaggatcttctattctgatctaaatggctttcagacgagtaggaggcagacatatgataagattcctctacagggaaattattacccaatgccatcacttgccttcttgcaggattcacatggtaatcgattttctgtacactctaaacagtcattgggcgcagcaagcttgaaaaatggatggctagagattatgttggatcgtaggttggttcaggatgatggccgtggtctggggcagggagtaatggacaacaagcccatgaatgttatatttcatctcctcatggagtccaatgtctcagctttgccccaaacccatagcttgcttactcttcaaccttctctcctctcgcaccgtgttggggcgcacctgaactacccaatgcatgcttttatgagcaaaaaacctcatgaaaaatccttcaagctggttcaacagtcatttgctccattaactgcttctttgccctgtgatgtacatattgtgaacctgaaggtcccacagcccctaagattttctcacacagaagcagcagagccaagatttgctgttctgttgcacaggagaggctgggacgcatcatactgcaaaaggggtggactggagtgtacaacagttggggaagagccagtaaatctgttctacatgttcaaagatttgtcagctgtgaatgtgaaggcgacttcgctgaacctcttatatgatgaccctgaaatgctaggttaccttcagcagatcggtgatgttggtcaggagggaaacgttcttatctcaccaatggagattcaggcgtacaagttagacttacagccaccatcatcgcaggaagagtagtttgtggaatcagtacatgcatattgaacagttctacaagacagtgaagatggatcttcccgaaatactttaatagtggcagctagtaccggaacagcagtgttgcatgtatatatgtcattttcttggcatacagttagtgattggacctatggaagttgctggaagttgtcgttgaggcatttggttgcagccttgttatccacgaaggtgcatgcccttgttcttggtatcatgctcaacagattggaaagatctggagcacattgaagcagagctaatttgatttgggtagacctatgtgttcacacgaccagtgttgattcgtccaatgctaacacgacaataacttgtatcagagcaagttttgtaattctgtcttgtttgcatcctttttgtaggtgccatcatcccgctgaccaaaaaaaactcggtttatactgtgtgtacaaaattttgcttgtaagcatgcgaggattgcaggaaatgctttctttttcgaggcattttcatgggtcctggctacaaagctcaccagctttaacgttgtttgatcctgtattgtttgctgcaatatattgccaaaccagagcacct

SEQ ID NO: 31827 - DNA, 1749 bp, Zea mays
  Clone ID: UC-ZMFLB73223E11_FLI
caacagtgatattttttacacaaataggtatattatggaaacatattccatgatgaatctaacaatgcttatctgatattataaatattaatatactttttgtataaacttggtcaaactctatatggtttgactccgtactatgttataattagaattaaattgttttcatgggggagtaataaacaaagaaccattattggtgctcacagctgaaagaactggcagcacaagaatcttgatttctatagtaaacaagtttttctatgcaatatacaaatgagtgcatgctgtagagttcatcattttccttttcaaaaatgtaacaccgcattggcaacctctgaagagaagattgaagacatatggtaactgtattatcacaaacttaatttgcaccattatgtttgttgtttaactttgttcttaaaaaggtagtattctagaatttcatatagacacattccttagcaacgaggtccgctgattaaactgtagaatagcctttgtattggtccctaagtttcagtttcatatgattttcatgtgtcatttaaatgtaattgaaacattctgttctattaaaatgtaaaatataagttggtttactacactgttgatatatgacttcattttttgtcactgttctaaaaatatacaaagccatttcatgccttttagatgcactgcgatgtactatttaccaggcaaggctgcttgtcgggaggaggttgagctacagagtaaacacagataatgcgtcgagcaacctagtcgaggaggagcaatacctgacacttgttcgtaagtcaccgtatcatcatggtgacagagcaaccgtgcttctaaactggaaattacttgctgtggagttcttacctgaagaggatgcagtttttgttcttctcctatgcatggtgattgcacggaccatgacagagatcaggagagaagatgtggctgggcttttagtgcggcggaggataagtgaagcaagggccgggcagagagactggggttcggtgatgcttcctggctcgctttcaccggatcctcatctgcagccttggtaccggaacgcaacgcaggttttgagctctgcggagacaggaccagtgctcacaaagtactcacctgctgacgggaaggacatgttgtacaggaaaaaaaaatagaatggcaccattctagccgaaaaggactcagtgagaatgtaagatggaagatgaaaatccttcgacgtgtgatagtgctttgtgcgttggggtgtgactgtgactgccgctccagccggctttgattgcctctattgctttttgtatctcctcaatgaggatggcaatgggcactgtctacgctcccagtcttcccagatgatatcttcttgtgcgccttctgcaagtggagcttcagtgagctgctgctgagaccagcattcttgccacagatgagatgggacacaccttcattgcagttgaaggcctcttgcgttaccattccatggagattttcccgtgcagtttcttgtcaagatccagcaagaccttagcaaactcatcattgggatgcgcacgtcggtgcaccttcagcatgttccatgcttccatcttcagatttaccttcaactcataagaatccacagcagtgctattatcagtgccttcaaaaaaaaaaacctgtgtgaaaattgttgtccttacacgactgtactacttcagtcctcagcatgtcattccattgttctactgt

SEQ ID NO: 31828 - DNA, 1514 bp, Zea mays
  Clone ID: UC-ZMFLB73223G07_FLI
caccgtccagcacacaccagcattgtcctgaggcctgagcagcgctgcgccgcccaaccagaacgacgaagcggagccagcgccaacgaaccaactaaccaacggacggaagtggcgaggcaaggccgccgcgaagccgagcaatagcccccctcctctacccgttcctctcctgccttctcgggatctgcccgcccgccttgtgcccccgcggttggagctccggctgcacgacaccatgagcccccgcgcgtagaggctgggagagagggagcggggaacaaagttaggcaccaacaaagttaagtggggaggccagagctggccagctgggtcgctgttctaccagagggatggacgggagcgccggctccttcgtcgccgtccgccggctctctggctccgaccgcgccgccgccttccaccactcctcttcggcggaggtcgtgacggggtcgacggcgtggatcgggagggggctctcctgcgtctgcgcgcagaggagggacagcgatgcgcgcctttccttcgatttgacgcctgtgcaggaagaatgcctacagaggttacaaaaccgtatagaagttcagtatgatagtgcaaacagagagcatcaggaagcactacagtccctttggtgtgcttcttttcctggcaccgagcttcgggggctaatatcagaacaatggaaagagatgggttggcaagggaaagacccatctacagattttagaggtggaggcttcatctccttggagaatctattgtacttcgctaggaactatccaaaatctttccaggaactccttcgcaagcagaatggtgaccgtgcaatctgggagtatccatttgctgtcgctggtgtaaatataaccttcatgctcattcaaatgcttgatctccaatcagttaaaccgaggtcattgttcggagcagttttcctaaagcttctttcagaaaacgatcaagcttttgacattctctactgcataaccttcaagctgatggatcagcaatggcttgacatgcatgctacttacatggacttcaacacggtcatgaagtctacacggcgtcagctagaaagggagctgttaattgaagatattcagaggattgaggacatgccatcatacaggcttctggcccggtagctagaagaaactgaaaccttaacatggctacatattgcaaggcggcttgagatgctaatggatcgcaacttatgtggacggcgacaatcttgaaatgtagatgacatgtatccttgtgtgttaggtacttgtggtctctggtaacctgatctctgaagattacaaggtagggtttttttcctggtgatagaatgccacgtagggtaactgaagtgtctgatcagctcccatggccaaaaaaaaaatttgtagggtgtgttattacaatctggtcgttgtccatcataccacgaaaggaagtattcctagggttgttgttgtaaacaggaggatttgggaaagatgatctgtgttgtctcc

SEQ ID NO: 31829 - DNA, 1173 bp, Zea mays
  Clone ID: UC-ZMFLB73223H04_FLI
gtgcgccaagcggctaattattaagcaagctagctagccgccctcctcgagtgatccaatgcaaagtggttggtggtggcggtggtggtgtcacgtactgtggggacgggccggccgggtgcctcgattgcgcgcgtagctgcatgtggatcctccttcctctctgttcattattacgcgtattattggtattgcaggggtgcgacgcgtcggtgctgctggactcgtcggcgggcaaccaggcggagaaggacgcggcgcccaacgccagcctgcgcgggttcgaggtcatcgacagcgccaagacgcggctggagcaggcctgcttcggcgtcgtctcctgcgccgacgtcctcgccttcgccgcccgcgacgccctcgcgctggtcgggggcgacgcgtaccaggtgccggcggggcggagggacggcaacgtctcctcggcgcaggaggcgggcgcgaacctgccgccgccgacggcgagcgcgagccagctgacgcaggcgttcggcgccaaggggctgagccaggccgagatggtggcgctgtcgggggcgcacacggtgggcgcggcgcgctgcagctccttcgcgccccgcctctactcgtacgggcccagcggcgcggggcaggacccgtccatggaccccgcgtacctggcggcgctggcgcagcagtgcccgccgcaggggaccggcgccgccgacccgcccctccccatggaccccgtcacgcccaccgccttcgacaccaactactacgccaacctggtcgccaggcgcggcctgctcgcctccgaccaggcgctgctcgccgacccggccaccgccgcgcaggtgctcgcctacaccaacagccccgccaccttccagaccgacttcgtcgccgccatgatcaagatgggtgccatacaggtgctcaccggcacagccggcaccgtccggaccaactgcagggtggctagctagctagctcatccatgagaatgtacctgtagactcatgtgcttaaaatcatacgacgaaactgtacgtacggcgtagagtggtgtggcggggtccaatgattcagattgtacgtacgtgtccatcgatccaactgtagttgtgtacgcagtacagtacgtgctagctacggatcagttgcttatatatagcttgtgcgtttttttac

SEQ ID NO: 31830 - DNA, 1553 bp, Zea mays
  Clone ID: UC-ZMFLB73224A03_FLI
gcaagggttccatgtcgctgcgcatggctgcgccacttgtgtgggcaactctggtgacctggatggatctgtatccgctgctatcacagaaaatgatatcgttgctgctgcggtgctgtcggccaaccgaaacttcgaggggcgtgtgaaccctctcactcgggctaactaccttgcctcgccgcctctggttgttgcctatgctcttgccggcactgttgacattggttttgaggaagagcccattggagttggaaagggtggcaaggaaattttcttgagggacatatggccttcaaaccaagagatcgatgaggttgtggagtccagcgtgcagactcacttgttcaagaaagtgtacgactccatcatggaacgtaaccctaggtggaaccagctgccggttccaaaggaggcactgtacccatgggacgacaggtccacctacatccgcaagcccacttacctggagggcatgtccatgacgccgcctggcccgcccacggtgacggaggcctactgcctgctcaaccttggagacagcatcaccacggaccacatctcctactcggggaagatccccgagggcacacctgcggccaagtatctgctcgagtatggtgtggagcccaagaacttcagctcctatggtggccgccgcgggaacaatgaggtggtgatgaggggagcgtttgccaatatgaggatcgtgaataagcttcttaatggcgaggctggtccctggacgatccatgttcctaccggggagaagctctacgtttacgacgcggcaatgaaatacaagtcggaaggtcatgacatggtcatcatcgctggctccgagtacggcagtggcagctctcgtgactctgctgccaagggaccaatgctactgggtgtcaagtcggtgattgcaaagagcttcgagcggatccaccggagcaacttggtggggatggggatcattcctctctgctttcaagcaggagaggatgccgattcactcggcctcaccggacgtgagcgctacaccatccacctccctaccagcaccgccgagatcagtcctggtcaggacgtgaccgtcacgacccacgacggaagatcattcacttgcactcttcgcttggacacacagcttgaggtcacatacttcaaccatggaggcatccttccctacatggtccgcaacctggcggcacaaatgaaataagttgaagtttattggtgggaataaattaaaaggtactcaatgccacgtatttggcgtatgtatgtaaataagtggcacattctaatcttcaattgtattattcgctctggcattgaggtgggtcgtagctgcattatactttctccgcaagacatgagcatggattttgttttagcaacagattatttgtactcttgattctttggttccatgctctcttcggccatctccatgtcaatttgctttgcaaacaatataatatcagcgtgccgtgcccttgtagatttccaaatggttatatgcatatgtactattgaaattgtcattttagtttgcaaac

SEQ ID NO: 31831 - DNA, 1428 bp, Zea mays
  Clone ID: UC-ZMFLB73224A04_FLI
cacaagcacaagcgcactctagcaatggcttctgaggttgtccgccctagcgacgccgagctactaaaggcacaagccgacatatggcggctcagcctctcctacctcacgcccctgtcactgaggtgcgccgtggagcttggcatccctacggcgatctaccgccatggcggggctgcctcagccgctgagctggtcacggcgctgtctctcccctccactaagctgccgttcctccgccgcctgctgcggctcctcgccgcgtcgggcgtgttcaccgtcgacaagcagagctcggaggaggagcggtaccgcatcagccccgtgtcctacctcctggtggacggcatccctcacgaggaccacatgaaccacaccgctctggtgctcacctgcacctcgacgcgctacatcgaggcggggatagggctggcggagtggttcaagagggacgtggtcacgtcaccgttcgaggagctgcacggggcgactctgttccacgagagcatggggagcctcgacgcagatttccacgacatggcgagcgaggccttggacgcccacgacaacttcggcatcgagatagctatgcgggagttcagggacttgttcgaggggatccagtccatgacctactgctgcggtaacttcggtgatgacaagggtgccagggccattgtcaaagccttcccacacataaaatgcactgtgctggcccctcccaagatcattgccaccaaaccggccgatggagcgatgataaactatgtcgaaggtgacatgttcagtttcattccacctgctcaaactgtcgtgctaaagcttgtgctgcaccacctgaccgatgaggagtgcgtcaagctcctggctcaatgccggaaggcgattccttcacggaaggatggcgggaaagttataatcggtgatattatgattgaccactctgggcctatgctggaaactcacctcctgatggacatcggcatgatgaccatgacaaaaggacggcagagagatgaaaaagaatggagcgagctcttcaccaaagcagggttcagcgaatacaagatcctgaaggaatttggagctcgtgttgccttcgaagtctatccgtgagattgcacctggactatacatatatatttacatacatatatgtatgtgtgtgggtgccttgcgtggcttggcgtgatgatgtcataaataaagagggtgggtgtgcttgcggtattcatggatggccatggatctgagcacatgacgttggatgctttcttaaggctctcgtggatcttctatatttggaagaagctgtaaaataatatatcgccatctagtgttggcgttggcttgtatgtactttgtacctgctttgttattttgtgtaatatcgagtaacctaatgtatacttgcttactactatcact

SEQ ID NO: 31832 - DNA, 2952 bp, Zea mays
  Clone ID: UC-ZMFLB73224A05_FLI
aacacacacacacacctctatcgccccgacctcgacgcgacccctctcgcttggatccggacggcccggtccctccgccctcccatgcgcacggcgccgccgccgccgccgcagccgacatgacgctcgcctccctcgcccgcgccctcggccggtccgcgcgctcctcccgcccgcgccagggtttccagctcgggggcctccggcagccgcccgcgccaccgctaccgccgcccgtccacggcggtgagggtggggcggcaggatttgttcgcagctacctgactgcggcctcgtcggcagctcttgggaagccatccgcgggcaagaccgtggattggagatatgtcctcgccagcccacatttccgacgcctcttctcggacgggtccaagaagaactacgagaactattaccccaagggtaagaaggaggtgcctaaaggagatggtacaaacaagtctgaatctaagcaggaatccaatacagatgaaggatggaattttcaggataatgctatgaaacacatgcagaatttccttgcgcctttattgattcttggcctgatgctatcatccatgtcatctagctctgcagaccagaaggagataagcttccaagagttcaagaacaagttactagaacctggtttagttgatcgcattgttgtttcaaataaatcagtagcgaaggtctacatcaggagttcacctcatccaaagagccaaggccaagatagtgatatccatattactaccactgatgctccaggcaagcctgctcccagcagatgcaagtattacttcaatattggtagtgttgatttgtttgaagagaagttagaggaagcccaggaagctttgggaatagatccacatgattttgtcccagtaacttatgttgctgaagtaaattggttccaagaagttatgaggtttgccccaacagcattgattgttggtctattatatttcacgggaaaaaggatgcagagtggtttcaatattggaggtggtgctggcaaaggaagaggaggtattttcaacattggaaaagctacagtgatgaagatggacaagaactccaaaaataaggtgttttttaaggatgtagccggttgtgacgaagcaaaacaagaaataatggagtttgtgcatttccttaaaaaccctaagaagtatgaagatttgggagctaaaatacccaaaggtgctctacttgtaggccctcctgggacagggaagactttgctcgccaaagctacagcaggagagtctggtgtgccatttttgtctatttctggttcagatttcatggaaatgtttgttggtgttggaccgtccagggtacggaacttgttccaagaagctaggcagtgtgctcctagtattgtattcattgacgaaatcgatgctattggtcgtgcaagaggacgtggaggtttttcaggttcaaatgatgaacgtgagagtactttgaaccagctgcttgtagagatggatggatttggaacaacttctggtgttgttgttcttgctgggacaaatagacctgacatcctggataaggcattattaaggccaggaagatttgatcgccagatagcaattgacaaaccagatataaagggccgtgatcaaatattccgcatatatcttaaaaagcttaagttggacaacaaaccatcattttattctcaaaggctagctgccttgacacctgggttcgcaggagctgacattgccaatgtttgtaatgaagctgctttaattgctgcgagaagtgaggaaactcagattaccatgcagcattttgagtccgcaattgataggattatcggtggtttggagaagaaaaatagggtcattagcaaactggagcgccgtactgttgcttaccatgaatctggacatgcagttgctggatggttcttggaacatgctgagcctcttctaaaagttacaattgttcctcgtggaacagctgctttaggctttgcacaatacgtcccaaatgaaaatcttttgatgacaaaagagcagctttttgatatgacatgcatgacattaggtggccgtgctgcagaggaggttttgattggcaaaatctcaactggtgctcagaatgacctggagaaagttaccaaaatgacatatgcacaggtcgccgtgtatggttttagtgaaaaggttgggcttctgtccttcccccagaaagatggtggtttcgaaatgagcaagccttacagtaatcagacagcatccatcatcgacgatgaggtccgggaatgggttggcaaggcctacaagaaaacagttgaattgataacagagcacaaggagcaagttgcacagatcgcagaattgctgctcgagaaggaagtcctacaccaggacgatctaaccagggtactaggagaacgtccattcaaggcactggagccaaccaactacgacctctttaagaaaggtttcgaggatggtggtgacaacagccaagcaccagcagagaacgccgagctgcctgatgattcatctcccccagttggtgacgttgtacccacgtagtgtttctctcctcaacgtcagagctgtacattgagcgctcattctcgatagattcttgtttgttggttgcatcataaaaaagatctgtataaattcgcgcccaagctgattatgccactgtggaaatgcatttggatttccgtagtgtcagtccggtcgatagggtgccttgggttcttcatggcacgagcaaatgttctgattcttgtattcgaatgttttgaaatattctgtctgacgggactgcggagttggcgcgagaagtgtgcttgttcagttctatctgaaggcttagctgtctgtagctgtagctggtaacaacagtggctaaaatggtacctctgaaatctttgtgacagtaacaagccattttcctttgaatttt

SEQ ID NO: 31833 - DNA, 1002 bp, Zea mays
  Clone ID: UC-ZMFLB73224A06_FLI
ctcgctctgagtctctgaccgccccttccgtcgtccccgttcgaaggcgcggcaagcgagcgattcagccagattcgattcgacatgaatcccgagtacgactaccttttcaaacttctgcttattggtgattctggtgttgggaaatcatgcttgcttctcagatttgcggatgattcatatttggacagctacatcagcacaattggggttgattttaaaattcggacagtagagcaagatgggaagaccataaaacttcaaatttgggatactgctgggcaagagcgcttcaggaccatcactagcagctactaccgtggagctcatggaatcattattgtatatgacgtgacagaccaagaaagcttcaataatgtgaagcaatggttaaatgaaattgatcgttatgcaagtgacaatgttaacaagctccttgttgggaacaagagcgacctaactgccaacaaagttgtggcaactgagacagcaaaggcatttgctgatgagatgggcatcccgttcatggagacgagtgccaaaaacgccaccaacgtggagcaggccttcatggctatggctgcatccatcaaggacaggatggccagccaaccagccgcggccaacgcaaggccagcgacggtgcagatccgcgggcaacccgtcaaccagaagacgtcttgctgctcgtcttaagcttgcctgatttctctggttccttgtgactattactaccgtttgtgcgagcatgcaaatgtatttgttgcattattgctgatagcatctgttcgttggccagatgagtagagagctgaaaaaatgttaagaacaccatagagagaagtctatccgtgctctctcaacttaaggagcaaacagcaagacttcatttttttttctactttactgtttattagtcgcgttacatttgtgaacagttattgtaatgtctttttttttaactctgtattcgtagtgagatgaaatgcgtgtgtggacaac

SEQ ID NO: 31834 - DNA, 369 bp, Zea mays
  Clone ID: UC-ZMFLB73224A08_FLI
gtggagggcacctccttcaccaagctcgtcaagcgccaggcgtcgccgagcgtggcgcaggcagcagcagccgccggagcgcagcagtgagtgcgctgtataggatccatcggtggcgtgcgacgtcgccggcgccggcgccggccaagcaataaagtaatgagtaggccctcctcgtcatccacatgctcgtctgtgttcgacttcgatcggtgtctcttcctcccggccggccgctggccgccaaacagccgttgtggtaataaaaaaatcatttgtggaattgcagagtgtaccgtggtcacacacacttgtacagtgaattctttagtgacgctgcaataaaattgaatgaacatgtactcgctc

SEQ ID NO: 31835 - DNA, 1022 bp, Zea mays
  Clone ID: UC-ZMFLB73224A09_FLI
ataccactccctaggaggacccagcaacacacacagccgagctttgcttaggcaagatgaacaggaagccaggagactgggactgcagggcgtgccagcacctcaacttcagccgccgagacatatgccagcgctgcagcgagccacgtggagttgctgatcgtggcggcggaggaggaggaggcgactacgccagcttcggtggccgcggtggctcctccttcggcggcggctttggcgctgctggctctgacgtccggcctggtgactggtactgctcctgcggcgcgcacaacttcgccagccgctccagctgcttcaagtgctccgcctacaaggaggaggccgctgtgaacagtggcgctggcggctttgacggcgacatgtcacgctcacggggctacggcttcggcagcggtgctgctggtgctggtgctggcgctgcccgtactaccaaccgccccggttggaagtccggagactggatctgcaccagatccggatgcaacgagcacaacttcgccagcaggatggagtgcttcaggtgcaacgcaccgcgggactctggtagcgctgccatgacctacgaaaactacttgcactgaggtgtaggatcgagcaagttaaaaagtctgcagcgccgaagaaagcgacgacaagaggagtcctcatcacgtcgtaacgtaagagagagagagagtagtggatttgcaacaaaaaaaaaaaaagacggccgcgatgctctgttactagctagctagttttgttcaaccacccatgccgtctcttctcttttattagatttggtttggttctcatagccctttaattaccatttgggacctatgtttgctgttctgtttcccgttcgtctcctccgcatgtttgcgcttggatcgagtcttgtgatgtaaccccccaaaaaacgcttgcttaactagtactgttgcttcttaatatctccgggggcgttcatcttgttcttgctttatggtgtaaggctagctccaacaaggagcttt

SEQ ID NO: 31836 - DNA, 2352 bp, Zea mays
  Clone ID: UC-ZMFLB73224A10_FLI
tcccctcctgcacgcaacctcatctcgtcctccagatcctggatggccgtcctccttgataccttgcctcgcgagtgctctcggtgagctactttgttttgatttatcaggaaatccgtttgcttcatgttatgcaggctcagatctgattgctggattcggcatcttacgggcttgaatagagctaggactgggagaaaacaacaaacccgcgttggatcctgtatcggttagtccttgccttcaaggttcatgttgttttgttttggtggtcgagcatcgcatgttctgcttctggttccagatctggagaaatttctaagtcgtcgtcgtcgtcgtcgttcggttcggagcggatctgaggcgacgatggctggaggcggcgggatctcttggtctgcagtcctgcttcacctcgatggatgatgtctctgcgctgataattattggatcaatttcgataattattagtagatctatgagatatgccgcctggaagaggcgaggtaagctgcagcatgtaaaagtctgcgtgcgtcgacagcaaaaaagagaaaaaaagatgtgacatcctagaggaggcctttgccatgatgggtgcgctcgcatggcaggccaggtattaataaaaagatgattattgtgtgccgggggaggagatcgcacgggggttgatgtttttggccccggggtctcctccctcatcttgttccgtgttcctgtatccgttgtttccgcgcctgttggtccgctgcgcacgccggatttttgcatcgagcacggagatctacaacaaaaacatggagctacgacgcgactcccaaggtacaatcggtaattatgttcaaacaatttttaagtcgttctgcgctccttctattacgagcaacgttttatattctgtgcttgcataatgaatcgaagaaatcctgacaccaatcgaactgaagatcctgaaacgcacgttaataccgttgacgtccgcttcacccagctcgattttcagtcttgtaatactaatcgctccatgagtctgaagtgtgcaaaaatttaggtcgcagctacacaaatttacatgctggttctgttcaacccgtgaatctcctaaggtcacagcgtttttatttcattctatattatatttcagtctggactaatgttgagatctccatatgtatctacgtctaagcatttttcatttgtatttaccatgttggtcaattgggatatttgtttcttgtatgttagcatgtttgaaccatagcaattggtggacgtgtgtagagaagattgcaaaactgcagtatgatggattccactattcatcaaccgagatcatggcgcgcttcaatcgtggctacgctgatggggaattgatccgttatggctcgtggctgtggagatgtggaactcattggttatagtgtgcttcaatcatgggtcatggcgatgctgatggaactgatttgttaccaaggtttaagttttcgctaccgttggacggcctgactggtactttgccctgttgactgtttgagaacgtactgcccaggtttacttaatacttgctgctttttgacggtactgtacatattgttcgacaatttatttcttggcagttcaattcgtccatttagaatttctaggggcacgagagcatgtgttaccctggagatcaatttcatgctgctttttgtaattgatcatgctgctttttgttacaaagttccctattctattttcaatttgattgagggttgcaaaattcatggcgttgtgagggaattgattccagtgaaggcgatggcgactggtaatttgatatcggtgggttgggaattagactatctccaccagattgtctatattcaaattacgctctacaaacaatataatttacactatgggtctactatattgtagattgtactgtttataaattgtagttttaatatctaattgtagattgcattgtttataaattgtttatagattgtttataaattgtaggtgttttaattatatatggtcattcatataatagagttttgggattaagggcccctttggtagggctctggcttctccaaaaacggctttaactctggctcacgagggattgagggcaggaccaaaaaataataatctggactggtgggaggactatagtgcaaaaataacgtgagccgaagccgggtgagccacttttttttagttcattttggaaaagtacttcactggtgaagccatctgaaaaagaggtgtttgacataacttttgcatgagccagagccgaagctgaaaaacattttttatcatatgcagcagagtatctttttaaaattttagttt

SEQ ID NO: 31837 - DNA, 1161 bp, Zea mays
  Clone ID: UC-ZMFLB73224A12_FLI
caatcatccatccccgcatttctccactcaacccacaccccaaagagaggggaatcagtctctcccatcccatcaccaaccctcctcctccttgcctaggtactcgcagcagcgtcggcaagcaaggttctcttctcgcgccgcccagatctgagcgctcccatggccatgccgtcctcccgctccccggcgccgccgccaacggcctcctcctcctactggtgctacatgtgcgaccgcttcgttcgcgccgccgcttcctcctcctcctcacccacttcgccgtcctcctcctcccccgcctgcccgtcctgcggcgggggcttcctcgaggagatgggcgcgccgccgccccgcgcccgccggccccgccgcgccgcccgccgcggcgccgactcccgcgcctcgcccttcaaccccgtcatcgttctccgccgctccccgcccgccgacgccgacgccgatggctcctcctctcccgccgccgccaccggcagcagcttcgagctgttctacgacgacggggcggggtcgggcctccgcccgctcccggagagcatgtcggacttcctcatgggctccggcttcgagcggctgctggagcagctggcccagatggaggccggcggcggtctggcggcgcgcgcccgcgacgcgccgccggcgtccaaggccgccgtggactccatgcccgcgctccgcgtcggcgccgcccacgtcgcggccgacgcgcactgcgccgtctgcaaggaggccttcgagctgggcgccgaggccagggagatgccctgcgcccacatctaccatgccgactgcatcctgccctggctcgcgctccgcaactcctgccccgtctgccgccacgagatgcccgccgacaacgccgccccgcgcgctgccgccgccgccgccgcggacgaggacgccagggtcggcctcaccatctggaggctccccggcggcgggttcgcggtcgggaggttcgccggcgggccgaggcccgacgagagggagctccccgtggtgtacacggagatggaaagcgggttcaacttcaacagcggccacgcgcccaggcggatctcgtggggcgccaggcaggccgcggccacggacaggggcaccgtccgccgcttcctccgcagcgtcttcgcctgcttt

SEQ ID NO: 31838 - DNA, 1607 bp, Zea mays
  Clone ID: UC-ZMFLB73224B05_FLI
tgaacaggtccttgagggtgcaaatgccagtgctgtagaacagactgtaccaatcaatacaccagcgcttactgttcaagagattgtcaatcgaattagagcaaatcctggagatcctaggatacttgaaacacaggagcccctccaggatttagttcgaggagtattaaaagtactttcatctagaacagctcctctaggcgcaaagggctggaaagcactagttgcctatgagaagtcaaacaaaagttggttctgggttggtccagcaccttctgtttcatcatatgatgaccccgatgaagaaacctctgctgaagcatggagtataccacacaagatgctcgttaagttggtcgacgcattttctaattggctgaaaagtggtcaggaaacccttaagcagataggttccctcccaccacctccaccgccaaatcctgcaaacttggatctgaaggaaaggttcaaggagcttaaagcgcagaagagtctgaacacaataagcccgagctcagatgaagcgaggacatatttccagcgtgaggaatttctgaggtactcaatacctgatagagcattctgctacaccgctgctgacggggagaagtctatagttgcacccttgagaagaggaggtggaaagccaacagcgaaagcgaggggccaccccatgctcttaccggacaggccgccgcacgtcaccatcctgtgtctcgtaagggatgccgcgtctaggttgcctgcaaggactggaaccagagccgacgtctgcacactgctcagagattcacagtacctaaaccatgaagaagccaacaaagaggccgcaattaatcaagtcgtcagtggagctctcgaccgtctgcattacgagcgcgacccttgcgttctgtatgacaacgacaaaaagctgtggacctatctgcacaggggcagggaggaggaggatttcgaggacgacggcacgtcgtctacaaagaaatggaagaggccaaggagggatgtctccgatgctgcagagccaggtgcagcgaatgatgatatcgacgacgatggcgctggcacccctccatcaaacaatgtgaaaaaacagaagacaacattgtcaggagaagctgccaacgatgagggaaatcatccgactcagaatccggcttctggtggcctggaaggtgattctgatctcaatgctgttccgtcttcaaaattttttgaagaaccatgtggagatgcctacattgatgcaagaccagatgacggtggcccaaattcagtagatgcgaaaccgggcagcacagctgacgacaacacggcactccctgggaacaccggcatggacgctaccaccccaccatgaataaagaacgtatcatggttcaatcagctagagatttgctgaagggtcagcgtaggtaacttgtgcagaaaccgtatctcatctgcgttgttcttatcgctacagttggctagtattaggagagtttgattcatttttagtgttgcttctcttcccctcgaagctgacagtaatgtaaactagaaatgctaagatgggggtttttcagcatacctcgttctgttttatagtgaagttgccatgttat

SEQ ID NO: 31839 - DNA, 1416 bp, Zea mays
  Clone ID: UC-ZMFLB73224B07_FLI
gcaagaaggatggtgaaaacttccatgagatgtataattgtaatagcaaggctgttccttgttctttgttagctcatgagcaccatcgtcatctgaaaacacagagaacggaatctgcaggaaatttgaaagtctgcacgttacctgatcaacaaactgcaaatgaattggcagacaagagtaatggtgacctgctgacatatggaccaaagccaaagaagggctcttgcaaccgaagaagcctctatttattcgaaaagttaacgattccttccaaatcacaaagtgcatatcctaaaaattctgcgtcttcaggaaaatctagcggctttggagtttgtatgtacggcaccaatattggaagccagttattcggagcacagaatcaatcttcatctaagactgaaacattgcacagcgatgctcttattgggtccaaatcctcagcaggcattgcttcattatcggcacaaaaggacaacggttgcccagccccagccccagccccagccccagacgaagcgaaaagcgagcagctagcagctccgtcgtccaacaccaagcagggaggagaatcagcatacagtaaagaagatggatctcataatctcaacgaaggccacgatgtttcgtccaaagcagctatcggtagcaagcaaccatgcatgcctggagcaggaatcacgaacctggatctcatactctcccagatgagcaggatgagaaaccagattcccagtggcggtgtaactcagccaccaataggcgccgagccaagtgatagatggctcaagcgcctgcagctcggcgtaccagaccctgacgtccttggttccaagaccaagaggccaaaagtcggagacagtcctccgccacccaggcaaataaaccggtcctttgacgtggcactcccttgcaacccaggaaaacaggaggagcagagcttgaatggaggggggaaagtgcagggaagagcccccccgattccagagaagagcgtcaatcgctggatagggagatggtgccagggcggcactcctgttttccgtgaaggcccaggccagggaaggcaggcaacgaaacctgctggccggttgtccgaggagcttgaaggacagttctttccaagcactgcggcgatggcgatgatggggcgcgcgatgcacaagctccggccgtgcgagcagcagcagaaggggccattcgtggtgtggaagatagattgacctttttgggtgtgatatacttgtttctttaaaaaaaataaaatgtaaggcaactatgcattttgcctggctgtggctcatggtttattgctttctggtagtggaagtagctaggtgtagtgcctactgattgtgtaatgctttgctgtaccaaaagtgtaatactatactgtttactgtgtcgttcgtt

SEQ ID NO: 31840 - DNA, 484 bp, Zea mays
  Clone ID: UC-ZMFLB73224B10_FLI
ctccagaaagcttcttctgccctgcttgccatccaaacaatggtgaagaatctgtatcacttgcacgctcagaggatgatgaggatagatcaagcactggagccggagctcacacgccgccggacagagtggtggagcgagacttaataaagcttcttagctgccatagcggtagctcatggagcgagagcagaagggctcctcatcgaacagctagaaggcgtagtagtttcgtcggattgttatgatgtgcaggaaccttcttagcaccgtgaattgattctttttagttaggttagaagcaggaacgatccatcatctgctgttgtaatttgtagctgttgacaggaggtagatgtagcaaggcagagctgtaagaacccattattattgatcttgtagcagtctgaggttttggaaattgtatcatatactaccgccgttcttgaatatttgtcgcctattgtttcaaaaaacgacaaat

SEQ ID NO: 31841 - DNA, 787 bp, Zea mays
  Clone ID: UC-ZMFLB73224B11_FLI
gggtgactgggctggacaagaagaaagcttctgtcttcttcaagaccactgctgatggttactcgctgtgcgccaaggagatgaccaagctctctggtatctcggacatcatcccagagatggagatctgtgacttcgacttcgagccctgtggctactccatgaatgctgttcatggccctgctttgtcgaccattcatgtgaccccagaggacggcttcagctatgcaagctacgaggtcatgggctttaacccgggctctttctcttatggtgacctggttaagagggtgctgaggtgctttggtccaactgagttctctgttgccgtgaccatcttcggtgatcgggacaatgcgaagacctgggggacgaaactggatgctgaggcctatgcttgcagcaacatggttgagcaggtgctgccgtttggtggcttgctcatctatcagagcttcactgttacggccgaaacgacccatgggtcgccgaggtcagtcctgcataacttcgctggtgacattgtcaagaatcgctcagagagtgatgctccctgggaagctgatgctgtggatgagagcgaggaaagagatgtaaagaagatgaaatgctgatgtggtcgacgatagatcagattcagagttgctgccactggttatcttgtgaagcagccaagcctaattatttatgccacataacctgtgctattgtaatgtgtcacatgcttatatttgcaataaacagctctaggtggtcagctttgtctgccgcaatgagcagtgtatcg

SEQ ID NO: 31842 - DNA, 1081 bp, Zea mays
  Clone ID: UC-ZMFLB73224B12_FLI
gcaggagatagcgcgggcggggaggggaaggagacaagtgaactcagagaagaactagcgcggcgggcgagcattgcaagccgagctgcaggggcccggagcggagaccggaggagggagacgtcgcttgcgatgtcaccggcagcatccgccgccgaaaccgccgtcgtcgtcgtcgtcgcaagcgtcccgagccagcagcagagcagccaccgcgccgcggcgccgtccgtcccgtcgtcctacgccgtctgggagaaggagcggtaaggcgtctgcagctttacgacgacgtcgtcgtcgtctgccacctacctactgctgctgctgctgcaaggggaagtaaaaaggaacggaaagggggaaggcatggaggtggaggcggccaagtgcgagtgctgcgggttcacggaggagtgcacgccggcgtacatcgcggcggtgcgcgcccagtacctgggccgctgggtctgcggcctctgcgccgaggcggtgggcgacgagatccggcgcgaggggaccatcaccacggccgaggcgctcgaccgccacgtcgcgttcgcgcgcgcgccgcgctcccggagggcgcccgcggaggacgacctcgtggcggccgtggcgcggctgctccgccgctgcctcgactcgccgcccgcgtcgcctgcgccgccgccacagagccggaaggtggccgcagggcccggctgccccgatggagccgacgcttgaagctgcttgcttaattggcggcaatgattggggggttggttcagctgctggtggattaattagttgtactagtacaagaataaacctccagtggcataatatgatggtacaagtgcatgtgtaggtcgccttcccggagaataattcgtgccggtatcatttgacgagagagggggcaaatcacgctccgtgtgtgatcgagcatgaagctattgttaagcatatcactcattggagtacatcaggacaaacactgttccattagttctgcatattcaggttgtaagaatattgtattggagtagtcaagtgctatcttcttgaattcaattcaatcgaagtaatttgatac

SEQ ID NO: 31843 - DNA, 333 bp, Zea mays
  Clone ID: UC-ZMFLB73224C01_FLI
gaacatgaagccatggctggagctagcaatgaccaagtaccgaccatattggaccaagtatatcaagtatgatcacccttacatccgtggatgcaacttgagtgagtagatagtcgtgctgaaaaactgacagatgaggaagagcttattggacagaagtgttccactaccatgtccttgcggtgcgttattcgactcagcaaagtggtactacctcaagctcttgattgctttcctcccctcctctcccaagaaaaattcaccggtggctgttctgacgagtgatgtattattatagcgatgcgttttttaattcaattattagtaatatgc

SEQ ID NO: 31844 - DNA, 1427 bp, Zea mays
  Clone ID: UC-ZMFLB73224C04_FLI
catatttgcattcttcaccctcgcttcacgtcaccaccattgccatccaagaacaaattaagcgggacactggaaacaaagagagacatgggccttcgcggcggagctcttgccctgcttctgctcctgttcgtccacggaggccagcgagcagcagaggccggcggggacgcgttcgtgagggtccagggcacccgcttcgtgcaggacggcaagccgttcttcgccaacgggttcaacgcctactggctcatgacattcggcgccgaccccgcgcggaggggcaaggtcacctcggcgctcagccaggccgccggcgccggcctctccgtggccaggacgtgggcgttcagcgacggcggcggcggcggcggcagcgcgctgcagtactctcccggccgctacaacgagaacaccttccaggggctggatttcgtgctgtctgaggcaaggaagcatgggattaagatgattctgagcctcgtgaacaattacgacagctttggagggaggaagcagtacgtgcagtgggcgagggagcgggggcagaccattggatctgacgatgagttcttcactaacccctttgtaaagggcatctacaagaaccatatcaaggccgttctgacgagggtgaacacgatcaccggcgtggcatacaaggacgacccgacgatcatggcgtgggagctgatgaacgagccgcgttgccagtccgacgtgtcgggccacgccatccagtcgtggatcacggagatggcggcgcacgtgaagtccatcgacgggaaccacctgctggaggccggcctggagggcttctacggcgcgtcgtcggcccgcaggtccgcgaacccgtcggggtaccaggtgggcaccgacttcatcgcctggctcgacgcccacatcgccgacgcgcgggcggtgctgcgcaagccgctgctggtggccgagttcggcgagtcgcgccacgacccgggctacagcggcggccaacgcgacgcggtgttcggcacggtgtacgccagggtctacgactcggcgcgcgccggaggccccgcggcgggcgcgctcttctggcagctcctggcggaggggatggactcctacggggacggctacgaggtcgtcctcccgcaggcgccgtccaccgccggagtcatcgccacgcagagccggaggctgcagggcctcgccagggcgttcgtgcgcgcgcgcaaggcccaccaggggaaggcgggcaagggcgctaagggtggcggcaactgaaagtggggtgaaacgtgtgtggcgagatcaagaagagtgtgtgtgtgtatgcgtcgatgtctcctcgagatgatttgaagattcatccgggagccaagagttacttctacatactatctagcgttgtcctccatgttttattatttagaggacttgcgttt

SEQ ID NO: 31845 - DNA, 1614 bp, Zea mays
  Clone ID: UC-ZMFLB73224C06_FLI
cgaaaaaaggcctcgtaatggccttcgacatctgacattaagcaaggtcaccacgacgatacaaaacaaatcggagttccacaacttactatgatgtacactctatacagagcatgtcgccccaaattacaaactattcaagcctagtagtctaaattacacactatacggcagctcaaagcttcaggaaaaaaaacgtacagctccaatactgtacgtggcaaaaggaaaaagaaacaccaaagaatcaatacacatgcacaataaagcttaactgttcaaatctctgaatttaagggcatttggctgttggtatggagaaggttgcattcatctttgtggccatggcagacgtcgccaggaactcaacaatgcggatctgtcaagaagcagcaggaggccaaggaacgtagtcgacaaaccaaaggtgtacttggctgtagagcttctgtttctccaaaatagtattgagagcacccacttgcatatcctgatcactgagaaactgctcgcaggcactagcgctttcttcacaatggctctctgctcagcaaccatctcccagcagagccgccgcgccatctccctggccatcaccagctgtgccctctccgcccgcagagcgaagatctccctccgcagggccgccctgtccgcctccagcgcctcgacccttgcatacagcccccccgagttgccgtcccccacgtactgtgcaaccacagacgtagctggcttcgttgtactcgcgcaggtaacatccaccgtatactcgaattccttctccacgggggacgacggctcctccgcgtcgtcggcgtcggcgtcggcatcctcctcgtcctccccgcggtcattgccaacgaccatggctttcacctccatgccactgcccgagtcgcgaacgttccgctccacctgcagcgcggccatgccgatctgctccacgtcttcggcgcccacctcctcgtacgagtacgactcgtcatcgtcgtcgtcggtgaaggagtccgggtcgatgccgtgggactggaggcgggagtggtaggaggcggcgaggtcggagagcgaggcgagctcctcctggacctcgcgctccctgtcctcgcggctctcggcgtagcgcttgaactggcgggcctccatctgcgcggcggccttctcccgctgcaggcgctcgatcatgagcatggcctcgctggccgccgtctccgcggaggcccgctcggcgtcgagctcctgccgcaggccccgcgccgcgtcctccgccgcctccttctccccgcgcagccgcgccgccgccgcctccagctcctctacccgccggatcagcccctccgccgccgcctctcctgcccccggacccgacttgggcgacagctccggcgaccgcgccggcggcctccgcttcagggaccgccgcgacggcgacgggtccgcgaccggatccatggaggcatgaagtaagcggccgggggggtggggggactcgcgtctgccaaatcgcaagccctgatcccgccgctgttgggagcagctaacggctggcgggagcgcggcttcctgctgtgacactgagacgatggcgcggtggctggtggcgtctgttggaag

SEQ ID NO: 31846 - DNA, 844 bp, Zea mays
  Clone ID: UC-ZMFLB73224C12_FLI
gggagaagttgatgcacatgtatcccctcataaggagatagacccacacaatgcggcacccaagcgaaagaaagccaggttcatgataccaaagagtgctcaggtggacagtgaggtgcgacgcgagctgcaggagctcatggacgctagggaggcaggcatgtccttcatcctggggcactcgtacatgaaggcgaagagcgggtcgagtttcataaagcgggttgtgataaacttcttctacgagttcttgaggaagaacagccgtggccctgcatacgccgcaaacataccccacgcctccactctggaggtaggaatggtctaccaggtctgacaacagttagcagctgtgtaaaggtagagagagatgagacgacgcctgtcagcgccacctgtatatatccacttgttgctgccgataccgttaacacaatcacaggatgacacgagtagtgagtggcccttgagcacagccaatgctgaggaagcagctgaagatgagatcatctgtggagagcccagccagaagtatgcattttttgtttgtagagccttttgttgtgccggtagttgttaagtttcgtatgtttgctgctgttgtttagtttcgtacttgtgagctgtaattgtctgtaagagtgactagcaaaatactgtagcatttttgacgttcagcagcggcctctgtagttctgtcacttgtctataattgaggactgtataggtagcagctaaacattctagtaggggctgatgtcgttgggccgcctgtattatagactgggccgtaaagcacagcttctttcgggcctaagaacgtctggaagacaaaccacaaagg

SEQ ID NO: 31847 - DNA, 1324 bp, Zea mays
  Clone ID: UC-ZMFLB73224D03_FLI
aatttgcagtcaacttacttagagctaatgctctcaatgaatgatactgggatcaaccctaatccaaaacgagctggtacaactgtacctttctgaagttctagactggtacaagattctgaaggaagagggaaactggacagagaagacatattccccaacacggaagaagttaatatctacgttggagagcaattcaggttacaatacagacgcacttcttaagcgccttccccaggacgctctttttgaggagcgagctatattgtatgggaaaataaatcaacacctcagagctctctctctctatgttcacaagcttcagatgccagagcgagcagttgcatattgtgaccgtgtttatgaagaaagagaacaacaaccgtccaaatcaaatatctattttaatcttctacagattcatctgaacccaagaaaagctgaaaaggaatttgagcagaaaattattccagttgcatcacaatactctggaatccaaaaggctagtgctactaagcccaaagggggtcgcgtaggtaaaaaggttgtagagattgagggggctgatgacatacgctttagccccagcggaacagatagtggccgaagtgatggtgatggagatgatgtaaatgaccgaggccctataatgttaaatgaagcactggaactgttgagccaacggtgggacaggataaatggtgctcaggctcttaggctgttaccaagagatactaaactccaggatcttgtatcatttcttgagccactattgcgtaactctagtgaacatcggcgcaattatttggttatcaaaaacttgattttgcgggcaaacttgcaggtcaaggaggatctgtataatcggtgtcaagctgttgtgaagattgatggagatagtacgtgttctctttgccataagcgtgttgcaaatagtgcttttgcaatatatccaaatggacaggctttggtgcattttgtctgctttaaagaatcacagcaaattaaggccgtcagaggagcaaactctgtgaaacgtagataatatggccgtgatccaggtttggttgatgccagcttatggaattccctctctttggcttcacactggattttagtggactgcttcagaagtttttactggagtaatcttcactctcttcagagatcgagtttatagccgtgcgtgtgtgctcgctctctgttttctggccatcgtactggaaaactggaacccctttcttttggttttcatgtacagaatgtaaatgatactgtaaagtttcggttaacagattgatgatggtcttgattatagtgccgc

SEQ ID NO: 31848 - DNA, 1149 bp, Zea mays
  Clone ID: UC-ZMFLB73224D05_FLI
ggaaatttctatgaagctcaacaaatgtacaagtcaaccagtgcaaggtatattgctgctcagaagtattcagaagccttggacatccttcagtcaggcgctttggttcaattgaagcatggacaggttacctgtggtggtgaacttgctgtcctctttgttgacaccctcatcacaggagagcttccatatagtgaacaaatttttgatcgtatcagaaagatgtatgaggcattcccaagggtaactgttccacatttccttggagatgactatgatgatgaggggcatcaattatctgaagctatttctgctgccaaagtgcgggcagagagttgctcatcattcatgaaagctgcaatcaggtggtctgctgagtttggaacatcaagaaatggttcttctgagcttcacgttatgttagcagaatacatatattcggaatctccagagacggacatgactaaagtctcaagtcattttgttcgtggaaatgatccaaaaaagttcgcttctatgctggtgaactttatgggcaagtgttaccctggtgaagatgatactgcaattgcacgtggggtcctaatgtacctatctcaagggaacttgagagatgcaaatttacttatggatgagatgaacgaacaactaaaatctgctaactcggaatttccgaaaacagatttgattcagttcatcaagtatcttttaccaacacttgagagagatgcttaccctctttttagaacacttcgacagaagtataagacaagtacagatcgtgatgctgtgtttcaggagttactggatgaaatagctgcaaaattttacaatatacaacgccagaaccctttagaaggccttttcagcgaaatgttcaagatataatgcacgagaaaagaattttatgtcgatgctttcatctaaaccattggctggaataatacaattggtcaacaaaggtgtttgctcaactatgaatctccaaggccatacatttagcatcatgctgcatgaagatatatacttagctctgcagcaaaatcgtcgattagtgtcagattgttactgagcatgtgtaactgaattttgttttctattacttgtttctctttgttgacttgcccttgattgttattgaccatgcat

SEQ ID NO: 31849 - DNA, 1696 bp, Zea mays
  Clone ID: UC-ZMFLB73224D06_FLI
gcagagataggcgtcttcgtactcgcctacctccgcggctcaaacctttcccccttctcccaattccttccgccggccgccgctccacccgtacgacgacaccatgagggagtgcatttcgatccacatcggccaggccggtatccaggtcggaaacgcgtgctgggagctgtactgccttgagcatggcattcaggctgacggtcagatgcccggtgacaagaccattgggggaggtgatgatgctttcaacaccttcttcagtgagactggtgctgggaagcacgtgccccgtgctgtttttgttgaccttgaacccactgtcatcgatgaggtgagaactggcacctaccgccagctcttccaccctgagcagctcatcagtgggaaggaggatgcagccaacaactttgcccgtggtcactacaccattggcaaggagattgttgacctgtgccttgatcgcatcaggaagcttgccgacaactgcactggtctccagggcttcctcgtcttcaacgctgttggtggaggaacgggctctggccttggttccctcctcctagagcgcctgtctgttgactacggcaagaaatccaagcttgggttcactgtgtacccttccccccaagtttctacttcggtagttgagccatacaacagtgtactgtccacccactccctcctcgagcacactgatgtggctatactgctggacaatgaggccatctacgacatctgccgccgatcccttgacattgagcgcccaacctacaccaacctcaacaggcttgtgtcccaggtcatctcatcccttactgcctccctgaggttcgatggtgctctgaacgtggatgttaacgagttccagaccaacctggtaccctacccgaggatccacttcatgctttcttcgtacgctccagtcatctctgctgagaaggcctaccacgagcagctctctgtggctgagatcaccaacagtgccttcgagccatcttccatgatggccaagtgcgacccacgccatggcaagtacatggcctgctgcctcatgtaccgtggtgatgtggtccccaaggatgtgaatgctgctgtggccaccatcaagaccaaacgcaccatccagttcgtggattggtgcccgactggcttcaagtgcggcatcaactaccagcctcctagcgttgtgcctggtggcgacctggccaaggtgcagcgtgccgtgtgcatgatctccaactccaccagtgttgtggaggtgttctcccgcatcgaccacaagttcgacctcatgtacgccaagcgtgccttcgtgcactggtacgtcggtgagggtatggaggaaggtgagttctctgaggcccgtgaggacctggcggcgctcgagaaggactacgaggaggtcggtgctgagttcgatgagggcgaggatggcgacgagggtgacgagtactagagaagtttgctgatgacgcagcatcaggccagtgtgctgcccttatcccgtgatctgccgagagttgctcctgctatcgtgttatgtgtgtctgttctgaagtattgtgtggtttacaacacctgatgttgtaagagttgttaattcccctgcattgctaccgggttattgagaataattatggctgtttacgttgttgcttcatctcggagatgctttacatttaccaccttgttc

SEQ ID NO: 31850 - DNA, 1397 bp, Zea mays
  Clone ID: UC-ZMFLB73224D08_FLI
gcgcactctagcaatggcttctgaggttgtccgccctagcgacgccgagctactaaaggcacaagccgacatatggcggctcagcctctcctacctcacgcccctgtcactgaggtgcgccgtggagcttggcatccctacggcgatctaccgccatggcggggctgcctcagccgctgagctggtcacggcgctgtctctcccctccactaagctgccgttcctccgccgcctgctgcggctcctcgccgcgtcgggcgtgttcaccgtcgacaagcagagctcggaggaggagcggtaccgcatcagccccgtgtcctacctcctggtggacggcatccctcacgaggaccacatgaaccacaccgctctggtgctcacctgcacctcgacgcgctacatcgaggcggggatagggctggcggagtggttcaagagggacgtggtcacgtcaccgttcgaggagctgcacggggcgactctgttccacgagagcatggggagcctcgacgcagatttccacgacatggcgagcgaggccttggacgcccacgacaacttcggcatcgagatagctatgcgggagttcagggacttgttcgaggggatccagtccatgacctactgctgcggtaacttcggtgatgacaagggtgccagggccattgtcaaagccttcccacacataaaatgcactgtgctggcccctcccaagatcattgccaccaaaccggccgatggagcgatgataaactatgtcgaaggtgacatgttcagtttcattccacctgctcaaactgtcgtgctaaagcttgtgctgcaccacctgaccgatgaggagtgcgtcaagctcctggctcaatgccggaaggcgattccttcacggaaggatggcgggaaagttataatcggtgatattatgattgaccactctgggcctatgctggaaactcacctcctgatggacatcggcatgatgaccatgacaaaaggacggcagagagatgaaaaagaatggagcgagctcttcaccaaagcagggttcagcgaatacaagatcctgaaggaatttggagctcgtgttgccttcgaagtctatccgtgagattgcacctggactatacatatatatttacatacatatatgtatgtgtgtgggtgccttgcgtggcttggcgtgatgatgtcataaataaagagggtgggtgtgcttgcggtattcatggatggccatggatctgagcacatgacgttggatgctttcttaaggctctcgtggatcttctatatttggaagaagctgtaaaataatatatcgccatctagtgttggcgttggcttgtatgtactttgtacctgctttgttattttgtgtaatatcgagtaacctaatgtat

SEQ ID NO: 31851 - DNA, 840 bp, Zea mays
  Clone ID: UC-ZMFLB73224E01_FLI
ggcgagcccgacaccgcgaatcggatccgccgacaaggtgagagggaagagatggggctcacgttcaccaagctgttcagccggctgttcgccaagaaggagatgcggatcctgatggtgggactcgacgccgccggaaagaccaccatcctctacaagctgaagctcggcgagatcgtcaccaccatccccaccatcggattcaatgttgaaactgtggagtacaagaacatcagcttcactgtctgggatgtcgggggccaggacaagatcaggccactgtggaggcattacttccagaacacgcagggtctcatctttgttgtggacagcaatgatagggaccgtgttgttgaagcaagggatgagctccaccgaatgctgaatgaggatgagttacgtgatgctgtgttgcttgtttttgctaacaagcaagatcttccaaatgctatgaatgccgctgagatcactgataagcttggactgcattcacttcgccaacgtcattggtacattcaaagcacttgtgctacaacgggtgagggattgtatgaaggcctggactggctgtccagcaacattgcaaccaagtcctaaattgtcaagcgaggtttggatcatctaggagcttttggatgatgatgatgatgatggtgctggatatttagggttgggttggtatttccgtatgtaagatgtatgcccctgagctcggcagtttttgagctctgcttaagattctcacagttaaattgttttatgtaatttgggccttgagatgtttctgaaccaaacagctaaaagagttcagttgagttaactggttgccattattacatt

SEQ ID NO: 31852 - DNA, 400 bp, Zea mays
  Clone ID: UC-ZMFLB73224E03_FLI
cccgacggcacgctctgcggcccgctcgtcgacgacgcctcgctcgtcggcctgcgcaagaagaagcccgcgcgccgcctcatgcagctcctgtaagcgctgcttccacgtgcactacgcccggacggaccgcgcaagcgatggtgtaatacggctggtatgtgttttttggtttggtgtgtgcgtgcgtggtatacgcgtgccgtgcgcgccctgtggctgtggctgcagtggcgtcgcgttgggtgttttcttgttgtgacgaagaaaaaagggtatgggttggggtggtccgctggccggcgcaccggggttttaatcaacttatattaacctgatgaaggtgaaggtgaaggtgacacgggattaatggcaaaaatgctcctagtactatttttgt

SEQ ID NO: 31853 - DNA, 728 bp, Zea mays
  Clone ID: UC-ZMFLB73224E04_FLI
ttcaagaaagaagtcataccgaagctgtggttcgaatggagcgagcactgtactacggaagacttcaaacttggtcaaattgatattgatgactctggtgacgaactgttggatactaaagcaatccgcaaggatatcaaagcgctgtatagaaggtaggtaacaagctttgtggccactggacaccatgtacatattgcagtgctgaccgtcgagctgatccttaaactgaagaaagaggtgacgggtgttgcggtggctacattgcgcggtcattcccagctatatccgtggaatggcggcttcttttgttcgtagtatgtgccaacttggggcagcagtcagctgatccccagacacatttctagactcttttttaggctcaagtttctgagaattaacctgctatggcgtttagccttaagtaaatatttcgttcgcaacaataataacccagtaaacctaatttgttcttgtgcgtttgtggtggtggttcttgaaatttacctggcgccttcttcctgggctagatgctatgcaggtgtcacaggttggtttgttggcatgtagaatcgggaaatgctaatctcgaaagctcgtagtttccttttcccccccgggtgacatgtttattcacctcttactagttaccacgtccatttccaactataagatatgatactttggcttttgaagatacattacttttattacgtatagtgtatatc

SEQ ID NO: 31854 - DNA, 614 bp, Zea mays
  Clone ID: UC-ZMFLB73224E07_FLI
gctcgatccgatggctcccacgaagaagtcgaagaagagcacagagagcatcaacaacaagctgcagctggtgatgaagagcggcaagtacaccctgggctacaagaccgtcctcaagacgctgcgcaactccaagggaaagctgatcatcatcgcaaacaactgccctccacttaggaagtctgagattgagtactacgccatgctggccaaagttagtgtgcaccatttccacggaaacaatgttgatcttggcactgcctgcggcaagtactacagggtgtgctgcctcagtatcatcgacccaggtgactcggacatcatcagtaccacccctggcacccagtgagccagccccggcacccattgcagctgcttcgcctttctcaagatgagatgagatgtagcgctccggccctatgtccgtttcctttttttatcttttagctatgtaattttgctaccatgtgtccatctaccatactgatagtacctcttattatggctgctatgcaaggcatatccatggttttgtttgatgagatggttgtacttgttctcttgttgatgttgatcggatcaggtcaatcgatgcgctgatgggctgcttggtt

SEQ ID NO: 31855 - DNA, 790 bp, Zea mays
  Clone ID: UC-ZMFLB73224E08_FLI
ctcattggagttccttttcaacaatgcacctgaggccgccaaatggctgaaggataactctgagttgtcctttgaagaaaaatatcggtctgatagaagctcatggttggctttgtatcctgtcccattcttgttctctggaagtttaaaattccaggcacaaactgaagagattaaaaagtactaccagcatttccctcagttagctgttcaggagatctgggataacaatggacagcgaagggtgcatctcaaacttgcacttggttccttatcagaaatttggacctctgtgctcaatattactgggccactatcaaattggtccttcgctgataacatgctcccagctcctcaaactgtaagtggtgggccaccatcatatatttgtcgactcagtggaaagagcgatgtggattggtctttctggttggaggcaaactcttctgaaagtctgagagtcgatgtcgcagtacttgatcagtaccttgttgatagtacaaagaaactcaagagcctcttcccaagttgggcagacttgacagccttcacaacatttttctcaacgtatcatttatgaggaggtcaagtatttgatgttcaacaagtgtaaatcattttctctttgtagccctacgtttcggggctatatgtggttttgtcaccatgatcagctggacctgagccccgaggctggtgtttgtaaaatctttgtaagcgtgccttgatgtattcatgaatcacacaagattgtaagaatctcaagtcagtcataaattttttaccactt

SEQ ID NO: 31856 - DNA, 725 bp, Zea mays
  Clone ID: UC-ZMFLB73224E12_FLI
agccgtggcagtggcctcctcggcgttagagaggaggcgacgcaggctggagatgaggaggttccgcgtcgcgagcgatcccgaggagctggtcgcggaggacgtccgcgctgccaagcggcagaggctggcgcgcacgctgtccggctcctgccccgacgcgggctcggactccgacaggccggccctgcccaggtacggggtcacctccgtctgcggccgacggcgcgagatggaggacacggtctccatcaggccggacttcctgcccggcaccagcaagcacaacttcttcggcgtcttcgacggccacggctgctcccacgtacggcatacacgacgcgcacatgcgaccatctaggaattttagatctctctgcggagttatgtatgttgatagcagtttcgcgctactactgtaggtagcgacgatgtgccaggacaacatgcacgaggttgtcgcggacgagcacacgaaggctgcctctggcgaggagacggcgtggaagggcgtgatggagaggagcttctcgcgattggatgagcaggccgccagctgggcgaccagccgcagccgcgacgagcctgcctgcaggtgcgagcagcagatgcccttgcgctgcgatcacgtggggtccaccgccgtggtcgccgtcgttagccccagccacgtagtcgtcgccaacgccggcgactcgcgcgccgtcctctcccgcggcggcgtc

SEQ ID NO: 31857 - DNA, 1820 bp, Zea mays
  Clone ID: UC-ZMFLB73224F02_FLI
cgccgccgccgccgtcctccgtctggtgccgaggtcttcgttggacccttcgcccgcgactagcgtccgccaggctgaaggcgatggcgacggagaggaggcgcgcgtcagtcgtggtactgggcgacatcggccgcagcccgcggatgcaataccactccctctcgctcgctaaccaggccagtatggaagtggacattgttgcaaatggaggaagtgatcctcacttgtcactgagagagaatccatcaattcacatccacgagatgaaaacagtgcagttaactggaatttcaaagatatctggtgctctgtcacttctacttaaagctgctgtccagttcattttgctggtttggtttctttgttttaagattcctcgccctgatgtcttttttgttcagaatccaccctctgttccaacactggctgctgtaaaactggcaagctggctgagaggtgctaaatttattgttgattggcataactttggatatacattgctggggttgtcgcatggcagaagtcacattattgtcaaaatctatttctggtttgagaagtactttgggcagatggctgatggtgccttttgtgttacaaaagcaatgcagcatgagcttgctcaaaattggggaatcagggcgacagttctttatgatcaatctcctgatttttttcaccctgcttcattgatggagaaacatgggttgtttagcaggctagggaattccatgtgtagtgctatgggcaatgctgattgcatatcagtggaggaagtaggggaagacatgaacactactgcctttaccagtaagattgatggccaagttttcttgaagcctaacaggccagcacttgttgtgagcagcacaagctggacgccagatgaagatttcagcatacttttggaagcagcactaatgtacgacagacgcgtcgctgcagctttaggtgaagatgattcaatggatgaggggcaactttggattgatatcaagaacgggaagcagtttgtctacccaagattactgttcattattacaggtaaaggacctgataggaagaaatatgaggatcaaataaaaaggttgaagttgagacgtgttgccttgcggacaatgtggcttgcatcagaggactaccctttattgctcgggtcagctgatctaggagtgtcgttgcatacatcttcgtcagggctggacctaccaatgaaggtggttgatatgtttggatgcggattgcctgtttgtgctgcttcattctcctgcattgaggagcttgtaaaagtaaacaaaaatggtcttcttttctcaacatcttcggagcttgctgatgaacttatgatgctctttaaggggtttccagaagaatgcaatgccttgaaatccctcaaagaaggtgccatgaagtcagcatcatcttcgaaatggtcaacagaatgggaaaccaatgcactacctttggtggaccaggtcattggatgagatgtgtgcttacatacatcagatagaattgttgtattgcagagaaccagagatcggtgtactagagagaccagatgtacattaaagggtacggtttgctttcaccaaaaatcaattgctagttgctgccagtgccatgtgcaccacttcagcaaaacttgggcaagtttgtagctacgaagctctttcctttttaggctgggaaacatactctgctgaacacatgtctaagttgtttcaggatgtatactactgtaggccagcactttgtttgataatatggtctgtattggaatacctctaatctgttacgtcagaaggaaaacatag

SEQ ID NO: 31858 - DNA, 1348 bp, Zea mays
  Clone ID: UC-ZMFLB73224F03_FLI
gcaatcttatccctggggaagaaatcacgtacatctccatctctcagccatctcatttcttctccgttcctgatgacactagagggattagtccgcacatcagtgcttggatcttgctagcagccgagctacttctccagcatcaatgtttgaaaccgtcatatctgcaatttccggtcgtcgacctcgccctgctgcttatcccgtcgccagctgtacttgtcttcctcaccggtgtgccctctcggctcgctcggcttcaatctccatcgcgcagcggcaacttcccttttctctggtgccgcgcacgctgctggtccttgcgagtccaccttgctccggccagtgacaccggtgccggctcgctaatgcttgcgcgcgtctgtccacgtcgccagcagctcggtctctacgtgtctccctcagcatctcggcatcggaactccatcatgtctgtatgtgtgtggaagaacgagatcgagggatcggagaagaaagcgaagcccatgtggtttgtgcgttcgtttggcttggaattggaactgtggatattggagaagaaattccgagaaattagtggacggtgatggtaatgttcgtgcgatactcatctgatgctcgacaaaaagcccgaatcgggagtggctgcttcgtcttcttcgtcgaatgagaatcgtcgtgctggccacgcgtcaccagctcgataaaataaatcctatgggtatctggttaaggatagaaattgtgtgcatcgctcgccagacgtgtgtggtcatgggcgtcaagcgaaaaccatcttcgtttttccgactatcgtgtcggattggtcagggtacgctagctgagaatcgtgcaaagcaaagttcatagctcaaaacaacccacaagacgatgtcgtcagtcggatcaacccgaagaagggcagactgaacaagtatcggaacaaaaggttgatcgccaagcggacgtcgtctaacaaacactaacatagtgtttattccaggtgaagtgtgttgctgtggaggaaggactctgctacttttgtgcaaaggtggttctcaagcaggaggaagaaccaaaaatagaagtgtgttgctgtggatggtgctaagtgccggtgggctcggccttcttataagtctaagtacctcttctatacttcttattgaggatggtcacttaagctagcagatatttcaaacttacaagtagtttataacatttcaaagtttatttctttgaatcactttgtaatcactccgataaacataatgtaaatttgatgtaacttgtaaccttttgtaataaagaaattccactgcaaaatgttggtgtgtgatttgtgttt

SEQ ID NO: 31859 - DNA, 1084 bp, Zea mays
  Clone ID: UC-ZMFLB73224F07_FLI
ggacgcttgaaatccgggacaggtcctacaggctcaagatcggtgtgatgagcgaagcgcatcctcctgtatatggtgacgatgaaagcgccgccagtgctgctgattcagatggcgaggagtttagccgaaacgtcaaggaagctgcggagatcctgaggaaggccagggcatccatggctgacgaagagaccgcagacgcactgctgtacaaatcagctaggctcctttccacagctgtggctttgaggccaacaagcctggtagcagtgggtcagctagggaacacgtacctcctccacggagagctcaagctcaaggttagtcgcgagctgaggacactcttggccagcagcggcgcctttctgaacggaagagagcgtgctccacggtccaggaaggtagacaggaggatggtaagcagagagagcatctcatccgctcttgtggatgtatgcgaggaatgcgagagcctccttgtcgaggccggcagaagctacaggatggccctctccatcgattcaggtgacgccaaggcattgtacaactgggggctggcacttattttccgggcacaattgctcgctgacatcggaccgcagccgacgctgaccgggtgtatctagctgcaatcgacaagttcgacgccatgttgtcgaggagcaacacttatgctccagaagctctctacagatggggcactgcgttgcagcagcgctcccatctgcggcctcggagcaacggtgagaagataaggcttctggagcaggcgaagagcttgttcgaagatgtgctgtatgtggaagcagacaacaagatggtgagggaggcgctgtcatcgtgcatatcagagctcaactaccatggccgctggttataaccgtgaggagctttgtagcaactagcaagcgaggggaggagggctaatgataacttttgagttttgaatgatgtattagcttctagctttttatgctgacaagaagctcaaacaatatcttgcaatacaatgcaatatgaccttttttttttcttgtatggaacgtgtggttgaatcgattaatacaagtgaatgaaaaagagc

SEQ ID NO: 31860 - DNA, 416 bp, Zea mays
  Clone ID: UC-ZMFLB73224F08_FLI
gtttgatacagctcgatgggtgcgcaaccttgaaagggcatactacaagatgtggaacctttactgctccagtcgccacccggagccattcaaggtggtagaggatgacaatgagtccccatttgaccgctaacgagatctcatcagcagcccggctctgtaaataaggcgagagttgtagaatatttagcatcgtgaccgctgttgctccaggtgcttgtttgccgccccctttcctgccgtgcacatcacctctgtggaggctaacttcgtagtatgtatgtactacactgcaaaagaagtcctagggttagcctattgttatcactatttagtttgctatattgtatcgcggtcgtggtttctaaaataaactgcaacctttaggagtgttgatgtgaaatctcattcttaat

SEQ ID NO: 31861 - DNA, 904 bp, Zea mays
  Clone ID: UC-ZMFLB73224G01_FLI
agggcacgggagtggtggcgcgaggagtatgcagaggagctcacgaagaagcaaaaacgaagggcacttgccaagtcaaaaagtgatgctggtgcgatgtctggtttgcaatggtgggagagggattgtgattttgaggagaagggccattcaaggtggacgatgatgaaaagctggagccggaggagcagcaatggcaatggcaatagcaattccagcatcagttggtgggtggacggtgtgagaaggagcagcagggattgggccagcggggaatttgtgcctaagagtggtggagcagtgagcagcacaccgagcatgcgtggcacagtctgctatgtggctcctgagtatggtggaggagggcctctatcagaaaaatgcgacatttacagctttggtgtgttgttgttggtccttatatctggacgacgcccactccaaatgacaacctcaccaatgtcagagtttgagaaagcgagcctcatttcgtgggcaaggcatcttgctcaagttggccgcttgcttgatcttgtagaccctgcactgcaggatgttgaccgagaccaagcgctgctatgcattactgttgcactcctttgcattcagaggtcaccagctcgccgcccatcaagtgcagaggtgcttgatatgcttgctggtgagggtgagccaccgcctcttccgatagagttctcaccatcacctcctggcggattccccttcaagtcacgaaggaaaggccggtgagtttagtttgttggttagatgaaaaggcagtgttagtattctatccttatgtttgtttcttcttgtactcaactcctaattttatctgtttaatttgttgatgtataaagatcttggtgggacaaaaaagtatccaattgggttcagatttgac

SEQ ID NO: 31862 - DNA, 1536 bp, Zea mays
  Clone ID: UC-ZMFLB73224G06_FLI
cgctcccattccggcgtccggagtcgctgaccgccaagtcagtcagtcgccgaggcgaggacgacgaggcagacaacgcacccccgcacctgttgttaccagcgcggcgcacgagtccagtcgcgtgcaggcgcgctgcatagggccagagccaagtaagtgggtggggacagaaatatcctcctgctcctcggcctcggcgtgctcgcgggcggagcaggaggggctaggaggaggcggatcggggagcggagatcctagccggagggatggcgaagggcggcgtggagaggggcgcgctgctgccggtctcagcggacgacggcaagggaaacggcggaggggcaggcggcgacgatgccgtgctgttcaaggggtccgccatgacccgccgcggcggcaccgccgcgctctcttacatggcatgctccgtgttgctagtgatgtttaacaaagcagctctctcttcgtataatttcccttgtgcgaatgtcatcacactccttcagatggtgtgctcaacgtgccttctttatgttctgagacgattaaagatcatctccttcactaatagtgatccatcagtgccttctgattcactattctttgtgccgtttaggttattactacgcaccacacctctttccttggcttatttactctacatgctagcttcaatggaatcggtccgtggagttaatgttcctatgtatacaactctacggcgcacgacagttgtgtttacaatgacaatggagtatttcctggcaaagcagaagcacaccccacctataataggcagtgtggctttgattgtattcggagcattcgttgctggagctcgagacttgtcatttgatgctcgtgggtatgctattgtctttgtggccaacattacgacagccatttaccttgctactatcaaccgtataggaaaatctagtggcctcaatagctttggcctgatgtggtgcaatggacttgtctgtggaccttcagtactgttattgacatatattcagggtgacctaaagagggccatggaatttccgtacctttattcccctgggttcatgactgtgctgctattttcgtgcatcctagcatttctactgaactacactatcttctggaacacaatcctgaattctgcactcacacaatcgatgtgtgggaacttgaaggatttcttcaccgttggaattggttgggtgctatttggtggacttccttttgatcttcttaatgttataggacaaggactaggctttctgggctctggattgtatgcctactgcaagatcaaaggaaagtagacgctgatgtctagtgggatcaactgggggtagacggtggtgtgacttggtgtttcattcagggccagtgtgcttaacaaaagtagcgttgtttatgctgtttgctcctacatatgggagagaaattttgtaggtttcctgtatgtattagacttcagccctaatgaacactgcaaaactgaaaaggaaatagagtataccgaatttttactgttacctt

SEQ ID NO: 31863 - DNA, 2164 bp, Zea mays
  Clone ID: UC-ZMFLB73224G07_FLI
ggcatctgtaccgccactgccaccacgtgctgcatgggtgtgttgtgatgattgccaaaagtggcggtgcatacctgctgaacttgcagatgtgattggagaaacaaattgcagatggacttgtaaggacaatggagacaagacgttcgctgactgttctattccacaagagaaatcaaacgctgagattaatgcagaactcgatctttcagatgcttcagctgatgaagcagacaatggtggatctaactccaaagcttgcaaaccaccgtcatggactcttgttaggtcaaacttgtttctgcatcgaaaccgcaggacacaatccattgatgagagcatggtgtgcaactgcaagccaccccaagatggccgaatgggttgtagagatggatgtttgaacaggatgctcaacattgaatgtgtcaagcggacatgtccatgtggagaacaatgctctaatcagaagttccagcggcgtagctatgcaaaactgagatggttccattctggcaagaaaggctatggattgcagttgcaagaagacgttactgaaggaagatttcttattgaatatgttggagaggtccttgacataacatcctatgaatcccgccaaagatattatgcttgcaaaggccagaaacatttctatttcatggctctaaatggtggtgaggtaattgatgcttgcactaagggaaacttgggccgattcatcaatcatagctgcagccctaactgttgcacagagaagtggatggtcaatggggaagtctgcattggaatatttgctttgaggagcatcaagaagggtgaagaattgacatttgattacaattatgttcgtgtatctggtgctgctcctcaaaaatgcttctgtggtactgccaaatgtcggggttacctgggtggagacatatcaattgtcgataccatcatcacccaagatgatacagaagcagatcattttgaacaaatggttgttgacaaagactccaaggagttgctgggtccaaatgagtctgattctgatggtagccacccaaatatttcagaacctgaattttctatccaaggggaagatttacatgattgctcagctgcaaaagtagaattagatctgcttgaaggaactagaggaacctcattagaaactagtgagcctgaacatcccttggaagcatggagcccaccagaagatgaagatgtcattcgtacgcctgtgcatgtgtcacggacatttgaaagttctctgcagaagttctcagtacatgacactcagtcatcagatcttttgcgtaagactgcaaattcaatggaaggatcaaaggctccaaatataacaaacggatcgacacttggttctgatttcaggggcaatctggtgcctactttcagacctgctgagagaaaaaacttaaaacaacataaaaatcagaaacgacaaccgtcttctccaattgacaatgaacatattttgggagttgaagggacactgaacagcctactggatgtggacggtggtatcagcaagcgaaaggatgctacaaagggatacttgaagctgctcgttgtgactgcagcagaagatggtagtgctgggggcacatccaaaagtctgagggatctttcgttgattcttgaggcacttctaaaaacaaaatcacattcggttctgttggatatcatcaataagaacggactgcaaatgcttcataatatattgaagcagagtagaggcatcttccaccggagacctattatacggaagcttctgaaggtacttgaatttctagctcagaaaggaattttgacatctgaacatataaatggaggtcctcggtttgctggagtcgaaagcttcagagacttgatgctgagtttaacaagacattcagacattcaggttcaacagattgctcggagcttccgtgatagatggatcccccctaataatgcaaggagtgaaccaacagaatatccacatacatcaacatttgtgcatgatatccagggaaccaatacagtctggagttctgctaggaggaaacgcaagagccgctgggactatcaacctgacgagcattataagatgccgggactaaaaatccaaaaagtttgttctggacatggtgaatttgatgttcagtttggctttatg

SEQ ID NO: 31864 - DNA, 2028 bp, Zea mays
  Clone ID: UC-ZMFLB73225A08_FLI
gtcaaatgcaagtgatggtgctcaagaaaactgggttgattttgattctgacgtggaaaatgctagcatcaatgaaaattcacacagtgacactgatgagaaggaatttgaggagccagtttctgattgggaagatttggatgacaatgctcttcaataccaattcagtccttattcaaattcagatgaggtcagtcaaaactcctcatacaaaacagtttgccaagaagtggagcttgctgaatgcattcctccagttgtcaatcctgcgagtgaagaaaaactcaccatgcttgtacataatgagcataaagctgctgtgtgtattggcaaaatagagagtgaagttaacagtatcatggatggtgttgggctacagcctgaaagacacactatcctgaaaaagctgaaagagttattttccatgcgacagcaaggggtttcttcgcaggattgtgttgagtcaagcccagatcaatgtgtacctgaagaaaccctttcctgtgacccattagatgtcactgtggaagacaaaacctcttttcaggaacaccttggagaatttgatgagcttcgacaaatcattgctgatttatccaagagggctgaagcattggagaagaagcagaaaggatcagatcaagatctactttttttgagggaagttgttaaagattcaggaagaaaagtacagcaactggaatatcttgtagatgagttacaattccgatttgactcttcattgtctcttcctggaagcatgcacaatactttagccaagccatcgatatttctgatcggtggctacaatggtgtgacctggttatcatctcttgattctttttctcctgagaaagacacaatggtgggtctcacaccaatgagttttgcccgctcatatgcatctgctgctgcattggatggtcacatatttgcttttggtggtggaggtggcaagtcatcatggtataacacaggtatgccatgggtatctatgatatgatttcactacttttgtgtgacctttttatgttttgtggcatgtacttctatatggttgttttcatttgatagtggaatgctatagttcgaggaataacgagtggatagaatgcccctcgttgaaccgcaagaaaggaagtctcgctggtatcagtcttaatagcaaaatatatgctattggtgggggagatggaaatgaaactttttcagaagttgagatgtttgatccataccttgggaaatggttatgtggtccatctatgctgattcctcgatttgctcttgccgtggctgaattgaatggaacaatctacgccactggtgggtatgatggaagcatgtacttacaatcagcagaacggtatgaccaaagggagggtgtctgggtccgtcttcgaagcatgaacacaaagaggggatgtcatgcccttactgtccttggagaaagcctatatgcaatgggcggatacaatggagacaagatggtttctagcgttgagatcttcgaccctcggctcaacgcctggaggatgggagatcccatgagcgccccaagagggtacgccgctgcagttactctggatggaagcgcgtacttaatcggtggcctggagtccaatgtgcagatcctagctaccgttgaagtttacaacgcgagctccggctggtcagttctcggtttgagttcactcgggaagaggtcctttgcatctgccgtagtcatgtagttactgatcacgatgttaactactgtcgataacatcaggtttaacatagtcgctgcgttatgcaaggagtagttagggtaaggtgggtggggctagatcacccttccgatgtgtaatgtgttgagatcttcatcaggggaaattcgcatggtatgggagactacggcccgtatacctttgaaccctcgtaggaagtcttgagaacccttgcatgcattcgctgttgtatgcgtgccatgctgttgaatttagctgtactacaccagatagtgatacccgaactcacggagtttaatgg

SEQ ID NO: 31865 - DNA, 1865 bp, Zea mays
  Clone ID: UC-ZMFLB73225B08_FLI
tccactcgccgcgcgacgaagagaacggctcccccttccccgccacctactcgggctggagcaacaggttctcgaagcgaaacattctcgccccaattgtgggggttcatgggcgccaacggccacccaccgctggcgagcacccgcgcgcacaacgggtcccactccggcggaagcggaggcggaggaggtgggggagggggagcgaaccctagcaacggcggcacggcggcggcgcttcggcacgaccctggcctggcgcgggagtggttgacggaggagcatgccatccttgacgaactgctggtcaagtatgcatccgacttacctgtcgttcgttatgcaaaattgcaatgaagttgccagagaaaacagttcgggatgtagctttgcgctgcagatggatgattaaaaaaggagagcgccaaaagaaagaaggaggatcattactcgtctaagaaaagcaaggacaaaaaggagaaggtttcagattcttcatcgaaaccacctgtccttatggctgataggcctactgttcctccataccctcttccagttcttccagtggacgatgatgaaatctcatccaaagcatgtatattggaggtccaacaggcgaaatccttgaaactaattcccaggttttgagtcaaatttcaacaaaccttagcaacatatacagaacaacatctctctgttgtgccaaactcgagataatatactcaggatcttgaaagagataaacgatgctccagagaccatgaagcagatgccctcgctacctgtgaagataaacgaggacgcagatgcccccgctacccagatgataaacgaggacctcgtcaactcgttgctgcccagaccaactgtacctatgcagtagtgatagcaaaatgaccgtatcctctgtagttccgagagctttttagactgactgcaacgcttgcctcttcacctcccctacgctaatactgttcatcgtttaggggctacagtctcctcctacctcgcgcagcggtgagtgagcgctcccctctccccttccttgcgacactcttctctctcacgtcagatgcagcgcttcactgtagccaccccctcggcttcttcgcgcggaaggagccgcccgcgccagacaccggaaacttctcgctccacctcgctccgtctccacccgtccacggaagggcgatttttggaggcgacgcggcggcggatctcccgtcggccggtggagtcggcaccggccccgctcgggtgcgcagaagacgaagtcgacgtcgtcagcacgcagtgccgttcgcgaccgaagacgaagaggggtcacatccgcttccgccgaggttcgtggcgtccgattcgttggcttccgtctccgaccatcaacgacgccatcagatccagacgcatccccttcgattcgacttggtgggcactaaatctcccgttcttaaggtaatttgctttacaactccacggcaaatcattgtttatgttccgattgagttacaactcaagtcgtattgtgcttgattcgccgtcttgcggcccagatccatccctactagaggtataggttcttctacctcttgaaacgaaaacttgagtgaggaaaaatgtacaatacctactgcagctgtgttcaaaattcgtattttttgttgccaaggccataggagttagcagatgcagagaactgatctaggtatgaagttaggtagtttttcatcctctgatttatgcgcctggtgtaccatactttatgttccacggcatccagtggtgttgattggactgttcttcatgtttttgaactgaagacaatgtttttgtgccttttatgtgcaatgttaccctttcgcact

SEQ ID NO: 31866 - DNA, 1095 bp, Zea mays
  Clone ID: UC-ZMFLB73225B11_FLI
gttcagggctcagttcttctgcggcggttggcatcgcctacttgctggctttagaacatgtaaatgatctggttatatcaccagtagataacattcagttagacaagtacattgaaaataaatacttgggtctcgaaaatggcattctagatccatctgccattttgctttcacggtatggctatctcaccttcatggactgcaagactgcttcaccttcctacgtctgcttctcggagctgaataaaagccaacagcctcagggacagctaccattcaagattttgttggcattttcaggactccaacataatctgccaaagaagcgtggatataatacacgagtttctgagtgcaaagaggctgcccgtgctcttttgcatgcttcaggctgtgaagatacaccaaatatactttgcaatgttgacccagttgtatatgagacccagaagtgtgtattggaagaaaatctttccaggagagctgaacactacttttttgaaatgaagcgggttacaaagggcagggatgcatgggctcatgggaacctacaagaacttggacagctgatctctgaatctggtcgcagctccatactcaactacgaatgtgggagcaaagagatgatccagctgtacgagatcctgctgaaggcccccggcgccctcggcgcccggttcagcggcgccggcttcaggggctgctgcctggccatcgtggagagcgaccgcgcggaggatgcggctgcatacgtccgtgccgagtacgaaaaggcccagcccgagctggtctccaggatccccgcggatcgccgtgttctggtctgcgagcccggggactccgcgcgcgtcatattgcctgatcctcacctgagctcctgatgccatttcgtggcccggacagacggaatgatgactctactagtccattcgctgcgtttggattcgtttttagttaagccccttttgagcatcggatattttcctttcctttattgtttctaataaaaataaattaatttctgtaaactttatataaggttctagcttttttagataaaagtatataatatctatctacttctctactatactt

SEQ ID NO: 31867 - DNA, 3084 bp, Zea mays
  Clone ID: UC-ZMFLB73225B12_FLI
ggcttccttttctaccccgcaggccgcggcgcgtagtcttctgctctctagctcaccatcaccgtcgtcatcaatcacggtgaccttgccctcgctgctcgactggaaccgtgcctcgctcagatctgccccgttccactccccgctgttggctgttgctctgctctcatcgtcttcggccgggaaaggacgctgctgctgctggtaggctgacagcgaggaggacgagacgagggggccatggctcagatcttgctccacggcacgctccacgccaccatcttcgaggccgagtcgctctccaacccgcaccgcgccactggcggcgcccccaagttcatccgcaagcttgtggaagggatcgaggacaccgtgggtgtcggcaagggcgccaccaagatatatgccaccgtcgatctcgagaaggcccgtgtcgggcggacccggatgatctccaacgagcccgtgaaccctcgttggtacgagtccttccacatctactgcgcgcacatggccgccgacgtcatcttcaccgtcaagatcgacaactccatcggggcctcgctcatcgggagggcctacttgcctgtccaggacctcctgggaggggaggagatcgacaagtggcttgaaatctgcgatgaaaatcgtgagcctgttggggacagcaagatccatgtgaagctccagtactttgacgtcggcaaggaccgtaactgggcgaggggtgtccggagcaccaagtaccctggtgtcccttacaccttcttctcgcagaggcaggggtgtaaggttactctgtaccaggacgctcatgtgccggacaactttgttcccaggatccagctcgctgatggcaagaactatgagccgcacaggtgctgggaggatatctttgatgctataagcaaggctcagcatttgatttacatcactggctggtccgtgtacacagagatcaccttggtcagggacaccaacaggccaaaacctggtggtgatgttactcttggggagttgctcaagaggaaggccagtgaaggtgtccgggtgcttatgctggtgtgggatgacaggacttctgtcggcctgcttaagaaggatggcttgatggctacccatgatgaggagactgcaaattacttccatggcacggatgtcaactgtgttctgtgccctcgcaaccctgatgattctggcagctttgtccaggatctgcagatatcaactatgttcacgcaccaccagaagatagtagtagtcgaccatgagatgccgaaccagggatcccagcaaaggaggatagtcagcttcattggtggcattgacctttgtgatggaagatatgatacccagtaccactccttgttcaggacgcttgacactgtccatcacgatgacttccaccagccgaactttgagggtggatcaatcaagaaaggtggcccaagggagccatggcatgatatccactcacggttggaagggccaatcgcttgggatgttctttacaactttgagcagagatggagaaagcagggtggtaaggacctccttgtgcgtctcagggatcttcctgacattatcatccccccttctcctgtgatgttcccggaggacagagagacatggaatgttcagctcttcagatccatcgatggtggtgctgcttttggcttccccgagactcccgaggaagctgcaagagctgggcttgtgagtggaaaggatcaaatcatcgaccggagtatccaggatgcatacgtaaacgccatacggagggcgaagaacttcatctacattgagaatcagtacttccttggaagttcatacggctggaagcccgaaggcatcaagccggaagaaatcggtgctcttcacttgattccgaaggagctctcgctgaagattgtcagcaagattgaagctggggagcggtttactgtttatgttgtggtgccaatgtggcctgagggtgttccagaaagcgcttctgttcaggcaatccttgactggcaaaggagaacgatggagatgatgtacactgacatcgcacaagctctcgaagccaacgggattgaagcaaaccccaaggactatctcactttcttctgcttaggtaaccgtgaggtaaagcaggagggagaatatgaaccagaggagcacccagaacctgacactgattacatccgggctcaagaggctaggaggtttatgatctatgttcataccaaaatgatgatagtggacgacgagtacatcatcattgggtccgccaacatcaaccagaggtccatggacggtgccagggactccgagatcgccatgggcgcgtaccagccgtaccacttggcgactaggcagcctgcccggggccagatccatggcttccggatgtctctttggtacgagcacctgggaatgctggaagacgtcttccagcggcccgagagcgtagagtgtgtgcagaaggtgaacgaggtcgccgagaagtactgggacctgtactcgagcgacgacctggagcaggacctcccgggccacctcctcagctacccgatcggtgtcactgccgacggcagcgttaccgagctgcccgggatggagaacttccccgacacccgcgcccgcgtcctcgggaacaagtcggattacctcccgcccatcctcaccacatagagtgcacactgcaggcagcgccatggctgctctcctctctggcctcaccttggtgtccctgtgtttgtgtttgggacactggaggttcagattgcagtgttgatattatatcccccctccgtccagagggattcgacgttattgagtcataataaaatgcattgtgcacggtgggagactgggaggataggaattatagttgtttattacagtacgactgcttactgcatccagattgtgttgtcccttgtctggtgtagcttctgttgcttgctgcgttgcagtgccggaagtgactccagatttcagaacttaaacatgattgcttgttcaagtgtgtgctgctaaatgtcaaactgtcgatgtcatgctacaacaacaatattgataatctctcatctttct

SEQ ID NO: 31868 - DNA, 975 bp, Zea mays
  Clone ID: UC-ZMFLB73225D05_FLI
caccagattacggccggcggcggcccgctctgttccatcgcccccaagcggcgggccttggctgcgccgcctaaatccaccggcgagagtaaagggcgcccctctctcacacgatggcctcgagctccgcaagcggcgccggggtggagggcggggtcggggaggggccgacgacgctggacgagctgtaccagatcaacgtagtgccggccgagctccacttcaagttccgcaaggagctgcagggcctccgcgtcggcctcaacctcgagttctacaatcttgaggtcaatgactttgaggcaaagatagtactgaagcctctagattacgagcggaaatggaagttccagtacaagcccatcagtggcgacatacagctgctttccaagaagataccagtcacaaagtttctaaatctacaggttggcattggccacaattttcaactgaatgcaactggatggaagtggaagctttctacttgcctggggggagatggtgtgtctcagataagaaacaagtcaaaactcagcttgttcccagggtttgatttgaggattggatggaaagcagagtatgtgcttcctgagattcatggggctgttggcacaggagaaccagccttcagtatgaactatggaaggttgcatgcatcgatagatcgggtcgaggctatcgttactcagtcagatcagtattgatcttccagtgcggaaaggcaagggagtttcttgatcaataacaaacacgttgagtagatcccagggttacaagaagcattctgaagctccgtgcctgatgtacagcaaataccaaagtttaggaccacgctttgagaagctgtttgagttctccaaagcttttgactttgagcggcttctgttgcttctgaaagcgtaactataaataatgtttatcctgcttgtgtacgaaacaccagagtatcagtaattcagtatagtgagcgacgtc

SEQ ID NO: 31869 - DNA, 1375 bp, Zea mays
  Clone ID: UC-ZMFLB73225D09_FLI
gcacccgcaattcgcaaacccgcacaacctccccaccccccaaacccatccctcccgcgagatctctcaccggagtcaccgccccccagatccgcctcccctcgccggcgcgctcgcgtgttttccgctcgtccgccgccatgtcgcacaaccacggcgacacgatcccgctccacccctcgtcggcgcagtccgacatggacgagatcgagagcctcatccacgccgcgccatctccggccaccgttctccccgcgcggccaccgtctccgacgcgggcctccattcccgtatcctcctctccggcgttggcgccggcgcccgtccccacgaagccgcctctccccgccgcctccattccgatctccgtctctgtctcccccgttctaacgtccgtctccgttcccatcggcgctgacgggtttggacctccacccaacacgctcacagagccggtatgggacaccgtaaagcgagacttagcacgcatcgtcagcaatctcaagctcgtcgtcttccccaatccctaccgcgaggaccccggcaaggcgctcagggactgggacctgtggggtcccttcttcttcatcgtcttccttggcctcacgctctcctggtcagcttccgttaagaagtctgaagtatttgctgttgcatttgctgtcctggcagctggggctataattctgaccttgaatgttctgcttctggtaagaccttttttttctactcacaaacacggttacacatgcacatgactgttggagataaattgtctctgtggctgtgctaatcaaagtaccttcctagcagttctacaattgtttattcaatcgcttttcagggtggacacatcatcttcttccaaagccttagtcttcttggttattgcctgtttccactggacgttggtgctctactttgcatgctgaaggacaacgtgatacttaagattgtcgtggtgacaatcacattggcatggagctcctgggctgcctatccattcatgagtgctgctgttaacccaaggagaaaagctctggccctatatcctgtcttcctcatgtatatctcagttggtttcctcataattgccattgattaacgggggggcaagcttcctagtaacatctgaatagttgtgactttcctcgtggatggttgaaccaccagaaaacatacaagtttgagtagacaatgcttctaccctgtagtctgaatcgtctcgtggggatttcggtctttacatgatccggaggcttaaggttgtaaaattagttgaaaatctatacctgttgtaaagggctgaacttttgaccactgaattgactgccaagcttcttatactgtgtgagagaaaatactgtgttaaatg

SEQ ID NO: 31870 - DNA, 2248 bp, Zea mays
  Clone ID: UC-ZMFLB73225F09_FLI
gggcagcagcaatgacacttccctgcgccggcggctgcgagatccaagccagcggcattaactaccgcatcgccgtctccacccgacctctcaaggtctggagcagatcagacgacgacgtccattcccaagaccaccacagcgtcgtccgccaggtgctccgggacgtctcctgccgcgcgcgccccggcgagctgctcgccatcgtcggccccagcggcgccggcaagtccaccctgctcgagatcctcgcggggcgcctctccccgtccccgccgccccacctgctacgcatcgacggcgccgccgcccacagcgccgacctccgccgcgtctccgcctacgtcacccagcaggacgtcctcttcccgctgctcaccgtgcgcgagacgctgctcttcagcgcgcgcctccgcctaggcgcgcgcctgccctccaaggacatgcacgcccgcgtcgaggcgctcctcgacgacctcaccctgcgccgcgtcgccgccaccaggatcaaggacctctccggcggagagcgcaggcgcgtctccatcggcgtcgaggccgtgcgtgacccgcccgtgctcatcctcgacgagcccacctccggcctcgacagcgcctccgcgctccacatcgtcggcgcgctccgcgccatggccgaggcgcgtggacgcaccgtgctgctcagcatccaccagccgggagcgcgcatcgtcaagatgttcgactccgtcctcctgctagccgccggctccgtcctccaccatggcaccgtcgaccagctccgcgccctgctcggggacgcgggccttcacctgcccccgcacgtcgatgacgtcgagttcgccatcgactccgtggacgcgcttcgccgccacgccagcagcagcctgcaggcgccgtcctccggagaccgagagggccggtgcacgctgcagcgtctgttccagctgcacggcaagcaggtggcggacgcccccgtggccgtgaccatgatggctagccgctacgccaactcgcgggcgcgggaggtggcggtgctgtcgcagcgcttcttcaagaacgtggcgcggacgcggcagctcttcgcgtgccgcaccgtgtgcatgctggtggcgggccttgcgctgggctccatcttctacgacctcgggcaggacaaggtggcggagcgcgtgggtctcttcgccttcctgctcaccttcctcctgtcatccacaacggaggcgctgcccatcttcctgcaggagcgcgacatcctggccagggagacggcgtcgggggcgtaccgcgtgtcgtcgtacgcggtggccaacgcggtggtgttcctgcccttccagctggcgctggccgtcgtgttcgcggcgccggtgtactggctggcgggtctccgtcgaacggcggcggcgttcggctacttcctgctggtgatatggctgatcctgtacacagcgaactcggtggtggtgtgcttcgcggcggcggcgccggacttcgtggtggggaacgcggcgatccagggggtgatgggctccttcttcctcttctcgggctacttcatcgcgcggtcggcgatgcccgggtgctgggtgttcatgcactacctgtcgttgttcaagtggccgttcgaggcgctgctggtgaacgagttcgccggcggcgggaggtgcgtggtgcgggcgctgggcgagtgcgtggcgactggggacgaggtgctgcggcgcgaggggctcggggaagagtgcaggtggcgcaacgtgggcgtcatggtggccttcatggcggcctacagggtgttgggctacgccgtgctgagggtgaggtgcagcctcgcgctcaacaagaagggggccgtggccgccggaccacctggcctcggcctcagccgccgcctgagaagacagctagccatcatcggcaccgctgcgtggccctcgccatcgtcttcttccaccccctcgctccctgttaattaaattaaattaaattaaattaaattaaatggcaaccaaatacactagtgtatgtgtgcttacttgttttgttcggtgattcgtacggagtgcttacttaatattgtattgtattatacttggagtaggaagtatggtatccaaagatagcatctgttccaatacatcttgtaatcagactctgctctaactcgtaccaacatgctgagatgtcccaaggcatggcattgtggaatctataaactctccgactataactatatatatgcttattttgt

SEQ ID NO: 31871 - DNA, 671 bp, Zea mays
  Clone ID: UC-ZMFLB73225H03_FLI
gaagatctctgcagagccctcacagcaaccaaaaaagtctgacaaggctgctcgtactgccacaaatgcgtcaccgaatggtaacctgaagccaaggtcactgaactctgatgctactgaaagcaaggaagctgtaaagaaagagagcattcagaaagtaaatcctggtgcaaggatcagaggctcctgtaacaggaatccagtcaaaaacaccaccgcaaaggaagcagttgccaagaacaccggtaaggaaaccaagaaaggggccaagggtcagcaggaagttagcgaggctccgtcagcccttccaaatcaggaatctgctgatgttgtgaaggagatcacccatgaagataaagagaacatgggcgatattgaaatggcagtggatgttgccgtagcccaagatatctagaacagccggaccaacttcagattcgatcccctttttttttctatcgctgaagatgaagtgttagcgtgtggttgcttattttggttttcaattgttaatatgttattagtagagcttgtctgtgtgattgctgtctggctggaccttgaacggtcttcaagagcgtgtcataagttgatgattgctttcattcctctgtcaagtttgcggctttgcatgtgctaatccgtgcaactgaatatagttgaatttatct

SEQ ID NO: 31872 - DNA, 1575 bp, Zea mays
  Clone ID: UC-ZMFLB73226A12_FLI
attcaggatatatccttagagaggtatcttcagcccaagcaagcacaagcagtgttctgtgttgtcatttctcgtcagatggaaaattaattgctactggaggtcacgataagaaggttttcctgtggaatgctgacactctgaaacaaaaatcaatgctagaggagcattctctgctcataactgatgtgcgcttcagcccaagcactcctcgcctcgccacatcttcatttgacaaaactgtgagggtttgggatgctgataacggggtcagactcaccatcgtagtggggaaaggagacattgggtcttcgatagccaccatcgtcgatgcagtcacgatgagcagatcctgtgctatgcatgaccccaacaggcgctacggtcgaggcgtgagttgatggtggagagctgcgctaatatctgatccaacttggctgagtcggaggaggtcttcgcaggatcgtgatcaacgccggacatgttggtcgatgcgtcggaggaatctgataccaaattgatatgtcttgggcgcctaggactgcacagtggtgatcgcagcaaggcttggaactggggaagggatctcagtgggtatggggatcgaccagaggaggagctgattctgtcagctggcgcaaggtgcgccaggatgaccaaggaagctccaccggccagcatggttattcaattcgtacgttcactgggcactcagcatctgttatgtcactcgatttccacccgaacaaggatgacctcatttgttcttgcgatggggacaacgagatacggttctggagcatcaagcatggaaatgctgtccgaattttcaagggaggttcgacccagctgagattccaaccacgttatggaggactccttgcaacggcttcagacaatgtagtctctatcctggatgtggagaggcaagcttgcgtgaggagatttgagagccacactaagggcgtcgattccgtgtgctgggatcccaccggcgagtacgtggtgtctgtcagtgaagacacggtgaaggtgtggtctttgaacgacgagagcttcgtgaacgagcttagctgcggcgggagaaagttcagttcgtgcactttccatcctacgtacccatccttgcttatcattggctgttaccagtctctggagctgtgggacatgtccgagaaccggagcatgactgttgcagcgcacgacagcctcgtctcggccctggcatcgtcgagctccggcctggttgcttcgagtggccatgacaagtatgtcaagctgtggagatgagcttcgactttcctgccctggcatgttaagtacggttgtggacgcgccccaacccttttggcaccattagctatctgcttgcattgcagtagcgctcaggagttaggatggtgactcgaccgcctgactgaacatgtgtccgctgaagtagcgtgcagtaaaaccctgaagaagtgggtttagcgcctagcttttgtataggaaattagaacacgggttatgttaagtatccaatgtctgtcactaccttgacatctgacatggcttgaaagcttttgctgctgc

SEQ ID NO: 31873 - DNA, 1351 bp, Zea mays
  Clone ID: UC-ZMFLB73226C03_FLI
ggcacaagccgacatatggcggctcagcctctcctacctcacgcccctgtcactgaggtgcgccgtggagcttggcatccctacggcgatctaccgccatggcggggctgcctcagccgctgagctggtcacggcgctgtctctcccctccactaagctgccgttcctccgccgcctgctgcggctcctcgccgcgtcgggcgtgttcaccgtcgacaagcagagctcggaggaggagcggtaccgcatcagccccgtgtcctacctcctggtggacggcatccctcacgaggaccacatgaaccacaccgctctggtgctcacctgcacctcgacgcgctacatcgaggcggggatagggctggcggagtggttcaagagggacgtggtcacgtcaccgttcgaggagctgcacggggcgactctgttccacgagagcatggggagcctcgacgcagatttccacgacatggcgagcgaggccttggacgcccacgacaacttcggcatcgagatagctatgcgggagttcagggacttgttcgaggggatccagtccatgacctactgctgcggtaacttcggtgatgacaagggtgccagggccattgtcaaagccttcccacacataaaatgcactgtgctggcccctcccaagatcattgccaccaaaccggccgatggagcgatgataaactatgtcgaaggtgacatgttcagtttcattccacctgctcaaactgtcgtgctaaagcttgtgctgcaccacctgaccgatgaggagtgcgtcaagctcctggctcaatgccggaaggcgattccttcacggaaggatggcgggaaagttataatcggtgatattatgattgaccactctgggcctatgctggaaactcacctcctgatggacatcggcatgatgaccatgacaaaaggacggcagagagatgaaaaagaatggagcgagctcttcaccaaagcagggttcagcgaatacaagatcctgaaggaatttggagctcgtgttgccttcgaagtctatccgtgagattgcacctggactatacatatatatttacatacatatatgtatgtgtgtgggtgccttgcgtggcttggcgtgatgatgtcataaataaagagggtgggtgtgcttgcggtattcatggatggccatggatctgagcacatgacgttggatgctttcttaaggctctcgtggatcttctatatttggaagaagctgtaaaataatatatcgccatctagtgttggcgttggcttgtatgtactttgtacctgctttgttattttgtgtaatatcgagtaacctaatgtatacttgcttact

SEQ ID NO: 31874 - DNA, 2657 bp, Zea mays
  Clone ID: UC-ZMFLB73226C06_FLI
cccgacgccgctcgcgttcgggaccgtaccgccctcccctgccgtatccgcccacacaccctccctccccgccgcttccgcccggtatcccccactcgcgcggccgtaggacacggccacgtgcgccgcctcaaactgggggctgtggctggggcgggaggagcggcggcgttagggtttccccatggacggtggcgaggatcggacgttcaaggcgaactttaccagcgagggggtgacgatgctgcaggaccgcgtcaaggagaagctcagtgagctcatgggcgactactccgacgacactcttgccgagtatgttgtagtattgctaaggaacgggaggcacaaggatgaggctgcaaaggagctacatgtttttttaggcgatgacaatgatgcatttgtatcctggttgtgggatcatctgtcctcaaatttgcacctttatgttcaacctaaagctgcctcttctaaggatgacactagaagcagtcacaatgctgccagaggattgcctgttcacagtgtgataagcagcacacaagttaatcatgaacctgaagctgaaacccagaagacagtgataactcataaaaaaaaagattggggtcatcgaaaaagagattggggaacaatcggtcgaggtcaatcagaaacagttcctcttagaagcgttgtcgacaatgtttctcttgcaaaggagaaggatcttcatgagtcacatgcagatgaaaaggcttttcataaatcacattctgtaagacgaacccgctctcctgacatgcataaccacagaaagaggagcagagaggcagatgtgcggtctactaagagtgcaacacacccagttaatggtgcaccacgtcggcttcttcagtttgctgttcgtgatgctgtcagaactgtgcccccagttacttctggttcagaatcagcttccaagcgactttgttctgtagtgtctacattggcttcagattccacacttgatattactcatattaggttacagaaaacaaattcagatttgagaataccagttgccacagcagcactaagagctgcagctgaggctgctgaagatgctctcaaggatagcttttgtggaagtgtttttagtagattgggcagaatgcccacaataaattctagtgaacaatcacctgatcgtagatcacaagatcttgaaggcaaagaatatgagaatatagataacatacaagctgaaaatcaagttgaattttatggaagaaatcaacatggtggcagtgatgtttacatgcgtgatcggagaacagaggaagccacaggttctctttctaatattgatgagtatggtcacaacagttctgttaggtataatggattgggttctctccgaagtgcattgcctgctagtggaggtaaagagtcattagtactggggtacgtaagaggagcttctgaagtacgaagcggaagattgatagctcaggggccacctgctggttcaggaccaagatcatctgaaaagatcctaaatgtttctggtaacactaagacacagaagcttcgaactcatgtaactagggatgcccttgcatttgaccctcaagtgccaatggagaaggtttctggtgcaaggaagtcgataggtcaggggccacatgctggttcaggaccaagaccatctgaaaggattctaaatgtttctggtaacactaacacacagaagcttccaactcatgtaactagggatgaccttgcatttgaccctcaagtgccaatggagaaggttgctgatgcaaggaaatcacatgtgaagattgcacatgctaacgatatgtccatgacaactgataagtccaaagatttgatacagtcaagttcaatgctggaggcacaaaaggctacatcaggtgctgctggatcaaatactacaggtcaacccgaaggtggctctgattctagaactgtctttgttagcaacgtacattttggtgcaacaaaagatgctctttctcgacacttcaataagtttggagcgatcttgaagacccatattgtgaccgatggtgtcactggtcagtcaactggctcagcgtatattgagttcttgcacaaagaatcagcagagcaggcgttaaccctgaacggggcatcatttatgttacgcattttgaaggtcgttcggaaaaactccactgaagcaacccgatcgcctggcttgcttcgtgtttcgcggggatcaccatttgcttcaaggctcattagaactgcatacccaaggccaacgtttcctggtgcaatccgtggacgactgccactcaggggtgttgcccagagcttacagtggaagcgcagtgccacagattcctcaaatgctgtaaaaccaagtcaggctgcaccttcagctcctgggaatcagttggtcaccccgaccccacgaagcttcacctacacacgcacggagccaaaaccaaatgacggtgcgatggcttgactgctcagctgcagcatgccgcagctcctgatgaatctcgcagaaagagttcgtgatactgttacgtggttcattcagctgcttttggtaaatatttaagtagctgcagatgttagtttgtagcaggctggtttttgtggaccaaaacctttgagcgatattctgtgaggttttc

SEQ ID NO: 31875 - DNA, 1253 bp, Zea mays
  Clone ID: UC-ZMFLB73226C07_FLI
gtgagcagaacaaaataggttttgattcagccaatgggaggactagagttatccgggtcatgtccaatgatgaacttgttatgtctggagaagggagaatctatatggattgtgaaatgaaggagattgaagctggtggaggaaggtacaggagagggacaggtgacgactacatggtttatggtcagggatgtcagatagacagacattgtttgttggatcctcttgcagaggcccagtacaagaatcctgttcagcaggacaataataggaatggtgttacggatgagtcctttatgattcctcttaggtccagctcacaggataatatcggagcagagagcagaactactatggacatagatgttgagcttccttctagcattcataaagcatcagataaaaaggctgggcatcagcttttttacgaacctgatgaactggtgcctgagcgttgattcgaagatgtttcatttggatatgatccagcaatggattatgatagccacatgcagagtactgtgaaggttgaagatgcaaaaccagaggatgtcttgccggtcactgacggtgtacagaaggtagagaaagagaagctaaagaacgcaagggatggttcagataaaagaacgaaggattccctattgaggagactatcggcgccaaggaccccactgaatgatgcacaaaaacgtgcacagaacctgcgtgcatataaagcagaccttcagaaactgaagaaagagcaggaagaagagcaaataaagcgattggagaggcttaaattggataggcaaaagtggatcgccgcaagaggtaatggaaagggtccagggaacgatgctcctagagcgaacggtatgaatggacttagtaaatcagttccaaccttcactgggatgaaaagggttgaaaacggaacgactgaatcactcagcggtcgactgaagaggctttctgaacccaaaagcattgttggggcagagcattcgttgaacccaaagtcagctggtgcaggccgttcacgaagaagtatggcatgagttgatgtgagatggagaactgaatagcttgagtccatcgtgccactcgctagcccggtaacttacttactagaaacgtgaaaggcatctcaaaaggctttttgtacaggaaaaaaggaaatggctggctctgtagcattgtctgcttccaagatttgtgatggaaaatcgagctatctttcaatggcatggcgttggactttcaatttt

SEQ ID NO: 31876 - DNA, 1154 bp, Zea mays
  Clone ID: UC-ZMFLB73226C11_FLI
ctcacgctaccgccgtgaccgatcatctcccactctctcgtcagatcctctcggctagctagctagctagctaggacagaggagggaggggaaggcgctggctatggcgactgcggcggcggcggcggccatggaggagccggacgtcgtcaacggccgcgacgtggtgagctgggtggcgtccggggtggtgctgtggtcgaccgccttcttgctggtgcgggcgctgttccccaagcgctcctacgacttctgcaaccgcgccgtctccaccatgcacgccgtcgccgccgtgtgcctcgcctgcctctccgtcgacgactggtcgtgccccgtctgcccgctcgccgccgcatcctcccctcgccagatgaaggcgctggcggttacgctggcgtacatggtgtacgacgcggcgtgctgccacctcaacggcgacacgcggctggacaacgccgtgcaccacctggtcagcatcgtcggcatcggcgcggggctcgcctaccagaggtgcgggacggagatggtggccagcatgctcgtgacggagatgtccagcccgctgctgcacctgcgggagatgctcaaggagctgggcgtgcgggacacggagctgaacctcctcgtcgacgtgctcttcgccgccaccttctccgccgcccggatgggcgtcgggccgtacctcacctacgtcaccgtgacggccgacaaccccatcctcatcaaggcgatggcgacggggctgcagctggtgagcgcctactggttcctgcggatcctccggatggtcaggtacaagctcgccggcaagaagaagccgacgccggccaagctcgccgccgccgccgccaactgacgtaataagcgccggcgacgaccttcacgagctacgcacatttatgataccgggagttggattcgacagaggccgtgctgtacatatagtacaaatacacacacacgcccgcctctgaagcaatgcaatgcaatgcaatgcaatttctccactgccaaggatgtgtctgtcatctctcatcaaccaagtgtcggtgcgtaccaactgtacgcgcgttgctagcgcaaaaagaaaagaaaaaaaagaaagaaaaaaatcgttcaatgagtcctgttgaatgtggcggcactttaactgc

SEQ ID NO: 31877 - DNA, 2481 bp, Zea mays
  Clone ID: UC-ZMFLB73226D02_FLI
ttttgtgttccgctgcttgcaagacttcgttcttagttttttttattgttatgaatataaaattaattaggaaagaaatggcttcaatggcggagctaggtggtggtcagcagtggccaggcccttgctactaccatactgcaccatatttttttgctacattgattatgtgacacagtccttgccaaagtggctggttctgtcttgttgcataccttgttgctatgtatagtactatgtgctgagctactgaagccccctttctgattcccttgaccatttgttacttcacttgttttcctgaccctaccaaagccagtctgatcaagctactgcctagccaaggaagcttctatcccctggttaggtgatgcttcctttcctcaactctgttaggctattgccacacccagtcagtaatttagttcccatataagcttacattgactaaatgtactttgtaaatctcacaagggtaatcataactaaactaaaaggtaaatttgagcaattcagatagagtgaaaaagtggcgatatgatgccagttggcatcctttttattatctatagtatgaaatatcctcattgtaggactgataatttaagtgctgagatatcttctgtgtctcatttccaaatgttattttccatagaaaaggtacatgacaaaattattattattattatgaggaaatgctgttttgggtctgattaacaaggaataatgtgaccgtggaatgaatctttcagatatgatcatcacactccagatggaactggttattttctttttttcccaacataaacggacgtagcaactatattcagtcactgggttgcacttagtgcctaattgttgattaattaggataggtgcctttttgcgctgcttagggccatttcttaaagatctgaatggagttgtggttagtgtattgctggtacaaatgaatagtgctaaatgttctagcatttatggttcaaacgacatactgaaatgaatcttcagatatgagcatccactccagacgaaactcattatttttttatgccaacatcaacgaacatagcaactatattcatttaccaagatttttcttggttcatgatgcagtgttttatgagaatgcatggcctccatttatttttgagaactaggagttttttgtggtttaatcagtttctgatcctatacaggcgaaactagagccactttaccagatcaggtttggtactgatcattctagatcgagcgatatttatttcctggttaagttgcatggttaaacacttaaacctctaatctggtatttgtagatgttcgccaccaactttagtcatttcatggctacaaggaatcaactttaacctcgtattgtttatatgcaatatagtctagcataatttaatgtcttattaatttatcctgtctctctttgctacagcaatctggccttgttactttattatatgaaagcatattgtacctgggaattgtttgtacatcccttggttgctgtgtcatatggtcagaaccattcgcaatgggacatacatgattaatcaaacatgaatttaagggatagtcctcagaagtcatgaaagctgttttttgtactgggatactctcttacttattttcagttaagttcatgttaagctttcttgattcaactcagtgcatgactgcatgtgatgtttcacttgttttgtgtagccttgaaacatgtggggaacattttgaatgtgtgctgaaaaggctatgtctatttttattagtatgttaagatcgtgattttatattgattttcatgtgtcaacaaggtcaataagatttctcctagccttagcgtgctgggggttttgaatggttatgtgctattatgttagcattgtgaagttcactgactattgactgtgtaacatctataggcacgttcaagcttaccttgcagtttacagaagattacccaaacaagccaccaactgttcggtttgtctctaggatgtttcatccaaacatatatgctgatggaagcatctgcttggatatcctacagaaccagtggagtcctatatatgatgttgctgcaatcttgacttctattcagtccctgctgtgtgatccaaacccgaactcccctgcaaactcagaagccgcaagactgttcagcgagaacaagcgggagtacaaccgcaaagtccgcgagattgtggagcagagctggacagccgactagtgcaggaggaggatgctcatcgtgcccgaaagggcacaataaggaaccatgaaaaaccatccttgtgtttgtggttcgccagacctgtcgaaacattgaagaactctagttctagtctgtcgttgtcatggttttggtctgatccagagcaccggttgctcatggtggtggctgtcgtaatgtagcggttgttgttgacctatatcttctcaagatttaaaatgatcctgcttgtgtac

SEQ ID NO: 31878 - DNA, 1891 bp, Zea mays
  Clone ID: UC-ZMFLB73226D08_FLI
tataatcctccaggcaatgatgtacatgctttcgctagagaattgaatgaaatatttgactcagaatgggaatcagtagaaaggaaatttagaggccgaaaccttgttcaagagcagaagacaaaggccataaaagttcgagctatcgtggattcgaagtctacagttgctagagggcaggttgcctgctcaaatcctaaatctttggctgcaagagggccagtaccttgctcaaattcgtttgcaaagaagacactgacagatgcattatcctccaaagtaaaaatcaaattttccgtgcgcagctctgcacatacctcttccaaagatatacctgttcaaacagctggtgtcaaagaggggtcattaaaccactcttttcctaccggcaacaaagaggcatatttaaattgcacttttccttttgctaaggagaatgctaaaatttcaagtacacgagaaactgagcgcagctctggttcaactggaaatgattcatggtcttgcaatgacatttctacttcgcctatcgcctcctctgtacaaggtgaggaaagttacctttgtgatgaacctttatcaccaagcagggctcttcgtgcagcaatgctcaggagtcgttttgctgggactatagtgaaggctcaacagaaggcacttctggatcatgggaagaatatagaccctgtgaaattgcaattggaaaaggagaggctggaaaagaggcagcaagaagagaaagcaaggattgaggctcaggtgaaggctgctgaagcagctgcacaacaaaagtttgaggaagaaatgagggtgaagcgagagcaggaaagggaagcagcacggctggcagtacgcatgatgaagaagactgttgatattgacaacagtgacttcctaaaggagctggagaacttcagcaaaacgtggcagtcgaatccacctggcaaattaatcgtggattttattgatggggacttgccaccggggttagggagccctctggagaggcttggcctgttcatgaagaacgatctcgaggatgaggtggaacaggaagtcgaggacagcgcatcaccctcgatggacgttgacatgaggaaagatttagcagggcatgaaatgcaagacagcatatcacccgtgaaggtcattggcacgaaggatgacttccagggagcggacattaacacgaggaaagatttccaggaagacgcagcagggcatgaaatgcaagactgcatatcagccgtgaaggttattggcacgaaggatgacttccagggagctgtagggcatgaaatggcgaacagcctatcaccatccactttcgttgacacaaagaaatattccgaagggacagaacatgagatggtggatagcatatcgcctttgatggatcctaacaccgaggaaggggagatcagctgctgacgttagctacacttgtcatccacatcatttgttgagttcgtgaggcagacatccttgctgggttgttggattaggcgacatcataagcagagtgacgaagaaacgctattcccctctggttgtgtcgtagaacaatgtggagaacatgtgtcagccgaactgagtagtggttttggctttgttgcggttttttttcctgtcgtggtcttgtcagtcgggcactccgctgtatgctgggttacctgagctcgtcagctggatgacctgtataaaaacatgatgaaattagggaggggttaatttagtgctagtatatattgtaggtgtaggactgtaggagcttatggtggagccggctgcagcacacaagctatagcattgttctcagattggtcagcgcgccgtagtaccttgttactgtattcattctaaaacttgaataaaatgatgccagtcgcac

SEQ ID NO: 31879 - DNA, 572 bp, Zea mays
  Clone ID: UC-ZMFLB73226E11_FLI
gagatgaacaaaggcaaattccattggacatactcgttttcagattagttaagcaatatcttcgtgctactcctcttaaacgtttggcattaaaggcactatctaaggctttaagggaggatgaactgttgtatcttagattgcagtttaagctgctcgagcccagagacgggctcgtatcgctcgacaactttcggacggctctgacgagatacgtaactgatgctatgagagaatcaagggttcttgagtttttgcacgcgttggacccgcttgcgtacagaaagatggacttggaagaattctgtgcggcagcaatcagcccgtaccagctggaggctttggaaagctgggaagaaatcgctggaacggcttttcagcacttcgaacaggagggcaaccgagttatatctgtggaggagttggcgcaggaactaagcctcgccccgactcactactccatcgtgcaagactggatcagaaagtccgacggcaagcttaactttcttgggttcaccaaatttttgcacggtgtcacgatacggggctcaaacacgagacgacactaaaat

SEQ ID NO: 31880 - DNA, 504 bp, Zea mays
  Clone ID: UC-ZMFLB73226F02_FLI
gagctgttctccgacaggggggcaccgccgcggcagcacaaggacaaacccgccggcgttgccaacggccggaagcccggcctgagtggcggcgtccggggcctgaacctgagcgtgaactcgtgcatcgggtaccggcaccaggttagctgccggcgggtggaagtcggcgccgcccgcggccctggccccgggctgttcggtatcaaggggctcttctccaagaaggtgcattgagtgagcctgttttgtgttcacccaccctcgggctctctgatcactcgtgtagtaactcctcttttacccttccttttactagtactttttttaaccttgtgggttatatatatataaatggtacgatgagatgtgtgttcgtgagcgaggttgttattacatgtaaaaaattgcatggttagccagtaaccggtttttgtaaggctaatgcttgcttggtgacatgtactgtaaaaagttcgccaacgttaacaacctctgtttatg

SEQ ID NO: 31881 - DNA, 775 bp, Zea mays
  Clone ID: UC-ZMFLB73226F09_FLI
aagcgcaagactctaaaggccgtcgccttcccattcttcctcgccgcgggggtcgcctgagatcacataaacaatggtgaaggctgttgctgtgcttggtagcagcgatggtgtcaagggcaccatctttttcacccaagagggagatggccctaccgctgtcaccggaagtgtctctggcctcaagcctggcctccatgggttccatgtacatgcacttggtgacaccaccaatggatgcatgtcaactggaccacactacaatcctgcgagcaaggagcatggggcaccagaagatgagaaccgccatgctggtgatcttggaaacgtgacagctggagcagatggtgttgctaatatcaatgtcaccgacagccagatcccactgactgggccaaactcaatcattggcagagctgttgttgttcacgctgatcctgatgatcttggaaagggtgggcacgagctcagcaagagcactggaaacgccggtggccgtgttgcttgtgggatcattggactccagggctgaaaacgatcgccggacttgggggtgcctgagaggtccgtctcctgccgtccccagcagacgagcctgaacattcggagacatcgtgaaataagagcgtcgctgatctgtgatcatcgtatttgtcattatgcacctgtagcaaccgatggactgaactgtgctggattatgctgttggatcacctgagtatgtgttacatgtcggttttgatgtgacatcctatcgtttcgatgtgttttgtgg

SEQ ID NO: 31882 - DNA, 3267 bp, Zea mays
  Clone ID: UC-ZMFLB73226G11_FLI
tcccatgccccctgccagcaacaggactgatcttggagcctctgttcttaatgatcactgggtatcagtgacatccggaagtgaagattattcatttaagcacatgcggaagaatcagtatgaggaaagcttatttagatgcgaggatgacaggtttgagttggatatgctgttggaatcagttaatgcagcgactaagcgtgttgaagagctgatagaaaagatgcaagacaactcagtcaaacctgagagtccaatacgcatggatgagcatttaactccgttgaacctgaggtgcattgaacgactgtacggtgatcatggtcttgatgtgatggatgttcttcgcaaaaatgctagtgttgctttgccagttattctaactaggctcaaacagaagcaggaggagtggtcaaggtgccgatcagatttcaacaaagtttgggctgaaatatatgccaagaattatcacaagtcacttgaccatcgtagtttctatttcaagcagcaagatacgaagaacctgagcacaaagtctctcctgacggagataaaagaaattaatgagaagaaaagaaaggaagatgatgtgctccttgccattgctgctggaaataggcgacctatagttcccaatatgtcattcgagtatgtagactcagaaatccatgaagatctacataagatcattaagtactcctgcggtgaaatctgcaattcttcagatcaattagataaagtgatgagaatatggacaacttttgtggagccaattttgggtgttcagcgaaaacatggctccgaggatcctgacctagttaagccaaagagccgaacaacaaaatcgggtattgcaaatgttggggaaagcaacactggagctgggattgtctccaagcataacaacgatgatgaaagtgaacaagggctgccgtctcgggctagaatagcaaatggagttgcagccaacgctcaaaatggtttccatgatgcagatcgaattgcccgtagaggtgaagaatcattaaatgttacacttaatggaagagtgcatggtgctgcctctgcagacgaaacaccttcactaagcacacaaaatattgcttctactgagcgatcagcagagaatgcagctgttgttaggactgaacaacataaggcaaatttggaacttacgccaggcgtgaatggttctagaagttctcatggtgcagttgaggtggctggtgaaggcaaggctgtcaatgaaacattgccttctgctgtgggaggggaaacaggtaggttgggaccatcttttaatggcatcagtgagggaattaaagggcgcctaaataatgatggttctgcaccccatatttcaaaagttgaaagagaagagggtgaattatcgccaaacggagattttgatgaggaccattttgttccttttgaagatggaacatctaaaggaaaggaaggttctacaagcagatcattccagggtaggcatggggaagtggtgccatctgctgaggcagctggtgagaatgatgctgatgctgatgatgaaggtgaggaaagtgctcagaggtctactgaggacagtgaaaatgcttccgaggctggtgaagatgcgtcgggcagtgaatctggtgatggtgaggaatgctttcgtgaagaccacgatgaagaagaagaggatatggatcatgatgatcaggatacaaaagctgaaagtgagggcgaggcagaaggaacaactgagacacatgatgtggaaggaggaatatcactaccactttcagaacgctctctgtactcagtaaaaccacttgccaagcatgtacctacagctttacatgatcgagagaagttctcacgtatattttatggaaacgattcattttatgtcttgttcaggctacatcagatcttatatgagagactactttcagcaaaaactaactcttttaccgctgaaaagaaatggaggaattccaaggatacaaaccctcctgatctatatgcaaagtttatgagtgcgctttacaacttgctcgatggttcttctgacaacacaaaatttgaggacgactgccgagctattattgggactcaatcatatgttctctttactttagataaattgatttataaagttgtgaagcagcttcaagcaatagcaacagatgaaatggacaataagcttctgcagctatatttatatgaaaaatcaagatctcccgggaggttttttgacctagtttatcatgaaaatgcccgtgttctactgcatgatgagagcatataccgatttgaatgttgctcaagtccgacaaggttgtctattcagctgatggaatatggtcacgaaaagccagaagttaccgcagtatcaattgatccaaatttttcttcgtatctttttggcgagtatttatgtagtacgtcagacaagaaattatctgaaggcgtctaccttgcaaggaataagcggaaatattcagataatgatgaaccttcagattttttgaaggcaatggatggtatcaaagttgtgaatggtctcgaatgcaagatatcctgcaagacctctaaggtctcgtatgtcctagacactgaagatttcttgtcccggcttcggaagagaaggaaaattttgcggggtgggagtgtgtctgacagttcgcagttttcaaaaatatatgctgcaaaagtgcagcgcttcaataggttcctatccaaagcataggatcatttggcatacaaaatgtctcatcattgtatctaaacctggagatattgctgggaccccagttgctttgcttcttcagtgataatatgcaggagttggaagatggtgacgtcatcgacaattcgtcgcagaatgccctttttgaataacagatggggagatctatagggtaaatacagcaaaacgaagcgagcatgtaggccacagcagtcagctctgttgtgcggaaagatgtgtatatatgtattagcaacatgtttgttctgatgacctttttaatgcttttcgatggtaggtctgttccatcaagtatttaactaatcatcatttgttgcagttggtataggtcttctgttctttttttttttgccgtcgtttttcattgaggatgttgccaaaattaaaacctgtgtcaaacagttatgtagtcttgtcttggttaatcttacagacgccgtaatttctcagcctcttgagtgaggtgcttgtacaccctttcattaagcttttgaggcgtggttgacagcaat

SEQ ID NO: 31883 - DNA, 1841 bp, Zea mays
  Clone ID: UC-ZMFLB73226G12_FLI
acaaaactgaagccacattcatcatccctgatgtgaagaatttatcaacctcccgtgcttgcaaccttaacattatatttattagccgtgggcaagtaggacaaattattggtgaagatagctgttccgggaatgatgtggaaggatcttccctccaaaagcttgaagggaaatgttcctggggtaaaatgccgactaatttacttgcgccctctttggagaaatgtgtgactttaagtacaggaaatgctgtggatttgacttctacagttacaatgaacccaagcttcttagagccaaaatttctggaacaagacagttgcttgacattttgctctcataaggttgatgctacgggttcataccaattacaagtatgcatatccgcagaagaggctggcgcaagagaattacttttatctccttattattgcaattactcatataataatgtcccaccttctctattaccagaaatcataaggttgagagctggaaatgtactttttaattacaagtactacaacaatacaatgcaaaagactgaagttactgaagatttttcctgcccattttgcttggtaccatgtggaagcttcaagggcctaggatgccacttaaattcatcacatgacctgttccactatgagttgtggatatctgaagagtgccaggctgtgaatgttagtctgaaggctgatgcctggaaaactgagtttgtggcagagggagttgatccaaggcatcaaacattttcctactgctcgaggtttaagaagcgtagaaggttggaaaccacagctgagaaattcaggcatgttcacccacatattatggaatcaggatcacatgaagatgcccaggcagggtctgaagatgactatgtgcaaagggaaaatgggctttctgtagcaaatacttcagttgaccctagtcagcctgtacatgggagcaatctttcaccaccaacagtgctacagtttggaaagtcaagaaaactatctgccgagcgatctgaccccagaaaccgacaactgttgcaaaagcgtcagttcttccattcacacagggcacagccaatgccattggaacaagtcctctcagatcatgatagcgaagacgaggttgatgatgacattgccgactttgaggatagacggatgctcgacgattttgttgatgttacaaaagatgagaagcttattatgcatatgtggaattcatttgttcgaaagcaaagggtgctagccgatggtcatataccgtgggcatgcgaggcgttctccagatgccatggacaacagcttgtacaaaaccctgccctgctgtggggctggcgtttcttcatgattaaactctggaaccacagccttcttgacgcccgcgccatgaatgcttgcaacacaatccttcaaggctaccaagacggaagtgcggaccccaagtaaatctacaatccagagaaatcgttggccagcgtgtgtaagatctgccggttccggcggttatttctgaaccccaaaacagctatgtgaagaactggaatggggccatagcggcatttgttttaaggtttagggttactccatttttccaagggaggaaactaatttcccttggaaaaatgaaaatccattgggaaaaatgagtttcccaaactagccattaaaagggtagcttcctcccacctagggggaaaaaaactaggagggaaaagctggatccttggccgagacaatcatcattgcttcattcgtgattcggttgtatttatcggtaccagttgttgttggcatgtggagtttgtatggatgataatgataaatgaagtgattcactgc

SEQ ID NO: 31884 - DNA, 2214 bp, Zea mays
  Clone ID: UC-ZMFLB73226H03_FLI
gacagaggagggagacctcgcccggtcgctccacccctcgcccacatcacttcgtctctctggtcgcatcccaccccacacccctcctctcccatctccgctcgatctcccattcttcctcgtctccgccgccgtctgccccacctccaaccaacgcccaacgatcagtattccagaagcttccccggcaaccttcgtccccgtcccggatccggggcgcccctgatgcggtgcccgcgcggcgcgatcgcgtgacggacggccgccatggatcccccaggccgcggcgaccaaggcgaggcgccgcagccgcagccgctggagtggcggttcgctcaggtcttcggcgaacgtgccgcgggcgaagacgtccaggaagttgacatcatatctgcaattgaatttgacaaatctggtgaccatcttgccactggggataaaggaggacgtgtggttttatttgaaaggacagatgttcgggataatgccagccagagagaactggagagacaagatgttccagttactagacacccagagttccgctacaaaactgaatttcagagtcatgaacctgagtttgactacctcaaaagtttggaaatagaggaaaagatcaacaggatcaagtggtgccagacagccaacaatgctctctcccttttgtctacaaatgataaaacaataaaatactggaaggttcaagagaagaaagtaaaacgatttgcagtcatgaatttggacagttcccaaagtgcaggaagtagtaccactgctattgcaagtaccagtagttctaaggcacctcttccaaatggtggatgctctgatatgcttggttgcctgaataatgatctcacatttcctcctggaggctacccatcactgcgtttgccagttgttaccagtctagaagcaaaccctgttgctagatgtcgacgtgtatttgctcatgctcacgattaccatataaattctatttcaaataatagtgatggtgagacattcatatcagcagatgatctccgaataaatttatggaacttggaaataaacagccagagctttaacattgttgatgtgaagcctacaaacatggaagatctaacagaggtgattacatgtgcggagttccatccatcccattgtaatacactggcctatagtagttcaaagggttctatccgacttattgatctgcgtcaatcagcactgtgtgacaaccattcaaaaatatttgaggaacatgaagcacctggatcaagatccttctttacagaaattattgcatcaatttctgatataaagttttcaaggaatggcaaatatattcttagccgtgattatatgacgctcaagctatgggatctaaacatgaattcaggccctgtttcaaccttccaagtccatgaacatttaagacctaagctctgtgatctgtacgagaatgactcaattttcgacaagtttgagtgctgtcttagtggggatggacttcgtgttgcaactggttcttatggtaatatatttcgtgttttcggtcgtcctccgggaagcatagaggcaacaactttggaagcaagtaggaacccaatgaggcgtcagattgcaaatccagcaaggcccacacggacactaacttcttttgcccgtggtgttcggagaggtggagaaaatcaaggcgttgatgctaatgggaattcactcgacttctcaacgaagctgctccacctcgcatggcacccgaccgagaattctattgcatgtgctgctgcaaatagcttgtatatgtattatgcgtagagaatgccctacagaaaatttgttttttttgtggcttgctctcggcgaaggcccagggcccttcaactgcaaccagagagatggtgcaggacattgttgtcagttcaccccttggggccagaagccgctgatgtccacaagatcaccaatgctgtgctaacagactgcgccctgttgattctttagtacatgtgtaaattataattctaaacatgggaagttttgatccaaatattcaatcgtggcagttgtattgggagtcggtggaagggacatatcgaagataaaattctgtattggatttgcaggacatgcattgcaatggtgtagtatgactggcaatccttatcatgtaataccacctagacagggataatgttgtttaatgtcagaaaatgatagatatttccc

SEQ ID NO: 31885 - DNA, 1612 bp, Zea mays
  Clone ID: UC-ZMFLB73226H11_FLI
tacaggattaactacttattggagatgggtttgtctaagaaagatctgtgctcaatgatctctaggttttccccacttctaggttacagtatagaacttgttatgaaaccaaagcttgagtttctgctaagaaccatgaagaaaccacttaaagcagttgtagaatacccaaggtacttcagttattcacttgaggggaagatcaaaccgcgtttttggctattgcagagtagaaacatagactgcactctgacagagatgttagcaaagaacgatgaactctttgctgaagagtacttggaacttggaggattgctcgagaaacctgtacaatcaagcataggtggttaatttctggacttatttgaaccatgcagtgcactatgctgaagctgttcagctttatgcttggattggtgaggctgtttttcagatgggaggccacttttttttcctgaaaacgaaggagagctgtgtttctttgtattcaaatgtcgtggctctgataaccattgcagttgaatctcacgttggtaaaggtattaacactcttttctggaccgataaatggctgcttggttcctgtatcggagatgtggcgccagctgttcttgctatggtaccagcaaaaataattaaaacaagggctgtggctgacgcactctcaaacaacagttaggtatcaaatattaatggaggactgtccatgattggtctgttcaattttttcagctatgggatgccacacatgaagtttctttaaccattgatgatggtcgccatatctggagattctctggttcggttgaattctcggcgatatcggcctatagagtttcttccatggtttggtctcctttgatccttggaagcgtatttcaaaaacttgggctccacctaagtgcaagattttcatttggctagctgtccgaaatcgctgttggactgcagaccgattgccttggagaggactggcacacctagttcattacgttctttgcgacctggaagaggagaatattaatcacattttgttttcctgtgttttctcgagggttctggtttagagttttctcccggctggggtatatttattgaccatgtgttggggtcccaggagcaatcgtttgcagattggtggtgaaaggcttgcaaatatctcccaaaagaaagaaaaaaggaagggcatggattcaatgattatgttgcgaatatgtggagtgttctgcatgctctcgaagatgaacaacatctctggtgtcttgctgtaagagttttgttcttgtccggagtgcaagcacagcccctcacggctctgtccggagcgagggtaaagtttgtacgggaggccacttttccggtgcttagtatcaaaaaggtaatacttgttctcatgaaagtcacctaacggaagttacaggtgcaaatttagattgatgagtgatgttgttaactcaatacagcaatgcattgggtattgggaaggtgatgaagaaattagttttcgccatacgcctcagttttactaatgcttcgtttagatgtcgatattggaggtcatgtaattgaatttgtttgaataccaaattaatcatagtatagtattgaaatg

SEQ ID NO: 31886 - DNA, 936 bp, Zea mays
  Clone ID: UC-ZMFLB73226H12_FLI
ctcactcacaagtcacacagccacacttgaaccgctgcccgcagcggagggagcttgcacgggccaacgcacacataacacaagctcgtcgtcgatggcgcggtgggctgcggtgctggcgctggccgcggccacggccatcgccgtggcgtccgtggcgggcggcgacatgagcgcggacaagacggagtgcgcggaccagctggtgggcctggcgccgtgcctgcagtacgtgcaggggcaggcccgcgcgccgccgcccgactgctgcggcggcctgcgccaggtgctggggaagagccccaagtgcctgtgcgtgctcgtcaaggacaaggacgaccccaacctgggcatcaagatcaacgccaccctcgcgctcgcgctccccaacgcctgcggcgccacccgcgccaacgtctcccactgcgctcagctcctgcatattcccccgggctccaaagacgccgccgtcttcagccccggcggcgacaagggctccactgccgctccagccaaggacaactcgacggcgacgaccgactcccgcgcgctgcaggcgaccaccggacgcggcgtctcctcctcggcggcgaccgccggtgctgcactcgcggtgctgctcgccggctacctcctcctgctcgtgccagagctgtcgcctagctcgttctagaccctctgtcaagttgtgccaccagtaggatttgatgtgttgttgttctttctagtacgtgacgtgacagacaatttgctgctggtgtccttgttgttgtagtagttgcactgtgtgttcctgttatgctatgggtacgagatgttagggcatgggttaagctaagctaaggcgatggggtatcagcagtaccttacctctcatctggctgctgatcctttttgttcttggcactgctgttttatctgaacatttgatcagcc

SEQ ID NO: 31887 - DNA, 3300 bp, Zea mays
  Clone ID: UC-ZMFLB73227A02_FLI
atttttttcagcgatcaaaagaattgttacttcatggcccaagcatacatgataagctgatttttacttggaaagaatcttcagaacaactaatttgatgtgaaagaactgtttaagttctttttgccaaatttacgccaacctattctaccatccaaaatcaaaattattgagtgattctgctgctccagccaatatttccacagatctcaatatttctctccctacaagttaactgtgggcaacgaaactacccttctcgcctttatacttgatgaatttcaacatataaaccaccattgggctaaagttctaggtggtagatgctaagagtgacactggtccaccttttccagtcctcaaaatgatatgaaggtagcagcaattggctcttctcaaaactcacaattgaaggggccccctcttcgagagttaaaaggctgctacaatcttgtaagagaagccaccatctcaatctaagggcaacacaagtccaacagtgatgttgaacatatattcttattgaggacaaaatagtcctcacaaggcatatagatcaactggatcagctctcccatttaccacagtagattcaccacttaacactgaaaaaactaatcaaagagcccaaattttgcccatttgtttgacctttaacgagagcttgattttggcacatcaagatgtcaaataagaaaagaaactccaatttttagttcagtgttcaaatagtacctgcaatgtcattaatagaacaattcaaatttttgaagtaataaatgcaaatatctgaaaaaaactgagagctagataattctctagaagaacttccaaagttcagttggacaatggaagagctacagagaaggaaatacgcatatcaggctatggactctaagggaagaaagaaaaacataaatgtatattttttctaaaaaaggagtaaatgtagtacccaatgaattaaggttctcatcatgagttaagacttaagagcttactcaccgccacaatgtaactacaatattctgaaactatcactaacctgagtacctgaattcattgaaacaacaatacctcacccaacctaaagcccgtgattgccccaaactggagtcaaacaaataacagaatcaattcatgtccccaaagattgaactccaactataataatccttatatctgctttcaaggaagtgactattgcagaggccagatctcactaaacctgaagatgcagaagacatgtcggtgttcgaatttcatgcattaccatcaaagcaaaggacaacagtgttgtaccatttaacagattcagtacttctgcttctaaagaaaaaccgagtgtagaacttatgtgttctttgtccaatggaatttagatattttcaaaacagattgaagcatcaaaaggtaccttgaataatttaatggctgttggggtgccacagggagaaggtacgttcgaaaccttagatatagcataagtcatgtgcatgatatttttcttgtgagcatgtaacatgtaattctaggttattgcttctaaattatggctattcttgtttaagcttatatcaaaacaagaaagtgtgttcaacgaaatgataaatcctggcatcacagattgacaagtggagataaacgcgattcagatttgtaatatggatacatatttaccagtttcttctactgactaataaacaacaaaggagatacagaaaagaattactcaatcataagcttcaaggtcaaaatcatcagtcatgaatttcactcagatgtggattaaaaactaaatatccaaatgcttccacttgaaggttaaaaaatgcatgagctacagagtaagtaaactgggacaggaaacatgattcctcaaactgctagatgataattagtcatccatacagtcagataacttcagttgaagggtatagatatgaactgaactatagtaacataattttgaaaatggagaatggtcaactcaaagaagggtcataaaagaggcaatgatcaaaacagatggtaacagggagacacattgatgtatattgatcacctgggactaaggattgtttgacacacccaaacatgaacataacacgacaagttttggtacagccaacaactaagtgtcgcagatatgcgtatgttgcgttggatatgtgggcacacaagattggaccgagtgagaaacgatgacatacgcgatcggctaagagtagcgccaattgaagaaaagcttattcaacaccgattgagatggtttggatatgtccaccggagaccactagaggcaccggtgcatatagacaccataagatggacaataatgtgagagaggtagaggtcgaccaaacttgacatgggaggagccaatcaaaagggacttgaaagaatggaatataccaatgaagttgtgtttgaatagaagtgcttggaaagaagctacccacgtgcccgaaccgtgattaggcatttttccttatagtgctctaaaaagcttttcccctccactttctcactctctcttttgtaacatcttgttgtgtttcaactctagcctacctcaacttgcttgggactaaaagactatgttgatgatgttgatgttgtgtttcctatcctaaatgacataactcaagagcccccgagccaaaccaaggcagacctatgacctatgtctgtagaaactggagtttggtgatagatttgggtaaaatcaattcactgaaaatacataaagaggctgaaatgtgggattgtattcttttttatgatagaaagaacagggattttggtgatagagatgaagcgaacagctagaatacaaatcagacaatatgaggcgaaatgaagaaccaccaccgattaccgccacgctttcccacgcagaatcgatgtaccgtttcactcaaatcgcactaatcgacgaaatgaagacgacgaggagggaacagcgacccccaaatccccattactgcgactcagcagcgagaaccccaaccgggcgcaccgatcctgcaactccccctaaattccacgagcatccacccactacccacgcagggtaggctgtaccaggaagtgccgctaccgccgaatgcataggagtaccacgcggatttaagcagggctgggggccgaatcggaggggtataccttcgcggacggccaatcgtcggctcgaatcggcgctgcgaacgccctaccgcgatcggagagatagggccccggccttcttcacgcgagcacgcaaccgccctcgagagaggaggaatttgctcctggtgc

SEQ ID NO: 31888 - DNA, 1728 bp, Zea mays
  Clone ID: UC-ZMFLB73227B01_FLI
gcctaccctcaccaccgctcgccgcgccaccgtattctccaggacgagatgtctctcttctacccccgcctctcctacctacgagcaggggcagcacgaggaggagccatcgttggtcgttgtggggggcggcgcggcgggcgtgtacgcctccataagggccaagacccttgctccgcacctcaacgtcgcggttgtggagaaaggcaggttcttgtccaaggtcaagatctccggcggtggccgctgcaacgtaaccaatggccatcaccttgagcccatgggactggcgagaaattatccaagggggaacaaggagctccgaggatccttctttaccgctcacggtccgcaggataccatgcgctggttcacagatcacggtgtaaagcttaagacggaggacgatggcagagtcttccctgtcactgacaattcagcttcagttgtagactgtctactgaacgaagcaagaaggcttggggtttctctgcaggccggcaaaactgtgtctagtgcatctgttgctcaagacgggaagtttgttctcaaggtggagaagcgtactgccgatcttgttgattatatcaacgctaattacatcttggttgctacaggtagcagccaacatggctattcaatcgctgcacaactcggtcattccattattgcaccagttcccagcttgttcacatttaaaatcgcagacaagcggctggctgatctcgccggggttacatttccaatagtcaaagcaaaactgaagctagatggtgttcaaaaaagtgttcccgagttaactcagactgggcctatgttagtaacacactgggggcttagtgggcctgttgtgctgcgattgtcggcatggggagcacgtgagctacatcagtgcaactaccaaggaaatcttatggttgactttgtacctgatattcatatcgaggacgtgaagcgcgtcctattccactacaaagatcagcatgcgaagcacaaagtgagtaacacgttccccacggagtttggcctggtgaagagattttggagattcctgctagaacaggagagtttaaatggtgatacacactgggcctccatgccaaataatcatctaaacgcagtggccttccggttgaaacaatggacgtttgaggttgttggaaagggccaatttaaagatgaatttgtgactgcaggaggtgttccaattacagagatatcgcttggcactatggaaagcaagaaacagccaaacctgttctttgcaggagaggttcttaatgttgatggggtcacaggcggattcaattttcagaatgcatggaccggtgggtatatagctgggacaagcataggcacattggcatcgactagcaatctcccagagcagcagtcatgtttccagttgtaactgggagtttcagagaaggaaatggattgagttatgaaagagactcctcagatcatctgggaatgattcagggataccaacaagtttgcaatcaagataaggatattccaagatgaccaggatcagggagctacaattgctactgaattgtaacactaacctaagatggggtacatatgacaagaccgcacgattttggttacaatctaggtgtacaaagtgcaatctggaacgataatagttacaatcgagttaaacaagttgtgatttgtacttgaccgatcagagtgtgcatccagctatgattcttctgtctc

SEQ ID NO: 31889 - DNA, 693 bp, Zea mays
  Clone ID: UC-ZMFLB73229E03_FLI
gataaaagttagatttcttgtttggtgctcatgcatgggttccatatgttcttcccgtcttattagaacatatctattggactaccatgcataaaaagccgtcgtttcataaactattgggactatacggcaccaatgaagctattgatgctggccggcaagctgacagcgaggtgaaagcttttcaaaacgatattccgagtggaagagaaaagaaaataaaagaaatagcaggttattttagaaaaaaatagttggcccatatgtaacgcgcggtagctttaagattattatgtccagcagcttattcatatattatacatatattcaaatttcactctgtgaatagtagtctaaaatacagtagtgttttgagtaaactatggataaactgctggacaaggtctaagataagtgctgcgtggtggcaacaaacgacacttagtcttgtttggtggcaatgatattggaggggctaaagttttttcgctcctaaacaagctcctaaacaagctcctaagaatcttacgtgttatgttgcattatggaatatctatgtatctgcaaactctctgtagtctgtatgtacctcggatgtgctctatgtggctttgtaattctgaacggaggaagtaataataagataaatggatggcgtaacaagataagttgctttgtgcaatttgtgtttcc

SEQ ID NO: 31890 - DNA, 2118 bp, Zea mays
  Clone ID: UC-ZMFLB73229H01_FLI
aaggtaccttttgatatttagggcaatgctacgttaggtatagaatcaaagcagggtggagaaattggcgccaaacatctgacgttctatatgacaggagggtaccatagaagctaaaagacaagttttataggacaaaaactaaacctactatgttgtatggtgcataatgttggccatggtttttaaagcggtaaggcggtccaaggcgttggagcaccgcctggacgcctaggcggcgcctaggcgttagaccaccgcccggacgcctaggcgacgcctaggcgtcgcctaggtgacgccttaagaatagtggttggcctacaaaaacacattatgttcaacagataagtgttatagaaatgtgtatgctatgttggatttgtagccatacaagaagggatcgagtctggaaggatgatatatgtgataggttagggatagcataattgaagaaaagattgtctaacactgatcatttggacatgtctaacaaagacctctaaaagcacccgtacatagtgggtcctaaggcacgatagtaatatgaagagaggaagttgatatgagaagtaggaaagggatacctgaaaggatggagtatacccaaagaattagccttgaatagctgtgaatggaaaaaagctatccacacacttgaaccttgatttgtggcttttattgggtttcaactctagcctacccctacttgcttgagacagactttgttgatagacagctcatcggttattacaatattttcagcatattgacacaaagttatggaaaggtttcttagagctgcacaaaaaaggggaaaatacaacagcatgctcgtgatgctgataagctgattgtatgacaactgctgctgcataagcttccttagttgtgtttttatatcaatgaactgatgtttggtattacctggtttacactgaattgtaatattattactgctgagttatgtcttagaaccattccttttaactgtgatctctccatgaccatacacataccaacactgatacttgaggagaacattgtgcttcgttgttactattgaaagagaataaattatgcttttctgtataaactatagaatagtacgatgataaatagttgacttgattcgttcttcaccaatagagcattctatttattttcacttcagatctcttaattaattctgctgttgccactgaccatcagttctgtcgtatgtcagttgtttcataagaaagttttatagtttgtttggatctttcatgtgttttgttgctactatccttaggaccttaacaaccttgatcataagtatgcttaaaaatcagtgtgatcacatggttaggaatgtttcaccatgacattggaatcgttcataaataagaaaccatcagcattattctacctgggattctgtcttgatagctaatataaagatacgagctcccctgtgtgtaagaaaacaaaagctatatcattgagcattcactgtcatgtgtgttaattccaataacatgccttgtgaatttaatggtgtcctgtcgatgcattttttccatactataatttgaagtgcttcaatagcattttgtattttttataggtacaaaacttactcgagaaaccacagtatgatcatttgccactaattgaggctagcaggttatgcaatatggacatcatctctaaggtccaacaggtaatctgcttcgcgttccacgacagcaaactgctgatggaaacatgccaggaggccatgaaccttcggaagatcgtgacactcttctacttggattagctccggtagggatctagtctcctttttttttgggtccgtggcgtaggctaacgttggggggataaaaagcaagctgaacagtttagttagtttcggaatatattggataggtggtgcggtgaccttctattggaggagaaagtcattttgtttctcccattgttttgattcttgtcacaaagaaaccaataatcttgtcgatatgcctaattcgtcattgaagggaataagattattagctggagtatatttgttgttgacctcaaggattatagttagttcgtgctccagtttttccatctattttatgtccc

SEQ ID NO: 31891 - DNA, 1882 bp, Zea mays
  Clone ID: UC-ZMFLB73230A05_FLI
cggcctttctggcggcggagcgcctccggggctccgcctcccgctagccgccgtcgcggtgaagcccaagcgccggtcgtccagggtcgcacaggcgccgcctcagcccgaggccgggatccccggcacgcagacgatttacgtcaagacattcgggtgctcacataaccagagtgacagtgaatacatgtcaggtcagctctctgcatttggatatgcgatcactgaagatcctgaaggagccgatttgtggctaattaacacatgcacagtgaaaaatccaagtcaatctgcaatgacaaccctcatatctaaatgcaagaatgcgaacaagccacttgtagtggctggatgtgtaccccaaggaagccagggcctcaaggagcttgaaggtattagtataattggagttcaacagatagaccgggttgttgaagtggttgaggaaactttaaagggacacgaggttcgcttgttgagtcggaaaacattgccgtcacttgatttacctaaggtaagaaagaacaagtttattgagattcttcctattaatgtgggatgtttaggcgcctgcacatactgtaagacaaagcatgctcgtggccatttgggaagctatactattgacagcttggtggatcgtgtgaaaactgtcgtctccgaaggtgtccgggagatctggttgagcagcgaagatactggtgcttatggacgggatatcggtacaaatcttccaaatttgttaaatgcgatcgttgcggagcttcctgttgaccaaagcacaatgctccgcataggcatgacaaatcctcctttcatactagagcatttgaaggagatagctgccgttttgtgtcatccctgtgtttactctttcctccatgtccctgtgcaatctggaagcgattctgttttaaaggtatagtttaactcgaactcttgttctcataagctttttagcagcaaacgcacaacatgaataatctttgtctctaacttatatcctgtgccttcacctcgatctaactcagtctatgattgcacatataaggcaatgaatcgtgaatatactgttggcgagttcagaaaggtagtcgacactctgtgtgagcttgtccctggaatgcaaattgctacagatattatctgtggctttcctggtatgccaagcaagttctcagtttagcgattcgctctgagttatttttttatgagtacatctgaataatatttgattaattgaatgccacaaaagatgttgctgctaatagtttgcactgaaccgacatcccattttcaggtgagaccgacgaagatttctctgagactgttaacctcgtaaaggaatatcaattccctcaagtccacatttcgcagttctaccccagaccaggtaaattgttcttccccaagccgcaatgttctgtaaaactacaagtcgtggttgtcgatatccttttcgtacacatacatctacaacgtgatctttgtagggacgcctgctgctaggatgaagaaagtaccaagcaacgaagtgaagaagcggagccgtgaattgacttcagtcttcgaatcgttttcgccataccaaggaatggaaggcaaagtagagaagatctggatcaccgagattgcgtctgatggtgttcacctggtcggacataccaagggatacatccaggtgctggtaactgctcctgatagcatgttgggaacgtccgcggacgcgaagatcacgtctgtcggacgatggtccgtcttcggtgtagtggtagaaggatctgttgcagtcatagaagcaccaatacaaactagtgccgaactgcaggaggaacacgtacagaatcaggtggaggaagctggttgctgtgcccccgactcc

SEQ ID NO: 31892 - DNA, 1763 bp, Zea mays
  Clone ID: UC-ZMFLB73230B10_FLI
ctaatctacaatctaccaccagacactgtcgtcagtcgtccctcatcaaccgcgcgcgcgcgacttcaagcatcagactaccataatcatggctccgccgccggcaatgcagagcccaggagagctaaacgacggcgcctacgacgcgccgcacatcctattcatcccgagcgccggcataggacacctgacccccgtcttccgcgtcatcgccggcttctcgagccggggcatcgacgtctccgtcgtgaccgtgctgcccaccgtgtctgccgccgagactgactacttcaacggcctcttcgcggactaccccgccgtccgccgcgtcgacatgcacctattgccgctggacgcctccgaattcacgagagaggacccgttcttcctccggtgggaggccctgcgccgctccgtccacctcctccgccccatcatcactaacgccgcgccgcgcatcacggccatcatcaccgacatcaccctgacctcctgcgtcatccccatcgccaaggagctggacgtcccgtgccacgtcctcttccccacagccgccaccatgctctcgctcaacgcctactaccccgtctatctcgagaagctcaagggtggaccggagccgggcgtgatcggcgacgccgtcgacatccccggcgtgttccgcgtcccgcgctccgccctcccgccggcgctcctcgacgtgaacaagctcttcacgaagcagttcatcgacaacggcagagcgatcgtcaaagccgacggcgtcctcgtcaacacgttcgacgccgtggagccggcaccgctggcagccctgagaggcggcaagatcgtccccgggtacccgccggtgtacaccatcggcccactcaagtcgcacgccacgaaagcgggcgacaagccaggtgacgcgttgcttgacgaatggctaggtaagcagcgagcgcgatctgtggtgtacgtggcgttcggcaaccgcagcgctgccaggctggaccagatccgggagatcgccgccgggctggaggacagtggctatcctttcctgtgggtgctcaagaccacgaaggtggaccgggaggacgacgccgagctggcggaggtgcttggagacggataccttgagcgcgtgaaagggcgcggcatcgtgaccaaggggtgggtggagcaggaggagctgctgaaacacccggctgtgggcatgttcgtgagccacggcgggtggaactcggcgctggaggcgtcgtccgccggcgtgccgctgctggtgtggccgcagctcggcgaccaccgcgtgaacgcgatggcggcagtgagggcaggcatcggggcgtgggcggagcactggagctgggacggggaggacacgctggtgaccaggcaggagatcgccgacaaggtgaaggaggttatggccgacgggaagttgagggcgagcgtggcggtggcccgcgaggaggccgcaaaggccgtcgcggagggcggcacgagttaccgtaacatgcatgacttcatcgccaagcttaagggaggagcttgaggcttgaggagatgatgttacgaacgcaacaatcatgcactgcacgtccattcccaccattccgacgagtgaagtgactgctgttacactcagccgtaccactttggttctgggttttcatttcatgttcatgtgtcttctactactatatacaagcatattcagtgtcttatgtgaactaaagatgatttgaaatggagtcaaataatatatatgtaattagagt

SEQ ID NO: 31893 - DNA, 1070 bp, Zea mays
  Clone ID: UC-ZMFLB73230C10_FLI
gggcaagaaaatattcctattcctgctactaacttggttgatgatccacctgttcctccatctggtttcaagtacttgaaatctctacaaattccaaaggacatcaagattccgtctagtattattggctgtgattgtgaaggaggttgtgctagcaacaaaaaatgtttgtgtgctcagcgcaatggttctgatctgccttatgtatcatataagaacattggcaggttggtggagccgaaagcagttgtatttgaatgtggggctaactgcagctgcaaccatgattgtgtaaacagaacatctcaacaaggtttgcagtaccgcttagaggtatttaagacagcttcaaaaggatggggagtcaggacttgggacactatcctccctggggctcccatctgtgagtacacaggggtgttgaggaggaccgaagatttggatggttcacagaacaactattgttttgacattgactgtcttcaaaccatgaagggtttggatggaagggagaaaagggctggatccgaaatgcacctgcctaatcttcatcctgagaatgattcagatgcacaacctgcacctgagtactgcatagacgctcactctattggcaactttgcaagatttataaatcacagctgccaacctaaccttttcgtccagtgcgtcttgagctcacacaatgatgttaaactggcgaaagtgatgcttttcgctgctgacaccatacttcctcttcaggagctatcctatgactacggttatcgattggacagtgttgttgggcctgatggaaaaattgtgaagctggcctgccactgtggtgctcctgattgccggaagcgcctctactaacctgcagtgtgtttatttctatttggatttttgaggaaacagcttatattgtaggaaaaacagtcatggtacctatgtagttgacatgctcttgatcatatatagcaaaagaggagcaatttatggggtgttcggtttaagaatgagttagtatatcatcttctcatttactatttttgcttggtttatgtaataaaatgagtcgatctatc

SEQ ID NO: 31894 - DNA, 1339 bp, Zea mays
  Clone ID: UC-ZMFLB73230D02_FLI
agcgtgtcttgattttctcgataagttcaagacgccagtcgttactggtgatgaacctgacagagataccttaaaaatgatagcaagaacaactcttaggacaaagttgtatgaagggttggctgatcagttgactgatattgttgtgaatgcagttctgtgcattcgcaaaccagatgaaccaattgatctatttatggtggaaataatgcacatgcgccacaaatttgatgttgacacccgtctggttgagggtctggtcctggaccacggttctcgtcaccctgacatgaagcgcagggcagagaattgttacatcttgacctgcaatgtctcattagaatatgagaaaagtgaaatcaatgcaggatttttttactcaaacgcagaacaaagagagaagatggttgctgcagagagacgccaagttgatgaacgtgtcaaacagattattgaattgaaaaataaggtttgtgctggaggcgataaaaactttgtggtgatcaatcagaagggcattgaccctccatctctggatctccttgctagagcggggattattgctcttcgaagagcaaagaggagaaatatggagaggcttgtgctagcatgtggtggtgaagctgtcaattcagttgatgagttgactgaagattgtctaggctgggctggtcttgtctatgagcatgttcttggagaagaaaagtacacatttgtggagaatgtgaaaaatcctcgctcttgtactatactgattaaaggacctaatgaccataccattgcacaaatcaaggatgctgtccgggatggtctaagatctgttaagaacacagttgaggatgaagcagttgtgctgggtgctggtgcttttgaggttgctgcaaagaagcatcttatcgacaatgtgaagaaaaccgtcaaaggacgagcacaacttggggtggaggcatttgcggaagctcttcttgttatacccaagactttggctgagaactctggtttagatactcaagatgtgattgtttctctccagaatgagcatgaccgtggattagttgtggggttgaaccatcactctggggatccgattgatccccagatggaaggcatcttcgacaactactctgtgaagcgccagatcatcaattctggacccatcattgcatcccagttgctgcttgtggatgaagtgatcagggcaggccgcaacatgaggaaaccgacttagatatttgtcgccacctggccgagacttatttgttctaccttttgttttggttttgtgcctagtagtgatctggatgattacgtttatggtttgagttggtcccatttcacg

SEQ ID NO: 31895 - DNA, 1537 bp, Zea mays
  Clone ID: UC-ZMFLB73230D04_FLI
gcccattgtatgtctccactggatcagcggtgccatccccaagggcttcagcaacagctgctatggagatggctgcagcaatgggcttaatgcccggttccccatcatcggtttcagcggtgatgtccccatttacccctccaatgtccccttcgggcaatgggatgcccccttcattgggctggcagcagccaaatgttccaacattacaccttcctggcagcagccttcagtcaagcaggctccgaacgtcactcagtgcaagggatatgcctgctgatgactactccctgatgccggacttcgattcccaacttatgaatgatctatgctattcccgtctcggttcatccacagggaaccactctgcacggaccaagtccctgaatccatcaaacctggatgatctcttctctgccgaactggtatcatccccgaggtatagtaatggtgatcagggtgctatgttttcaccttctcacaaggctgctatcctgaatcagttccagcagcagcagcaagcactgctttctccaatcaacacaggagtttactctccaaaggctgtggacaacaagcagttaccttcacacccatctctgctgcatgcatcgcttgggatgccctcccctggccggatgtctccacgatgtgtcgaatcaggctccccgatgaactcccacctagctgctgctcttgcccagcgtgagaagcaacagcagacgatgagaagcctcagttctcgtgaccttgggcccagtgcggcacgagcttcagctctcggctcccctctaagcacatcatggtctaagtggggatctccttcaggggtaccagattggggcgtagatggtgaagaattgggtaagctccgccgctcatcgtcgttcgagctcaggtctggcggcgatgaccctgatctctcctgggtgcatacactggtcaaggaatctccgccagagaagcaagttactacgtccgaatcaattaattccgttggaccctcaccactaatgcctcccagcatgaacaacggcggcgaaggttctggcctgaacacccagctggatgggcgtgaccaagccgcggttttaggggcactgcttgaacagatgcagcttgatcagcagattggtagtctagcaacataggcgtgcaacgagcctggaaggtgtgagggtactatattcttatctactgaattccaagttcttttccccctgtcaattatggtattcaacaaagatggatagctgaaggtggtggctcagagattggtttttctttaattttggaggtaaatcatacgcattattgaggtcccagtaggttaaaagaatgaagttcctcgtctggggttgttccaaggccaacccaggtagaactgcaccccggcagcatcggtctcattgattgaagttctctgttttgttaattaacccctgttaagaaaaaaagaaggcgtgttcgccgtgtcggaattctttccttcctcccctagtgtttatttcaatatgatatcgatacctgatgtact

SEQ ID NO: 31896 - DNA, 1319 bp, Zea mays
  Clone ID: UC-ZMFLB73230D10_FLI
ctcgccctcccctctctttcttgcctccaggtccggccgtccgggcggcgccgggaggagagaatggcctccacggcgtcgccgccggtgttcgagagggtggccgggatccgagccattgccgagtccggccgcttcaaggcatggttgctggaccagtttggcgttcttcatgacgggaagaagccgtaccccggcgccattctggcattggagaagctagcggagaatggggcaaagatggtgataatcagcaattcctctaggcggtcatctgtgacaatgaagaagctcaagagcctggggttcgacacgtcctgtttcctcgcgaccatcaccagtggggagctcacacatcagcaccttcagaagagagacgacccatggtttgctgctcttggaaggaagtgtatccatatcacttgggacgatcgaggggcaatttctctcgagggccttggtttgcaagttgtgaacaatgttgatgatgcagagttcatattagcccacggtactgaagctcttggctcaccttctggtgttcctcttcccaaaagtcttgaggagcttgagcaggttctaatgcttggcatagaaaagcgacttccaatggtggtagctaatccagattatgtcactgtcgaagctcgagatctccgtgtcatgcctggcactctggcagctaaatatgagagtcttggtggtgaagtgaaatggatggggaagcctgataaggtgatctatacatcagcgatgtccctagcgggcgttgatgcccgtgaatgtatcatggtgggtgattcgctgcaccacgacatcaaaggagccaatgcgtcagggatggcatccgcgttcgtcactggaggggtccatgcggacgaacttggactcggtgaatttggagaaactgctggggaggatgctgtcagttcgctgtgcagcaagcacggatcgtacccttcttatgttctgccttcattcgcgtggtagagatgcggcctagaatttttttttgttttaggtgcacgggaaagtgattttaggcagatattgttgttatggaaataagtgccacgcaatgatcaagccgctggaggtgtcattcttcttaataaataataagtgacacgcaatgctcaagccgctggaggcagatttgtatttgcatttgtagtgtgtgtgtgtctatatatgctgcctgtggtgtatataccgcctgtgctgcaatgttcggttgagactttagacagcgatactgtatgaaggattcacattgttctgctcaattatgtaaacccgctctattacttttcgtggat

SEQ ID NO: 31897 - DNA, 2114 bp, Zea mays
  Clone ID: UC-ZMFLB73230D11_FLI
atttgcccttttcctcctgtagttccgctcatgtgcagcttcaggtccctgagttggctaacgtaccttttcttttttcctttcttgcgcaggtaaataaagcggttgggataagtttgtaaattgctttgtcaaaccaggacaaggttctgaatcaggggcaggcaacctctcgcgtagcctgttcatcttcatcagacaggcccaaggatatgtcgtcgtccaacaactctgtcagcgcggcgctgtcaggaacgacgcccgtgttccggctgagagtatggcagctgattgccatcgccgtcgggatagtcatggcgatcctgctcgtcattgcgttgtgcctttcgctgcggaggaaaaagaagacagtgaaagggttcgacaacacttcgctggccgagatcccgatcgtctccaaggagatcaacgtcgacagagtcgatgcgcagagcctacatgacggtgaagcgcccttcatgccggtgcaggataagtactcgcagaccaaaggcgcagggcagctgggagggcgtagatccgtcgacgtcgacgcgttcagccagtgcagctcggtgtacaacatagagaaggccgggagctcgtactccgaagattacagctacagcagctccggtccggctaggaaaggcagctcaccgtatgcgtattcagcgtcgccgctggttggcctgcctgagctgtcgcatctaggctggggccactggtttaccttgagggacctggagtgcgccacgaaccggtttgcgaagagcaatgttcttggggagggtggctacggagttgtctacaagggccgtctggtgaatgggactgagatcgccgtgaagaagatccttaataatgtggggcaggcagagaaggaattcagagttgaagttgaagccatcggtcatgttcggcacaagaatctggtccgccttctgggatattgcgtggaagggatacataggatgcttgtctacgagtatgttaataatggcaacctggaacaatggcttcatggcgtgaatcaacacggtgtccttagttgggaaaaccgtatgaaaattctccttggcactgcaaaagctctcgcgtaccttcatgaggccatagaccccaaagttgtgcacagagacatcaagtcaagtaatatcttaatcgacgatgaattcaacagcaaggtttctgattttgggttggctaaacttctgaattctgacaaaagtcatatcaatacaagagttatgggaacatatgggtatgtagcacctgagtacgcaaatagtgggatgctaaatgaaaaaagtgacatatacagttttggagtggtgttgttagaatgtgtgacagctagggatccagttgattacagtaagcctgcagatgaggtgaatctcatagagtggcttaagatgatggttaccagtaagagggcagaggaggtagtggatccaaacctcgatgttaagccaccaaaacgtgcccttaagcgggcaatcctggttggcttcaagtgcgttgatcctgatgctgacaagaggccaaagatgagtcacgttgtccagatgcttgaatccgttcagaacgcataccatcaagatcaaagaaagctcagccaggtgggaagcatagatatcgagtcgcagcagtcgctagaggagacttcaaacagtgctgatgcctgaacctctccgattctgaacaagcactggaatcatctgatagcaacattgaattgatcgttgctcggtactttatagagtgagtggatcaggcttacagtttgcatatactggaggaggaggtggttaaaatcaatcagtagcaagttgttcattccgtttttttacccatttttccgggtgtgcttctatactcccctaaaaggttcatctcttttacccttaggatatgtatagttttccttttgggagagcatagaagcaccttcatcttcttcttctttttcgtttgagttgccaggagcgactaacctcaggcatagtcactggatttcattacccgtgtgtagcggctttatggaaactcactgttaccctatatgaaaacatgaaatttcctgctgtgaagcgctgacatctgaatcc

SEQ ID NO: 31898 - DNA, 1627 bp, Zea mays
  Clone ID: UC-ZMFLB73230D12_FLI
ggactgggaagcagcggcggtacaaagtgtgggagagaaaggagaagagacttgatgtcctcgcagtttgtccaatagatctcctcgccgcctcacccgtctcctcctccgcagcttccccgcgatcccgaccatggagggcgacggtaccaaccttgatgcggcgatagagtcgctcctgaatgtcgagaagcagatgaggctggccggagatgtcgccggcactcggaaggccgtcatcgacatcgtcgagctctgctacaaggccggcgcgtggaagacgctaaacgaccagatcgttctcctatctaagaggagaggccagcttaagcaggctattactgctatggttcagaaagcaatggagtacattgatttgacaccaggcattgacacaagcatcgagctaataaaaacactgagcagtgtctctgctggcaaaatctatgttgagatagagagagcaagattgatcaaaaggcttgcaaaaattaaagaggagcagggacaaatttacgaggctgctgatttgatgcaagaagttgctgttgaaacatttggctctatggcaaagacggagaaaattgctttcattcttgagcaggtccggctatgcctggatcggcaagattttgtcagagcacaaattttatccaggaaaatcagtactagagtatttgacgcagatccatcaaaggaaaaaaagaaaccaaaggaaggtgacagtattgttcaggatgctcctgcagatattccttcccttctagaattgaagcgcgtctactacgaactgatgattcgttattactctcacaacaatgattacttggaaatctgccgttgttacaaggctatttatgatattccagcaataaaagaggatccaacaaagtggataccgattcttaggaagatctgttggtacttggtgctagcacctcatgatcctatgcaatcaagccttctcaatgctacactagaggataaaaacctttcagaaatcccaaatttcaggttattactgaagcagctggtcaccatggaggtgatacagtggacaagtctgtgggaattcttcaaggaggaatatgagaaggagaaggatcttcttgggggagctttgggtgccaaagcttcagaagatttgaggctgaggattatcgaacataatatcttggttgtatccaagtactatgcaagggttaccctcgagaggcttgctgatcttctttgcctgactttgcaggaggcagagaagcatctctcagacatggttaactcgaaatctctagtggcaaagatcgacaggccgatgggagttgtcagcttccggacgacccaagacagcaatggcacactgaactcatgggccacgagccttgagaagcttctggacctcgttgagaagagctgccacgagatacataaagagaccatgatccacaagacggcgttaaaagtttaactcttttggtttaggttttgaaacccgtgctgttcatgagttaccgtaacaggagggggggttttttgttgttgttgggcacggccagtgtccccgcaaatttgctttgactcgctgaatatttttcggattcctagatctgcaatcagatacctagtcctg

SEQ ID NO: 31899 - DNA, 604 bp, Zea mays
  Clone ID: UC-ZMFLB73230F01_FLI
cttctcggccatactctaaagggccgatgcctctgcctcccccaccagtctaggacggttgacttccacctcctcagcgtccggacgacaagaagtccttcgacatacccaaacctgctactgctgatcgtatcgccaacctctatgcataccgtaaagctcaaggcctctgctataagtgtggtctccagtactctcgaggacataaatgtgcagaaactgttcaacttcatctggtggaagaaatgtggcagttaatggatctttctgactctgatgacagtcatgatgttcctcctgcacaagtgaactctatcctcttgtcataagctgctgtggatggatccttagcgccgaaaactatcaagttcctcgggtctgtgcaaggcattgaagtattaattctgttggattccagcagttctcacacattcatcagtgcgtcagtggctgctcagcttcatggatgtacaacagtgcctcacaggttgtcagtacaagtagctgatggttctcgattgacatgtacctcagagctagtcaatgcagtctggtttcttaatgattatcaattttaatctacactgaaggtgttgtccctctc

SEQ ID NO: 31900 - DNA, 1577 bp, Zea mays
  Clone ID: UC-ZMFLB73230F06_FLI
gcccacacaaacgccaccgccgcatcgaatccgagacgccgatctcggattcgccgtcaccacacgctgccctcgtcgcgctctcccgccgccgccgctcgtctcgtcagccatggcaggattggcaccagaagggtcgcaatttgatgacaagcagtatgacaagaaaatgcaggagatattaactgaagacttcttcacttcatatgatgatgtttgtgaaagttttgacagcatgggactgcaagagaaccttctgagaggcatctatgcctatggttttgagaagccatcggctattcagcaaaggggaatagttcccttctgcaaggggcttgacgtgattcagcaagctcagtctggaactggaaaaacagctaccttctgttctggaatcttgcagcaacttgattatggattggttgaatgccaggcattggttcttgctccaacccgtgagcttgctcagcaaattgagaaggttatgcgtgctcttggggactatttgggtgtcaaagtgcatgcctgtgttggtggaacatctgttcgtgaggaccaaaggattcttgccagtggtgtgcatgttgttgtgggcacaccaggacgtgtgtttgatatgttgcgcaggcagtctctccgtcccgacaacatcaagatgtttgtgttggatgaggctgatgagatgctctcccgtggattcaaggatcagatctatgatatcttccagcttcttccatccaagattcaggtcggtgtcttctcagctaccatgccccctgaggcccttgagatcacgcgcaagttcatgaacaaacctgtgaggattctcgtcaagagagatgagctcacccttgagggtatcaagcaattctatgtcaatatcgacaaggaagattggaagctcgacactctgtgtgacctgtatgagaccctggcaatcacccagagtgtcatctttgtgaacacacgccgcaaggtggactggctcacggacaagatgaggagcagggaccacaccgtgtcagctacacacggtgatatggaccagaacaccagggacatcatcatgagggagttcaggtccgggtcctctcgtgtgctcatcaccaccgacctgctcgcccgtggtatcgacgtccagcaggtctcacttgtcatcaactacgacctgccgacccagccagagaactacctccaccgcatcggccgtagtggtcggtttggaaggaagggtgttgccatcaacttcgtcacccgcgacgacgagcgaatgctgtttgacatccagaggttctacaacgtgaccgttgaggagctgccggccaatgtcgccgaccttctctagatagtatggctgctaaggtttctggataaaggagtttgtttttgttaaaatacgccaacttttctctgctttggatgagtggtaaggtccggggtctgttcgtattgtggcgaaggatgggttttaagtttattttgtcgtatgcaacgtttcggaatttttgtagcgagtaggctacgtgccgctcctgggctagctgggtgctgagacactactgaagtatttttacctt

SEQ ID NO: 31901 - DNA, 897 bp, Zea mays
  Clone ID: UC-ZMFLB73230G02_FLI
agatctctctcggccccgtgcccagcgctccgaaaccctagcgccgccgcgggtgccaggccgcgagcgtcgccatgggcatcgtgtttacgcggctcttctcgtcggtcttcggtaaccgcgaggctcgcatcctcgtcctcggcctggacaatgctggcaagaccaccatactctatagactgcaaatgggagaggtcgtctccacgatcccgacaattggattcaacgttgagacggtgcagtacaacaacatcaagttccaagtatgggatcttggtggtcaaacaagcatcaggccatactggcggtgctactttccaaacacccaggctatcatatatgttgttgattcaagcgatacagataggcttgtaacagcaaaagaagaattccatgccatccttgaggaggatgaacttaaaggtgcagttgtccttgtgtatgcaaataagcaggatcttccaggtgcactcgatgatgctgccattacagagtcattagaactacacaaaattaagagccgccaatgggcgattttcaaaacatctgcaataaagggagaggggctcttcgaaggtttggactggctcagtaacacgctcaaatctggaagcagctaaggagcctccgcctcgtcatgaatcatttgctggatggtaaagaatagccgatgcttgcaagtcagcgcgcaaatcccattctctttgttttaactccagaagttctacaccgccatcaattatctgtaaagtgcgtgttaaattttttggatactacattagatgtacccccaggttgagatcaagaataggtctgtggaaaatgacgagcaaactgtgctactgtctttacccgtaaatctcatggatcatgacaagtttttttttgtacccc

SEQ ID NO: 31902 - DNA, 1499 bp, Zea mays
  Clone ID: UC-ZMFLB73232A01_FLI
gccgtgtgcatataggtcattgttgtcggattctcgtcagacatcggagctgctctaggggacacgaaggaacactgcagcctctaccacggtcctcgttggcacgctgcgatcgtgtacgttctggggttttggctccttgacttctccaacaacactgtgcagggtccagcacgtgctatgatggctgatctatgtgaccatcatgggccaagtgcggctaactccatcttctgttcttggatggcgctgggaaacatcctaggctactcctctggctccacgaacaattggcacaagtggtttcccttccttaaaacgagcgcctgctgtgaggcctgtgcgaacctgaaaggtgcatttctggtggccgtggtgttcctagtcctgtgcctgacggtaaccctgatcttcgccaaggaggtgccgtacagagcgaacgagaacctcccgacgacgaaggccggcggcgaggtcgagactgagcctaccgggccacttgccgtgctcaagggcttcaaggacctgcctcccgggatgccgtccgtgctcctcgtgactgccatcacctggctttcgtggttcccgttcatcctctacgacaccgactggatgggccgggagatctaccacggcgaccccaaggggagcaacgcccagatctcggcgttcaacgaaggtgtccgagtcggcgcgttcgggctgctactcaactcggttattctagggttcagctcgttcctgatcgagcccatgtgccggaaggtcgggccgagggtggtgtgggtgacgagcaacttcatggtctgcgtcgccatggcggccaccgcgctgatcagcttctggtcgctcagggactaccacgggtacgtgcaggacgccatcaccgcgaacgccagcatcaaggccgtctgcctcgtcctcttcgccttcctgggcgtccctctcgccatcctgtacagcgtcccgttcgcggtgacggcgcagctggcggccacccggggcggcgggcaggggctgtgcaccggcgtcctcaacatctccatcgtcatccctcaggtgatcatcgcgctgggcgccggcccgtgggacgcgctgttcgggaagggcaacatcccggcgttcggcgtcgcgtcggccttcgccctcgtcggcggcgtcgtgggcgtgttcctgctgcccaagatctccaagcgccagttccgggccgtcagcgcgggcggccactgatcgaacccggccggggccggccgccggcacgcagcccggcaagagctgtatgttgttgagagttgaacagaaaccatgcatgtgtgcttctgtagttctgttgtttgtggtcgatcgatgggcgttgcgtggcagcgtgggcaagcgaggcgaggtgcgcggatccaaaaaaaagggccattcgatcaatcaatgtgtagtagagtacaactagacgatgatgttcacatcatttgtctttaatacataccggtttctattgtctttac

SEQ ID NO: 31903 - DNA, 2469 bp, Zea mays
  Clone ID: UC-ZMFLB73232A07_FLI
cgcccactcctccggctcttcttctccaccggcaccagtccaccacctcccacctcctgccaccgcgcggccccaaccaaccacaccgcagcgcagcaatggcgggcaacggcgccatcgtggagagcgacccgctgaactggggcgcggcggcggcggagctggccgggagccacctggacgaggtgaagcgcatggtggcgcaggcccggcagcccgtggtcaagatcgagggttccaccctccgcgtcggccaggtggccgccgtcgcctccgccaaggacgcgtccggcgtcgccgtcgagctcgacgaggaggcccgcccccgcgtcaaggccagcagcgagtggatcctcgactgcatcgcccacggcggcgacatctacggcgtcaccaccggcttcggcggcacctcccaccgccgcaccaaggacgggcccgcgctccaggtcgagctgctcaggcatctcaacgccggaatcttcggcaccggcagcgacgggcacacgctgccgtcggaggtcacccgcgcggcgatgctggtgcgcatcaacaccctcctccagggctactccggcatccgcttcgagatcctcgaggccatcacgaagctgctcaacaccggtgtcagcccctgcctgccgctccggggcaccatcaccgcgtcgggcgacctggtcccgctctcctacatcgccggcctcatcacgggccgccccaacgcgcaggccgtcaccgtcgacgggaggaaggtggacgccgccgaggcgttcaagatcgccggcatcgagggcggcttcttcaagctcaaccccaaggagggcctcgccatcgtcaacggcacgtccgtgggctccgcgctcgcggccaccgtgatgtacgacgccaacgtcctggccgtcctgtcggaggtcctgtccgccgtcttctgcgaggtcatgaacggcaagcccgagtacacggaccacctgacccacaagctgaagcaccacccggggtccatcgaggccgcggccatcatggagcacatcctggatggcagctccttcatgaagcaggccaagaagttgaacgagctggacccgctgctgaagcccaagcaggacaggtacgcgctccgcacgtcgccgcagtggctgggcccccagatcgaggtcatccgcgccgccaccaagtccatcgagcgcgaggtcaactccgtgaacgacaacccggtcatcgacgtccaccgcggcaaggcgctgcacggcggcaacttccagggcacccccatcggcgtgtccatggacaacgcccgcctcgccatcgccaacatcggcaagctcatgttcgcgcagttctccgagctcgtcaacgagttctacaacaacgggctcacctccaacctggccggcagccgcaaccccagcctggactacggcttcaagggcaccgagatcgccatggcctcctactgctccgagctccagtacctgggcaaccccatcaccaaccacgtgcagagcgcggagcagcacaaccaggacgtgaactccctgggcctcgtctcggccaggaagaccgccgaggcgatcgacatcctgaagctcatgtcgtccacctacatcgtggcgctgtgccaggccgtggacctgcgccacctcgaggagaacatcaaggcgtcggtgaagaacaccgtgacccaggtggccaagaaggtgctgaccatgaacccctcgggcgagctctccagcgcccgcttcagcgagaaggagctgatcagcgccatcgaccgcgaggccgtgttcacgtacgcggaggacgcggccagcggcagcctgccgctgatgcagaagctgcgcgccgtgctggtggaccacgccctcagcagcggcgacgcggagcgggagccctccgtgttctccaagatcaccaggttcgaggaggagctccgcgcggtgctgccccaggaggtggaggccgcccgcgtggcggtcgccgagggcaccgcccccgtggcgaaccggatcgcggacagccggtcgttcccgctgtaccgcttcgtgcgcgaggagctcggctgcgtgttcctgaccggcgagaggctaaagtcccccggcgaggagtgcaacaaggtgttcgtcggcatcagccagggcaagctcgtggaccccatgctcgagtgcctcaaggagtgggacggcaagccgctgcccatcaacgtcaagtaaagaacgccaaggagaagaggagggaggggaggaaatacgtggaaaaaaaaataaaacctgtacacgtgtatgtccagatcgcgtgccgtcgatcgttcttcgttgttgatttttggttgtattgatcgatccgtatgtgtgcgtgcgtgtgtggcgttgctctttcttcttttgtgtagctgccctgccaccggccgacgtgcatgccatggtggcggacagcgttttctaaggtcatatactgttgttgtgtttaagt

SEQ ID NO: 31904 - DNA, 1121 bp, Zea mays
  Clone ID: UC-ZMFLB73232A09_FLI
cgccagaggcaaagagttcaagaaacctgagaagcccatcaaccataagggaaccaaggagcaggtgtccatgaagccaaggtctccaccacgtgaagggaagcatctggagaagccgtgcgagatcgtcgatgtcgagcagtatgaagctgtggctgaagcgctcaggaaatctgacgaagcggctgatgctaagggagcatcgctcaaagacgtgacgaggaatggagctgatgaagtggcgggccaagaacaagggcgagagcaggagcccgtggacgtggaggacgacgacgacggcgtgcgctgcgccgtgtgcgcgagcaccgacggcgacccgtcggaccccatcgtgttctgcgacgggtgcgacctcatggtgcacgcgtcctgctacggcaacccgctggcgcgggccatcccagacggcgactggttctgctcgccgtgcgtcgccgggaggggcaagccggcggcggcgcggcgccggagctgctgcctctgcccggccgggggcggcgccatgaagcgcacgacggaggggaagtgggcgcacatctcgtgcgcgctgctcgtgccggaggtgttcttccgggaccccgacgggcgcgacggcatcgactgctcccgcgtccccgcgcaccggttcgccaggggctgctacgtctgcgggggcaacaacaacgggtgcgccctcgagtgctcccagcccaagtgcggcctgggcttccacgtctcctgcggcctcggcgccggcctctgcatcgagtaccaggaggggaagggcggcggcggcgccatcgtcgccggcttctgcagagagcacaccgagctatgggagaagcaacaattgacaggcaagtacaagattgtggcgagaggacaagaatgatgatatgggagatggataaaattgggtgcctgaagatgcgcttgttgttattaggatttgttgtacgtaggagagtctcgtgtactatgttaacaatagtcgaataagttgctttttatttaattattttgcacattgtcctcaagatcacgatcagaaagtgtgctgttgtcggtaggttcatgcagaactaataagcttaataagatctccattggtattgtacttc

SEQ ID NO: 31905 - DNA, 1375 bp, Zea mays
  Clone ID: UC-ZMFLB73232B04_FLI
gaactcgtaaatcttgtgttcctgtgtggctgctttcgttagatctctcggctatgtctatatgatcgtcttggccagcatctctgggttcttttcgcggccgagaggaaacttactaactgatcgagtgtgccaggcatcaatctgtcgaatcgtgactcgtcgctttttcatgtcttcagattttgtccatctgtcaaatcatgtggaaaaattggcatatcttcttgtattctcttctgtcctttttaatgcctccagcggattaatttctagctagttccgttccattgatctgccttcagataatataacttaaattctcgctttcttatgcaagaactaaattacttgcatttcagctgagatctccagcatggggaggggaaggattgagatcaagaggatcgagaacaacacgagccggcaggtcaccttctgcaagcgccgcaatgggctcctcaagaaggcgtacgagctctccgtcctctgcgacgccgaggtggcgctcgtcgtcttctccagccgcggacgcctctacgagtacgccaacaacagtgtgaaggctacgatcgagaggtacaagaaggcacacgccgttggctcttcctctggccccccactcttagagcacaatgcccagcaattctaccagcaagaatccgcaaaactgcgcaaccagatccaaatgctgcaaaacactaacaggcacttggttggtgactctgtgggaaacttgtcactcaaagagctgaagcagctggagagccgccttgagaaaggcatctctaagatcagggccaggaagagtgagctgttggctgccgagatcaattacatggccaaaagggagactgagcttcagaatgaccacatgaacctcaggaccaagattgaggagggagagcaacagctgcagcaggtgactgtggcccagtctgtcgcagcagcagcggccaccgacgtggagctgaatccgttcttggagatggataccaaatgcttcttccctggcggccccttcgcgacactggacatgaagtgcttcttccccggcagcttgcagatgctggaggcacagcagcgccagatgcttgccaccgagctgaacctcggctaccaactggcgccgcctgacactgacgttgccaacaataaccctcagcagttctaaactggatccatgagaaagccaactgtgaccgatggaagctggctgttgcctctagatgatattggcttccataacctagcttattatggtgtgtattgttgccttttgtgtgtgattctccttactactgatggagaataaacctaatcgattgggcataatgatcaaatgctacagcacccgtgaggctgtgatcaggac

SEQ ID NO: 31906 - DNA, 1448 bp, Zea mays
  Clone ID: UC-ZMFLB73232D01_FLI
ctaaggagttatgcatcaattttatatcttatgctcccggataacttccaaatgattttacggggaaaaaagattgaccaccataacattatcaatgatctcatgctaaagaagcaacttacttataatccaacagtgggcgatggacttccaaaggatatgcatgtggcagctaaggtgacaattggttttgttaaggatgcgagacaacatattgatattcaagggtttaatgtttaccacaagaatcgcctaataaagcctttttggagagtatggacttctgctggagttgctggccgtggtatcataggtgtactggaagtaaattttgtagaaccagctcatgacaagcaggactttgaacgcacaaattgccttgcaagactcgaagcacgattaaaccgaatgcagaagaaatattggtctgataatcgccatcgaattggctatggaaccaatgatgctagcacagattctgtaaaaaggaaaacaggactgtcgttgcgtccatttggccaaggttcctggaagtcagggtatctgcaaacgatcagaagtgatggcagatcatgttctaatacaacaaataatattatgaatgcaagcatgtcatccccagaaacttccaagcttagtggtcccaatagagagttctcttcaacaacagtgtgccagcacagagctgaaaagtctgcaaataccataagatctgaaagatcagttttgcatggcttgtcaaatacagatggtggaaagactgagactgccaacgccccatccaaatcaacttcccctatcctaaggactagtttgccaccaactcccaatgaaggaaaacgaagtgagaggattgctgccaaataccaatcgaagcaagtaaatgcaacaactaatggagacagggaatccattgttgaccctgaagctatcatcaagaagttgaaggaagaaaattcatcgctaaaggagagaatcttgatggtgcaggaatcattatcaagggaactgcaaatcgagcgggataagaacaagtctctgaccgagaggtttgaggatgtggagaggcaactcgagttggcaattaaagagcaagaagcaacggtagaactctttgcagaagaaaggaagtgccacgaccaagaggtggaaaacctgaagcggaagctcacggaggcctcttccaccattcaggatctgatggagcagctcaatgctgcccggaactgctgcaagagatgaagcagcagacgaagcaacttcaccccccagtaatacgttagtacgtgtatgtcaccagcatgctcttagcataaataatgcccagatggttgtggagctgttagcagtagcagaccagaatgctctatgtatgtttcacgtcctgttgttagatgtgtggtagcaagtgtaagatgattgaatgagactaacgtgatgaattccct

SEQ ID NO: 31907 - DNA, 203 bp, Zea mays
  Clone ID: UC-ZMFLB73232D06_FLI
tgcctatgtttaatggcagcacccttgaatggcttccatctgatcagcctaaagagtaaacagtatacattattggacccagcacttgggggaatcaataggtggagttttctagttctttttcccgtttccactagaatcagcatagcgaaactattctgcttgttgaaagcaacggtggaggatctgcttgttgagttgtt

SEQ ID NO: 31908 - DNA, 1847 bp, Zea mays
  Clone ID: UC-ZMFLB73232F01_FLI
ctgttctggaagctccaagcgttggcgaaaaaagtaagatatttctgcgaggcaaggaatccctcccccgcttctactctttcggttcgccggttcgccgtctcgcacacccacttcctacaccgccaccgagcactcgctcagtttcatacccatcctcgaagtcgcctctgtctagttcctgctcttccaccaccgcctgtgatgtatccccgaggcccggatgggggacgagatgcctcgtctcgccctatgcttgccactcccgccggcaacgacacgcgcgaggaggatgagatcaccaccgcggaggctcatgtggagaaagacgccgcgcggatggacgctgccctcctcatgcggactacgcccaagatggacgagtttcacaccgggggcgatctggactcaagtggaagtggaagcggcatctcggggccaagcgcctccaaaagacagctacaaagaaggggatcgtggcggcaacgagtcagcaggtccagcatccatgcttatccttttcctttgtgtttctatttgatctgtttttttgcccgcgccagcaacagagaagaatgtggtcgtggctgtaatgggtcagcaggtacaccatccacgctcatcatttcctttgtgtttctgtttgatctatttttttaaaatttctttatcagtttgattagcatccacttgcatccgctcatagtttgattcgtgttcgttggatgggcctcaaaattaccagttgcttcgactacactctctgaatttcgcagatcaagataaaacccgacacaaaggaatgaatagcacacaaaaaatcacagtattatttagtcatattggacacgaataagttaaatttcttaaattttagatccacatttttgtattttggtctagactatcaaaaaaatcctagaaatgtccctctgcctctcgcgcgtgaattctcctctgccgaagggaagacactcaaaggcgagctactgatcttcaactgcttttctggattctctttgcaatatgctttgttggggctagatctgaaatcaatgtttttaataatctagcacaaataggaaatgttgcatgtgttgccgacagaaccatctcactctctctttagtttctgcaattttttggacgaccgagaggtgctgccgtttatgagtaactttccagtatgccacaacatcatggtcagagtttggacattgcatgaagcacttgctggacaattgagaagaactcatgcctacttgcaggcatcatctcaaccatacaatgggattcattgaaatatcaggagggttgttgtacacgtgagtggaggtcgaacccttcttgtagggctcttaatgtatgaagtacgccatgctagctattgaatcaagttcaatgggattcgttaaaatataaggagggttgttgtacaagtgagacaaggtcagcccttcttgcagggctcttaatataagcctgtactacacgttcatccacgtcgagctcgtcggctcccaacgcaaccccttcttctctcacgagatcagtggtgaggacgacactggggatagagacctagggttctccaagtgggcctagaaactccatggcaacgtctcaggtttcatgcagttctctaaatttattttgctcgattgtaagggaactgtgtcctctataagctcgcgctcgtgctgtaccgggagtaccccttcttcctgcaagtctggttcaattaaaaaattttgttctgtcgtgttgtaaagtacttggcgagctatgatatgtcattaccttagtgagaagactgcttctaatatattagtaatttttagctgtgc

SEQ ID NO: 31909 - DNA, 1450 bp, Zea mays
  Clone ID: UC-ZMFLB73232F03_FLI
ctcactccaccccgttaaaatcacgacgcggtggtgactggtgagtccacagtccacactccccactccattttctaccatcacactgacacgttcatagctagctagtcttcagctagtaacgtacgacggactaatctcgatctgggagcgaggaggaggacgacgataatgaagatgagctccgtgcccgcggcagcggcggtgatggtggtggtggtgctgctctctgcggcggcggcgactgtgacggggcaggcgcttgtgccgggcgtgatgatcttcggcgactcggtggttgacgcaggcaacaacaaccggctagcgacgctggtgcgcgccgacttcccgccctacggccgcgacttcccggcgacgcacgcgcccacggggcgcttctgcaacggcaagctcgccacggactacaccgtggagagcctggggctgagctcgtacccgccggcgtacctgagcgaggaggcgcagagcaacaacaagagcctcctccacggcgccaacttcgcgtccggcgccgccggctacctcgacgccaccgccgccctctacggcgccatgtcgctgagccggcaggcggggtacttccgggagtaccagtcgcgggtgggcgcgtcggccggccagcagcgcgcccgggagctgacgtccgggtccatctacgtggtgagcgccggcaccagcgactacgtgcagaactactacgtgaacccgatgctgagcgccgcctacacgcccgaccagttcgccgacgcgctcatgcagcccttcacctccttcgtcgagggcctgtacagcctgggcgcccgccggatcggcgtgacgtcgctgccgccgatggggtgtctcccggcgtccgtgaccctgttcggcggcgggaacgcgggctgcgtggagcgcctcaacaacgactccctcaccttcaaccggaagctcggcgtggccgcggacgccgtgaagcgcaggcaccccgacctcaagctcgtcgtcttcgacatctaccagccgctcctcgacctcgtccaaaaccccaccaacgccggattcttcgagtcccggcgggcgtgctgcggcacgggcacgatcgagacgtcggtgctgtgccaccagggggcgccggggacgtgcaccaacgccacgggctacgtcttctgggacggcttccaccccacggacgccgccaacaaggtgctcgccgacgcgctcctcctgcagggcctacagctcatcgcgtgagccacagccacgcaacggcctcccgccgcccttctacgtacctaccttgctgcttctgtcgttccgtcctgctactgtgtctcgtgtgcttgtctgtctgtctgtctgtccatgatctctcgtagctttgtgatgctttggaaagacttgggagtgctgtaagatttctggtctgtataattacattcagcgtcttccc

SEQ ID NO: 31910 - DNA, 1227 bp, Zea mays
  Clone ID: UC-ZMFLB73232F05_FLI
gcacaactccaccgctagcagcagccaacagactcccgtcgggatggccgtggcgctcctcctcctgctggtgacgcccgtcgggctgctcgccgcgctcgcgctcctcacgcggccccgggccgcgcgggtcccgctcaaaggccgccacgtcttcatcacgggcgggtccagcggcatcgggctcgccatggccacggccgcggcgcgggagggcgcgcgggtctccatcctggcccgcaacctcgcccgcctcgaggacgcgcgcgccgccatccagcgcgactcgggcagggacgacgtcggcgtccacgcggccgacgtgcgggacgccggcgccgtcgcgcgcgcgctccaggaggccggccccgtcgacgtcctcgtctgcaaccacggcgtgttcgtgccgcaggagctcgaggggcaggacgtggatgagatcaagtggatggtggacatcaacctcatgggcagcttccacctcatcaaggccgcgcttccggccatgaaggcgcgcacccgcgagacgcgcctccctggctccatcgccatcatgtcctcccaggccggccaggttggtatttatggttacactgcctactcagcgagcaagttcgctcttcgcggattgggtgaggcgttgcagcatgaggtcatcgcggacaacattcatgtctcgttgatattccctcctgacaccgagactccaggattggaagaggagcataagaggaggccggaattgacaaacatcatagcagggtcatccggtggaatgaaggccgacgatgttgccaagaaggctctggacggcatcaaatccgcaaaattcattgtcccctgtaatttcgagggcgcaatgttagccgtagccaccgctggtttatccccgcagagctccccgttaatggcattcctagaagtggttggcgctggactcatgcggtttgcggcaatttgtttccagtggaattggttctccaccatcgagagctattatgccaagaaaaagaagagcgagtgatagcacaaaccacagctggacattattttcctagatcccgtgagagtcaaaagaaacaaataagtcacgtctgacctaatgtaaatgtagcgtggtagtattagagaagttgaagctatcttctttttaatggtttttttcatcagatcatgtctacaatatcagattctgttaaaaacaatggttcgtgagattttgatgac

SEQ ID NO: 31911 - DNA, 1357 bp, Zea mays
  Clone ID: UC-ZMFLB73232H03_FLI
ggtccgtccgtccgtcgtcaccagcctcctccctcgcgcccaccgccgggatccgtccctcctcgtctgcgcccgcctcggtctagatttctgagaaaatggcgagaagtgcgggaactaggaggcgtgtggctcgccagctcaagtccacacatcccattccttcataccgatggaagtcaaagcccatgaaaaagccgatgaaaaaatccaaccgaaagcaagtgttgccaaccttgcaaaagatggactgggaagatgccaattgctctgtgtgcatggaatacccacataatgctgtgctcatcctttgctcatcccatgataagggttgtcgtccttatatgtgtggaactagctaccgccactctaattgcttggatcagttcaagaaagcttacaccaagggggcattgcttgaggaagttcctgcaaatagtgttggctctaatctggattcggcgccattggctgcagaaaaaactgactccattgaccttgcatgtccattgtgtcgtggcaaggtgaaagggtggacggtggtggaaccagctcgaagctacctcaatggaaaacgaagaacatgcatgcaggatggttgctcatttgtggggacctacaaggagctccgcaagcatgtcaagttggaacaccctcttgcaaagccaagggaagttgatcctgtccttgagcaaaaatggagattgctcgagattgaaagagagcggcaagatgcgctcagcacgatcacggcaacaatgggcagagccgttgtttttggtgattatgtgctagacttggaggatggaatggactccgaggatgttgacagtgatgctgataatgatggccgtgggacagaaaacactcgtaggatgctactatttattatgcgccaagttgctcaacatcaccaaaaccaaaggctccagaatgcgactggtgcatctgacaatgctgaggacaattatgtggtgagcagtggtgccaatggaaccacaccatactcttaccccttggagggggaggacgagaatggtatggttgtggccggaggcagaagcactgatgtgctgagaccagagaggaggcgccgtcgtcgccgcaggaaccgtgggagattgtttttaggtgctaattgagaggacaggtggccaggtagggtttagccgccagaggagtacatacagaaatgcttccctggtgcctggcattcatcaattcctgtctcaatttacttgatcatgatcatgtaccaagtagttatcttaacatcagctcattgtcataaatttatggtatctcacattcttcgttgaaaaaggaaaacaccgcatccatctcttgcggtttgtgt

SEQ ID NO: 31912 - DNA, 877 bp, Zea mays
  Clone ID: UC-ZMFLB73233D01_FLI
gggcgggggcgcgtataaatcccggtaaaattcccccgacgcgaggcctcaaatcgctctctgcccccgatcaccggtcgcctcccttccgctcccctgcctgcctaatccctccggccaccccgaaaccgctcgctcgctcgctcgctccccgcgcccagagacaagcccggagaccatggcggaccagctcactgacgaccaaatcgccgagttcaaggaggccttcagcctcttcgataaggacggcgacggttgcatcacaaccaaggagcttggaactgtcatgcgttcactgggtcagaacccaacggaggctgaactccaggacatgatcaatgaggtggatgccgacggcaatggcacgatcgacttccccgagttcctcaacctcatggcccgcaagatgaaggacaccgactccgaggaggagctcaaggaggcgttcagggtgttcgacaaggaccagaacggcttcatctctgccgcggagctccgccacgtgatgaccaacctaggcgagaagctgaccgacgaggaggtcgacgagatgatccgcgaggccgacgttgatggcgatggccagatcaactacgaggagttcgtcaaggtcatgatggccaagtgagtaaagcctgcggtaatggtatagtaaccccgctcggaaggaggaaaccgtgcgttgcatattagtaaggcaatgcaatgcagctcttgtttccttcttcccgtgaagaaaccgtactagctgtagctgctgaacgtttgagtccctctgctgccacccttatctccattgtgccgtcgaacctccttgcttcccctgtgtgaatctgtacggattttcgtgttctgaacactgattgcagttgaatcc

SEQ ID NO: 31913 - DNA, 712 bp, Zea mays
  Clone ID: UC-ZMFLB73233D02_FLI
ggatctagatgaaatcaacggggttcgatgcacgcaaacccctctttttttacttgaatgtgttctttatttatcagttagcaacggatctatgtttgttaatatggaagtactactaccatattaacaaacataatctgaaactaacatcaaatgaatctaaaattagcaacggattatgtttgttaatatggtagtagtacttccaattatattttgtagctatgcattcactaatttctacatctgtagctatccattccaattagcacagttgcctcagagtccgcttttagcacaagtggttgtgttcttagcgagcaccgcagccgacttactccagagatcttggaggcgcttatgtgctcacaagattggatgcgacgcaagtatctagatgcatctaatgctgaccaacctgaaacattttggacttgccttcaagagatgtaggaagggatgcagaagcttttactctgagcaacaagactggaattggaagagaagggtgcccttaagctccaacagcttagaagtcttatatattcaaatattaagtattgtgtattgaacaattagatttgaaggcatgattttgtccacagttttgtagaatcaatgctatgttttgtgtgatttgaaggcatgatattgccatttaatgttgaatattgttgaacatgtgataaaattatgttgggttcgatacatt

SEQ ID NO: 31914 - DNA, 869 bp, Zea mays
  Clone ID: UC-ZMFLB73233F10_FLI
tgttggggtagctagctagagagagcagcaggccagcacagcagcatggggaggtcgccgtgctgcgagaaggcgcacacgaacaagggcgcctggaccaaggaggaggaccagcggctcgtcgcctacatcaaggcccacggcgaaggctgctggaggtcgctccccaaggccgcgggcctgctgcgctgcggcaagagctgccgcctccggtggatcaactacctgcgccccgacctcaagcgcggcaacttcacccaggaggaggacgacgtcatcatcaagctccaccaggtcctcggaaacaagtggtcgctgatcgccgcccagctgccggggcggacggacaacgagatcaagaactactggaacacgcacatcaagcgcaagctcatcgcccggggcatcgacccacggacgcaccagccggcgagtgccgccgcagttgcccccgccgccgccgccgccgccgccgcgcaaagcagctttcgccaccatggcgacgactaggcggtggcgcggcgcagctgctcgcgagacagcggctgcatcgcggcgcacagcagcgacgacgacgacagcacgtccgggtccctgccacaccaacatgctgtcggcggcatcgacctcaacctctcgctaagcccaccgacgagccaaccgtcatcgccggccgccgccaagggagttgtagctagcggatatggccaagggagtgagagctagctgtacctcctctgcactgccacgatgatggttgtcaattgttgttagctcctcctcctcgtcttatgttcttccatgcaggccggaagatcctaaagagaacgtgtgcgtgcgtgtgagaattaaactcgtgtctgttgttc

SEQ ID NO: 31915 - DNA, 1665 bp, Zea mays
  Clone ID: UC-ZMFLB73233G11_FLI
gcggctatgcgggcttcgaccgtcattatttagcagcttctcctttgggttgcattcgaagttgtcgacttcggctgttgtcctcgttgcttgcacacagacgaaacttttctgcacactgcttcggttgaagccaggttagcttcgtccgctagtgaaaatgttcctggaacacacttgttcgtgccgaagcagcatgttaatcaggtgatcttcgacataagaggcccccaatagatgttttgtttagttttcagttttcaaaaattaaggtcggtttagatgccaatagatagcaatctatattatattgtgaacataaaccaggttaactcattgcccaaatagtaaattgtgggggtatcaatttgggttgcaagtagtcaacctatcaacactcatcaattagtttgtgtacattgagatcgaacttttgaaaatgaacctgcaactgacaatttgggctgcacgaaatcaacctatcaacgttcatcattggtttatgtacattgagattgaacttctgaaaatggcaaagatatgctgtctaatcagttttcataatccagtgcaatttgtaaatatagtacatattagtagcgaatgatgtgttctggaattacacacaaacctatcctcaaccatattatgcagctatagcaaaaaataattaaattcattttaagatgacacttagaatgacactcaaaataacggaattgataaaagtacaggtacaattaaacagtgcaatcttatgcaggattcaagcagcttgcaggctgtcataggttcatcattgaatctttagtagcttttcatttttttctgaaatatagaatgcatcatcgttttaacttcacacatatttttttcttatattttgtagcttgccatcagaatttgtttcatcatgctataaacaaaaaaattgctcaattcttaactggtaaagtaatgttttttacttgctacttgtgatatttaagcactagaatttgcaattatgttatttaagtaaaacaagaattgatttcaatattgataccttgtccttttcgcattaagcaaccatcctttattttcctagatactccttgaatgtctagtacctttttctatatcaatatcttttattatgaagggcatgtctagtaaagtggttagagctgtctcactaagtcaacaggtgccgtgtttgaggagtctctcctcatcgtctaggctctaggaggctttgaaagtgggtctatctaagattgtttatgatctgaccaggttgcacttgcatctgggaataaaaggaacattgaaaaagtcagaaatgctcaatttagtgttaatttgcccaatgttgtaactgtggatccgatgggtatggcactgaatgaagacaagttgcatcttaccaccgagtcacaagtaaaacttggcaaaatgctggcagaagcgtacattttgaacttctctacatcaacttgttaggtgaatacaagtgtctcaagatcttcaatccacaacaagtatatttgataaggtcgcctagtgacaagattactatgtgctcaagcacttaatcaatcgaagacattgtatctatcttatgtccgagaatacgctaaagtgcctcaattcttgtatagcatttcaaactcgcttcataac

SEQ ID NO: 31916 - DNA, 2117 bp, Zea mays
  Clone ID: UC-ZMFLB73233H01_FLI
tttccatctcgctataaacccttcacgccccggcgtccgcggctcgctcctgttcgcgccgccgactcgcctcgcgtcgcctcactagggtttgcagttcccgtcgcgggcgaaggcggcgtcgtctcgtggcggcgccgtctccgtgtgccttcccgctcccaagcaatggccttggaagatgggagcccagctacttttactccacaagtgattgctaatgcatttgtcaaacaatactatcaaactcttcgatatgccagagaggatgcctataaattctataatgacaaaagtattcttggtcgaacagattctaatgggaaaatgatttgtgtaaccacaattgatgatatcaaggagcaacttgtgtctacagattgtgctgactgtttgatagagatcgagactgttgatgcacagccatcccatgtggatggtgtgatcattttggttgctggatattttacaacggctgttgtgaaacagaagtttatacaatcattttttctcgctccacaggaaaatagtggctattatgttttgaatgatacattcagacttactgggatttcattcgaggtgaaggtagttgcagctaaccatgataacaaaagcacacaaattaccaccctgcccaatgagccagaaatagattcatttaaggagagtgaagtgccaggtgtaccacctgcaggaaacattctcgtcaatgatggagttatcagcacctctgcaaatgttgtttctccagttaagaatgaccctgttgttgagacatgtgtgaaagtggttaacgaggatgttgtgaagatacctgtagccgctccagcttcaactcctgttacagctgaggaagttgttaacaaggattttgtgaagattcctgagtctgctccggctctcccttcatcagttgagaaggctgctccagcacctcccgcatcagttgagaaggctgctgcagcacctcccgcatcagttgagaaaggtgctccagctcctcgcacaccagttgagaaggctgatccagctcctagtgcacctgttgagaaaggtgctccagctcttcgcgcaccagttgagaaggctgatccagctcctcgtgcaccagttgagaaggaagtaactaggaagacttatgcatcagttgttaaaatcccgagggaggacacacagcctgccccagctgccagaccctccaagcccaacctaaatataaagatggttcaaaatacggagaaaaatgtgtcctcaccatcgaaacctgctcatgctactgttaatgccctaccgggcgataagggtgttcctaaaaacaaatcacctgatgagccagggtactcaatttttgttaagaatttaccttttgaagcaactgttgaaatggtcgaacaagagttcagcaagtttggtgctattaaatctggtggtgtacaagtcaaatgccagcctgatcagttttgctttggctttgtcgaatttgagtctcagcaatccatgctagcagcaatcgaggcttctagggtttatttcggcacaagagaatcatatgttgaggagaaaagaactaaaacacgagttgttgatggtgttatcacccgtggggatgacaatggcaacggcggtggcggtcggttccattctggcagaggtggtggttactatggggacggctacaagcggcagtggggcggtcagaacaacggctactacaacggcgcggataacatgaggaacgactactcaggtcgtgtccgtggaccgcaagggaacggccaccctcagaacggccacggctaccatcagaacggccacggctactactctgggaatggctaccaacagcgacgccccaacagcaatgggaacggactgagggtcgagcgcaacaatggcttcaggcagcaaggccctgcatctgcctagaccttgtcatttttgcagtccatccttgatacgaaagcagtggggatattttgatgtctataggtagatactttgtcatggctgaattttgttgtcgcggttgataagagcaatcgtgcgtcctttgactggaactgtaatgaggagtggagtcagtcgtgtcgcaaaggggaaaaaaacatctatcg

SEQ ID NO: 31917 - DNA, 2109 bp, Zea mays
  Clone ID: UC-ZMFLB73234A03_FLI
gttcgggatgaaggttgagagcctgctctgaaacgacgtacgtaaagggagcaaggaaccggagagcgtgcggcgggcttctggattttagagtaggcacctgtcgcttggacgtgcttcggagaagtaggtgtccaaaagttgcttacagtggatccagatccttcgaacaacattgctcaagctcatgatatagactgtcatggaggcagctgcagatgaggagaggccactgattcagtacctggctccagaggatgatgaagcttcctcacgatacactagcgacggaacgctcgatatcaacaagcagcgtgctctgaagaagagcaccgggaactggagagcatgcttcatgattctgggtaccgagttcgccgaatgcctggcattttacgcgaccgcaaagaacctggtcacctacctcacggctgagcttggtgagaccaacatcgatgccgcgacgaacgtgtccacctggattggcagctgctacctcacgccgctcatcggcgccttcttggccgacacgtactggggaagatacaagacgatgatagtcttcctcttgctctacatcgttgggatgcttactctgacagcgtcggcgtggctccccttggccatggaggacgactcacctgacaacagcggacttcggcgtgccacagcgtacctggggctctacctcgtttccctaggcacaggaggcatcaagccctgcacggcggccctcggggccgaccagttcgacggcggcgacgcggcggagcgggtcaccaaggcctccttcttcaactggtactacttctgcaccaacatcggctccctgctgtcggggaccgtgctcgtctgggtgcaggaaaatattggatggggagtcgggtttacggtgcagacggtgttcatgctgttcggcctcgccgtgttcgtcgccggtcgcaaggtgtataggtacaagaagctgggcgggagccctctcacaagggtagcccaggtggttgtcgcagctgtgaggaactgccatctcgtgctgcctgatgatacgtcagccctgtaccacgataagcttctaccaactgaaccaaatttcaggattgagtctgccagacaattcagattctttgacaaggctgccataatcaccggcgagaagggtgcagcagcgccgacgagcccgtggagactgtgcacggtgtcccaggtggaggagctgaagatgctgctccggttgctgccggtctgggcatccatggtgctcttcttcgccgtcagtgcgcagacggtaaccacgttcattgagcaggctagggtgatggacaaccgcatcggcccgttcaccattcctccggcgtcgatagcgaccttcgacgtgatcagcgtcatggtctgcgtccccgtctacgacgccgtgctggtgcctctggcccggcgtgccactggcaacgaccgcggcctgtcgcagctgcaccggctctccatcgggatcgcgctgtccgtggtcgtcatggtgtacgcggcgctgctcgagggcaggcgcctggccctcgcgcgggccaacatgcccgccatgaacatcgcgtggcaggcacccatgttcgccgtgcacggcgcggcggcggtcttcgccaccgtcggcgtgctcgagttcttctacgaccagtcgccggacgggatgaagagcctcggcaacgcgctcgcgctgctctccatggcggccgggagctatttcaactcgcttgcgctcagcgctgtcgggtcgatcacggcgcgcggcggggaacgcgggtggctcccggacgacctgaacaagggtcatatggactatttcttctggatgatggccgctcttggaacgctcaacctgctgcacttcttgcactactgcaacagacgatacagaggcaacaacaacaacacttcttgacgtgtgctgtcatgctgtgtgcaccatgtttctcaaaatcatagtttgataatactatattttgtaattatcataataatactatagttttagccagctccaaaaatactaggttctaagaaacattgcttaaatacaacatcatggcgttaggagcttactcttgagtaagttctcgagtt

SEQ ID NO: 31918 - DNA, 1124 bp, Zea mays
  Clone ID: UC-ZMFLB73234C03_FLI
gggtttccgcgcctcttcttctgcgcccctctcctcccaaactgcggatagagcagcgagccatcgacacgatcgcgagcgcaagcacgtacgttgtcggaagctcaagttagaagaagcaccagtgcctgatcgatggcggcccaggctctcctctccggccggcagctgctgggccgccccgtgcagtcggccgtctctaggtcgtcggcgaggaaggcgcccttcgtcgtcagggccagctccagccctccagccaagcaaggtgccgacaggcagctgtggttcgcgtccaagcagtccctctcctacctcgatggcacgctgcccggcgactatggcttcgacccgctgggcctctcggacccggagggcaccgggggcttcatcgagcccaagtggctggcctatggcgaggtgatcaacggccgctacgccatgctgggcgcggtgggcgccatcgccccggagatcttcggcaagatgggcatcatccccccggagaccgcgctgccgtggttcaagacgggcgtcatcccgcccgcgggcacctacaactactgggccgactcctacacgctcttcgtcttcaacatggcgctcatgggcttcgccgagcaccgccgcctccaggactggtacaacccgggctccatgggcaagcagtacttcctcggcctcgagaagttcctcgccggctccggcgacccgtcctaccccggcgggcccctcttcaacccgctcggcttcggcaagaccgagaaggagatgaatgagctcaagctcaaggagatcaagaacggcaggctcgccatgctcgccatcctcggttacttcatccaggggctcgtcaccggcgtcggcccgttccagaacctgctcgaccacctcgccgaccccgtcaacaacaacgtgctcaccagcctcaagttccactagaacgtggtgcatcagcatacctgctgctgccgccgccgccgccagttgtttgctgtggaaagctagatgcatgcgtgttgtaaaggaacctgaagcgttgcatcggtcatgattcatgcatggccagcctgctgcctgtaacaacaaactagtattgatcttattgagaccggaaactgtattgc

SEQ ID NO: 31919 - DNA, 1414 bp, Zea mays
  Clone ID: UC-ZMFLB73234D12_FLI
ccccggcggctgccgaacctctgctccggcgactaggttcccgcctccccgactctgccccaagcgagcgcggcacgcgtgtcgccttggcttcctctcttctgcttcagtctcgcgccgccggtttctatcctgccgtcgcccggagctcatcgtgctgacctccagtgacgcgctgaagggatctgggaacttcgaggatgctttgctgtgctggccatcaggcgtcccttctcctcttcgctctgctctctgtctcctcccttctgctcgtcgacggatcccatcaggaccaggaattcggtgaagctgttggatccagaattcttcaaacaaatccagacgcacatgaggtgcattgctcaagggaaaggagccgtgcagcttgggaagctattgatgagtatttgatgcccttcgtggaaaaagaaaaatatgaactcccaagcaaatgtagacttcgtcctgataatgacatgtttcgggagcaagagcaacataagattcattttgatattaatgagtggcactgtggcttttgcaagaaagctttccgagcagagaagttcattgatcagcattttgaaaatcgccacaagaatcttgtggataatagtgaaggaagatgcatggcagatctatgcggcgcactacattgtgatctgatgatgcagttcaaaaaaccaaaaagtaaatgcaatgcagctgcagctacaaggaatcgtcatctttgtgagagccttgcagacagttgctttcctattaatcaaggtcttgctgccagccgtcttcatgaatttttcttgcgccagttttgtgatgctcacacttgcagtaagggaacaaaacctttccccaaaggtggcaggaaacaaacaaacaggttatacctcgctctctccattttgacgctgatacttttgccgctgttctatctaattgtgttcctgcaccagagggaaatgaggaaaggtacccaagatctaaaacggttttagaaaattgggcagaagaaaaagccatcctagtgtccaacagtcacaacgttctcgagctcatggagccaaggatgagctggataaggaacgtggtatgcagtgtgaaatgtttttatgggcagggaagaaatttccctcatttccaggacgggaacaatgtccgcaggtcgaggaatgctggcttcgaccttttcttttctttttctttcttttttgtttcgacatgtagatgcaaacttcgagaggcaagcatgtgtggtctttgtgagattacggcgatattctatatcgtcaaccataaccgaagtcctattgataatttaaggatttttgggaggcctcaggcttaaaaaccaatgtcagtgaatgtagtatgacttctatccaatgtaatgatcaatgtgttggtgaggcac

SEQ ID NO: 31920 - DNA, 1405 bp, Zea mays
  Clone ID: UC-ZMFLB73234E10_FLI
cgagagggccacacacaaaaaccccaatgcgagcgcccctggcttgtcggcgtcgcctccttcagccaaaaccctagcttgcatacgcgcccgaacaaagcttcgtctgcgaggggcgtcctcctgccgccagaagctttcaggagcatcagcgatggtgtggttccaatgcgaggactgtggcgagaacctcaagaagcccaaacttgccggccacttccgctcctgctccgcgtacaagctgtcatgcatcgattgcggcgagttattcagccacgacaccgtgcaggggcacacccagtgcatctccgaggccgagaagtacggtcctaagggacagaccaaaccatccaatggtgcacagggtaaggcagataagccaaagccaaatgcagatgtcgatatcaatgttgggctgtcgacacggcctccttggttctgtagcctatgcaagaccactaccacaagtaagcaaactctcttactacatgctgatgggaagaagcatagggcaaaggcgaaagccttccatgtgtctcagaaacaaaaagatggtgcagaacaaactccagatgtgaaggaagctggagttgtacccacaaaagaatctgctcaagtaaatggtggcgtgagtggtgatcatgaaagaaatgaagataaagatgctgggaaaaggaaacgaatggatgacatgaccatagagccaggtaacacaaaaagacagttgacacagtctggagatgagaagtcagaaaacaaagcgaagagtaaggccgatgaactagcaagtggtaccgactgcaaaagtgttcaaaagcaaaagatcaaatggaagaagattattactaaaacattgaaggcgaacgcagatggagttatgaagctaaagaagctacaaaagctagtctccaaggagcttcaggaatgtggtgtctccaaagacaaggaggagctccgtgctaccttgatggataaaatagcttcaagttccagattttatgttgatggcaagaatgttagactggtggccaagaatgaagaagaatcttagaaagaggttgtcagtcatttttttggcattgttgctggtttcattctttggtgtcaactttcagatggcttatagccaagtgttggttaaattgagtccatgaaccatcaattatatccatgacgtgtagacggtatgggaatttagcatctgaattttctcgacaaccgttcaaaagtgaaatgtttactctttatgctgtcaagcaatggcaatgatggttgatagtggcggcgtagtcgcaggggagagatgagagatgatacaaataatgttcattggatttgagtaagggagaagatgttatgtagtgctctgaaccatcgattttgatggtgtgataattctgggtgc

SEQ ID NO: 31921 - DNA, 1459 bp, Zea mays
  Clone ID: UC-ZMFLB73234F01_FLI
caaacagcaagcgaagcatcgccagattggtatatcgatcgattgatcggtggcggaggaaggggaggacggggggcagatggcggcgtgccggggcttcttcgagtgcctgctcaggctgctcaacttcatcctcaccgtcgccggcctcgctatggttggttacgggatctacctgctcgtcgagtggatgaagatatccgaggacggcatcggcggggcttcgacggcggaggtgctcgtctctggccggccgttgttgggggctgtcattctcggtgacagcttcctcgacaatctacccaaagcatggtttatttatttgtttatttgtgttggcaccatcgtcatcttggtgtctctgtttggctgcattggagcagggacaagaaacacctgctgtttgtgtttcgtatcctgttatgtgcctcttcggcgtcattatgttgtcctctctaaagaagattccatttgtcatgcacaagacactaaaaagtacttggaattatgctcaacattaattccagacgggatattattagttgctgaacatgtgaaccaacaaaattttgtttctgtgctactctgaacgctgatcttaattcttatagaacagcagtagcagaggcaataagattatcactatttctgcagcccaaaaaacgtttcgtccaaggcacttggcattttataatgatagggtcacagtattacacgcttgtttccttttacttgtaaacaagtatgctttcttggtcatattgttgatccttgctgaagctgcagctgctgcattcattttctttgaccatggctggaaagatgtaattccagtggacaaaacacataactttgatgttatgtatgactttctgaaggaaaactgggagattgcaagatgggtcgctctgggcgttgttgtttttgaggcagtgctcttgctgttagctctggctgtcagggcaatgaacaaacctgctgagtatgacagtgatgacgaaattatagcaattggccgaagccctaccatccggcagccactgatccatacccaaaatgttcctgccactggtgttcctgtcccaacacttgatcaacgtgcaagtagaaatgatgcctggagccaaaggatgcgagagaagtatggtctggacacgagccagttcacatacaacccttcagacccaagcaggtaccagcaaaatggcacgccacgggctgaagaaaggagtcgatgcactataatgtgaagaattcttcatgaggtcctacgagataatagactttcttgaaggggctactgtagtttggtgttaccagtgttgttcagactttacacagcggtgtgtggaatagaagaatcccgaccatattttttgtcacgctcgatatgacttctcagcaaatgctctatgcacctaattttactgtgaatgaggaactgctagccgttgacatc

SEQ ID NO: 31922 - DNA, 1612 bp, Zea mays
  Clone ID: UC-ZMFLB73234H09_FLI
ctcgttgactatattgcctcggccagtgggaaattttctgaggcaagcatgcaagagatcacaaaaatggtttctgcaaacctgttcaggacgctgagtactcctcctagagacaacaaagtggatggctttgatgtggatgaggaggagcctgtcatggaccctgcatggccacacttgcagattgtctatgagttgttcttgagattcattcagtctcaagagacagacgccaagttggctaaacggtacattgatcattcgtttgttctgaggctacttgacctctttgattcagaagaccctagggagagagagtacctcaagatgatacttcaccgtgtctatggaaagttcatggttcatcggccctatattcggaaagccattaacaacattttctatcagttcatctatgaaactgaaaaacacaatggaatcgcagagttattggagattttgggaagtatcatcaatgggtttgcattgccacttaaggaagagcataaattgttccttgttcgagctttaattccacttcacaagccaaagtgcatcgcgatgtatcatcagcaattatcttactgtatcacccagtttgtcgaaaaagattgcaaacttgcagatacagttatcagaggcctgctaaaatattggccaatcactaatagctccaaggaggtgctgtttctgggggagttggaagagatattggaagctacgcaacctgcagagtttcagaaatgcatggtccctctcttccgccagatcgcacgttgcctgaatagctcacactttcaggttgctgagcgggcgctatttttgtggaataacgaccacatcgagagtctgatcaaacaaaacagcagggttatattgcctatcatctttcctgcactggagagaaatgccagtgggcactggaaccaagctgtgcaaagcctcactctaaacgtccgaaaactgttctctgacaatgaccctggactattcacggagagtctgcggaaatacgaggaagagaaagcgagagagaaggaggttaagtcgaagcaagaggccacatggagacgccttgaagagatggcatcagcgaaagcgacaagcggcgcggcagttctcgtctctcgacccttatcccggcagtcttcggctgtgtagcgaattttcatgtggtggtcgtgagaacattgtacaggattgagttgtatatacgaggtatattaaggtgggcaaattgacaaatgatatcgtcggagaagccagccagatgggttacagggctaggcacacatcattttcttggtcccgaatctgggcttctgctaagatctacagctggtcgcggtatcatcattatgtttatccttgtcaggagttggctatgattcaattgttttcacctgctggtcctgcagtcttgccatgcatgggtatctgtttctggagacaaaaaatcggtggaagtcgatagaacttagagcctggaaacgagtcgtgctgttgttcttggagtctggaattgttgcgtttctttctagtacaattcatgtgttgtcatcattagaagttaaatcctttgtgctcatcatcatcatacgtatgtggatcc

SEQ ID NO: 31923 - DNA, 690 bp, Zea mays
  Clone ID: UC-ZMFLB73235A12_FLI
agcacaccatgtgatgcgggaggagcctgctgttccgcctctcatccccctacttcttccaagatgcaatcatgctgccccaagctcctcgggccctcggccgccatgattgcctcaccgcctctcaagagtcgcctccacctacttccaagaggaagaggccggagaagctatagtccgtgaagaaatcaagcggaggggcggcggtgtaggaggggccggcggaggagagagagggccgggggaggtgacagaaagctagagagagatgcatgatggagcatgatgatggcgtggttgatctcttcgatctagcacttctatcattcgagtcaagaagccatcatcagatcggtgcagtcctccctcctcctcctcctcctcctccttccagctcctctttatcagcttctctgtaacgctgcgccgccatggctttgggggaatcaagcgccttggtccgaagaaatccgtcttcttttcctagctaggatctacgtacttgtgcaagagtatgtcatgcatgctacgctatatgttattcctacatgttcttggtcgatctgtcgctacatatggtttgtgcagacatcaatactcgtctgtctttgattgatttgttttgacaccactctttgatccggagtttggttcatgtaatactatttcattagatatgtggatttcttc

SEQ ID NO: 31924 - DNA, 2983 bp, Zea mays
  Clone ID: UC-ZMFLB73235D08_FLI
cccaaactagcccttacaggaatttattttgtacaggcctcaacgagctagcctgagacaagaacactggaaccatggtttcaaaatcatattcaaatctgctagacatgaccccaggagatgggtttgactttcgacgaccttttaagtctcttcctcgtgttgtaacttctcctagcattatatctgaccatgattgggattccataagtgatggtgattcagttggttcagcattttctatcgagaggaaaataattgtcgccaacttccttccgctgaattgtacaagagatgaaaccggggaactgtccttctcattggatcatgattcactactcatgcaacttaaagatgggttttcaaatgagactgatgctgtgtatgtaggcagtttgaaggttcatgtagatcccagggagcaggaccaagttgcacagaagcttctcagagaatatcgatgcatacctacttttctcccatctgatctgcagcagcagttctatcatggcttctgtaaacaacagttatggccactttttcattatatgcttccaatttgccttgacaagggtgagttgtttgatcgcaccctgtttcaagcctatgtccgagccaacaaactttttgcagataaagttatggaagcaatcaatacagatgatgattatgtttgggttcatgattatcatctcatgctgctccctacattcttgaggaagaggttacaccgaataaagattggtttcttccttcacagcccttttccctcttcagaaatatacaggactctgcctgtaagggatgaaatcctgaagtcactgcttaatgctgatctgattggtttccaaacatttgactatgcccgccacttcctatcttgctgtagcagattgctaggcctgcattatgagtcaaaacgtggttacattggaatagagtattttggccgaacagtgagtttgaagatcctttctgtgggtgtccatgttggtcggcttgaatctgtcttaaagttgcctgctacagttagtaaggttgaagaaattgaacaaaggtataagggcaagatactcatgttaggtgtagatgacatggacatcttcaaaggaataagtctgaaattgcttgcactggagcttcttctggacagaaacccaaagcttagagagaaggttgtccttgtacagatcatcaatcccgcaagaagcacggggaaggatgtgcaggaagctatcacagaagctgtctctgtggctgaaagggttaacacaaagtatggttcttcaagttacaagcctgtcgtcctaattgataatcgcataccgttttatgaaaaggttgcattctatgccgcgtctgactgttgtattgtaaacgctgtgagggatggcatgaacttagtaccatatgagtatactgtttgccgacagggaaacgaggagatcgacagagtcagaggccttgacaaagacacccatcacacaagcacacttattgtttcggagtttgtgggttgctccccatctctgagtggtgctttcagggtaaatccttggagcgtcgatgatgtggcggatgccttgtgccgcgcaactgatctatctgaatctgagaaacggttgcggcacgaaaagcattatcgctatgtcagtactcatgatgttgcttactgggcgcacagctttgctcaagatctggaaagagcatgcagagaccattacagccgaaggtgttgggctattgggtttggcctgaatttcagagtcattgctctttctcctggcttcagaaagctttcttcggagcactttgtttcttcttataacagggcttctagaagggcaatatttctcgactacgacggcacacttgtgccccagtcgtcaatcaacaaggctccaagtgaagaagtcatctccattcttaacaccttgtgtaatgatccaaagaacgttgtgtttatcgtaagtggacgaggacgtgattccctcgacgagtggttttctccatgcgagaagctccgtctagccgcagaacatggctattttatcaggtggagcaaggaagctgcatgggagtcgagctattcgagtccgcggcaagaatggaagcacatcgctgaacctgtcatgcaggtatacaccgagacaacagacggatcttcagtcgagtcgaaggagagcgctctagtgtggcactatttggatgcagaccatgatttcggttccttccaagcgaaggagctaaaggatcatcttgagagggtgctatcaaatgagcccgttgttgtgaagtgtggccattatatcgtagaagtaaagccgcagggagttagcaagggtcgtgctgtcgacaagctgattcaagcactggccaacaacaacgggaaggcacaggatttcctgatgtgcgtcggcaacgacagatctgacgaggacatgttcgaatgcatcaacggtatggcctccaacgatgtctcatcgaccacagtaccggaggtgtttgcctgttcggtcggccagaagcccagcaaagcaaaatactatgtggacgacaccagcgaagtgatcagattgctcagggatgcaacccgcttctcatcgtcgcagcggagggaggacgtcaacgccagccgcgggcgtgtgaccttcagagacgcactcgattacgtggactaggcaccagcagcaattcttagttactcgaaatgattagctgcggagcttgtaaattccgctgtcttctgtctgccaatggttttcgttctagagaattgtagtgtagccgacatcgacatggatcgtcgtcaccgatacacgaacagcggaaatatgagttgaagttcgccgtttcgaggctcagaattggtacatttatagaattgtagtgtaggcaattttttggtagggaatagtaattggtacatttatagaattgtcaattgtttttcttctaccgctgataatactatagcttcgct

SEQ ID NO: 31925 - DNA, 2314 bp, Zea mays
  Clone ID: UC-ZMFLB73235D09_FLI
caacgtagaggggaccgaggaccgaggccctcggcgaaatccgtccacgcgctcccggctcccgcaccccactccccgtttttctccgcaccgccctgctccccgaccccaactgctgtctccttcctcgggtaatgcgaccgcgcgccagagcatgctccgcccggagcccgcgctagggttcctcgccgccggccccgcgcgcgcgtgcaagccgccgcccgagcgccgccgcaagaagcagccaccgacgcggcggaggcgaccggccagtgccgcaacggtggtgggactgggaccacgcggcgcggccgatccagatcccgcgcactcgtccgcgctgctgcctctcaccagcggcggcagcggcagcggctttgcctcgcggggcacggttgcgccagacgaggaagaggggagagacgaggcgagctcggctgaatcgcaggaagtggcagaagcagcaaacgattcgttctcctactcactaagagagtgccagaagcagcggcgtctcaagtcagagaggtctgcactggtgcggccaccggcctcgcatgagctcaataatgccggaggtattgagcttctagtgctctcgccgaggtgcttgattggtggtaacccgggaggaatgagcaagagctcaacgacatcatcccggagcagatcaggcacaggcacgttcccaagccctgggactccgagctgcaaccggcattgtgcaggcagcatgcagtactccaagggttggagttcagagcgcgtgccactgggcactggtaggaatagaaggtatgggggcagtggggttgtgcttccatttaacaatgggaggaagctgccatcgaaatgggaggatgcagagaagtggatcctaagtccggtttcctgtgatgggatggggaggatgtctgcaccagctccacatcatagacggcccaagtcgaagagtgggccacttggccatccagctggcattccaggggcttatgcggctgtttcaccgcttgttccttgctttgatggtgtgctggcagcagctaatttcgcagcacattcacctttctctgctggggttctcataccagagcacgggcgcattggcgacttcagcagtggaagagacagatgcggtgatgacggtagcagcagatcctactctgctgagaaagagtcctatatattaagatctgcaagcatacatgcatggacagaaacacttatggaggcatctgcttttgctaatatctcagaagaaaccgtacaagatgataaactgcaaggccagatagaagcaacttccatgatttccagtccaatcataaagaaagacatcggcacacagatgagtcctgaggatagtatatcttctccaaaagcaagacattcctgctccagtctgccttcaggacatctgataaaggaaccaaatagtcatatacctaaacctgaaattcgggacgtgcaggttgatgaccaagtaactgtgacccggtggtccaagcgacatgtaacacgaggctctgataagaggtcaacaaatattattgaatggaggaagaagaccactgaaacccgaactccatcttttgatgaaaaagaaagagaaagatgcatgtcacagtgcaaaagggaggaagcaaagatcacagcttgggaaaatctacagaaagcaaaagcagaggcagctattcggaagctggagatgaaacttgaaaagaaacggtcatcatcaatggacaaaattttaggcaaactccgctctgctcagaacaaagcacaagacatgcgaagtgtagtttcttctagtgaaggtcagtgtagtgtgagggcaaccaagaagacatcttcctctgtcaaaactggcaggcctttcagctgctgctttacctaccgtgcttgctagttgtgatacacagttggtgcctgtggctacagcaatggatatagttctactcgttatggacgcgaagggaagtcagttggggtttgactgcaaggcctaattgttaatgagatttgcactgatgaatgagatatcgttatggagcagcagacgaagccatcgagcaccgcgaaatccactcatgtaactgatggagtggactactgcagtctagtatgcgacgatcaatctctgtacacccggtagaaaaagttcatgagcttcatggcagttagaatcaggattgagctgatattcatcccgcttgatgtgtagctagctttcttgtaactggaattgtgtatgtaatgcaaatcatgggcgcattagactttaatgaagaaaaagtcagggctgcgcctttag

SEQ ID NO: 31926 - DNA, 628 bp, Zea mays
  Clone ID: UC-ZMFLB73235D10_FLI
gcgcggcatcaacaaggcactatcttctccgctcaatcatcaatggccatcccacactacagagcttggtactgacagatgctgatggccaaggcacattgtgcatgggggcaaagcagctggaggagttcagagagaaccagttgtcgacctcggcatgttccaacaggactcaggtcccagcctgcaatatggagcatacttgagcttcatgttgcaggctgggacctgaagctcaagtatgctccatatgttgaactgcctggtggtatggcgttgcaaggcgctactttggtggctatcaaaccctcacctgagggaagcaatggaagccaccctaaccgcaaggaagccgaaggattcgtctttggagcattcgatgggccatttaaagctgctgtgaaggcgctgatgaagagacgcacttaccttctggagatgaatggcttctaggaatcttggtatctagcttgttggtgctatgcatggtacatttagctgagtgtctcatatgtgtaatattcaagaaggcaccatctctagttttgatgcttgctgtctgctgttttagctatttgtacagtgttaacatttggttagataaagatcatatcaagtcctctagcgc

SEQ ID NO: 31927 - DNA, 1035 bp, Zea mays
  Clone ID: UC-ZMFLB73235F02_FLI
ggcggtggccgcttcttcttcagcaagaccacgcgtgccgaagccactgctgagcccgacaagaaggccgccggcggggacaccgttgccgcgccggcgttctcgcggccctcgaccgccggcagcggcggccgcgggtacgggctctacggccgcctcgaggagaagtacccggcggactacttccgccgtggcgtgcaccgcaacaccgagaagctgacgacgacgaccggcggcgagcgcgtccggacgacgttccccgaagacagcggcaggggtcggccgcccaccgacgtgccgggcgccaccgaggaagaggggggaggcgccggaggagacctcgagggcgtccggccgtacccggaaaacggcagcggcaggggccgcccgccgtggtactacacggccttccaccgcggcaggcagcaggagcaggagcagcgggacttcgggatgagcgacacgaggctgtaccagaacggccgctactactacgacgtggacgccggcaggtacggctacggccgcgagtcgaaccccatgcggacgcgccccgacgagggagagttcggctccgggtacggccgaccccgcggccccgccggtggcaggcgcggcagtagctacggcgacgcggcgggttaccagcagcggtacggcaacgacgaggagttcggggacggagccatggatcagaacacgaacggcgccttccaggaggaagcaggccaaaacggacgacgatacactccatgagcttgcatcgtgtgtcatgcgtcagagatacactcagtcgtcgtcgtgtgttgctagcgtggttactatcgtgtgctccatctccgagtaatctcccatgggtcgatgcgattgagtacttgtaacttaatcgtgggcagaaccagctgcctgcctggtttcgcggacgtctacgcgcaccactggtgacacaagcaatgagtgaataaggtgtgtgtgtgactgtgtgtgtacaatgtaaactgtattgcagataaaaatgtcactatatatccacct

SEQ ID NO: 31928 - DNA, 478 bp, Zea mays
  Clone ID: UC-ZMFLB73236B02_FLI
gataaacccaggaagagtgagacaccgatgatggttcaatgactacatcaacactagcttctcatcaccacccgccgtcgccctcattgtagcagtactccttgacaacacacttgatgtgagagatgcagcaagggaccgaggaatgccatggtgggcgcggttcaggacattccgtggcgacagcaggaacgaagagttctacactttgcctttcaacctcaacagattctttccaccgacttaagccaaattgccattgagaacacgctgcatgtcaagtggtccactcaagcaagcattgcctaacaatgaggtctgcttctgatagagtagaacaacaaaaggctcgacaaaggaagaactaattccctgttaccaatcgattgtacataaaacaaaactgtttaggttgaccaccggtgtcgaatcagaatgccatattttgatgtaatatgagtttagagatcttatgaac

SEQ ID NO: 31929 - DNA, 613 bp, Zea mays
  Clone ID: UC-ZMFLB73236C09_FLI
ttgggacgacgttgaggacgagggcgatgacgtggtcggcctcctccactctgtggagacaaccaaggcggtcgcggtggcggtcgctagcatgcaaccccactgagtcgagctcatacggcagctcgacgcctcctgtgagacacgccgccacgagccgccttctccacccacatctgcacgcgcaacacaaatctcgtcgtcggcagcttccacaccgccactatggcagccagtaggagggccagcgacagccgcgtcgccgttattcctctgaccctcttgctgatcgagagaggtggctgagagaggtggaccggccgaccggatgagcttgtggctagctggaggaagaggtgaggagatgtatgatctgaatgggagtgggtagtggtggtggcctggcgacggacagcagtgcagagtgacgaccttgctgctgttgtgtcatggcgagagtgctttagtagcttctttatttgttttgaccagtctataaaataaacaaagaatcattagcaattatgtaaccacttgcttgtggattgtggtaattatgtcatatacgataaaacctgttagatatgtcacatatatgcttgttgcttgaaat

SEQ ID NO: 31930 - DNA, 1586 bp, Zea mays
  Clone ID: UC-ZMFLB73236D07_FLI
ccttgtccgtcttctgccgtgccgctttcgatcaggagtgtgttccgcggactgctgacaagagattggtcaggcaggtctctgcagagtgcaggggccttccactggctctgaaggttattggtgcgtcattgcgcgaccagcctcctaagatctggctcagcgccaagaaccggctgtctcgaggagaggctatttccgactcccatgagaccaagcttctagagaggatggcggcaagtgtcgagtgcttgtcggagaaggtcagagactgcttccttgatctgggatgcttcccggaggacaagaagatcccccttgatgtcttgatcaacatctggatggaggttcatgatcttgatgaaccagatgctttcgccatcttggttgagctttcgaacaagaaccttcttaccctcgttaacgatgcacagaacaaggctggagatttgtacagcagctaccatgactactcggtgacacagcatgatgtgctgagagatcttgctcttcacatgagtgggcgtgaccctctgaacaagcgtaggcggttggtgatgccgagaagagaagagacacttccaaaggactggcagaggaataaggataccccgtttgaagctcagatagtttccattcatacaggtgaaatgaagggatctgactggttccagatgaacttccccaaggcagaagtgctcatcctcaacttcgcctcaagcctgtactacctcccgccgttcatcgcgtcgatgcagaacctgaaagccctggtgctgatcaactacggcaccagcagcgcggcccttgacaacctatccgccttcaccacgctgaacggcctgaggagtctctggctggagaagatcaggctcccgccgctgccgaagaccaccatcccgctgaagaacctgcacaagatctcgctcgtcctctgcgagctgaacagcagcctgagagggtcgacgatggacctgtccatgacattcccgcgcctctccaacctcacgatcgaccactgcatagacctaaaggagctgccagcaagcatctgcgagatcggctccctggagaccgtctccatctccaactgccacgacctcaccgagctgccatacgagctgggcaagctgcactgcctcagcatcctccgggtgtacgcctgcccggcgctgtggcggctcccggcgtcggtgtgcagcctgaagaggctcaagtacctcgacatatcccagtgcatcaacctgacggacctcccggaggagctcggacacctgacgagcctcgagaagatcgacatgcgggagtgctcgcgcctgaggagcctcccgaggtcgtcgtcctccctcaagtccctcggccacgtcgtgtgcgacgaggagacggcgctgctgtggcgggaggccgagcaggtcatccctgacctccgggtgcaggtggccgaagagtgctacaacctggactggctagcggactgatgtcagattctggatgctaccgcttccaaactgaccatgtacatatatgatgataacgatgatgtttagatgttgcttcccctgtgtagtgcagggaagagaatcatc

SEQ ID NO: 31931 - DNA, 1626 bp, Zea mays
  Clone ID: UC-ZMFLB73236F04_FLI
cgcctacctccgcggctcaaacctttcccccttctcccaattccttccgccggccgccgctccacccgtacgacgacaccatgagggagtgcatttcgatccacatcggccaggccggtatccaggtcggaaacgcgtgctgggagctgtactgccttgagcatggcattcaggctgacggtcagatgcccggtgacaagaccattgggggaggtgatgatgctttcaacaccttcttcagtgagactggtgctgggaagcacgtgccccgtgctgtttttgttgaccttgaacccactgtcatcgatgaggtgagaactggcacctaccgccagctcttccaccctgagcagctcatcagtgggaaggaggatgcagccaacaactttgcccgtggtcactacaccattggcaaggagattgttgacctgtgccttgatcgcatcaggaagcttgccgacaactgcactggtctccagggcttcctcgtcttcaacgctgttggtggaggaacgggctctggccttggttccctcctcctagagcgcctgtctgttgactacggcaagaaatccaagcttgggttcactgtgtacccttccccccaagtttctacttcggtagttgagccatacaacagtgtactgtccacccactccctcctcgagcacactgatgtggctatactgctggacaatgaggccatctacgacatctgccgccgatcccttgacattgagcgcccaacctacaccaacctcaacaggcttgtgtcccaggtcatctcatcccttactgcctccctgaggttcgatggtgctctgaacgtggatgttaacgagttccagaccaacctggtaccctacccgaggatccacttcatgctttcttcgtacgctccagtcatctctgctgagaaggcctaccacgagcagctctctgtggctgagatcaccaacagtgccttcgagccatcttccatgatggccaagtgcgacccacgccatggcaagtacatggcctgctgcctcatgtaccgtggtgatgtggtccccaaggatgtgaatgctgctgtggccaccatcaagaccaaacgcaccatccagttcgtggattggtgcccgactggcttcaagtgcggcatcaactaccagcctcctagcgttgtgcctggtggcgacctggccaaggtgcagcgtgccgtgtgcatgatctccaactccaccagtgttgtggaggtgttctcccgcatcgaccacaagttcgacctcatgtacgccaagcgtgccttcgtgcactggtacgtcggtgagggtatggaggaaggtgagttctctgaggcccgtgaggacctggcggcgctcgagaaggactacgaggaggtcggtgctgagttcgatgagggcgaggatggcgacgagggtgacgagtactagagaagtttgctgatgacgcagcatcaggccagtgtgctgcccttatcccgtgatctgccgagagttgctcctgctatcgtgttatgtgtgtctgttctgaagtattgtgtggtttacaacacctgatgttgtaagagttgttaattcccctgcattgctaccgggttattgagaataattatggctgttt

SEQ ID NO: 31932 - DNA, 1290 bp, Zea mays
  Clone ID: UC-ZMFLB73236G04_FLI
gcagcatggagtttcaatgtcaccacatcggttggactcatcatggtcaacaaggccttgatggctacgtatgggttcagtttcgccacaacattaaccgggcttcattttgtgactactaccttgatgactatcttatttcgttggttaggcctgagtcagccatcccacttacccctagcagatctagttaaatttgtgatattttcgaacttgtcaattgttgggatgaatgtgagcttgatgtggaactctgttggcttttatcagatagcaaagctgtgcatgatacctgcatcatgtcttctggaggttgtatttgatcatgtacattattcccgggacacaaagctgagcataatggtcgtgcttataggagttgcagtctgcacggttactgatgtcagtgtgaatgcaagaggtctaattgctgctgttatagctgtttggagcacagctttgcaacaatactatgtccattttctccaacgcaagtactccctgaactcattcaacctcctgggccacacagctccagcccaagctgggtcactgctgctagtgggaccatttgcggattacttgttgacaggcaaaagggtggatcagttcagtttgtcatcgcttgctctgtttttcctggcactctcatgcttcatcgccattggtgttaatctgagccaattcatctgcatcgggcggttctctgccgtatccttccaagtcctaggccacatgaagaccgtacttgttctgtcccttgggttccttttctttggcaaggagggcctgaaccttcaggtagtccttgggatggtcctggccgttctcggaatgatatggtacgggaacgcgtctgctaaaccaggtggcaaagagcggcgcagcatcctgccggtgaggtctgcgagtctcaagggaagttccgaagaaaaggccggtgccgagaaatagtcttgctatatctgactgcaaactttttatttagatggggaatttttcgttccgaaggttaaatttctggtgaggtgacgcgagtatcacagattgggagctctgcattatgtctgacgcgcacaaaacaaacgcgtcccttgtagagactctggattgttatagttacaggtatactgtaaagcttcatttttttttggcgctctgaatcgtttgcagtgagggggaaagacggacatggtttacggcccgttcggttcttccggaaccgtagcctggaatggttcctagctcaattgtttacctaatttatataagttttgatcaacccgaatg

SEQ ID NO: 31933 - DNA, 1460 bp, Zea mays
  Clone ID: UC-ZMFLB73236G10_FLI
cccacacgtccgatcggccaaggctgattctgtcagaaacttgccgaaaacccttggttcaatgagagatgggagagtctcgtttcaattgcaacacacgggagaaatctacattagtcaagggtgcaatgtgacgcaaacagtcttcaacgggattaatgtgcttgctggtgttggccttctttccactccgtttacaattcatgaagctggatggactggccttgcagttctagcatgctttgcgattgtttgctgttatactggaattcttctaaaacattgttttgagagcaaagatggtatctcaagttatccagacattggagaggctgcatttggaagaattggccgtgtgttgatatctattattttgtataccgagctatattcatactgtgtggaattcatcattttggagggtgataacctcacatcaatttttcctaaagctggttttgattggcttgggattcatgttgatggaaaacattttttcggagtgttaactgctattttagtcttgccaacagtatggctgcgagatcttcgagtactctcgtacctttcagcgggtggtgtgattgcaactcttctcgtattcctgtccgttggtttagtcggtgttaccgatggtataggcttccattcaactgggaaggcagtaaactggagtggcatgccttttgccattggtatttatggattttgctactccgggcattcggtatttccaaatatctaccagtcaatgtccgatagatctaagttccctaaggcactgttcatatgtttcgcaatttgcacagcaatatatggctcttttgctgtcattggctttctcatgtttggaaagaacactttatcacaaatcactttaaaccttccaaagcattcgtttgcctcagaagttgcactatggaccacggtgatcaaccctttcaccaaatttgccttgttgttaaacccattagctcggagtttagaagagttgcgtcctgaaggttttatgaacgaaacatcatgcgctattatactgaggactgcccttcttgcatcaactgtatgcattgcctttcttctgccgttctttggtcttgtgatgtctctcattggatctcttcttagtatacttgtggcagtcataatgccacccttgtgtttcctgaagatcgcgcagaacaaagcaacttgtgcacaggtaatcgcaagcatttgtatcgtaatgttgggcgtcatcagtgctgccctggggacatactcctccgtgaaaaagattgtagaaaactactaagctcttcgacaataattgcctgcctgcaccagactccacgtatggaactcgaaatggtcaggttttactgtacgaccaaatttttactagaactaccggatttcctgtacattattgctgctgttattattcggaccacactagcctactaaaaaggaacacttcc

SEQ ID NO: 31934 - DNA, 789 bp, Zea mays
  Clone ID: UC-ZMFLB73237C04_FLI
gcagaatccgcgaatcacagacgcgcctatctcagcttgctgcactgccctgccatcatatcaatatcatatcgtacgtgagcccggccgagagcgagggagaggcatggctgctccgaagctcgcgacgctggcgctggccgtgctcctggcggcgaccgtggtggctcccccggccgcggtgcgcgcggcgatgtcgtgctccaccgtgtacagcacgctgatgccgtgcctgccgttcgtccagatgggcggggccatgccgccccagccgtgctgcggcggcatccgcagcctgctgcagcaggccaacaacacccccgaccgccgcaccatctgcggctgcctcaagaacgtcgccaacggcgccaacgggagcggcacctacatcagccgcgccgccgcgctgcccagcaagtgcggcgtcgccctgccgtacaagatcagcaccaacgttaactgcaacacgattaattaagtgaggcgtcctgtgcgcgtcccgggcgaggaatgcatgcatggcgctggcggagagtaataaaataatgctactggtattttaagctatatcgaggtgtgcctgtctctagtcatttatggtgtttaggaatcgtctacacagttcgtaacggtgtatcgtggtcggatgcatgttgccgcgagcagagtacgtaggcatgaaccgacgtgtgcgcttctgtctgtgtactctctctatgttgtaatgtgtgggtgctttgatccagatgtattcgctcgtgagtcgtggaagtagatcgtttcagtatc

SEQ ID NO: 31935 - DNA, 914 bp, Zea mays
  Clone ID: UC-ZMFLB73237C12_FLI
tggtggtgatggcggtgcccggaggcggaggcgggggcggaggatcggcctcgtcggcggcggcggcgccgtgcgcggcctgcaagctgctgcggcgccggtgcgcggcgggctgcgtcttcgcgccctacttcccgcccggggagccgcacaagttcgccaacgtgcacaaggtcttcggggccagcaatgtcagcaagctgctccaggagatcccggcgcagcaccgaggggacgcggtgagcagcctggtgtacgaggccaacgcgcgcgtcagggacccggtgtacggctgcgtgggcgccatctcgtcgctgcaggagcaggtggaggcgctgcaggcgcagctggcgctggcgcaggccgagatggtcaggctcaggatgaccaacgactacatcgtgcaccgcctcaaggcggccagcagggccggcggcgggggcagcagctacgccggctcgccctcgtccatgtcctcgcccaagacggcggagccggaggcgcactgcaaggccacgccggagctgctggacatggtcgtggaccagcccggcatggacgacgcccacttctggtcgtcctactagcctagggccgggatggaggccgctgacaaccgagcgcttctcttctgatctattagtcgtgtggtcgatcaggtgctgttttttgagtcacagatggtgtcatcaggtatatggtgtgcgcgcgctgtaacagcgtcacactaggaggaatggaaggcgagcgtacgtagaaggccttcttctcctataccttctaccagtatgtccagggcttgatttttttggctgtccttccatgagaaggtggaacatggttacaggtattggtgtgcatctactgcctagttaaaacaggtgaactctgctgtggaaatgcagatcgatctt

SEQ ID NO: 31936 - DNA, 2604 bp, Zea mays
  Clone ID: UC-ZMFLB73237E07_FLI
aaccggccggacctcaccggctcatccctcatcgccctagtccccaagggccaagtccccaaccccggctgacgactgtgcccgtctccttccctgattcatccgcaagcccacccgtcggcgatcgtccatgacggaggatcgagcgcacaaggtcgccgacgagcccgccgcctcaggcaggcaaagacctgaaaggaagaagaggaagtgggatcaacccgcggaggacttggtctccgcggcggtgacggctgctgccgtgtcggggatgcctgtgatgaatttcggtgctcttcctggcgttgtactgcctggcgtcaccgcatatggagctgctacattgccaagtgtagtccctgttccgtattcattgccgccccatattgcaccatcggtgctccagaatgctgctgcagcagcccagaaattgagtcaggcaaaaataccagatgaggtcattgcacgggaaattgttataaacgatgcagatccatctgtgcgatataagcttacaaaacgacaaacacaagaagagattcagaaatgcacaaacactgtcatcattaccaggggaaaatatcaccctccaaatttacttcctgatggtgagaagcccctctatctacatatctctgctggatctcagttgaaagatactgctgagcgcattaaggcagttgatcgtgcagcttcaatgattgaggaaatattgaaacaaggaacaacctcagagtccatatcggtccctttctcctctagcactggacaagctgttcgtccttttagtgcctcagtttttttgggttttgatgcagatccatcattgaatatcacagctcgaatccgtggtccaaatgtatgactatgtgatcctggttttatttgatcattttgttactagcacatctcagttaattttgttaattactcaatttatgtgctgttgtctttcaattttttgaaagatctaatcataaagctttctctggcatcccaatttggatgggagaaactgcttttctgctgttggtgcttgtgctcttttgttattatataggatcagtacataaatcatatcatgaaagaaacaggggttactgttgtactaagaggaaaagattcggagaatcttggcagttgtcatagtgaagcctcacaacaacctctacacctatacctcacaagtatgcatttaaagaacctagaagctgcaaaagttttggcagagaacctcctggatacagtagcagcagaattcggtgcttccagaatttcttcttcaaaagtatatggtgctgttccacctcctcagcagttgttagctggtgtcgacacctcaggaacgaaatcagatgttcactatattgtagggcccaatgtgttatcgggagctacacattcctttgcatctactggagttattgctcctgttgttgctcctgcagtgacagtgcaatcaggggctccaacatattctggggttccactacccagtaacatggcctatcctattccaccagcaaacggtggggcattttacagtggttatggggacatttatccccaagcaactccgttgcagcagctggcattcacactcaagcatgcctcatcgtcggcaactcaggctgttccagtgacgtccacaccaacaagcatggctacaaaggggaactcaatcttggatgcggagatggataaacgatcccgaaggaaattccaggaactaccggtttcgaagggcccagcaacagaaagtcagaactcacaacaggggtccaaatttgttaagacaggtttagatagttcaggtaacattgggagctcatcaattgcacctccgaagaaagttcaccctggatcaaatggaatgcttccgcaagaagaagcggatatgccatcacatctctctatatccactaagatgctaccaccacccctgaagagcatgctgccactgccacccagaagcatgcccccaccaccacctaagagcatgcctccaccgccaccaaaatttccttcagatgagtttttgtcaagaaacgagaacaagttttttcctttaaaggagccaacagcacctccaaggtcctttgatgcaatatcagtcttgccatctgaacgacgaccaagggagcctaaggaggaaaaaacaaaaggcacacctgtgtctgatactttgctgaaacttattgattatggagatgacgacgatgacggcgatattgatgtgacagacaacacacctaagggcaatccaactcctggttcagagcagaaaccattttgggctgtttaaaactgggtctgctaacgtagtctagtgtgaattcttgttgataaggatgcttgctgccttggtgcatcttctgaattgaagaggcaatcgagctccttgttcgtgtactgtagtaattctaacaggcaatgagatttctttgaacttgtattcattctggcctagtcaaaatgaaccgtttgttgttttggttcagatacgatgatgtttcgtttttagattcgacgttggttgctgaactcgtagcattttaatgtcggtattatataattgttagagcctatgtcaattttgtatcc

SEQ ID NO: 31937 - DNA, 1233 bp, Zea mays
  Clone ID: UC-ZMFLB73237H05_FLI
ttggcagaggaggtggtccaactcatctggccatattatctcagccaccagacacgatacatggatcacttcgtgtaacagttcaaggcgaagttattgagcactcctttggagaggagctcttgtgcttcagaactttgcaacgctacactgcagctactcttgagcatggcatgcatcctccgatttcccctaagccagaatggcgtgctctgatggatgaaatggctgttgtagcaactaaagaatatcgatcaattgtcttccaagaaccacgcttcgttgaatacttcagatcggctacacctgagactgaatatggtaggatgaatattggcagccgtccatcaaagaggaagcctagtgggggaatagaatcactccgtgcaattccatggatctttgcttggacacaaacaaggttccatctgcctgtctggcttggatttggtgcagcgataaagcacatcatgcagaaggacatcaggaacatccatatactgagagaaatgtacaatgagtggccattcttcagggtcacccttgatttgcttgagatggttttcgcgaagggagacccgggaatcgcagctgtgtacgacaaattgctagtggctgatgatttgcaatccttcggcgagcaactgaggaagaactatgaggagacaaaagagctactccttcaggttgctggtcacaaggacgtccttgaaggtgatccttatctgaagcagcgtctgcggctgcgtgagtcctacatcaccactctgaacgtgtgccaggcctacaccctgaagcggatacgcgacccgagcttccaggtgagcccgcagccgcccctgtccaaggagttcaccgacgagagtcagccggcggagctggtgcagctgaaccagcagagcgagtacgctccaggcctggaggacaccctcatcctgaccatgaagggcatcgccgccggcatgcagaacaccggctaggccaagatcttcggtgtgcaaataacctgtctcccatgagacggtggacgatatgtgtaggcctgtgagcagttagtacaccggcgccagtgtgttctggaggatttttcatgtcagagcctttctcttgtgtgcttgctgtagatgccaaggggagcttattggctgttgaagcctgatgcaaaataaagtacgaaactatgttttttgtttaactaataactagcaaacatgcttccgttgcattgaaact

SEQ ID NO: 31938 - DNA, 1138 bp, Zea mays
  Clone ID: UC-ZMFLB73238A03_FLI
attgtttgcctatacaatttgttcttatactatactgtctatgtatgctcctgcttcctgcgttttggtccagtagaagggtgcaagctcatcagaaaagaaaaggtggatctttctttattttaattaaaaaatgtctatagatagcttgtaacagataaatccataccccacctgtccccagcacccactcgcccactcacctgtaaaattgtggctgccttttcagattgctctttgcatctgatttttggctttgctttccccgtatgtctcaagtctagttaccatttatggctttcgcacctgtaaacatttatggttgcttttgttgattcatactagcatctatgctaattttttaatgcacgaccttaatgctacttttatgtgtatttatgatcaatcaccatgtattttacgctcttcggtttttatgtcaaaaaaatgggtttttacgctgatttatatgtgtgcctatgctgcaacacatacaattctaactaaatatgcataaagcagcgcgccagcacctcatattttattctcattgtttctacttcgttaattcattgacccatgtctctgtcttggtatattctggagacaaatccccacgtccagagttacaagaagatcaagcttggctgtggctgcagctgtgttgcctcctcttgttggaccgaagagagggaggggagaagcagctggcgtgcagacttctactcaggtggtcttttattctctatggggcttctaggatacatcttctccagaagcaccataagtcttgtcttgggcattacaccagggctagccactctgctacttggcactctcagtctgaagttctggaggagcgacagatccagcttcctgcttatcttggctcaggcagggatttgtttggcttccaaatggtttgttggtcctaaaatagtcagaatcacatgacatctgtgctatagatatggacctcagtggttttctccacattaggaaagctggaagagccgttttgaactcaatttttttgctaacagtggtgttatggtgaaacagagttttgtgtgtatgtaccaacaactaaaatgtaaacacgacattatcatagttgagtacaggaataattatctct

SEQ ID NO: 31939 - DNA, 882 bp, Zea mays
  Clone ID: UC-ZMFLB73238A08_FLI
agaattagggttcgattcctcaccttcctcaacctcttcgccgtccttctcgccgtcggcgccgagcgccgccgcagcaccgggaaggtgatgccggacgagtacgacgagcggtcctactgcctctacgacactgacgcctccacggtgtacggcgtctccgctttcttcgtgctcctgctccagcaggccattgtcaacgtcgccacgtggtgcctctgcttcggacccgtgctctcctcccgcggctgtgccgtaacggcattcgtcctctcctggataacattcctcgtcgcagaagcttgtctcataggaggatcggtgaggaatgcaaagcacaccaagtatttaggctactacatgaagcatgatttggtgtcgtgcgccgcccttcgcaagggagtctttgcagcagctgctgcaatgatgatcatcaacctcctggcgtccctggtgtactactggagttactcaaaagctgcgacgggtgggttcatgaagcaccaaaatgaggttggtgtgggcatgacggattacggccttgacaagggtgtttctgggccctgagtgagatggaatcttattggcctctgtgcggtattaatactatcgtcgaaatgtatgtggatgaagttgagttgtttctctacggtgtgctgtgaatgatataccataactgtacaatggcatgggtggtgatattgtagggttcgtgctgtgaaaaatgcggtagcactagttgtgtttggtgtgctgcacgagcacgacaccgacttcttcctgctcgctgctggcggtggttgttcgcaacacaaatgcgggacttcaatgttcttggctgtcattaaattatgcaaggtggtactgtactgattttgcact

SEQ ID NO: 31940 - DNA, 504 bp, Zea mays
  Clone ID: UC-ZMFLB73238B01_FLI
atgactttagaagaatcgcttcaccaaaccaatatagaggatctgcttcatcatcgaatcttcaaaataatgagccagcagtcgatggagctcgcattgcgggtgcaccttctgcagaccaagcgtctaattcaagcactgttgctgtgatacaaggggatggtggtatctctgaaagtgcaggagagcctagcaatgcaggttcttcgggatccctgaggaggagagggaggagcaatgcatcaggttcattggatgtggatggtggaagcctccaacagaacaagagacacaggatgaactgaatcctctttgacatgtgtgtttgtcccaaaccaaacttggcctctttcgctgcattgtagcatgttgtagtttcgtctcttttatgtgttcactgaaacagtttacagttccttcaggttgcttaaatttggatcttcaaacatattatgtgtcctgaagttattttcattatgatatcggaaatggactgcctttgtt

SEQ ID NO: 31941 - DNA, 1765 bp, Zea mays
  Clone ID: UC-ZMFLB73238B06_FLI
tagccgaaaccctagcggccttgcgccggccatggcggcaccgcgcgccaccaagcgccccaagtttgcctccggcgcggcgccgccccagcgaggggaggacgactacgtgccggggaacatagtagagattgagctcttcaacttcatgacctacgaccgcctcgtctgctgccccggcccgcgcctcaacctcgtcgtcgggcccaacgggtctgggaagagctcgctcgtctgcgccatcgccctcggtctcgccggagaccccagcattctcgggagggcgtccagcgtgggtgcatttgtcaagagaggggaggttgccgggcacgtcaagatatctctccgcggggatacagctgacgacaagatctgcgttactaggaaaattgatacgaagaacaagtccgagtggctcctcaacggtgcaactgtcacaaaaaaggaagttattgacgtgattaagaaattcaatattcaagttaacaacttaactcagttcttgccacaagaccgggtatctgaatttgcaaagctaagtcccattcaacttctagaagagactgaaaaggctgttggtgaccctgatttacctattcagcatcgccaacttgtagagagaagtaaggaactgaaagcgtttgaagtggctataaggcaaaacgaacagactttgaataatttgaaggccctcaatgctgaacaagaaagagatgttgagcgtgttcgactaagagataatctccttagaaaggctgaatcaatgaagaagaaggtgccatggctgaaatacgacatgatgaagaaggaattcatagaagtgatacaagagaaggagaaaattgcaaagcaagaaatggaagaagcagctagagtctgggaagattcaaaaggccctattgacaaactcaagaaacacaaggcaactcatacttcaaatataaagaagataagcggccaagtaaatcaaaacatggacaaccgtcataaagttatggaccacgatttaaagctgaatgcagaactgaaagctacatttgatgaaatggatgacctgaaaaagcaagaaaaatctcgccagcgaaggatcctgaaaactaaggaagatcttgctgctgctgaaaaggaacttgaagatctacagccttatgaacttcctaaagctgaaatggcacaactaacagaccaaattgcacgaataagtgttgagataaaaaacttaaaagcggaaaggaatgccatggagtctcagttagctcgagaggaagaaagcttgaggagatgttctgataggttgaaggaaatggaaagcaagaatagtaagctactccaagcattacgaagtgctggtgctgataaaattattgaagcataccactgggtgcaagctaacaaaaagaatctcaggcaagaagtttacgggcctgttctccttgaggtaaatgttcaggataagcttcatgccacttacttggaagaccatgttccaaactatttatggaagtcattcatcactctggatgcttcggaccgtgactacattgctagagaaatgaagcagtatggcattcctgttctgaactacttagtgcgcgaaggcacaaggagacggccattaaacatcactccagagatggagcaacttgggatctactcccgacttgatcaagtatttcaagcccctgacactgtgaaagatgttttgattagtcaggcgggtttggatgattcgtacataggtacagataaattcatcgttcaggtg

SEQ ID NO: 31942 - DNA, 1216 bp, Zea mays
  Clone ID: UC-ZMFLB73238B09_FLI
gggtgctcccgcggctggactagccccacgacctccagctcgaccattcccgatcccgtggactcccaattgcctgcctcctctacctgtccggctgtcccggctccagcatttccaccctcgcgcggcggtcgccggagcgagcagagctgccggaaggcccgtcggatccgccgccgccaagatgaatgacgccgatgtagccaagcagatccagcagatggtgcggttcatccgccaggaggccgacgagaaggccaacgagatctccgtctccgccgaggaggaattcaacattgagaagctgcagcttgttgaagctgagaaaaagaagattagacaagagtatgaacgcaaagagaagcaggttgaagtacggaagaaaattgagtactctatgcagttgaatgcttctcgcatcaaagttcttcaagctcaggatgatctagtaaacaaaatgaaagacgatgcgatgaaggaactcctccttgtcagccacaaccaccatgaatacaagaaccttttgaaagatctaattgttcagggcttgctccgtttgaaagagccagctgtattgctccgttgccgcaaggaagatcaccatcatgtggaatcagtactgcattcagcaaagcacgagtatgcatcaaaagcagatgtccatgaaccagagatatttgttgaccatgatgtgtacctaccacctgccccaagccatcatgatgctcacggccagttttgctctggaggtattgtcttggcttctcgagatggaaagattgtgtttgagagtacacttgacgccagactggaagttgttttccgcaagaaattgccagagatccggaagcttctttttggccagactgcagcttaattgactcaatccgcagatgatggtatggctcgcttctacctagtggtttttgccaaattgatcgtttacggtattcatccccaatgtacaaactaccttatttgttcattactgtcgccgagcaccgactgtttgtacttcgttcgctccgaggaataagaataaagcactgctagacttcccattgcgaagctgaataaatattgtaaagccatttgtcgtgctgaacttcccgttccgttcctgtcctgtcctgttgatgtgtatatctagttaatgtcggaaacggttcttgtgggaaaaataaaaaataaaagttcttgtaaagttcgcccgccc

SEQ ID NO: 31943 - DNA, 739 bp, Zea mays
  Clone ID: UC-ZMFLB73238C01_FLI
ttggagggaacacactatgttgtccatcccaatgggtcttcaatgtttataacgaggatgagtgagccatcaacagagccctttccgtggcagactgatggggagtttgatgtcgagaggagcttcgcaggcgagggcattgccaatgggtatggcttcagataccctagctcaaagcctggttcattgtttgtcctccagaatgggctacttgcatttgtttggagagaaaccggggccgtgcttaccttgcaaagactggatttggacgaactgctgaagaaaggggagcgtgtgcctgcattgcagccagtgccgaactttgcttacctgacaaagtcttactccaatgttttcaccagtttccctgtcggcgcggcttctcccaggtaaaaggtgtgagtggaggaggatgtatcaaatgatcacctgatgcagacaacggagaaacggtctccaggatcaagtttagctcttcttgcttgccatttgccaggtgatagtcacctggcgatgcttccataatacatactacctcgtggctgaaggagcatagcagcagccgtaatactttaggaattcaaatactttgtcatgaaggaaatagcaaccacaccccatattccttactacagctatttttcatgtttgtgctataaaatgaaaccaatctggagtgtaaatttgtatgagatctgtacatctcttcactataatgcaggcgatttatacgaagtct

SEQ ID NO: 31944 - DNA, 165 bp, Zea mays
  Clone ID: UC-ZMFLB73238C02_FLI
cgacatgccatggtgaatttaggattcttgtgtggtggggcgagtttgttgataatggattattggcttccgtttgggcgattgatgtcgggtgcagccattctggccaactttggttccacgtgtttcctactatttgaacaggggactaaaatcttcaaagtt

SEQ ID NO: 31945 - DNA, 1655 bp, Zea mays
  Clone ID: UC-ZMFLB73238D04_FLI
cgcagaggcgcagagacaggcgtcttcgtactcgcctatctccgcgactcaaagcttcttccatttcctaccgccgccgctgcagctccaccccattccgtcgacaccatgagggagtgcatctcgatccacatcggccaagccggtatccaggtcggaaacgcgtgctgggagctctactgcctcgagcatggcattcaggccgatggtcagatgcccggtgacaagaccattgggggtggtgatgatgctttcaacaccttcttcagtgagactggtgctgggaagcacgtccctcgtgctgtttttgttgaccttgaaccaactgtcatcgatgaggtgaggactggcacctaccgccagctcttccaccctgagcagcttatcagtggcaaggaggatgcagccaacaacttcgcccgtggtcactacaccattggcaaggagattgttgacctgtgccttgatcgcatcaggaagcttgccgacaactgcactggtctccagggcttcctcgtcttcaacgctgttggcggaggaacaggctctggccttggttccctcctcctggagcgtctgtctgttgactacggcaagaagtctaagcttggtttcactgtgtacccatccccccaagtttcgacctcagtggttgagccatacaacagtgtcctgtccacccactccctccttgagcacactgatgtggctatcctgctggacaacgaggccatctatgacatctgccgccgttcccttgacattgagcgcccaacctacaccaacctcaacaggcttgtgtcccaggtcatctcatccctgactgcctccctgaggttcgatggtgctcttaacgtggatgtgaatgagttccagaccaacttggtgccctacccgaggatccacttcatgctttcctcctatgctccagtcatctctgctgagaaggcctaccacgagcagctgtctgtggccgagatcaccaacagcgccttcgagccatcctccatgatggccaagtgcgatccccgccatggtaagtacatggcctgctgcctcatgtaccgtggtgatgtggtccccaaggatgtgaatgctgctgtggccaccatcaagaccaagcgcaccatccagtttgtggactggtgcccaactggctttaagtgcggcattaactaccagcctccaagtgtggtgcctggtggtgacctggccaaggtgcagcgcgctgtgtgcatgatctccaactccaccagtgttgtggaggtgttctcccgcatcgaccacaagttcgacctcatgtacgccaagcgtgccttcgtgcactggtatgtcggtgagggtatggaggagggcgagttctctgaggcccgtgaggatctggcagcgctcgagaaggactacgaggaggttggtgctgagtttgatgagggtgaggaaggtgatgatggtgatgagtactagaagtatcctgatgcggtcatcgtcaggcttgtgtgctgctcttgtccccgttgtggtttgcaacacctgatgttgtaagactttctggttatgtccgccccgctgtgccactgggttattaagaacgtcgttatggatggttgtctacactacattattgcttctcgatattggaaaactgttatgcgcct

SEQ ID NO: 31946 - DNA, 1239 bp, Zea mays
  Clone ID: UC-ZMFLB73238D10_FLI
atttgtatgcatggtggtattggtcggtccatcaaccatatagagcaaattgaaaatcttcaaagaccaattaccatggaagcaggctcagttgttctgatggatcttctgtggtctgatccaactgagaatgatagcgtagagggactcaggccgaatgcacggggccctggtcttgttacctttgggcctgatagagttatggagttctgcaacaacaatgacctgcagttgattgtgcgagcacatgagtgtgtgatggatggctttgagcgattcgcccaaggtcacttgatcactcttttctcggcaacgaattactgtggaacggcaaacaacgcaggtgcaattttagttctcggaagggatctggtggttgttccgaaactcatccatcctttgccgcctgctatcacgtcacctgagacctctccggagcatcatattgaggacacatggatgcaggagttgaatgcaaacagaccaccaacaccaaccaggggccgccctcaagcccccaacaatgaccgaggctcccttgcctggatataacaggctggccatattattaaacaattgatttcttgtctcctatcattggcttgaggctaaaattatccatccattctggacacatggaagcactctgctgaaagcacacactggcccaaaacaatgtcgaaagaaaactgttcagggagcgagactaagcggtgctctgaaggcgaaggccagagaagagtcactgtcgacagcgctccccaaatcctttccacaaacaagtagaagagcagaaccaagtgttggtaaaccacaggatcttgcctgggatcgcgcctgtacatactcagacgccagcagatagaggaggggttgtgtatgtgttctttttgtcttagcgtcgaaagggatagcagcgtccattgtactaggtattcatttgctgtagattttgatttgttgcctcatgttgcaaagtatggagtgggaaagttggtttcctcgtgtgacggacggtggtctgtcaggtcttgtataatagcgttgtcggctgtttatgtttgcagcgcgtcagctgttacttagcacaccttacacctccctcatgttgtaattcccatcaccggtgctgatgaatgtgcacaatatattgttgtctgttgtccaaagttttgggtcctggacgggttaggtgatttgatttggtttattggagaagcaatacgttgtttgattttg

SEQ ID NO: 31947 - DNA, 2330 bp, Zea mays
  Clone ID: UC-ZMFLB73238E05_FLI
gggcaaggccgcagctcactcgtgtcgtgcacccgtcccctcccacccgccaagaactagcattgccgccgccggtgccagggggcggaggagaggccgcggcggcgagggagcggcaccaggcgcagggggtcaggagagccgccggcaggatgttcgggcgggacccctggggcgggcctctggagatctccaacgccgactcggcgacagatgacgaccggagccgggacctggaccgggcggcgctgatgcggcagctggacgagacgcagcagagctggctcctggccgggcccggcgaccaggcgggcaagaagaagaagaggtacgtcgacctgggctgcgtcgtcgtcgaccgcaagatcttcatgtggaccgtcggcaccatcctcggcctcggcgtcttcatcggcttcatcatgatgatcgtcaagctcgtcccgcacaagcgcccgccgccgccgccgcccgaccagtacacgcaggcgctgcacaaggcgctcatgttcttcaacgcgcagcgatccggtccgctgccgaagcacaacggcgtcagctggaggggcaattcctgcatgaaggatggcctctccgacagcaccgtccgccggagcttggtcggaggcttctacgatgcgggggacgccatcaagttcaactaccccatggcctggtccatgaccatgctcagctggagtgtgatcgagtacagggcgaagtatgaggccatcggtgagctcgaccatatcaaggagctgatcaagtggggaacagactacatcctcaaaaccttcaattcatctgctgacacgatagacaggattgtcgctcaggtgggtgtaggtgacacctctaaaggcagcagtcagcctaatgaccattactgctggatgagaccagaggacatcgactacaaaaggccagtcaccgagtgtcactcttgctcagatctagcgtctgaaatggctgctgccctggctgcagcttccatagtgttcaaggacagcaaaacctactccgacaagctcgtcaaaggcgcaaaagccctgtacaagttcggaaggctgcagcgcgggcgatacagccccaatgggtctgaccaggcaatcttctacaattccaccagctactgggatgagtttgtgtggggtggtgcgtggatgtactttgccacagggaacaattcatacctcacggtcgccacagccccaggaatggcgaagcatgctggagcctactggtttggaagtccaaactatggagtatttacctgggatgacaaacttccaggagctcaggttcttctcagcaggttgcgactcttcctaagtccagggtacccttacgaagaaatactgaggacattccacaaccaaaccgacaatgttatgtgctcatatctgcctctattcaattcattcaacttcactaaaggaggactaatacaactcaaccatggaaggcctcagccacttcagtatgctgtcaacgcagctttccttgcttctctatacagcgactatcttgaagctgcagacacgcctgggtggtactgcggacctaacttctacaccacagaagtcctccgcaagtttgccaggtcacagctcgactacatccttggcaagaacccattgaagatgagctacgttgtgggtttcggaaacaagtacccgaagcgccctcatcacagaggcgcgtcgatacctcacaacggcgtcaagtatgggtgcaaaggaggttacaagtggagggacacaaagaaggcaaaccctaacatccttgtcggagcaatggtggctggccccgacaggcgcgatggctacaaagatgtccgcacgaactacaactacacggagcctactctcgcagcgaatgctggtctggttgcagcgctgatctctatatccgatatcaaaaccggacggttcggcatcgataagaacaccatcttctctgcgattcctccgatgttcccaacacccccgccgccgccatcagcatggaaaccatagaggcaatacctctgaatgtttttccaaagcatcgaacagggaagtggagcaaacgtgtgatcatttggtacagcgaaggccagagacaggaaagctgacagcataagtttatagagcttctatttctgtaccaatatgacagatcagtataagatcctctgtcagacatagatcggaagctgtgtgcatcgcgtggagctaatttttgggggtcttgttgctattggcactccagctcatgtgtgaagttctttttgtagaaatggtacctttacaaattgttttataggagtgacttttcattattatagt

SEQ ID NO: 31948 - DNA, 1818 bp, Zea mays
  Clone ID: UC-ZMFLB73238E10_FLI
cgtccgggcagagtccccatacataagtagtatagcaaatggcagtgtggatcattcgaatacatcgaacaacatgggttcagattcttcagacgcaccccataacagtactcaagggcagaatagcattccgggtgatcagcaaaaaggtggtaacagcaaggcagataaacaatataaagttaagcaacctcggaaaaaccagtcagacaatgtatctaagccaacaaggaccgatgaagcttcagttgatggagtatctgatagttctaaaggaagcactgctaccgagccaaatcaatcccagtcttcatcatcctcattaccaagttctgatttgcatgatgggggtggagcacaggtggatgagctgaatacacaaaaaaaccagccatcttcccagtccaaaaagccgaaaaaatctactctttcccatcaaaagagtgctcctcacgacttttaccatggtaagaagcctggtgtgtcagttgagtcttcatctaaaaatggtgctcccgatgtgactagcaatggtcgtccaaagtatcagaaaccccaatcctctcatcaaccaagacagcagaacccagtgaaccatcgtcctcatggtggatctggcaattttcaatcatcaaactcacatagaagcaactcatgtccagcaccagctgggcataatggtattcctactgcaccgttgcaattctggccaagcgggccaccttatcatggaccaccaatcaattatcctgatatgagtcggttgaatatttctgaatatcctaggggtattcataataaccaaggtttgcatgccaactaccatccaaaccatcctggttacaatgattatagctacagacctccaactcaacctaacatgcctagcaacatgcaaaatattggacactggggagccaacccgggatgttcacagccatcttcggaccctcaaggtcttgtaagatatatcttaggtgctttggaagttttgaagactgagaagattcctccaacagagcaatatatagcagattgtatatggtatggacatggtgatgctaatatgccaaattttgatgttaagaaggcacttcaagttgccatgcagcatcaagctgttgtcaagaaaaagttagggaaaatgtcattctttctgggaaaagatgaaaatctctggaaatgtgttaatataatggatgataacgcaaaatacccaaaagaaactctagatgctgttcatgctttcatgtcttctgctccaggctattctgagataaagagttctcaatctaggtatcaagctgctactatgttgaagaaaacatgcctgaagcatctttcccttgctgaagtccttcaggttctgaatatcataattaacacaaaaaagtggtttgtgcctcattcttcaggttggcagccgttgtcgtttaacataatagtggctgatgctactactgccactggtggaaaggcttagcatcggtacattatctgcttgtaccaattgaacatgttgaggttctggtcgttggtgcaagctgcgtccgcaaaagctaagttctgttgaggtttcctagcacaatgctctgcattttgccaagtttggggttaagttgttttacacacagtatatgttagctggagtgaaacagtaagtagccttagactgctaaattttagtgggagtcaatctgtcaactattgggcatgttgaaagaactctgggcagccctggctgtggctactcctatgggtgataattgtggtggtaagatgcttatgcaatcaagcataaagcggttcagagggact

SEQ ID NO: 31949 - DNA, 1658 bp, Zea mays
  Clone ID: UC-ZMFLB73238F07_FLI
tcttttttgaaccatttctctacaagaaagctaacacaagaaagtgtccaaaagtgtctgaggagcacttgagtgagaggtgaaccttcgtattcttcgtgtcttgcattgatatgaaatttaaaattgcaatcatatatcaatatatcatactagtattattttctttaagtaagtcttgagctatgcgttatacctatcgattcctcattattttcaaattctgaaaatcaatattatggtatcccatataatatacaccattgcagtgttctcttttgagtgtagagaactagagataatagaattatcttgtttgaaaacatttgcagtgttgggagcttctgtgaacgccactttggaagagaagttgttgactattttgttgatccatttgtagctggaacaagtgcaggagatccagagtcactatctattcgtcatgcattcccagcattgtggaatttggaaagaaagtatggttcagttattgttggtgccatcttgtctaagctagcagctaaaggtgatccagtaaagacaagacatgattcatcagggaaaagaaggaatagacgagtgtcgttttcatttcatggtggaatgcagtcactaataaatgcacttcacaatgaagttggagatgataatgtgaagcttggtacagaagtgttgtcattggcatgtacatttgatggagttcctgcactaggcaggtggtcaatttctgttgattcgaaggatagcggtgacaaggaccttgctagtaaccaaacctttgatgctgttataatgacagctccattgtcaaatgtccggaggatgaagttcacaaaaggtggagctccggttgttcttgactttcttcctaagatggattatctaccactatctctcatggtgactgcttttaagaaggatgatgtcaagaaacctctggaaggatttggggtcttaataccttacaaggaacagcaaaaacatggtctgaaaacccttgggactctcttttcctcaatgatgttcccagatcgagctcctgatgaccaatatttatatacaacatttgttgggggtagccacaatagagatcttgctggagctccaacgtctattctgaaacaacttgtgacctctgaccttaaaaaactcttgggcgtagaggggcaaccaacttttgtcaagcatgtatactggggaaatgcttttcctttgtatggccatgattatagttctgtattggaagctatagaaaagatggagaaaaaccttccagggttcttctacgcaggaaataacaaggatgggcttgctgttggaagtgttatagcttcaggaagcaaggctgctgaccttgcaatctcatatcttgaatctcacaccaagcataataattcacattgaaagcgtctgacctatcctctagcagttgtcgacaaatttgtccagttcatgtacagtagaaaccgatgcgttgcagtctcagaacatcttcacttcagatattaacccttcgttgaacatccaccagaaaggtagtcacatgtgtaagtcggaaaatgaggttaaaaactattatggtggccgaaatgctcttttttgttttcctcacaagtggcctacgacacttgatgttggaaatacatttaaatttgttg

SEQ ID NO: 31950 - DNA, 2007 bp, Zea mays
  Clone ID: UC-ZMFLB73238F08_FLI
tttcgccggaatctgtccctcctccccctcctccccgcctctgcgggtactggaccaccgtggagcgggcattcatccaggctaggtccattccttcctttgctcgttctcttctccatcgcggaagctccacccgagttgacgccagaagagaatcggtgccctagggtgttctcgcagaattattttccagaagatttgcagatcgagtcgaaccctatgccccacgttaagcctgccgccggcctgcccccttaccaccaccgggcgctccctggccccgggcagggtccagttcccacgggacatgggatgatgcaccgggaggtccgtgatcagtacgggccgctggggccgaggatgcacctaccaccgctggggcacgggcccgctccgttcccctacgacatgctgcctccgctgcccccaccggaggtcctggagcagaagcttgtggcacagcacggggagatgcagaagctggttatagagaacggccggcttgctgcaagccacgcctcgctgaggaaagagctagccgcggcgcagcaggagctgcagaggctgcaggcgcagggggaggccgcgaaagccgctgaggaggaggagatgaggggcctccttgacaaggttgggaagatggaggccgacctgaaggcccgtgagtccgtgaaggtggagctgcagcaggctcatgctgaggcgcagagccttgtggccatgaggcagaacatggtggcagacgtgcagaagctgagcaaggacctgcagaggaacctcggtgaggcacagcagctccccgcgctcttggctgaacgggatgttgcaaggcaagaaaatcagcatctcaggagtacttatgattacgaaaggaaactcagggtggatcactctgaatctttgcagacgatgaagaggaattatgactccatggttacggagcttgaaaaacttcgtgctgagttgagggacacatctaatcttgacaaaagtggttttttctacaatagcaccacccaaaaggccgatggtatatctagccatctttctgttggacaaattgcttatgatactggctatggaagtacacaggcaagggcaactcctaccggtctggcagacttaagtggagtccctggaggcgctggccttcgttctggattcgacccatcaagaggcaatgcatacgatggctctcatgttgccaatttcagctcttcaaaaactgggacccatgatgcatcaaggggtgccactggctttgactctctcaagggttctgggtatgatgcttcaaaggcgcatgtaactggacaggcgtcagctacagcggctcatgggggcattgctggttactacgggtccaatcaggcagcacatgcgtggggacaatctgcatcgccctacggatctgtacaggtgccaccatcctacgcatctgggtcaaacacatcctatggcgcagcagcagcagcagcagtgcgtccctatggttcagctcaggcgcaaccatcatatggacaaacgcaggcaccatctgcgtatgggcacacacagctaccatcatcctacagtctagcacaggcgcagtctcccttcaccgctgcgcaggggtcctcgccctatgggttggctgcgcagcctccagcctatggatctgggcgagcaggctccaatgctggcagttacgaagctcctcaaggacgtaaataagttcgcgccaaatttgcatacttggccacttgcgaaagagagctttgttacaccgagtccaaatcctttctgttgctacttaaaccttgtttaactgtgatgtcagaggaacctgttacagccgataaaacgattctctgtaaacgtattatcgtgaccgatgatgccgatgcatttttttgttcagtagagtaggccatttgggaacgcagatttgagttgtgcgatattggttctatatctggcttcactggttggttcattcataacgttaaattatgtttgtttaagttc

SEQ ID NO: 31951 - DNA, 684 bp, Zea mays
  Clone ID: UC-ZMFLB73238G04_FLI
cgtcctcatccgcctgctcctgtaccagttcgtggcgcgcggacggggccgcctggccgtgggcgtccgccgctccttcggctccttcgccaggaggagcgcccgccacgggctcgccgcgtccgcgctcgccgcgctgccggtcgccacgtaccgcgtccgcggggcggacgacgacgggcctagctccgcctccgacggcgccgggaccgggacggcggactgcgcggtgtgtctgtcggagctcgcggacggcgagaaggtgcgcgcgctcccgggctgcagccacgtcttccacgtcgattgcatcgacgcgtggctgcggtcccggaccacgtgcccggtgtgccgggccgaggtgcggcccaaggcgacggcggacacgcgcccctcgccgcctccggcgttgatcgatgccgctgggggcacgttggtcgtgaccgtggtaggcggcgccgcggagaccggggacgcacaccgcacgtccgtgctgggctccggtcaaccggccggtgccgttgggtaggtaggcaaaaacgacgttgcgactccttagcacatagtgtattatactatacatcataatacatgtaattagaaacattgtgtactactttatcttctgtaattctgtgaagatgacaccttagcatctccaacaaaaataattatccttcgcctcag

SEQ ID NO: 31952 - DNA, 1928 bp, Zea mays
  Clone ID: UC-ZMFLB73238G08_FLI
aaccctaaccctccgccgcccctcggacccccaaccagcagctgccgcggccatccgccggcgagatggcgctgtacctgctgttcgagtcggcgtccggctacggtctattccacgcgtacggcatcgatgagatcgggcagagcgtggaggccgttcgctcctccgtgctggacctcgatcgcttcggcaaggccgtcaagctcaccgccttcaaccctttctcctctgccgtcgatgcactcaatcagtgcaacgctatatccgaagggatcatgaccgatgaactgaggagtttcctggagctgaacctgccgaagcccaaggaggggaagaaggccaaatacagcctcggggtcgtcgagcccaaggtcggttctcacatctccgaggtcaccggcattccctgccagagcaacgaattcgtccaggagctgctccgcggtgtccgcctccacttcgaccgtttcatcaacgagcttaaggattctgacttggagaaggcccagcttggcctggggcatagctacagcagggccaaggtgaagttcaatgtgaatcgtgttgacaacatggtgatccaggcaatctttctattggatacgcttgacaaggacatcaattccttctccatgagagtcagggaatggttctcatggcacttccctgagcttgtcaagattgtgaacgacaattacctatatgccaagcttgctaagtttatcgtgaacaaatctgatttgacggaaaaagatattcctgctttggctgatatagttggcgacgaggacaaggctaaagaaattgttgaagcagcaaaggcttcaatgggccaggatctgtcaccagttgatttgatcaatgtccagcaatttgcccaaagggttatgaatctctctgagtatcgcaaaaacctttatgagtatcttgtgactaagatgaatgatattgcacccaacctgacatcgttgattggtgaagtagttggagctcgcctaatctctcatgctggcagtctttcaaaccttgctaagtgtgcagcctccacccttcaaatacttggtgctgagaaggccctattcagagcactgaaaactcgagggaacacaccaaagtatgggcttatattccactcctcctttattggccgtgcttcaactaagaacaagggcagaatggctcgttacctggcaaacaaatgctcgattgcttcacgcattgactgctactcggaggctagcacctctgtctttgggcaaaagttgcgtgagcaagtcgaggagagactggaattctatgacaagggtgttgcgcctcgtaaaaaccttgatgtgatgaaagccgctattgacagcatggtcaatggcacctcaatggatgatgatgatatcgagaagaccgatgcatctcccaagaaaagcaagaaaaagaagaccaaaaccaaggctgatggtgatgcaatggacgtggataaaccctccaacgttgctggtggagaagctgagcctggaactgagaagaagaagaagaaaaagaagcataagctggaggaggaggcacaggaggagaacggtgcagcagatactacccctaagaaaaagaaaaagaagagccgtgaagcttccgaagaagctgaacctaagaccgccaccgatggtaagaagaagaagaaaaagaaggctaaggccgaggatgatgagtagccaagttatttgttgtatggcgtatgaatccgagagtatttgttgaaaaacagagatgaacgcctgcctagctcaactagcttgtagttcatgaggcgtttgatgcaaacccaactcaaagtacgaagttttcctatcgtctttagcttgtatttttattttttggttggatatgctagtgaactctagtgacttcgtatgctaacgatgcagaatagcagatcc

SEQ ID NO: 31953 - DNA, 1596 bp, Zea mays
  Clone ID: UC-ZMFLB73238G09_FLI
ctcagtcctcagtccctcacacactcactatacactgctctgctgcagcaagaaggaagaagctagcgcctccctagctctcgttgtcagcaatggccaccaccgccgcgtccagcctcctcaagtcctccttcgcgggctcccggctcccttcggccacgcgcaccaccaccccgtcgtccgtggccgtggccaccccgcgcgccggcggcggccccatccgcgcgtccatctcctcctcccccaccccgccctacgacctgacgtccttccggttcagccccatcaaggagtccatcgtgtcccgcgagatgacccggcgctacatgacggacatgatcacccacgccgacaccgacgtggtgatcgtgggcgccgggtccgcgggcctgtcctgcgcgtacgagctgtccaaggaccccaccgtgagcgtggccatcgtggagcagtccgtgtccccgggcggcggcgcgtggctgggcgggcagctgttctcggccatggtggtgcgcaggccggcgcacctgttcctggacgagctgggcgtgggctacgacgaggccgaggactacgtggtggtcaagcacgcggcgctgttcacgtccaccgtgatgagccggctcctggcgcggcccaacgtgaagctgttcaacgccgtggcggtggaggacctgatcgtgcggcgggggcgcgtcggcggcgtggtcaccaactgggcgctcgtgtccatgaaccacgacacgcagtcgtgcatggaccccaacgtgatggaggccaaggtggtggtcagctcctgcggccacgacgggcccttcggcgccaccggcgtcaagaggctccaggacatcggcatgatcagcgccgtgcccgggatgaaggcgctcgacatgaacgccgccgaggacgagatcgtgcgcctcacgcgcgaggtcgtgcccggcatgatcgtcaccgggatggaggtcgccgagatcgacggcgccccgaggatggtcagtcattaattgaggaagacagctagctagctgctgctactccttaattgcccaccgattgatttgattgggaagacagctagctagctgctgctactccttaattatcaattcactgattaatttggtgttggtttgcatgacgcagggcccgacgttcggcgccatgatgatctccggccagaaggcggcgcacctggcgctgaaggcactgggcaggcccaacgccgtggacgggaccatccccgaggtgtcgccggcgctgcgcgaggagttcgtgattgcgtccaaggacgacgaggtcgtggacgcctgagcgagcatccacgcgccagcatgcaagcagcgtcttatctgggccggcgccatcacggggtttcttcttttaatctgggactttgttgttgttggacgaatgaattcccttcgatcggttagctttaatctgtctcgttagtgtgtcgtgttcgtgtagcaccatgccacagctacgccatgccgtgtgctctgtcacgtgggggccactcgtggggtctcctgctgctgtcagaacgaataagagaagatggaattgtggtgaaacaataaaaatgcatggttt

SEQ ID NO: 31954 - DNA, 2711 bp, Zea mays
  Clone ID: UC-ZMFLB73238G10_FLI
cttgcattgcgcagccgcaggccgcagcacgaagctagccagtaggcggtagatggcgagcagcgcggggaaccgcttcctgaggcagctgagcgcgagcaacggcgacgaagcggtctgcggcggcctgcagatggaccagcaggagtacggcggcgccggcgtggggaggaggggatcccggcggtggtcgaagaagcgggccgccgccgccgccgccgcgaggggctacggcgccggcagcgggaatggcgtgaagcagccggcctctgccgcggggaagcgggtgatggtggtggtggacgagagctcgggagccaaccacgccatgatgtgggcgctcacccacgtcgccgacaagggggacttcctcacgctgctccacgtcctgccgcgctccggcagcggcaggggcgaggaggcctcctccctcgccaactcgctcggcacgctctgcaaggcctccaggccagaggtgcacacctgcaacaacacatgcatttgcatttgctgattagtggagttcaattgtaactagttactagctcgtaagaagtgctcgtttgaacaactttgttggcagcatatgcttggagccatgcagaacagcacaagagaattagtagtattagttaactgaaaacgagtacaccaacaacagaatcactaggagtttaattaaaaacaatgacaccaacaaatgtatcagtactagtgtacttcatgggttcatgttttttttaaaggaaggattctggctggttgttagataatctggagaagtcactcatcacttgaggagttgaggttgcctttctatacttgtaaccagttggggagatcgtagtcgtaggtagatgagatcagaatccacttttgtatctgcttggatcaagatctaggtccccaaagggcaccatatgcagggttcgagacaactctgtagacaaccataaaaatggtgttgtactatctctgacttcaccagctgtccagctccctgctccaccactagtggacctgctctatagtggatctaggtaaatctaaatctggattaacttttttttttggctttgtgaagttgttccaaacaaacccatagcaatcaactccaaaggaagtaagcaacacagactggaggagggctctctatttcctccctggtcccctaaaatctggaaccatgaaccatcgcattatgaaatgcaatatcctgcccggtttctgtttgcttcaatcaacgccatagttattttaatgtctgtgcacctgcctgcttaaatacgacagtagaggcgcatcaactgttcctttgtcttgttgtgctgtgccctgtaaatgtaaagaagaagaggtcatggtggctcacgatgagaaatgggtgtgaatgatggtaggtggaggtcgaagcgcttgtgatccaagggcccaagctgggcaccgtgctcagccaggtgaagaagctggaggcctccgtgctggtgctcagccagtgcaggccatctccctgctggttaagctggtaaggcactccgcaccccgtaccccttctcctatcttatccgctctgcatttgtctcggaaatgtgaagctctcagaggtcaactatggaccagtaaaattggggtgagggaatctctcatgatgccaatccatagcgtttcgtttaaaaatggaaaacgaagcttagacttcagaactagtaatttacatgtctgcaattccagcagaatattcgactagtatcagatttagcttatcctctcaggtaaacaatcctaaaagcaataggtcaaggctcaggagtgagctgattggcacttatttagttgcgtttgcgtctcaatgtatactttctgtaagataaatcaggtaaaaaatgtaattatgagagggcctactcgcaagtggtggccaaactatttgtaaagaatcctcgctcgccaccgttcagtactagggtccatggctttgggtgaaaataacgcctttaggatgcagctccatgtgcaatccataaatccaagatgccatgcatgtccttctagatacatctctcccaaacaaaagcaagaaccacgcacacagatgccagcgagatacgagtacagtacactttttgctgcaatgtgacatcacatgtggaggggcagctgaacctctctaggttggataggattattagggcaaatgtagtaagtactcttcacatcagtgtctgataaccagccgttgtttgagcaaattccaatgctgtgaccctttctttttgcagcttcctgcggagcagcggcgaggagtttgtggagcagtgcatcaaccaggcggagtgcctgacgctggcggtgaggaagcagagcaagggcgtcggtgggtacctcatcagcacccggtggcagaagaacttctggctcctggcctgacaaccatgcattttacctagctagttactactgctacatgatcacatttgttttaagtcactcccgtatatgtgctgtcatttcgtgtcatcaagtgcgtcacaagaaagaccatctctctctctccttcatcctgttgtaaagcgaaaagagcctccgaatctgaccacctttctacgaacctgtatcttccctgcaagtctttagcgtgcgtgtagtactgtgatctgcactgaacaatcatgtaatgctgcataaatgaccaattctgttgtacggcgctt

SEQ ID NO: 31955 - DNA, 1851 bp, Zea mays
  Clone ID: UC-ZMFLB73238H03_FLI
ggtgctcccccgtctgaaaaccctccccacctccggcggcggcggcggcgctggcgaccgggtgtcttctccggcgagtctcccccctagtaacaagaaaatatggatgtacctgttgatgaccctgtggagaacctcactggaagtcctagtacccttggcaatgaggaagaagccactacttatgctaatgtgcaagatcagtccaaggaagaaccagaaaagctttacgaggaacccaaagacccaatgcaagacgagttgggtaaccaagggcatgtgagcatgaacaatgaagatgtgggaggccagaacaaagtggaccaagctacccccacagagcacggcgaggaagctggggtgaagcagcatgatgctacagttcctgatgacaagaaatggcctgggtggcctggagagagtgtgttccgtatactggttcctaccacaaaggtgggtgccgtcattgggcgcaaaggggatttcatcaagaaaatgtgtgaggaatcaagagcccgcatcaaggttcttgagggaccaccagctgtgccagaaagagctgtaatgatttcagcaaaggatgaaccagacacagagctacctccagctgttgatgggttgcttagagttcatagaaggataacagatggtttagaaactgaaactgatcagcctcaacgagctactgtcaacactgggccgacaaggctactggttccagcttcccaagctggcagcctaattgggaagcaaggagcaactattaagtcaatacaggatgcttcaaagtgcgttctccggattgttgagaatgttccacctgttgcattaaacgatgacagagttgtagagatacagggtgaacctcatgattctcacaaagccgtagaactgattgcaagtcatttaagaaaatttcttgttgaccgcagtgtcctccctttgtttgaaacacagattaaagcacacaatatgcacagagagcaacctatgcctcctccacaggcatggggcccccctcctccgtcaccctggggtcatccaccaccaaaccttcctcctggtggcccaggttatgttgggaacccacactacatgcctccacggccacaagagaactattatcctcctcccgatgtgccccctgtagaaaagcagccacactatggaatttcttcatatggacgagatgcacctccaagtgctcccccagggaatcaaaaccaagcacatgggtcatctcaggtgacacacagcatgcaagttcctctttcctatgctgatgctgtgataggggcagctggtgccagtatcagctacatccgcaggcatagtggagcaactataagtattcaagaaggcgctcctggcgagatgacagtggagattacaggaagtgcttcacaagtacagactgctcaacagctaatcaagaatttcatggctgaagcttctccccagggaccaccagccccaggtccacacggtcaaccagtggacacgggttacggctcgtacccaccttacggtggagcatcctatgggtctcctccaggtgctccagctccagcgcctcacaacggtggaagttatggtgctgcaccatactcgtcgagctatggatactaatccggagcaagagcttgcctcagacttagggaaggagggttatcgttatggttttgtttgctagtctattcatctgttgagaactcaagattgttattgttaggacgtgtgaactttggtgttctaggctgctttcagacgccagtgtcgatatactctctttgctttattgttgcggaatttatcgtaatatgttattttaatgttcaagaaaaaaccaac

SEQ ID NO: 31956 - DNA, 1764 bp, Zea mays
  Clone ID: UC-ZMFLB73238H07_FLI
gtttttttttgttatgccattaggtggctgactatctgattttgtttcatttcactgcacatccagatttggtacaacaacgtccctcacccaaagctggtggagtataagaaagatcagaactgggttacaagatctggtgattatcttgtttttcctggaggtggaactcaattcaaagatggcgtgggaagatacattcagtttgttgaacagattatgccaaccatacaatggggaaggcgcacaagaactgtcttggatgttggatgtggtgttgccagctttggtggatacctgcttgacaggaatgccattactatgtcatttgccccaaaagacgagcatgaggctcagatacagtttgccctagagcgtggaattccagcatttctagcagtaattggaacacaaaagcttccgtttcctgataatgtgttcgatgttgtacactgtgcaaggtgcagggtccattggtatgcaaatggtggaaaaccattgttggagcttaatagagtactgaggcctggaggatatttcatttggtctgcaacccctgtctaccgtcaagagcaaagagaccaagatgactggaatgcaatggttactctgactaaatcaatctgctggagaacagtggtaaagtctcaagatgtcaatggaattggagttgttatatatcaaaagccagcatcgaattcttgctatgctgaaagaaagaccaatgagccccctctatgctccgagagagatggatcacgctttccttggtatgctcctcttgatagttgccttttcacaactgccattaccacttcagatgaaagatataattggcctgttccatggcctgaaagacttgatgttagctatgcaagtgtacctgatgattctgcttctaacaaagagaagtttgaagctgatacaaagtattggaaacagctcatttcagaagtatatttcaatgacttcccacttaattggtcaagcattcgcaatgtaatggacatgaatgctgggtttggagggtttgccgcagcactcattgatcaacctttatgggttatgaatgctgtgccaattggtcaaccagataccttgccacttattttcaacagaggtttgattggggcatatcatgactggtgcgaatctttcagcacctaccctcgtacctatgatcttctccacatgagtaatctcattggaaatcttacaaacaggtgtgacctcatcgacgtggtggttgaaatcgacagaatactgagacctggaagatggtttgtgttgaaagacacgttagagatgataaagaagatacgcccaatcctgaagtctctgcactatgaaattgtcgtcgtgaaacagcaatttcttgtggctacaaagagtttctggcgtcctggcaaaccagcttccacatcagggtgacatatagatcgtactttcaagggagtcttcaacaaccaacgattctattgattctttgagacctgatcaaactaattctttctacaacacagtctatgtagattattacctgtataagtatagaaaatacatatggtaagttgaggtaataccccttttttttgccaaagcataataacaaggatgttatagacttatgcagtagtaggcaagttttgacaaatacatacaaagggaagggatcatgaaacgtgttgtgtatacttgctcgttgataacttttgtaaaaggagtttgaaataaccttgtactcagtactcatcatggttctgc

SEQ ID NO: 31957 - DNA, 2537 bp, Zea mays
  Clone ID: UC-ZMFLB73238H12_FLI
aagtaacccggtttgattttgtttgtccaaattagtttcaatttaataccttctcgagttttgcttcctgtttttatcctttgggtttactaaattgcttagactatttgtggatctgtacatattaacttaacacctgcaagcacactgttgctaaatgttgatatatggtggtcgaatgctacttaggccccgtttcaatctcatgggataaagtttagcttcctgctaaactttagttatatgaattgaagtgctaaagtttagcttcaattaccaccattagctctcctgtttagattacaaatggctaaaagtagctaaaaaatagctgctaaagtttatctcgcgagattgaaacagggccttagtacgcattgtagtctaaattcactctataactggtatcagctattacatgttgcaaagtgttgatatatggtggttgaatgctacttagaatgttttgtagtctaaattcactatgcaactggtatcaactatattacataaaaataacgttatatgcttacattttgtttcctgcctacatattatataatcatattatatttaaatttgttttacatggctgggtacttacaccaaactcttaagacatatgtgctcacgcgcgctgggcgcgcgctaaacactagtatagagtagtagagattgaatggctgttcagggcagtgtgttgctacagttcctcgtttataccattactggtcttcctatctctgtcattgctggcactaatagcagatcatatctgcatgtacttttatagactgtatcaattaggctagattagaggacattaggaggatagctttgattctttcctttgcatgtacagtccttcgcataaatccagcctttgcatgtataagtacagcctacacaatagagaattcgttccacctaatcgcctatcttctttcactgaggtcctatcacttgacggaatgcaatcgtgttgggcaggtctggatgagatttcatcgaaacatttgtcaaattatgccatgggagcatcttaggctgttgcattgatttggctgatggctgtagttctgtattcaaatgttcccaatgagccacctttttaaatgtgttcagtgcctcttagaatatgcacagatgagtaacatactaccgtgctgtagtgctggactcgaactactataaatttgcctttctggttatctggtataagttaagattaaatgagccacaccagcagctcccaatctttatgaaatgaatgcaaagccaatggcaagcgaacctgcatggatccatgttttgtattgtggagtaaatcatatttgtttgtgcaatacatgttgtctgagagaggtcgcggaacaagggctgttcgggtgtgagtatccaaaaaaataaatgaatttgttaggtttcaattacttcttttccctgcattttacttagttatactggtagcagcggtggcctgtatgttgtcctggacccgtagaataccagatctaagaataaaaaacgtctgcagcggtatccagtacctcgtcctgtattatccaggggggcggctccatcccgtagatatgggggacaagagagcgtccggcaagtcctccagctcccggctcctcctctcattcgcgtgattgggcatggacccgtaggacatagaggatatgccttataggataccgttgcggataaaatttatttacgggaagaaatcttttggaggaatctttaaattagtatttaggggatgcaatatacaggctaccgttgctaccagtcttagggctagtttgagaacccttttttcccaaaagattttcatttttcaaagaaaaattagttcatttttccttgagaaaataggaatcccttaaaaaaatagtgttttcaaactagcccttaatgttttttttcatgaacagaagctgcggccgtcagaaaagcttgacaggtttcttgagggtagaaacttatatgaagggatcttccgtaaccacatccagattgtttcattgaggcttatacggtaaaaattcttctgctagtgagatcaagattaagggtacaggagttgcatggacccactagaaattggtggccaaagtaccaaacgagttctttgaaacagcttcagtttttcttgttatgtaccaaatcggtctgccactagtgcaatgaccacagaaacaaaaccagggcaggttcccacttcccaccgtgtaaatagagatgcagtcgtcatttttctagctgtcatttttctagctgggttctagtctttggacgacaaatacaagagtagggttgagattgaccatccgtacgtgcttttcttttttttcatggctcccaatctatctttggttgtatttgaatcttgtgctggggtccaatgcgtaatcttctcgttttgtgagggattctaaagctttgatctctgaagtgacttttctgcacaaatgtatgattagctttacatctggactgatcactgatgaagctgccgattgatttct

SEQ ID NO: 31958 - DNA, 785 bp, Zea mays
  Clone ID: UC-ZMFLB73239A09_FLI
tctgatgttgctgctagtgctcttgttggagcagccaatgtttttggtactatggttgcatcttctctaatggacaaacaaggaaggaaaagccttctgataacaagcttttctggaatgggtgcttcaatgctactcctagcattgtccttcacctggaaagctctggcaccttattctggtactcttgctgttgttggcactgttctgtacgtgctgtcatttgctctaggagcgggccctgttccagcgctacttcttcctgaaatatttgcctcgagaataagggccaaggctgtcgcattatctctaggcatgcactgggtatctaactttttcattggcctgtacttcctgagtgtcgtgagcaagtttgggatcagcaacgtgtatctgggatttgcatcagtatgtgcccttgcagttctgtacatagctgggaatgtggtcgagaccaaggggagatcacttgaagagattgaaagggagctaagtgtagcagaatgatgtacttttgctagtcatgctgtggcgccgttttggttatcgagaatgcaaccaagcgctcaaccgagcatccttggacctggagactctttctagtttcatgtagttttagaaataagcgaacggcaagagtaccaatcttaggtgacttggtgtgggttgtgtctgaaataagtgaattggattgtagaatttcagaaataagtgaattggattgtagaatttcagaaagtgtgttccccttattttttcgctgcagttccttccatgctagacct

SEQ ID NO: 31959 - DNA, 2100 bp, Zea mays
  Clone ID: UC-ZMFLB73239A10_FLI
gccgcattgctcgcccagagttcttgtttaggcaaaggcaaaagcaggagcaaaaaggtttcgttggcgatggcgagctcgtggacgcttcctgaccacccgaagctccccaaggggaagccggtggctgtcgtcgtgctggacggatggggcgaggccaaccccgaccagtacaactgcatccatgtcgctcagactcctgtcatggactcgttaaagaatggtgctcctgagaaatggagactagtgaaggctcatggaacagctgtgggtctcccatctgatgatgacatgggcaacagtgaagttggtcacaatgcacttggtgctggtcggattttcgcccaaggtgctaagcttgttgatcaagctcttgcctcaggaaagatttatgatggagatgggttcaactacatcaaagaatcttttgaaaatggtactcttcaccttattgggttgttgagtgatggtggtgtccactcccgccttgaccaactgcagttacttctgaaaggtgtcagtgagagaggagcaaaaaaaattcgtgtgcacatccttaccgatgggcgtgacgttttggatggcagcagtgttggtttcgtggagaccctagagaatgatcttttggagcttcgaggcaagggtattgatgcacagattgcttctggtggtggaaggatgtatgttaccatggaccgttatgagaatgactgggatgtggttaaacgtggctgggatgctcaggtgctcggagaagcaccctacaaattcaaaagtgcacttgaggctgtgaaaacactgagagcacagcccaatgctaatgaccaatacttgcccccatttgtgatagttgatgacagcggcaaagctgttgggcctgtattagatggtgatgcagttgtcactatcaacttccgggctgatcgcatggttatgcttgctaaagcactagagtatgcagattttaacaattttgaccgtgtacgtgtccccaaaattcgatatgctgggatgcttcagtatgatggtgagttgaagcttccaagtcgctaccttgtttccccaccagagatagatagaacatctggggagtacttggtgaagaatggcatccgcacctttgcttgcagtgagacagtgaaatttggccatgtcacatttttctggaatggtaaccgctcgggatactttgatgaaactaaggaagagtatgtagaagttcctagtgacagtggtattacattcaatgttgcacccaagatgaaggcgcttcaaattgctgagaaagctagggacgctctcctaagtggaaagtttgaccaggtacgtgtcaacctgccaaatggtgacatggttggtcacactggggatattgaggctaccgttgttgcttgcaaggcagctgatgaagctgttaagatcattctgaatgctgtcgagcaagttggtggtatttaccttgttactgccgatcatggcaatgctgaggatatggtgaaaaggaacaaatctggcaagccgttgctcgacaagaatggtggtatccagattctaacctcgcatacccttcagccggtgccggttgccattggaggccctggtcttcaccccggagtgaaattccggaacgacattcaaatccctgggctcgccaatgtagccgcaactgtgatgaacctccatggatttgaggcccctgctgactacgagcaaaccctaattgaagtggctgacaactaaatactggccagctatgtccaattttggttctatagttttgagaagggatatggccatgccattcaataatttctgtttgcaagcacgttgctcaaactcaccaaaacattgagaaacgccttttgacttgcatttagatgctctatttataccgttgacaatcgtctcttctggcttttagcagtttgatggctatctttacttagctatataatgtatctgagactgcaaactttgtgtcagtcaaactgctcgaggttatatgctgtttgtgtgggtcatcacgtgtgattaccttcgcacgcattgacgcatgaattgtgttcaccattctaattgcaaggcattttgatgggctac

SEQ ID NO: 31960 - DNA, 2007 bp, Zea mays
  Clone ID: UC-ZMFLB73239B07_FLI
tctccgtttgctttgcattcaccccttgccgcacacatcaggaaggcgggcaggcgacgacaatgacgatgatggcgccgcatccgcagccactgccgctgccacagccgccggcgccgttcggggacaccacgctcaccaaggtgttcgtgggcgggctggcgtgggagacccacaaggacgccctccgcgagcacttcgagcgctacggcgacatcctcgaggccgtcatcatctccgacaagctcaccggccgctccaagggctacggcttcgtcagtcccccttttcctctcccgttcccggcccctagctccgcctgtttgttgttgttgttgtttttttttcttcatctggacgagcgaggtcgacccatatgcgaaacgtcgccaacctagcttgcttgcatgcacggcaggtgacgttcaaggaggcggacgcggccaagaaggcgtgcgaggacgccacccccgtcatcaacggccgccgcgccaactgcaacctcgccgccctcggcgccaagccgcgccccccgccacacatcctccgcccttcgccgccggccaccccggcgccgcacgcgcccgcgctcccctcgcaacaccagcccacgccagccatcgccgtggggtccaggggcgtgtcgccggtgccgtggtactaccacccctccacgacgccgccgccaccggccgcgcaccactacgcccacggcgcgcaccagcagtaccacggcgtgctcccgttctaccccgccgccgccgccacctacgggtacgtacacgcacgccgctcccagctccgaattccaatcccccgcccgcgacaaggtacgtttcgctagcccaattgaaaaagaaaccggcacggcacggcgttcgcgcacctcgagcgccgccaaactatctgcactgcacgtcgcgcgaggctacgaggatttcgtgtcctctgctcgttggcttcgggttggctggctccttgcgagcttgcggcgggcggggagggggaccagtcaccagtccagtgggcgcgcgcacacatgcgtggcagagcggctgctttggtttggaattggagcagccgagcacgcgaggcgggactggcgggaggcactggcgcaggcacagccgcgcacaggctggacctggaccggaccgcgctgcctcgtcgtgctcgcacgtgcccacgtgccggcctgcacggcggcacaaaaaaaaaagagagaggaggtggacatttcaatgctacgtactggacatggccatgtgttaagactcggcacattaattaccctagttataaacaattactactataaaagtagtagacgactgatctgtccctgttctctgccattttttatcgggttctactgtgcgcggcgcgccactgttacgtgcccctcccccaccccactcgtactgatcgatcgatctgtgctgttccgttcaggtacgccccgaattacgtcgcggacctgagctacaatgcgaaggtaggccaggcggcagctggcggcacgggcgggtcctacctgcaggggcacttcgcgtacccggcggcggcggcagcgcagggcggcatggtggcggcggcgcccaacggcatggtgccggtgtacccgttctaccactaccaccagtaccacgcctcgcaggggggagtcgccgccgcgcacttcttccccccggtctccgccgccgccgtccccgccgtcgtctccaagcacaccgtcatggccgctcccaaagtggagcaggtgacaggctgcagctgaaggcacgaggcgatcgatgatggcgacgacgagcggcggaacgaaaggagcaggccaaacaggctgagctgcacatgaagggtgtcgtccgtctgtcgggagggcccgaagcgacgcaaggcccgggcccccattaggccattgctacatcccccctctgacttcgtgcgtggctgcacggccaccgtgccgggcaagaacagtctgtaacaaatgattcgattcgtctc

SEQ ID NO: 31961 - DNA, 987 bp, Zea mays
  Clone ID: UC-ZMFLB73239B08_FLI
caccaggtgcagagtctttcgtcatctcttctccggcgaagaacccccagtcgcccaccagatcacttgttaaactttgttgaggggtgatggcggtttctttcgcaaacctcaactccgaggcagggcttaaaaagcttgatgagtaccttctcactcgcagctacatcactggctaccaagcttccaaggatgacttggctgtctacacttcgttttcggctgctccctcgtccaagtatatcaacgtagcaaggtggtttaaccacattgatgcgctcgtgaggctgagcggaattactgcagagggccaaggtgtgaaggttgaatcctcagcagttccttcagccccaactccagatgttgctgaagcacaggccccagttgctgaggaggacgacgacgatgatgttgacctttttggtgaggagaccgaagatgagaagaaggctgctgaagagcgtgctgcagctgccaaggcttctggcaagaagaaagaatctgggaagtcatcagttttacttgatgtgaagccatgggacgatgagactgacatggccaagctcgaggaagctgttaggagtgtccagatggaagggctgctctggggcgcatccaagcttgtcccagttggatatggtatcaagaagctgcaaatcatgatgaccatcgtcgacgaccttgtctctgtcgacactctcattgaggactatctgtgcgctgagccagtgaacgagtacgtgcagagctgcgacatagttgccttcaacaagatctaggcgtgacttccgatcagtccttcccctggggtgctggcgatggtggtggctgggcaatgcaccagcctaatttatccatagctatatgtctgctttgtgtggccagtgatattgccgtgagtatttttggatcctattcgagtcgaatgtaccagtaccagagttaatttgctttaattcgaaacaccgttccagttggaattctgtt

SEQ ID NO: 31962 - DNA, 1194 bp, Zea mays
  Clone ID: UC-ZMFLB73239C05_FLI
gcacgccttccgttttgggaaggcgaggagaggggaaccccggcccagggagagttgtggggaggggatcggcggcggaggagatggaggagcgggagaagctcgtgtgcctggccaagcttgccgagcaggcggagcggtacgacgatatggtggaattcatgaagaatcttgctaggatggacgtggatatgagtgctgaagaaaggcatttgttctcagttggtttcaagaacactattggagcaaagagagcatcatggagaatcatttgttcacatgagcaaaaggtcgcagctgatcgtcagactggtgtgatgatagatgcctataagaagaaagtagaagaggaactaaggaaggtttgcaatgaagtattgtcagtcattgctattcactgccttcccttggccagtacgggtgaaaatatcgtattcttttataagatgaaaggtgactactaccgttacttggctgaatttagcactggaactgaaaagaaagctgcctctgatcagtcacttatggcctatcagcatgccatggttgtcgcctccagtgagctctcacctgctcaccaaatccggcttggccttgccctcaatttgtcggtcttcttttatgagataatgaactctcatgagagagcttgccaagtggcaaaacaagcatttgatgaggctcttactgagataaattctggtgagggagtttacaaggatagcacacttatgatgcagcttctgaaggacaacttagcattgtggacatcagaactaactgggggtgaagcatccaagggtaacggcgatgtcgacatggagggttgatacattctccatgttttaaggaaacacagaacgcacgcaaaaatatccaggctgtgatgctagcgaacctgggtcctcaagttttttctgcatcggaactaagaagagccttgtgtatttttctgaagtttctgtccgtctcggggtttttttttttgaggtctgtttgttcctctcttttggccatcgtttggtcctggagtcagtcactcactaccaagtgtttcagaggtctgaactggtgagcatccagatctgttgttgcttttttttccttctgtgcttcagaggcatctttgtacaccgatggaaaactgtttctcttatcaacgcatagactgtcagtgctgttactgatcatgtt

SEQ ID NO: 31963 - DNA, 940 bp, Zea mays
  Clone ID: UC-ZMFLB73239C11_FLI
ggaaattcagctgcagcttgagaagatgaagaaatatgcttctgttatccgtgtcattgctcatacccagattaggaagatgaagggtttgaagcagaagaaggctcacctgatggagattcaggtcaatggtggtaccattgctgacaaggtggactatggctacaaattctttgagaaagaggtccctgttgatgctgtcttccagaaggatgagatgattgacatcattggtgtgaccaaggggaaaggttatgagggtgtggtcactcgttggggtgtcacccggcttccccgcaagacccacaggggtctccgcaaagttgcttgtatcggtgcatggcatccggctagggtctcctatacggttgcccgtgctggtcaaaatgggtaccaccaccgcactgagatgaacaagaaggtttacaagatcggcaaggctggacaagagacccacgatgcctccacagagtttgacaggactgagaaggacatcactcccatgggtggcttcccccattatggtatcgtgaagggtgactacctgatgatcaagggctgctgtgtgggtccaaagaagagggtggtgaccctccgccagtccctcctgaagcagacttcccggctggcgctggaggagatcaagctcaagttcatcgacacatcgtccaaatttgggcacggtcgtttccagactaccgatgagaagcagaggttctttggcaagctcaaggcgtaaggtgctgcggtgcagcgacaagtcccatttctcaaaatcatcaaactgtgatacttttgtttgtaaccttgctgtactaagttttgtagccggatggtttgggagcatggtccggtcttctatggattgttccatgcttctgaactgcaatgtctatgttttgtgctactttggttgtttaatgccctaatcattgcatat

SEQ ID NO: 31964 - DNA, 947 bp, Zea mays
  Clone ID: UC-ZMFLB73239D02_FLI
caaactgaaagcacaacatatatgttttttttggcaaatggatgtcatgcaaatttatttgcgcaaatttactcttcctgtccaacttgtttcaccagctgcttactttaatcgtgttaaccatgctttccctttttaaatattcatgtggtaccttagtcccctgtttctaattttacagtgaagttaatacttaatagtatttatctatttgggactacaggtctcaggagatgctacccttcaagttgaccatttcacattttcaccaagcatcgctgacaatatgagaacagcttccttagttatcagccatgcaggttcaggaagcatatttgagacgctgcggctgggcaaaccgcttatcgtcgttgtaaacgaggatctgatggacaatcaccagagcgaactagcagaagaattggctgaaaggaagcacctcttctgcgcacgcccacaaacactgggagagaccatccgggcaatggacctggagacgctggttccttacgagccaggggatgccaagccagtcgtcgccctgatcaacaggtttcttggcttcccagttgcctgacaaataaacgacgagatacctccattaaggcgtcagttcctgtacctgtttgatgtaaaatggattaactggcatatggaaacagcaagactgtcctcgatcgttgcagttgggtttaattggggtggggggcgtcgattcgttgttcttgtcatgcccttgacacgagaaggcaatactgtgtggttggacggcatcactgaagccaatactttatgatcgtgagagggccgaaggagacggaagtcacgtcacccttcttcatagtgatttgaaaagtaccattgaaatgatagccagcaggggccaacgaaaccaagaaagttgtagtaactgacaatgaattcgctgcaattgaatgctagttgcc

SEQ ID NO: 31965 - DNA, 690 bp, Zea mays
  Clone ID: UC-ZMFLB73239E03_FLI
gattgctgctacaattggtcttaagggtcttggaagcctcctttttattttgagcagctctctcggtgcttatctcctgctgctgtaccttgctttgatcactcctatcatccatgacttctacaactacgatatggagaaggcagaatttgcaggcctctttgcgaagttcacccaggatttggcgctgatcggagctctgctcttctttctgggcatgaagaactccatcccgaagcggcagggcggcaagaagaaggcccccaaggcgaagacgaactagggctgcttagatagctgcacgcctcaggcggggtgtatcaggccacaggtctatttcgaagcaggcccagcgcgatgcagcgaatgccatcgagctgcgcttttacatgtttatcatcagattccattttgcggggcacggcccggacaaaggtgtgaccggggtgggttaggcgactagattgcacgattatgtacttgcgatttgtttgttgaactgggttgccgacagttaatcttcatttgattttatcttgttagcagcgcaggaaccgttgctgattcagtggttggtagtttctttcacttcctgagttgttggtttagggcatgttcgttttgctcttaatccatgtggattgagtgggattggataggtttaatctcaaataagttaaaatctttcat

SEQ ID NO: 31966 - DNA, 1638 bp, Zea mays
  Clone ID: UC-ZMFLB73239F02_FLI
gcagagataggcgtcttcgtactcgcctacctccgcggctcaaacctttcccccttctcccaattccttccgccggccgccgctccacccgtacgacgacaccatgagggagtgcatttcgatccacatcggccaggccggtatccaggtcggaaacgcgtgctgggagctgtactgccttgagcatggcattcaggctgacggtcagatgcccggtgacaagaccattgggggaggtgatgatgctttcaacaccttcttcagtgagactggtgctgggaagcacgtgccccgtgctgtttttgttgaccttgaacccactgtcatcgatgaggtgagaactggcacctaccgccagctcttccaccctgagcagctcatcagtgggaaggaggatgcagccaacaactttgcccgtggtcactacaccattggcaaggagattgttgacctgtgccttgatcgcatcaggaagcttgccgacaactgcactggtctccagggcttcctcgtcttcaacgctgttggtggaggaacgggctctggccttggttccctcctcctagagcgcctgtctgttgactacggcaagaaatccaagcttgggttcactgtgtacccttccccccaagtttctacttcggtagttgagccatacaacagtgtactgtccacccactccctcctcgagcacactgatgtggctatactgctggacaatgaggccatctacgacatctgccgccgatcccttgacattgagcgcccaacctacaccaacctcaacaggcttgtgtcccaggtcatctcatcccttactgcctccctgaggttcgatggtgctctgaacgtggatgttaacgagttccagaccaacctggtaccctacccgaggatccacttcatgctttcttcgtacgctccagtcatctctgctgagaaggcctaccacgagcagctctctgtggctgagatcaccaacagtgccttcgagccatcttccatgatggccaagtgcgacccacgccatggcaagtacatggcctgctgcctcatgtaccgtggtgatgtggtccccaaggatgtgaatgctgctgtggccaccatcaagaccaaacgcaccatccagttcgtggattggtgcccgactggcttcaagtgcggcatcaactaccagcctcctagcgttgtgcctggtggcgacctggccaaggtgcagcgtgccgtgtgcatgatctccaactccaccagtgttgtggaggtgttctcccgcatcgaccacaagttcgacctcatgtacgccaagcgtgccttcgtgcactggtacgtcggtgagggtatggaggaaggtgagttctctgaggcccgtgaggacctggcggcgctcgagaaggactacgaggaggtcggtgctgagttcgatgagggcgaggatggcgacgagggtgacgagtactagagaagtttgctgatgacgcagcatcaggccagtgtgctgcccttatcccgtgatctgccgagagttgctcctgctatcgtgttatgtgtgtctgttctgaagtattgtgtggtttacaacacctgatgttgtaagagttgttaattcccctgcattgctaccgggttattgagaataac

SEQ ID NO: 31967 - DNA, 2018 bp, Zea mays
  Clone ID: UC-ZMFLB73239F05_FLI
gtaggcatagcgctctctctcccgctcgccccctcgagtcccgactcccgtcctcgatcgaaattccccggatcttccagctattagacagttttcctgctgattttcgcggcttcttttcttttgctcccggggagataggatggagaggatactcagatgcttcaatctagggccaacaggatccgaagatgatgatataagtttcacactgaccgtggaaacgtttagcttcgaagagctctctgctgcaactgataatttcagtagcaccctcaggataggctctggggggcaagccacagtctatgaaggccacataccccacattggacaggttgctgtcaagcggttgagaaccaatgattttccctctaagcaaagggcatttcttatggaggtctatgtgctcaattcaactaaccaccctcacattgtgaaactactcggttgctgttctgagggaacagaacgacttcttgtgtatgaatatgtaaagggggggacattgcgtcatcgattgaaagagttgaactggtatacgagaatgagaattgcacgtgacacagctacagttctggagaaactccatctccaatccgatccaccaatcatccacagggactttaaatcagacaacattttattaagcacaaaccttagtccaaaggtttctgatttcgggatagctaaaattgccccagctggggatgagcttactgcagcaacatcagaaacgttgggaacgtatggatatgcttcaccagggatttttcgtccattaaatgcgacagtcatgacagatatctacagttttggggttgtgctcttggagatcattactggaaagcctgccattgatcatagtaaagaaggagatgaacattatctagttcactggagacaagttttttttggagctgattatgttattaaagagcaagttttggagtagtggttcatttgactgtgtttggaagtccaacgaatctatggacagactaaggttgaaaaatcgtttgtggaactaatgatgatatataaactgatgggcatgtttaggcatacatgtggtttatctgttattttctgaagataaataatactggagagagagagagagttgtcggtacatgtactgttcgtattataattggcttgggagagtgctgcatctgatgggcatgaagatatataaactgctgcatcaaacaggccaatttgaaagaactatcagaaactactgggaacagggactcacttcaggtcgtttatggcatatatgtacttgtccgaagataaacaaatacctgagaaagtgtttggtatcaccatatactgtttgttcttcatcatcttggagatgtgcagcagccatttgtaaactactttggatcaagttcctggtgtcatttctccctagattatcatttcacaaaacaacccctgtgcaggccgcaagcaagtcgaaagatgggaactttgaggaagtacttgatccaaggttacgtggctctgtatccagaatggtgctcagcgaggctcttgctgtggtggataggtgcactgggacagaacctgttggccggcctcggattagagaaatcattagagcccttcgccatgtggtgtccatatctcaggatgatactccgggtgcgtcatcgtcagcagcgagctagatacgtgcatggggtctgtcactccatcttcgatgaagcatataagaggcaaatgctgacaagaaagcaaaaactgtcgactgatgcgcatctgctgtttactgattaaaatataattcatgcatgtgactgttagactgtgtgctatatgtaagagactctgccttccatctcgtacatcctgaaagcttctgtcagccacctgcacagcacttaggtgcgtttggttggagagtcaaatggaatagagtggatccattatagtatttgagaatggagccattctattctacgtttggcaagaataacaaagtcgttctattttttgtttggttg

SEQ ID NO: 31968 - DNA, 2694 bp, Zea mays
  Clone ID: UC-ZMFLB73239G02_FLI
gcctcaccgcgccgcacgcctgcgtcggtcgccgaccccagtcaccggtccacgcccgcctccccctttctcctccgccctttcttgtgaccgccgccgcgggccctagcccgccgttccctctccggcgccccgctcccgcacccgcaccggatcagtccgggccgcgtggtcgcccccacctaccgcctcgggtccactcgctcgcggttgcgtgtcccgcggggtggcccctcgggcctcggcagctccggtttcgaatggggctctcgtcggccgccactggcgacggggtgcagctctgcgtgttcgacctccagagggggcaacaggagggccaggagctcgacaagatcctctacttctaccccgccgactgccccatcctgctccagctctctgtcatcggcctctgcgaggggatcgtcactttcactaggttgccttcgctctcactcatttttattgtgcagttggtcgcaatttgaaggtcttgatctgctcgtgctcctcgccaacaacagcagcagcatcttctgcgtttaggaaaagaattgcacccagctttctagagggctacaacagcatctaagcttatagcatcacttcagtatttcaaatccgtagattgctcgagtatgcaagtttgggtgaatcgattttgttgcatgtgatccagcttaggttttttcaagcaagaacaattctggacttgattagtttttttggcagcgggccaatggcgttggttcctaagttcacctgtatgacagtggcagatctagaaacatctagccttttaatagtaataacatttgtaattttgtatagtggtttattttcacatagtgttcacagttcacatattcatgtagatctctagacaactgcaaatactaatggatgattactcagactgacatgggggttaacatcagtaattggggcccttcataagcaacatctcttttgtggtcacattatgacttccgtttgctctttgatagtgtattctccccaaattgccatccaagtatttcctgactctatacttttgataattcatttattgcctaatattgctgggttccacatcttatttctcaatgttagttatatgcagaatattttccccagaagaggattgcgaggttatagaatcagagaaacactcccatgttttttaccaagccgaaacggatatttggatggttctggttgtggaaaaaaacaaggaaaatgaattgacttggcgttgtggtgcactacaagggattcttaaagaggctcattctctctttgcaatgtttcatggaccaatccgaactttgcttcacaaacaacccagtgcagagcttgctcgtggtcacctccgcacatttcttacagattatttgagcgaacagattttaatgttggaaagaagttacaatttccaacctaccgtgacagcctaaaggagaggggaacagtccaaatgcttacggtatcacgagaagtggcacttgacgttcagtcactcgccacagtacttggatcatgtcttggaaatgttacctgccaatcacttgtactatttgaagacctcttggtgtcaacgacactgcccccggatgatactttaaacctatatacatatgctgttctgaggttaactccgcgtgctttatattccaatgcaagttcttggtcctatttgcggaaaggaacttctgttagtgctggccaaacatcaagttcatcaaatggaacaactgcaggagaaaggcctctcctacgtgagaaattgtcaaagggaaaggatggctttgttgctgctgatttcacagctacagaagctcgttgtgctgtaccctcgactccaatactttggttccagcaggcagatgagtgcatgcacctatgcatttatcagcacaaaagtctcactatcttactgctggttcctgcttcctcagtgataaatggagaagagggcattactcatgtgaagaaggcgatgcttgaaaatgcatcacagaagattgtcactgttgagcagaaattgacacgaggatggggaggagaaaatgcgtatcatgttagtggatatcgttatttgcttgttgatccggagagaagagtatcaagagcctccccacctgggaaagtcaccaccctagcaaaggattctctacttgccctcaacatgctaagacaagaagtagatctagagaagtcaagatacaagagaggcgacccttgtcatgataaggatttcgaagtatgtatcagaacaaaaaacaatgcgtgggttattgctaaaatcagtcaaggaagggagctttacatggctctagagaagggtggtgaaacgcttctatatgcatccacagctgtagagaaattcagcaacaggtactgtgagggagcattctctacagattagaagcaccagagggagatcttagcttttccatacattacctattatgtacatcctgtttttttcccagctgtatcgttgccccctattgttgagagactcggaccactctttgcgaagggaataaggagttcgtatcagttgtacagctgctctgctgtcgtgtgctatctgcaaaagaatagcctagtctgggaataacgcagagcgggatagagtttgtttgttcacttatgcccttccttaacgcagagcattgtgcgtgtttt

SEQ ID NO: 31969 - DNA, 1153 bp, Zea mays
  Clone ID: UC-ZMFLB73240A04_FLI
ctgggcggcggggacgaggacgacgaggacgaggaggcgcgcaccgcgaggctggaggaggagaacctggccctccgggaccgcctcttcctgatggagcgcgacatggccgacctccgccgccggctcctagccgtcgaggagctctgccgagaccgccacagcgacggcggctgcgtggtggacgccaccgccgccgacgaggccgctcgctccgagagcgctgccgccgtcgtatcccccggcgcctgcgcctgcgaggaggcggacgccatggagaagtgaagcatatacagtaccttctacctgaccagacaaggccctcccggccgtactgaaactgtacatacggtttccgtttcttccctgtgcagatgtcgctgtggagagtagtaggaagaagcggcacctttgaaagccttttagagttactcttcgttgcatcttgttagctttgatttcgtttcatgttcttgtagaaaaggatcatcagtcaggaaaaggccgtgggcgacgatggaatgtgagggggaggaacacgagatcctggtgtcctcctgctcgtccagatcttcaaccaccagctaaccatccttttttttagtgtagccagtaattgttattccgacgttctttgttttgtaatactactaatatctgttgtgatattctgtgctgtgattgttcggtgattgggtagggcagcctcgcaggactggaaccatgtctgcatctgatcgacgggacagcccccgtgttgggttgggtgtgttcaaaatgctgccgttgcggcttgggtggttatggatgccttcaatgccgtccggttggatttgcttgctactagtggtaaaagtagtgccgtgcagactgggctggctctcgcaactaggcaggcaccggatggctttggcctctgggcgacgagcagcggagaagcggtacacactgtacagtatggccgtggcaaagcgagggggtagggagaatagcatcgagaaagctgtgaaagcttccatagaggagaacctttgagtattcgttcgggctttctattctatttgttttcctcgcccttctctcacagctacttgcctctgttaatttttggcgcccatattaccaactttgtttgtttttatttaaaaaaaaa

SEQ ID NO: 31970 - DNA, 1576 bp, Zea mays
  Clone ID: UC-ZMFLB73240B12_FLI
cgacgctaggtggggccccagtcacaccatccctccgctgcatcttcaacaaatagcctccggcgcaggtggacgtgggcctcagcgacggcagcttcgcgaggggggccgtgcccagcgcgcagcggcgcatccaccgatgatgtgatatatgaggccttggagttgagggatggaggatctgattatcttggcaagggtgttcttaaggctgtgaacaatgtaaatagcattattggaccagcaattgttggaaagcttgatggaacctccaacgaatggggctggtgcaaacagaagcttggagcaaatgccattcttgcggtctcacttgctgtgtgcaaagctggagctatggtgcagaagattcctctttaccagcacattgcaaatcttgctggaaacaaaactctggtgctccctgtacctgcctttaatgtgattaatggaggatcacatgctggaaacaagcttgccatgcaggagttcatgatcctcccaactggtgcctcattcaaggaggccatgaagatgggagttgaggtgtaccaccatctgaagagcataatcaagaagaactgaagaagtatggtcaagatgctacaaatgttggggatgaaggtggttttgcacctaacattcaggaaaacaaaaaaggccttgaactactgaaggcggctatagaaaaggctggctacactgggaaggtacatcctctcttaactacttggctcacagacagacaaacctttgtgtgcataggtgattcgacttacctgtgtggcaggtgttcattggaatggatgttgctgcttctgaattcttcagtgagaaggacaagacttatgatcttaatttcaaggaggagaacaacgatggttcgaacaaaatatcaggtgacagcctgaaagatctgtacaagtccttcgtttctgagtaccctattgtgtcgatcgaagacccatttgatcaggatgactggaccacttacgccaaactcactggtgagattggacagcaagtgcagattgtaggagacgatcttctcgttactaatcccacaagggtcgccaaggccatcaatgagaagacctgcaacgctcttctcttgaaggtgaaccaaatcggctctgtgaccgagagtatcgaggctgtcagaatgtccaagcgtgctggatggggagtgatggcaagccacaggagtggcgagacagaggacaccttcatttctgacctctcagttggcctggctacgggccaaatcaagacaggagctccctgccggtctgagcgcctggccaaatacaaccagctgcgcttaggatcgaggaagagctcggtgttgccgcagtccacgccggagcgaagttcagagcaccagtggagccctactgaaccacgtgtgcctagagcctggagaaagaagatgaggatgtttccccactagttcgctgctgctttttgatagaatgcctgtacgatcacagtaatagaagtttggccttgtttgccgaatagctacactagtgggtttttttttctcgtggaaaaaaagaaagaaataaaaccttttttt

SEQ ID NO: 31971 - DNA, 753 bp, Zea mays
  Clone ID: UC-ZMFLB73240E08_FLI
gaatagcaaaaaccagaaaattcgattgacccactagcgattaaagccctcggattccttggtcgcacccacgcccccggtgtttgcgactgggagtccatttgatcctgtggagtactttggcaatttacatgttcccggacaggcaaacaatgcctatatcttcccagggtttggcctcggcgtggtgatgtctggagctatccgcgttcatgacgacatgcttctggcagcatcggaggctctggcccagcaggtcacagaagaaaattttgagaaggggctgatttatcctcccttctcaaacatcaggaagatctctgcccacattgcagccagcgttgcagcaaaggcatatgaacttggtttggcaagtaggcgccctcggccaaaggacctggtgaaatatgcagagagttgcatgtacagccccatctaccgcaactaccgttgaattcggatcaactccagttatgtgcaaatcagcagcagctattccgcagcgtttatctcttgcgatgtcatgtaaatcagctccggttagccttttggatgctagtcagtcatggtgctggtgccgtccttccggacaaggataaatttggaataaagtttgagtcgacgattcctccctcggtactgcgtgttcacctgaacgtttttttgcttcacgcagttgctgttgttttcaacaagtgcttggttgtatgcgtgaaggtaagtaggtaacaccaggaaaggttcttctttttt

SEQ ID NO: 31972 - DNA, 657 bp, Zea mays
  Clone ID: UC-ZMFLB73240F04_FLI
ctcggctgtggaagttcgagggcgaggcgcgggagcaggcgaagaaggacctggtggaggtcctggagaccctggagggggagctcgccgacaagcccttcttcggcggcggcgccctcggcttcgtggacgtggctctggtgcccttcacgtcctggttcctcgcctacgagaagctgggcgggttcagcatccaggagcactgccccaggatcgtggcctgggcggcgcgttgcagggagcgggagagcgtggccaaggcgctgtccgaccctgccaaggtgctcgagttcgtccagttcctccagagcaagttcggggccaagtgatcggaagcactgcgtgtgctgctatgcaggcggcaggccatgctggtgctttgatctgctcgatcagctctatgcccatgctagcgttgcatagcgcagttgatgtgtgatgtgtctggttggttgtagctgctctttgcctggttgcgtcagtgtaaggtttcaggttttcagcgtctgggcctctggggtagctctgcctctgcgttgcccttgcccttgcccttgcccctgccccctacctagcggctcttgagctcttcggctcgccagcaataaagttgcagaggctttagctaaaagtttctgcattttttagttgacgatt

SEQ ID NO: 31973 - DNA, 2500 bp, Zea mays
  Clone ID: UC-ZMFLB73240F09_FLI
cccgcatcgcccgccatccccaccgccgcgcctcttccgggcagccatggacgaggccttcgcgcgcgcggtggaggacggcctcaagctcaccaagcgcctcgtcctgcccagcgggggcgggatgccgccgccgccgcgcccgcacctggcgatggaccgcgacgaccccgccgcggcgctgcagcagctcatgccggcggcgcccatggcgtacgccgtcgtcgtcgacccggccgccgtcgacagccccgacgtgcccagctaccagccccacgtctacggccgcctcgacccgcccgcgctcatcccgctccagatgcgggaggtcgagctccgcgtcgactgcgccgccggctgcgccaccgccgaggtcgccctgcgcgcgcgctggtggctgcactgcatcacgcgcagccgcgcgtgccactgccgcatcgtcgtgcccatggctcaccagggttcaattctaggcgctgaggttactgttgggaaaagatcatacaatactcatgtaattgatacagaggataactgttcagtgaagattgcaatgcccgagagtgggggtcttttaaaacaggaatttttttccttgacaataccacaggttggaggtggagaagatatatttgccacaatcagatggtcacaaaaattgctatacgacaacggacaattttctgtcgaagtaccatttcgtttcccgcagtttgtgaaccctttgccaaaggttttcatgaaaaaggagaaaatacagttgattgtgaatagtggtgtgactaaggagattttattgcagggaacaagccatcccttgaaggaaaaaagtagacaaggtgagaagttgtctttcctgcatgaagcagttgttgagaattggtcaaccaaagattttaccttcgcatatactgtttattctggtgatttgtctggtggagttcttgtgcagccctcaaccttgcgtgactatgatgacagagatatgttctgtctttttcttttacctggaaataacgagaacagaaaggtcttcagaaaggctgttgtttatatcattgatacaagtggaagcatgcaaggaaagcctcttgagagtgttaagaatgccctgtccactactctctctgatcttattccaggagattacttcaacataataacatttaatgatgagcttcactcattctcatcgcatttggagcaagtaaatgaaaaaacaattggaaacgctattgaatggatgaacttaaactttgtcgctcagggtggcactaacatcatgcatcctttgagtgaggcaatgactttgctgtcaacttctcacgatgcgcttccacaaatctattttgttactgatgggtcagttgatgatgaacggaatatctgccatacattgaaaactcaacttattaaaagtggatctaagtctcctcggatttctacttttgggctaggttcatattgcaaccactatttcttgaggatgttggcatcaattggtaagggtcactatgctgctgcatttgatacaggatcaattgagggtcgaatgcttcaatggttccagaaagcttcaagcacaatagtgtcaaatgtttccattgatgccataaagcatattcaagattttgaagtggattctgtatatattccagacatttcagcaaaatatccattgtgtgtttctggaaggtacaatggcaagcttccggagacacttatcgccaagggtcacttggctgacatgagtgaaatatctattgaattgaaagtccaacatataaaggatatacctcttgataaagtattggcaaagcaacagatggatcttctcacagcaaaagcatggcttatggagaacaaggagcttgagcgaaaggttgtgaaattaagcatacaaaatagccttccttctgagtacacacgcatggtactacttcaaaccagtctggacaaaatagatccagcacaacaggcgaagaataaaccaacgaaacaaagcagtagcccagatgagctgccagcgatgccgctaggtggcctagcggtcggatttggcgacgtagcggcaacaacagagaacctgacaacaggattcggagacatgaaagcagccgagaagtttgtgatgttggagaaggccgctggctgctgcagccgcatggcggactgctgctgctgcatgtgcttcatcaaggcgtgcagcaagatgaacgaccagtgcgccatcgtcatggcgcaggcctgcgccgccatcgcgtgcctgggatgcttcgagtgctgctcagagctgtgctgcggcgggtccaactgagtgaggccacagcaaccgagcaagttggtgagaatgtgttgttgtatagtgatgtaaatgctcccagtaatgtatagaatttggcatcacgtacgtgtttatctaacttggcttgatcagtaagagcgtcacgtgtgttaatcactgtattaagggacagaacagaagcgcacacgttccgtt

SEQ ID NO: 31974 - DNA, 1312 bp, Zea mays
  Clone ID: UC-ZMFLB73241D07_FLI
cttgaagtggctatctttcacctgagtacgccatgagaggtcacatgactgagaaagttgatatttttgcttttggtgtggtcatgttggagattattgctggaaggccgaactatgatggtaagcttgaccaagacatggcttatcttttagaatgggtaagttttctgtgagttttagacctagttcttgtactctttcttttgtgttgttggataaatgcaataacatgcatattcatatagatgctattgggaattttgtaattggaataatggtgtacccatctgggtgatgtttttttttttgcatgcacgtgtgcacacaactatcaggtccattcatttattacaccgaaattcatgccgataaataggtagagagaatgaaggggtatgtgtagataatcaagaagaggtggatgtatatcatttgggtgggatgggcgcttgtggtaagcaagtatattaatagtgtacaagcgcatgcgatcagatctgaaacatgttgatgaaacatatgaagaaattctttaggcatttagttgatgatagatccatcatcttcgaaaaaagtgatttattctattattttctgctagtgtaacgaacattagtgaagttgtgccacttatccatttacaggtctggcaactttacgaggaagaccatccgctggacattgcggatcccaagctcacagaattcgatagtgtcgagttgctccgtgccatccgcatcgccctcctctgcatccagagctcacctcgtcaaaggccatccatgtcgagagtggtgtcaatgctcacaggagacagcgaggcgcctgaggcagtgtccaagcctagctatgttgccgaatggcagagcaacactgaagggacgtcaagctcagtgtccacagcagaggctgtgtccgtggctccattcctaaaccccgttgtggacgatggccggtgatgatggccatcgctaagatcatcttatgtcaagcactcaagccacagattgttttcttggagatccacctttaaaggccccattatttaggttgaatgtggatgacagatttatgttgttgactggatgagatgtcctagggtttcctcacgttgtagaatacaactctcacaagtataagaatctaggaacatattccttcgatgtaacatacctcttttgtttaatctgttttgtaagagaaaccagaagaacaccttgtatttcggttgatattttgaaacccacagccaattgaatgctgggtgtgtaggcatatatatgaccaataggttgattgtaagctttactac

SEQ ID NO: 31975 - DNA, 1255 bp, Zea mays
  Clone ID: UC-ZMFLB73241D10_FLI
gctaattccttggcccggcaatggctagggttgagctcctcgcgctgctgtgcctcgcgggcaccctgggcgcgcaggccaccgccggcccccgccccgatgcgagggtcggcgtgtacgagctcaagctgggggatttctccgtcaaggtcaccaactggggcgcccgattaatgtccgtcgtccttcccgactgcaaagggaacttggctgatatcgtcctgggcagagataccgtcgctgaatactttaacgacacttcttactttggaccgataaccggccgcgtggctcagcggatatcgaggggccggttcgtcctcgacgggaaagtctaccacctgcaacgaaacgacggcaggaacacgattcacggtggtggcacagcgttcagcaaaagcgtctggacggtgaaggagtatgtcggcggcggcgactccccatacgtcaccctgtactaccacagcttcgacggagagcaaggtttccccgggaacctcgacgcgtacgtgacgtaccgggtgtcgggcccgtacacgctgggcgtgcacatgagcgcgacggcgctggacagggcgacgccggtgaacctgctgctgcacgcgtactggaacctgggcgggcagggcagcggggacgtcctgggccacgagctccggctgcacgcgtcgcggtacgccgtgctggacgaggagctcctgccttcgtcggggcgcgtcgcgcccgtcgccggcacgccgctggacttccggacgcccacgcccatcggcgcgcgcatccgccaggtcacgggcgggaaggtcgtcgggtacgacgccaactacgtcgtcgacggggaagggatgcggcccgtggcgcaggtccgggacggcgcgtccggcagggcggtggagctgtgggcgaaccaggccaccgtgcagctctacaccgggaactggctcaaccacacccaggggaagggcggcggggtgtacgaccagtacgccgggttcacgctggagaccatggggtacgtggacgcagtgaaccaccccgagttcccgtctcagaccctgttgcccggacaggagtacaagcacgacatggtcttcaagttctcgttctagcaggtgcatggtttggtttgatgtacaacgttcgttattggtgtttgagacgtacctaggcgaatactgagggtttgatcagctgccctgcaacaacagagtcagtggatttttttaaaacacacaaactatgcattaatcaatgacgc

SEQ ID NO: 31976 - DNA, 1595 bp, Zea mays
  Clone ID: UC-ZMFLB73241G05_FLI
tccacagtcgccatcgcccccacctctcgtcgtcgtctccgtgcaccactcggcccccactgtcggccgcgcctcccagccacctcgtgccgctctgccaccccgcccgtcctccactgcccctatggctgccatgggcgagcgctgcccgagtagccgaccgccctttccccgccgtcttcagctgccgcgcgctgccccgcctccccgccaggcctccactgcccacttctccggcggctacagcggaaggcaaggagaaggacagcgggcagcggtagctggatctagcaagcacagggcgtcttctccatccgccacctctcggcgcatcatcagctgagagtttcaggcatttgctcaggtgttttcatttcataatatagctactactattttaatgatgggtaagagattaggtggttgtactgtacaaaatattcatgtgttttactggccatcaagtttcccttaaattaatgcctaattgcatttgttggggttacgtactaatgccttgaaaggactgtgtaatattccagaatattgtgttcattttcataagtaaaatttgtttgggtgaagttgatttttcacatatatttgagatctgtttagacaagccttgatgaacttggttgtttagcatagttcggctttcacaaatcacaatgtttagaatctttttatacgcatggggcttatatgatgaagcttcactgctccactactatttgacatacaatatgtttagaatgttttttataattgagctttcacaatgtttagaatcttttattcttataatgtatgtttttatgccacgtactcatagtttttacaatcagttgcttatgatccttcagttcattaacgaacttttaggtggttgtgcttgatcggtggtgttctcatgccttctgttttgtggctgtaggatatcaagaggagggaagaggcgctgaagaatggtgcagatacacatttgtttttgcataattgctgccatagctccaccaattgtatttcatgggaaatcattaacgtaagtttgccactccttttatctaaagtaatcaaagtcattagttattatgggcttggataatgtgagtaagcaccattacatagatagccagtgatgttgtctgctggaaaaggagaaatcaatgaattatagattgggatcacagaacttcagagaggaaactaggttgattgttcaatattttttaagaatacttagtatcctggataatatgtgaaacaaacaatatgtgattactgacaccttgtgcgagcagatatttcgttccctccgttgagaagatccagcaactccttgtgctatgtagccccctttgaagataaaaaaacttctgataggtttggagctactgctctcagctgcaggtgtccatctcttgaacataacctttgtggtttgctcagtctggagctattttgtttcagctgtgttgtgtgattaaaattgggtctcggaggtattttgcagaactaccactatgttttaatcttgtatgtttggtctgtcgatcttgttgtcattactgaaggagttttgatctgatacc

SEQ ID NO: 31977 - DNA, 1649 bp, Zea mays
  Clone ID: UC-ZMFLB73241H10_FLI
ggggtgagttcgcgggtcgagcggaggagaagcttctggtggtggtggctctcgtcgtcaagcaggaggggagagaggagccggcggcggaggtgaatggcggtggagtaccactgctgctcggcggcctttttcgagcacatcgtcatcatcatcgtgctcgtgctcttcgcgggcctcatgtcgggcctcaccctgggcctcatgtcccttagcctcgtcgatctcgaggtcctcgccaagtccggcaccgagcaggatcgcaagcacgcagctaagattttacctgttgtgaagaaccagcaccttctgctatgcactcttctaatctgcaatgcggctgcaatggaggctttgcccatattccttgatagcttggtgacagcttggggtgctattttaatatcagtgacactgattctgctttttggtgagatcttaccacagtccatctgctcacattatgggctggctattggtgcctcagttgctccattagtccgtgtgcttgtttgggtctgctttcctattgcctatcctataagcaagctattggactatgtgctgggtcatggtcagacagctctcttccgtagagctgaactaaaaacacttgtcactctgcacgggaatgaggctggcaaaggtggagaattaacccatgatgaaactaccataatagcaggagctcttgaactgactgaaaagaaagctaaagatgctatgacacccttgtgtcaaacatttgcaattgatataaatgcaaaacttgacaggaatctaatgcaagaggtacttgagaaagggcatagcagagttcctgtgtattatgaaaagaaaacgaatattattggattgatattggtgaagaatttattatcagttagtgctgatgatgaggttcctataaaaagtgtaactatccgcaaaattcctcgtgttctagaagaaatgcccctctatgacatcctaaacgaatttcagaaaggtcacagccacatggctgtagtcataaggaaaaacaatccaagttaccaaccagctgaacaagctgctaatgatggtggaacttttgaggtgtccattgctattgatgataagaacaacgaaaaggtcgtgaaaaaccttccgccaccactgcaaagatggaagagctaccctaacactcagaacacatcaaatagaggaaataggcctaaaaaatggtccaaagatcaagcagacgttctgcaggtccataaagagcccttgcccacactgagcgaagatgaagaggctgttggtatcataaccatggaggatgtcatagaggagctcctgcaggaggagatatacgacgagacagacgtacatgaggaacaatgacgctggccttgcgccctccctccagctgttagaaagtgcgcttttatgcaaaacttatgtatagataggcagatacactgagagatattttagccgtagcccgtagccgttcattgtagtactataggtggctggctgtctcgagtattggtaaagactgttcggagtgcgtcgttcgttctcgtccagaacagctgggttctgggcatccggggaagaaacggaggcgttgacgcgtgtgtgtaggttcagaagaaaccccaataagataattgcgttgttat

SEQ ID NO: 31978 - DNA, 1323 bp, Zea mays
  Clone ID: UC-ZMFLB73242A01_FLI
cgacgaatccgatcgtctgtcgtgtgggagagccgcggccccatcctccgtgtgatgaagttcgggaaggatttccggaaccacctggaggagacgctgccggcgtggagggacaagtacctcgcctacaaggccctcaagaagctcatcaagaacctggtgccacgcgagcccgcagcggcccctcctctccctcctcctgcccccgccgccgccgacgccgaggggccgggggctcctgccgccgcgcacgggaacgtcaacctggccaactggttcgccagcatcctcgacgcggagctgcacaagctcaacgagttctacatcgagagggaggagtggtacgtcatccgcctccaggtgctcaaggagaggattgagcgcgtcaaagctaagaagaatgacgcttttacatccaggagtgaatttaccgaagaaatgttagagatacgtaaggattttgtgatcatacatggtgaaatgattcttctgcaaacctacagctccctaaattttgctggactagtgaagatactgaagaagtatgacaagagaacaggtggcgtgcttagcctgcctttcactcagcgtgttcgtcaccagccatttttcacaaccgaacctttaacaaggcttgtccgagaatgcgaggctaacctcgaactacttttcccggtcgaagcagaggttcttgagcctagttcatcctcgaatctagaaccgcacgatgtggctaggtgtgacccgacatcgtcccgcgatgtggaaaccgtcgatgtttaccgaagcacactcgcagctatgaaggcgatacagggccttcggagagccagctctacttacaaccccctgtctctgtctaggttcttccacggcgaggatggcgaaccctgctcgggtgccatcacttctgagagctcactgtcagattcctcaacggactcccagattcaggatgctgggaaggatgataaggaggtgcaatcaaattcgagggaccagaatgctgcccaaggggaacagaatgcacaaggcgagccgactgatgaataaacagtttttttcccacacgctgttcaataagacaataaccattgataagtgtaaatgctaataatcttgctggttaaccctcttttgaagtgacacatatgcaatgactccctggtggcgcagtttcatttttcttctttttccttaattaatgggtaaagagtatatgggatgttggatttatcatgttcctatcgtgttgacagcatgccagttgccagaagtttgacacttgataagagctatgatcgtaatcagcatgttggatct

SEQ ID NO: 31979 - DNA, 3008 bp, Zea mays
  Clone ID: UC-ZMFLB73242A06_FLI
tccactcgccgcgctccccatcccggagcgcggcacaccgtagccccgcgccgcagcggctggccggcatgaagagcatgtggaagcagagcggcggcctggtgtgcgccgacgccggccccctcagccctctcggaggccgctcgcggcgccgcacgaggctgacgctgtacgcggtcgcctttgccttcgccgcgttcaccgcctacgtcgccttcgcctcgcctccctccgcgggcgccggcgcctcgtggttcggcggagtgtacgcgtccacggcgccgtaccgctcgcagatttccagcctcttctcgtccatcttgcccgccgactcgcccgccccctcgccagagccgctgcgcgtcacgttcggcggatcgggcggaggcggtggccaggtgacccgtgatgcgagcactgtgcaagttgggagcgcggcggaaagcatcagctctgccaaggctgggtctagtaagcagctgggaactggaggcggcgctccgatcggcaatgcgggcgctcggagtgtacctccggcagtccatttgccaggcactggaattggcggaggcgcagctccaacgaacagttccgcctcaggtgtcggtgctccgaacgacgcggtggatctgaataaacgaagcgacggaggcgtttctacagaaggcggcagtggatccccggccagtagttcagccgtgcatggaaccgccgcggaggtccgcgagaatagcgttaatgggtctaataagcagtcgggaaatggaagcggagccctgagcaatgctgctaccggacatggcagcactgtcagagctgaggccaaagttgcaagtgatgtttcaaccaatagttctgctgggagtggtagcttggggaaggtagatttgagcaccggatcttctaataatctggcagggagtggaagtgtcgtttcaggcagtggttcggatgctggaaatagaagcactgtaaagcctcatcctggagatgctgttggggcagggagcagggggtcttctggaaacggcacaggtaccatggttgatctgaataaaggttcagatgcccagccaggaaatcgaaatggagatgcaagccatcaatcagatgtaagttctggtttcgagaagagtaaaggtgcaaaggttgtgacgacagatgctcaaccagacagtggaagtggagatgcaagccataaatcacctggaagttctagtccggcaaagagcattgcaggagatggcgaagttgagggtagtaagagaaacgtgagtgttgttccaactgttaatcaaactgggagtccggcatcggtagggcagaaagatgttggttctcccaggaacaacaacacagttggagcatcccccccagtgaagaacccggaacagacctggagccaagttgctcccggcgggagcagtggtacagtgaataatccgaaaggaaatgctgctgctcagggcagtgctggttcatcagagaaccattcggcccaagtaaactcctcaaaatctggaaataacagcaagggtagcaggtcatcaataacacaggatggtggttctggtggaaataagaaaggtgattggtacaaggaaatggctagttgcgatatgtttagtgggaattgggttagggatgactcataccctctctaccctgagggatcgtgtcctcacattgatgagcccttcgactgctacctcaacggtcggcgagatctagcttaccagaagctccgctggcaacccagtggatgcagtatcccaagattgaacccaaccgatatgttggagaggctgagaggaaaaagactggtgttcgttggtgattcgctcaataggaacatgtgggaatcccttgtgtgtattttgagaaattctgtcaaagacaagaggaaggtttttgaggcatctggcaggcgcgagtttaagacggaaggctcatactctttccttttcacggactataactgcagcgtggagttcttccgctccccattcctagtccaggaatgggagatgcaagtgagcagtggaaagaaaaaggaaactctcaggcttgatctggtagagcaatcgtcattgaagtacaaggatgcagactttatcattttcaatacggggcattggtggacacatgagaaaactgctcttgggaaggactactatcaagaaggtaaccatgtgtataatgagctgaatgtcatggatgcctttcataaagctcttctcacctggtccaagtggatcgatgccaatgttaaccccagaaaaactctggtgttattcagaggctactcagcatctcatttcagtggcggacaatggaattcaggcggtggctgtgacaaggagagtaaaccaataaccaacgatcagtacctttcaacctacccaccaaagatgagcatcctggaggacgtgatccacaagatgaaaactccggtcgtttacttgaacataacgagaatggctgactacagaaaggatgcacacccttccatctaccgcaagcagaacctgactgacgaggagaggagatcgcccgaaagatttcaggactgcagccactggtgcctccctggagtaccagattcctggaatgaactggtttatgctcaacttctgatcaagcagcatcaaatgcgccaacaataaaggcaactgcggttttttgctgtgtgcctgtatatgatctgttgttttctaggataaatggataatagtcaacacggtggtcgaagtaaagtcgacatgagaccgaggattttcttaaatcccggcttgttcgctgcggctttaatccggccgtggcttctacagtattttgtctctctatagattgcaactgcggctgccagccagctgatgaattcctcagttagggctacctcccaatacccacataaattcctcagtagaggtttctgggacatcatattgtaaagttcatgtctatcggtaatctgaaataatatgaagaatagtatagatgtgatg

SEQ ID NO: 31980 - DNA, 1397 bp, Zea mays
  Clone ID: UC-ZMFLB73242A07_FLI
cccgttcaccccgcgttcgcttcatccgggcgtgggctaccgccgcagccgccgccctacgtccggtgaccaggctttcattgagctttgccgacgacgaccacgcaccagatggctgggtatatgtcaagagggccccaaaatggttctgtgtatgtctgcaatctacctcctggaactgacgagaatatgttggctgaatattttggcaccatagggttgctaaagaaggacaaaaggaatgggcgcccaaaaatttggatctatagggacaaagtttccaatgaaccaaagggtgatgctacagtcacttatgaggatccacatgctgcttcagctgctgtggaatggttcaataacaaggatttccacgggagcactattcaggttcacatagctgagtcaaaaagcaaagatgctttcgataaccccacaaatttgaacaccattgctggtgtcagtgaacaagatgaagtggataacggagcaggcagaggtagagggcgtggtgatggtcccggcaaggcttggcagcaagatggggactggatgtgtccaaatacaagttgtggcaatgtaaattttgccttccgtggtgtttgtaatcgctgtggagctgcacgccctgccggtgctggtggaactggtggtggaggtggcggtaggggtagaggccgtggtaactctgatgcaagaggaagcagtcgtgcgggtgctggtgctgctactggtggtggtccacctggattatttggcccaaatgattggccatgtccaatgtgcggcaacatcaactgggctaagcgtaccaaatgtaatatatgtaacacctccaagcctggtaccaatgaaggtggtgtgaggggtggccgtggtggtgggtacaaagagctcgatgaagaagaactagaggaagttaaaaaacgccggaaagaggctgaggaggatgatggagagatctatgatgaatttggcaacctgaaaaagaaatttcgctctaaagctctgcatactggaagtgcgcagacacttcctgggtctggacgtgctggatgggaagttgagcatcgtggttctagtgaaagggaaggcagggagaggagcagggatcgtggtagggacgactatgatgaaaaggaaaccaggagcatagatagaggtgatcatggaagggaccagcgccggagccaagaccgcgaaagggaaaaggggagggagagaagagaccatgagtatgagagaagtagggagcgtgaccggcgccacaggtgaagagagaaatgacagggctttctgttcttacatcgcatttgccactttttgtagccatggaacccgtggtcttgtgttagtatctgggggcgtgcattgattctcagaatctgatttttgctttg

SEQ ID NO: 31981 - DNA, 1099 bp, Zea mays
  Clone ID: UC-ZMFLB73242B04_FLI
ctccgtgtctccctcgttcacgtctcgtctaccattactggaaccaaagaaattaaagcctggtgtttgtttctttccgaaggcagccatgatcccggccgttgccgatccgacgacgacgttggacgggggcgcgcgcacgccgttgctcccggagaccgaccctcgggggcgcgctgcccccgccggcgctcggcagaatcggccggcggcggcggcggcggcgacggcgacgatgaccgttctcaccgccgccgtctccgctgtgctcctgctcgtcctcgtggcggtcacggtcctggcgtcgcaggagggagtcgacgggcagggtggcgggggcgtcgtcgccgtggaggtggccgcctcccgtggcgtggctgagggcgtgtcggagaagtccacggccccgctcctcggcgccggcgccggcgccgcgctccgggacttctcctggaccaactcgatgctggcgtggcagcgcacggcgttccatttccagccccccaagaactggatgaacgatccgaacggtcccctgtatcacaagggctggtaccacctgttctaccagtggaacccggactccgcggtgtggggcaacatcacctggggccacgccgtctcgcgcgacctcctccactggctccacctaccgctggccatggtgccagaccacgcgtacgacagcaacggcgtgtggtccgggtccgccacgcgcctcccggacgggcggatcgtgatgctctacacggggtccacggcggagtcggcgcaggtgcagaacctcgcggagccggccgacccgtccgacccgctgctgctggagtgggtcaagtcggacgccaacccggtgctggtgccgccgccgggcatcgggctgacggacttccgcgacccgacgacggcgtggcgggcggcgcccaacgacggcgcggcggcgtcgtggcgggtcgccatcgggtccaaggaccgggaccacgcggggctggcgctggtgtaccgcacggaggacttcgtgcgctacgacccggcgccggcgctgatgcacgccgtgccgggcaccggcatgtgggagtgcgtggacttctaccccgtggcc

SEQ ID NO: 31982 - DNA, 1085 bp, Zea mays
  Clone ID: UC-ZMFLB73242B09_FLI
taaggttgctattatcttgttgatgctggttacacaaatgcaaatggtttcttagcaccatatcgaggacagaggtatcatctaggaggtttcactactcaaaacccaccacatagtgctgaggagtacttcaacttgtgccatgctagagctaggaatattgttgagagggcatttggaaggctcaagggtcggtgggcaattttaagagacccatttgaaaatgatgaggagccagctatggatgcatcatttgaagttatggatggagaaatcagtgaaccagaatttatcacaggtgtctcaacatctaatgaatggactgatttccgcaataatcttgctcaggggatgtataatagatatagagctaggtctaataactaaggacatgaaccaattagagagctcaagtgttactcggggaagagggaaaaacaaaaggatctggacttattatgaggatgaggagttaattaaagcactatatgagatatctttagatccaaagtggaaaagtgagggaggttttaagaatgggtattgttctgttctagaaaatgaactcaaagcaaggctaccagggtgtggtctcagtgctattccacacattgagtctagagtgaggcattttaggaccaagtatggttctattgaggtcatgcttgctaagagtggttttaatcagatgacgatgcttttcgcgcttcctgagactcttaggagagaattcatcctgaacatgattgcagatgaagctcaaaggaagtgacttgtcaaattatcaatgaagaatgtcaggagcatttggtgaagagtgatcggcatatcaacttctggaagttgaattttgaagacgtttgaagtcctaagacatttctagaacatgaaaattatgaattcctaaggctagctttttttgactgactgtgttgttgactttgtgtgaaaataacccgttgtttgaaacctattatatttgctagctttatttgctattcagcaagacatataaagttgctagctttattggttgtctgtgttttcaactgtttgtgaaaataaccagtataaagttgttgttt

SEQ ID NO: 31983 - DNA, 2941 bp, Zea mays
  Clone ID: UC-ZMFLB73242C04_FLI
gtcgcccgtcggcacgagatccttgcccgaacaaaaaccagaagatgggcgaggggagggggagacgagatctcactccccgcttcctctccacctctcaaatggcgccaccgagtgctaaccgtagccaccagcagctcgtcgtcctaccggtcctgctcctactcctgatccggatccccgcatccgcggtagcggcggcagatacctccctgtccaccttatcctactcccaccactgccccaacctcccgtccgcgctcgacctgcccggcggcgaagtttcggcgctcgggcccgacgcccgtgtccccgtccccgaggtctccaccgggtacttcgtcggcggggaccgcatcttcggccccgacccctcctcccagccgcgctccttctcgttgctcccctcctccgtcgcccgcaccaccaacgcctcgctcctccacgtctccgccactctcaccgtctccggcgggcggcgcccgttccgcgaccgcggcggccggaacctcttcgagtacgacggccgcgcgcgccacttccgcccgcgcctcccgcgcttcacggggcggcgcggctccatcaccttcggcctggagggctactactccaccgggtccggggacctctgcatggtcggcaccgggtccgggcgcgccgccgacggctcgcccgtgcacttcctccccgtcgtgctccgtctcggctttcccagccccgccaacgtgacgcggcccttcgtcaccggtcgcctcgagaacgttgacaccatcagccccatcgagcccatctcactcgtcgcctacacccaggagggctacgcgtacggggagagcgcctcctgcccgccgccgcctgcggggaggcttgatgcgctccaggtgttcgagaataggaatttctcgtgcgcccatctcagttccatgctcaaatcgccgttcaggttggactacccgagtggcagcgagtcgaccgcatcttcactcgggattcaccaaagctacatgtatgtcaaccggatgcactgcaacgatgacggcgctgtccgtgcttatgtggcgttcactaaccagacagagttatcaaggtactacttcatgctgggcgagaaggccgtcgtggtggatggattctgggatcagaagagcagccggctttgcctcaaagggtgtcacgtggtgaagtcggggccatcccgtgcagatttggcagtaggtgagtgtggaattgggatgagcttctggttcccggcagtgtggtcgttacagcaacggagcttttctgctggtctggtctggaatgcaagtctgaaaagtggtgaggccgtcgctgccggttctagtgcaatcactcccaactataggggcaatctttctggtttgaagtataattacacaaaggtggacgaggctatgaaatactatgagaaatctggattgaacaagaacaggaaagggaagttcccagatagcaattcataccaggacttggagttccgttttttcgtgaagagaggaggcggctctggatatgcctcacctgtcacaattgggtcaatgttgtttgatggtaactctttggtggttcaagatcccttttctcgccatgtcacagccgagatgaagcaaaggctgcttaatgtcagctatgatatctactatgttgggaaatggtctctagaatcattccatcgtcgacatatctctgccgagggtgtttatgatactaagacaggttccctttgcatgatcgcttgtcgcgagcttaatgtctcgtcagattgtgaaatcctggtgactgctcagttttcttctttagatgcaaaagttgcacagcatgtgaaaggggcgatcaaaagcttgaggaagaagactgaccctcttttctttgaaacgctggacattgcttcatatgggatgtacgtagagcaagtggatgcatcaatctggagaatggacatagaaagcaccatgaccttgatctctatgacactggcgtgcgtcttcattgctgtgcagctatttcatgtcaacaaggtccctgaagcacttcccgccatgtcgatcaccatgctggtcgttctggctttgggttacatgatccctctcgtgctgaactttgacgctctcttcaagaacagcaacaagcagaccgttccactctcaggtggcggatggcttgaggtgaacgaagtcatggtgcggatcattaccatggtaacctttctgctgcagctgcggcttcttcagcaggcctggtccgcacggtccgtggatgcaagcaaagccgagtcatgggctgccgagaagaaagtgctctggatatgcctgccactgtacatcattggcggagctattacttgggttgttcacatgaggtcaaaccacagccgaagaatgctaaggcaggttgtacacttgaagccagttgagcagcatgcgttctgggaggaccttgtgtcttattgtggactgatactcgatgggttcctgctccctcaagtgatcctaaacgtgttctcagactccaaagttagagccctctccccagggttctacatcggaagcaccttgatccgtgtcctgcctcatgtgtacgatgtgttcaggagacagcactttgttccaagcctgagaccatcttacatgtatgcaggccctcgtgacgacctcttcagcctcgcttgggacatcgtcataccttgcggagcactgctactgtcggcgctcctcttcttccagcagtggcgcggaggagctttcttcctctgttcgaagaacaggaggacgagagagtacgaaatggtttccgtggccagctcttaagaaaaatcgagtggatatgaaatgcttttatagccggttcttgacatcgttattgcaagggaaatgtagaggaggtttacttatagactttttaaaaaatagctattccatttttc

SEQ ID NO: 31984 - DNA, 1368 bp, Zea mays
  Clone ID: UC-ZMFLB73242C06_FLI
tcggaaggatcggcaggctcgtggccgttgattccgatcttaatcttgcccatggcgactggcgagtagaggagctaggaggatgacgggtggacgagattaagatcggaatcaacggcttcggaaggatcggcaggctcgtggccagggtcgccctccagagcgaggatgtcgagctcgtcgccgtcaacgaccccttcatcaccacggactacatgacctacatgttcaagtacgacaccgtccacggccactggaagcacagcgacatcacactcaaggactccaagacccttctcttcggtgacaagccggtcaccgtctttggcatcaggaaccctgaggaaatcccgtggggtgaggctggcgctgagtatgtcgtggagtccaccggcgtcttcactgacaaggacaaggctgctgcacatctcaagggtggtgccaagaaggttgttatctctgccccaagcaaagacgcacccatgtttgttgttggtgtcaatgaggacaagtacacctcggatgttaacattgtttccaatgctagctgcaccacaaactgccttgctccccttgctaaggtcattcatgacaacttcggcattgttgagggtttgatgacaactgttcatgccatcactgccacccagaaaactgttgacggaccctcagccaaggactggagaggtggcagggctgccagctttaacatcattcctagcagcaccggtgctgccaaggctgttggtaaagttcttcctgatctgaatggcaagctcactggtatgtccttccgtgttcctactgtggatgtctcggttgttgacctcaccgtcagaatcgagaagggggcctcctatgaggatatcaagaaagctattaaggctgcttccgagggtccactcaagggtatcatgggttatgcggaggaggatctggtttctaccgacttccttggtgacagcaggtcgagcatcttcgacgccaaggccgggatcgctctgaacgaccacttcgtcaagctcgtctcgtggtacgacaacgagtggggctacagcaaccgcgtcgtcgacctgatccgccacatgttcaagacccagtagaggggttttttccccctgcttctcatggatggttgctgcttgtgtatgccgagaataaatgtggatggcgcgtgcctctgggtcgccaggttcatgctgagtctggacatgttttgcacttttgcttcccttcctgctaccatctgtgacagaaccgctcgctaatatgggacctgagattagctttttgctgcttgtggtgaggttgcagttttgttctgtgtttctgtgttgttagcaatcctatgattcaggtgttcgttat

SEQ ID NO: 31985 - DNA, 751 bp, Zea mays
  Clone ID: UC-ZMFLB73242C08_FLI
atgcgttcactcgagcagcagcttctgcatcctgacgaccaggggcggatctacgaccggggctgcccgggctgcagccccggtcgcggcctagtacaagcgaataggcccagtacaagccgtgtctccgcctacagcctccagccgcgtgcctgcgtcggggcgtcgcgtagtcgcgtccagtccgccagcggagcagctcagcagcaccgaagtggagacgagcaagaagcgccgaagcggagcagctcagcaacgccgaagtggagacaagcaggaactgccgaagtggagaagaggaggaagcgccgaagcggaacagcacggagaccagcatgaagccaggaagcggagcagcgctgcgtccagtggcagatctagatttcgctacgtccaggtctccagaaagccaagcaccagccaccagttaaagcctcattcagttaaattagactatggtttaatctggattgaatcggatccaatctagcccacaattcatgccaaaaaaatccagaattattttatttttcctctcttcagttaaacccgctatggttccccagggttttggatctggccgaccgaccgactcaagttgttcctgtttgttttataaaggtaggaatatgatatatttcactcgagatcggtcactgtaataatacaattcactagctaaaaatatgtttgtagatatttaagatgaaaagattttgaagcatttttaaggcttaagaactcggaagat

SEQ ID NO: 31986 - DNA, 991 bp, Zea mays
  Clone ID: UC-ZMFLB73242D05_FLI
ttctcctgagtatcaaggatctgctgagtggagtagcatgcagaatgatgacacagtttcacccttcacatggttcaagactatgtttgatgctccagaaggtaatggccctgttaccattgatcttgggagcatgggaaagggccaggcttgggtgaatgggcatctcattgggcgctattggtcactagttgcgccagagtccgggtgtccatcgtcatgcaactacgcaggaacatacagtgatagcaagtgccgatcgaactgtggaatcgctacacaaagctggtaccacataccacgcgaatggttgcaagagtcaggcaatctattggtactcttcgaggaaacagggggagacccatctcagatatcgctggaggttcattacaccaagacaatctgctcaaaaatatctgagacttactatcctcccctttctgcctggtcacgtgccgccaacggtcgcccctcagtaaatacggtagcaccagagcttcgcttgcagtgcgatgacgggcatgtgatctcgaagattacatttgcgagttacgggacccctacaggaggttgccagaacttctctgtagggaattgccatgcatcgactactctagacttggtggtagaggcctgcgaaggcaagaacagatgcgcgatcagtgttaccaacgaagtattcggagatccatgccgcaaagtcgtcaaggatttggcagttgaagccgagtgctccccgccatcggttaaccaagaacctcgatacgatatatgatcacggtactgtattgtggtgctcaggtcttggtggacgttgccgcagctttgcagggccgtgcacaatggtcctgcatcgttgtctcctatacctctgcacccatattatatgtaaacagtgacctacatgtaaatctaaagaagaggagggattgaaaagaaatgagatggaaaaggaataaagttgcttttattacaaatggtcattcctgtg

SEQ ID NO: 31987 - DNA, 886 bp, Zea mays
  Clone ID: UC-ZMFLB73242D06_FLI
gtcaaaccctaagcagggagttgatttatccgctgcagccatgagtaagttgcagtctgagtctgtcaaggatgccatctcccagattgttggggatgccaaggagaagaataggaagttcactgagactgtggaacttcagattggtctgaagaattatgatccacagaaggacaagcgtttcagtggctctgttaagttgccccatatccctcgtcccaagatgaaggtgtgcatgcttggtgatgcccagcatgttgaggaggccgagaagatgggacttgactacatggatgttgaggctctcaagaaaatgaacaagaacaagaagcttgttaagaggcttgccaagaagtaccatgctttcttggcatcagaggccatcatcaagcagattccccgtctccttggtcctggtctcaacaaggcaggcaagttcccgaccctggttactcaccaggaatccctcgagtccaaggtgaacgagactaaggcaaccgtcaagttccagctcaagaaggttctttgcatgggtgttgccgttggcaacttggcgatggaggagaagcagatccagcagaacatccagatgagcgtcaacttccttgtttcccttctgaagaagaactggcagaatgtgagatgcctctacgtcaagagcaccatggggaagccatacagggtgttctaagtatgctcttttgtgaagtctgctaggttctggcaccgaggttttattgaattaaacttttgttaagagtatgtttttggacgatcctatatttcgtcctggcgctactatgtttcagaatggtggtactactataagtatcctggcgctttaagtattgcttgaaaggatcaatataatttgcgtgtcataccc

SEQ ID NO: 31988 - DNA, 1732 bp, Zea mays
  Clone ID: UC-ZMFLB73242F09_FLI
tcttcgtactcgcctacctccgcggctcaaacctttcccccttctcccaattccttccgccggccgccgctccacccgtacgacgacaccatgagggagtgcatttcgatccacatcggccaggccggtatccaggtcggaaacgcgtgctgggagctgtactgccttgagcatggcattcaggctgacggtcagatgcccggtgacaagaccattgggggaggtgatgatgctttcaacaccttcttcagtgagactggtgctgggaagcacgtgccccgtgctgtttttgttgaccttgaacccactgtcatcgatgaggtgagaactggcacctaccgccagctcttccaccctgagcagctcatcagtgggaaggaggatgcagccaacaactttgcccgtggtcactacaccattggcaaggagattgttgacctgtgccttgatcgcatcaggaagcttgccgacaactgcactggtctccagggcttcctcgtcttcaacgctgttggtggaggaacgggctctggccttggttccctcctcctagagcgcctgtctgttgactacggcaagaaatccaagcttgggttcactgtgtacccttccccccaagtttctacttcggtagttgagccatacaacagtgtactgtccacccactccctcctcgagcacactgatgtggctatactgctggacaatgaggccatctacgacatctgccgccgatcccttgacattgagcgcccaacctacaccaacctcaacaggcttgtgtcccaggtcatctcatcccttactgcctccctgaggttcgatggtgctctgaacgtggatgttaacgagttccagaccaacctggtaccctacccgaggatccacttcatgctttcttcgtacgctccagtcatctctgctgagaaggcctaccacgagcagctctctgtggctgagatcaccaacagtgccttcgagccatcttccatgatggccaagtgcgacccacgccatggcaagtacatggcctgctgcctcatgtaccgtggtgatgtggtccccaaggatgtgaatgctgctgtggccaccatcaagaccaaacgcaccatccagttcgtggattggtgcccgactggcttcaagtgcggcatcaactaccagcctcctagcgttgtgcctggtggcgacctggccaaggtgcagcgtgccgtgtgcatgatctccaactccaccagtgttgtggaggtgttctcccgcatcgaccacaagttcgacctcatgtacgccaagcgtgccttcgtgcactggtacgtcggtgagggtatggaggaaggtgagttctctgaggcccgtgaggacctggcggcgctcgagaaggactacgaggaggtcggtgctgagttcgatgagggcgaggatggcgacgagggtgacgagtactagagaagtttgctgatgacgcagcatcaggccagtgtgctgcccttatcccgtgatctgccgagagttgctcctgctatcgtgttatgtgtgtctgttctgaagtattgtgtggtttacaacacctgatgttgtaagagttgttaattcccctgcattgctaccgggttattgagaataattatggctgtttacgttgttgcttcatctcggagatgctttacatttaccaccttgttcatcttttgtcatcagtaaaatcgagtcggcggatgattttcttgcgtct

SEQ ID NO: 31989 - DNA, 2409 bp, Zea mays
  Clone ID: UC-ZMFLB73242G02_FLI
gatgattttgttgctgcagccttagcacaggcaaatgttacacgtacagaccacataatgtggaccatgggggatgattttaactaccagtacgctgaatcctggttccggaatatggacaaacttatccaacatgtgaacaaggacggcagagtgcatgcgttgtattctactccgtctatctacacagatgctaagcatgcatcgaatgaatcttggccagtaaaatatgacgactatttcccctacgctgattcaacgaatgcatactggactgggtactttacgagccgtccaactttcaagcgatatgttcgagtacacagcggatactacttggctgcacgtcagatagagtttttggtgggcggtaggagctccttgggattgttcacttccagcttggaagatgcgatggggattgcccagcatcacgatgcagtctcaggtactgcgaaacagcacacgactgatgactacgcgaaacggcttgcgctgggagcagcaaaggttgaaaaaggtgtaaacaccgctctggcttgtctgaccagctccaacgggacatgtggatcctctgttgtaaaatttagtcagtgttcacttctcaatataagctactgcccttcgaccgaggaagcaatttcatcaacaaagcgtttagttgtagttgtttacaatcctcttggatgggaacgtagtgacttcataagagttcctgtcaatgatcaaaacctagttgtaaaaggctctgatggaaatattgttgagtcacagctagttgaggttgataatgtgacgagaaatttaagaaagttttatgtgaaggcttatcttggaatcacaacacacaaggcccctaagtattggctactatttcaagcttctgtaccaccaatgggctggaattcctacttcatttcaaaatcaactggagcaggatacaacagtactgagcatgtctcggacgtggtttccccaagtaacagcacgattgaagttggaccaggacatctaaagatgtccttctcaaaagcatctggacaactcaataggatattcaattccatctcaggagtggatttaccagttcaacaaagctttctttggtacagatcaagtgagggtgatgcctcagactcacaggcatctggagcatatatatttcgaccagatggtaatacaccgactacggtttcatcctcggtgccactgaaagttatccgtggaccactggttgacgaagtgcatcagcaattcagctcatggatttatcagataacacgactctacaaaaacaaggagcatgctgaagttgaatacacgattgggccgatccctgtcgatgatgatgtagggaaggaggtcatcacacggctgacagcaaatatggtcacaaacagtacgttttatacagactccaatggaagggatttcctcaaaagggtgagaaactacagggaggactggaatcttcaagtaactcaaccagttgcaggaaattactatccggtgaacctaggagtgtatgtagcagatgaaaaatatgagctatctgtgcttgtggaccgtgctgtcggagcatcaagcattcaggatggtcagctagagattatgctacacaggcgtttacttaaggatgatggcaggggtgtcggagagccacttgacgaggtggtttgcgtggatcaagattgccaagggcttacggccaggggcaattactacgtcaatgtcgagaagctagggcatggagctcactggcgacgtacatatggccagcaagtctactcaccctttctccttgctttcactcatgaggatgagaccagctcgaaatcctacagcgtggccaaagctggtatgatgaatgccaactacagccttcctgataatgtcgccattgttactttgcagaatctagatgatggtaccacactactccgcttggcccatctctttcaagctgctgaggacccgagatattccaaggtggcaaaggttgatctgaaaaaggtgttcggaaagagaactatcaaggaattgacggagactagcctctccgcgaaccaaaagaagtcagacatgaagaagctcagctggagggtcattgggaacactgaaactggtcctgccgcagtaaaaggtggcccagttgacagtagggctctagtcgttgaactaggacccatggagatacgcaccttcttgctgaaattttagtggcagttgttcttttgtttgtaaacaaacaatagtccatagagtaatttctaccttttcattaacgtgcccaaatcttagttcaaataggatcaaatacttgggcaatggaggtgcacacccacaccaagtttgttcatgtaataatagctacatgtcgggaaaaaaaaaaggaacggttgtggtgct

SEQ ID NO: 31990 - DNA, 927 bp, Zea mays
  Clone ID: UC-ZMFLB73242H09_FLI
cttcccatagcatagccatggacatttggaagtccaaggtgttgcccaagatcaagctcgtcttcgtcaagagcgccggcaagaaggccgccgccgccgccgagctcgtcaagtccttcgacgagtccaaggaggggatcgatggcgagttccaggagaagaaggctgatctccagcccaaggtcgtcgagatctacgagtctgcccctgcaccactcaaggtcctgatcaaggagaggagcaaggtgtccgggatcaagaagaactccgccgcaatcaccaagttcttcgaggagctggccaagatcgaattccctggagccaagcaagtgagcgacggcatctccaaggccggcccggccctgctgtccggccccatcttcgccacgttcgagaaggtctccacgctgctccctgtcgtcgctgccgaggagccggccaaggaggccccggccccgcccgccactgaggaggcagccacgaaggaagcgcctgttgacgagaagaaagaggaagcccccgcccccgccgccgccgtcgagaagaaggaagagacccaagaagaggagaagaaagaagacacccctgcaccgcccgccgccgagactgctcctcctgctgatgcagcagctgctacagagcagcccgctgcggaggccgcggcagaagctgaggctccacctgcacctgccgtggcggagccggccaaggccgaggaggagacacccaaggcctagctagctagggttcagcaggttcatcttcttgcgcttgctgcccctagctagctagctggtgtaccgtgctctttaatcacgtcaccatccatattgttgttgcatatatatgcacacaatgtttttgttgctccagatgttattgctgtgcaaacccgtgttagatatttatgtatgtatatgtaagcct

SEQ ID NO: 31991 - DNA, 1322 bp, Zea mays
  Clone ID: UC-ZMFLB73243G12_FLI
aaatatggtcatttcaatccaagttctccgcaatgtgaccaacaacttcagcgaggacaacatccttggtcgaggagggtttggcactgtttacaagggtgaacttcatgatggcacgaaaattgctgtaaagcggatggaggctggtgtgatgggtaacaaggggctaaatgagtttaaatcagagattgctgttttgaccaaggttcgtcaccggaaccttgtttcgctgctgggctactgccttgatggcaatgagaggattcttgtgtatgagtacatgccacaggggacactgagccaacacctgtttgagtggtcagagaacaatttgcgaccattggaatggaaaaagcggcttagtattgcacttgatgttgcaaggggcgttgagtaccttcacagccttgcccagcagacctttatccacagagacttgaagccatcaaacatacttcttggtgatgacatgaaggccaaggtggcagactttggattggtcaggcttgcaccagatgatgggaagtgcgtctccatagagacaagacttgctggcacttttgggtaccttgcaccagagtatgcagttactggacgagtgaccacaaaagctgatgtcttcagctttggtgtcatcttgatggaactgattacagggcgcaaggcacttgatgagactcggccagaggatagcatgcatctagttacatggttccggagaatgcagctgaacaaggaaacattccgcaaagcaatcgaccctgttattgaccttgatgaggagacatatgctagcgttagtactgtctcagagcttgctggtcactgctgcgctagggaagcacaccagaggcctgacatgggccatgctgttaatgtgctctctaccctttcagaagtttggaaaccaactgatccagactcggacgacagctacggtattgacctgaacatgaccctccctcaggctctgaagagatggcaggcttttgaagatagcagccactttgacggcgcaacctcttcattcgttgcaagtttggataacactcagacgagcatccctacaaggcctcctggattcgcggagtcgttcacctctgctgacggaagatagacgggttagctgctagggcgtgccaaaccttgtgtgcttccgttgaaatagaaggctcacgcgatccttgtgttcattcttttagtctcttcgctcctaatctttcatgtccccttattcggctctgtactgccgtgtagctgctctttgatcctgtcccaaaaattgcctggaagttggaaaaaatttgctaaccggttatgtc

SEQ ID NO: 31992 - DNA, 1019 bp, Zea mays
  Clone ID: UC-ZMFLB73243H12_FLI
gtgcttggggtgctgggattggttgtagctttcggattgaacgttgctgcattttcaagaaaggtggtggcaccattggtcttgagccacgccttagccacgtgtcagctgtggagcctactctcgccccagttgcagttgagcgtacaatgacgacaagagctgcagcttctaatgcattgcggcaacaaagatttgtccgtgaagtgactatacagtacaatctgtgcaatgagccatggttgaaatatagtataaacattgtggcagataagggattgaaaaagtctctttatacttctgctagactgaagaaaggagaagtcatatatttagaaacacacattaataggtatgagctttgcttcagtggagacaagccttgcattattggatcaagctccaatgcatctgaatcagaaacggagaaacaccagagcgggagtcaccattctcagaatggtgacagaggctgtgtggagcatgaactccgggatgtgttccggtggtcccgctgtaagaaggccatgcctgaaagtgccatgcgctccatcggtatcccactaccagcagaccagttagaggtattgcaggataacctcgaatgggaggatgtgcagtggtcacagaccggtgtgtgggtatctgggaaggagtatcccctcgcccgagtgcacttcctctcggcgaactagaagcagatgatgttggctgtgttcgtggggggaaaaaagaaggtgatgttggagcaacaaaggaattaatatttcttgtggacaagacagagtcgggaacattgcgtttgcttgtacgggtcaccatgccatgtgtacaaaagaaggatcagttggttagtgttgatatggtagccttactgtgttgacaataacactattcattaggctggcctgctgcccatgcatgtgccaaagctatatttgctggttttaggtcctgtgtcggtacgcaaataacttgcaatatgcttgcttctcaagtaatctggccatccttattgg

SEQ ID NO: 31993 - DNA, 1885 bp, Zea mays
  Clone ID: UC-ZMFLB73244A08_FLI
agaccttacaccaaccagatccggtataacgtctccatcgttaagacagacacgtcaacgctcccgcctatcatcaacgccgacgagattttcatcgtcatctctacgaccaacgttggcacggactcggaggacgtctctgctatgaaggctatcaaggcgaagtatcaggtgaagaagaactggatgggagacccgtgcgttgctgggacttttaggtgggatggactgacgtgcagctatgccatttctgatcctccaaaaattactgccctaaacatgtccttcagtggtctgaccggtgacatatcatctgctttcgcaaatctcaaggctgtccaatccttggatttgtcacacaacaacctgacgggctcaatccctagctccctgtcacaactgccgtcactgacaactctagatttgacggggaatcagctcagcggaccaataccctctagtcttctcaaaagaatccaagacggctccttaaacctaatctatgccgataatccagacctttgcaccaacgccggggattcatgtcagacggcgccgcaaggaaagagcaagctagtcatctactacgtcgctgttcctatggctctgatcgtggtggcgttggcagtactgctgtgttgtcttctgcggcggcgaaagacgcgagggctagcggacgtctctgtgaagccccgggacaagactccgacgagccttgcttcaatggcggccgacgaacacagacttagctcgctgcggcttgagaaccgccggttcacatacgaggacctagagatgatcaccgacagcttcaagcgtgtcattggccggggcggctttggatacgtctacgagggcttcttggaggatggcactcaggtggcggtgaagatgaggtctcagtcgtccaatcagggtgccaaggagttcctcacggaggcacagatcttgacacggatccatcacaagaaccttgtctccatggtcggctactgcaaagatggggtgtacatggcgcttgtctacgagtacatgtcagaaggatccctgcaggagcacattgcaggaaaacgcttgacttgggggcagaggcttcgaatcgcattggaatcagcgcaagggctagagtatctgcacaggggctgcaacccgcctctgattcacagggacgtgaagaccagcaacatcctactgaacgcgaaactggaggccaaggttgctgatttcggcatgtcaaaggctctagaccgcgacacctatgcgtccacgaacactcttgttggcacaccaggatacgtcgacccagagtacctggaaacaatgcagccaagcaccaagagcgacgtgtacagtttcggcgtggtgctcctggaactggtcacagggagacctcctatcctgcacagcccacagcccaccagcgtgatccagtgggcacggcagcacctggcgcgcggcgacatcgaggtcgtggtggacgcgtccatgggaggcaaccacgacgtcaacagcgtgtggaaagccgcggaggtcgcgctccagtgcaccgagcaggcgtcggcgcagcgccccaccatgggcgacgtggtggcgcagctcctggagtgcctcgacctcgagaagggccgctccgccaacgaaagtttctgcgacggagacgacagcggctccgcgaccgcgagcttgagccacagcagcgcatttgtgacggggcgtatttttgggacggtgccaatggtggagacaggccctgccacgaggtaaacgctagttgacgctgtttcacaaaggcacatggaagtgttcacaaattttttatatgaaaaacttcttattcaaacgtatgaaataagaacagcctggagcaggcctctttgttaggatc

SEQ ID NO: 31994 - DNA, 853 bp, Zea mays
  Clone ID: UC-ZMFLB73244B07_FLI
gttatatctgctcctatctcaaaggtactccttgatgacgggaaagccgaacgggtcattctggcacatccttctggcatagatggcgcgcaagaggcaataaccgagtaccgggtgatgggaccaacaattaatgggtgctcatggatcgagctacacccattgactgggcggaagcaccaggtaccctcataatgtttggattttgtttgtgtgaacacaatccaccctctagtatatgcctttcatttgttcttagaaacatggaaaataaattcatgtcatgcttaggaatgggcattttcaactgtaagcatcaacctgttctgtttgctctgggttgcagctccgagtccactgtgctgaagccctaggcactcccattgttggggattacaaatacggttggtttgtgcaccaaacgtggaagcaaaatccccagcctgacttcgaaccgttcactggagagccatacaagctgaggcggccagaaggcttggagattcagaagggcagtgtcctctcaaaagtccctttactacacctgcattgccgggagatggtcatccccaacattgcaaagttcctgagcagcactggaggatggcacgaaaacggcaccccatgggccaaggagaagcccaacctcctaagattcgtcgcgccaatgcctccgcacatgaaaatcagttggaacatcatgtcttcatacctggtgtaatttctgtattttttttcttccatacttctctagcttctcatgttaaccccaagttccatagagtgatttgtttgttcaagattctgagattgtagccaccatttctgaatcaatgcacatctcatcgtctcc

SEQ ID NO: 31995 - DNA, 1604 bp, Zea mays
  Clone ID: UC-ZMFLB73244B10_FLI
ttatacgtgatgagtgcaccaaatccttccttgttttgatccgagggactcatagcatgaaagatactctgactgctgctactggggctgtagtgccatttcacctctcacttttggatgaaggcgatgtgagcaaattagtgttaggttatgcacactgtgggatggttgcagcagcccgctggattgcaagaggtgtaacaccatgcctccgtgaagcagtcagacaatgcccagagtaccaaatcaagattgttggccattcattgggtggtggtactgctgcattgctaacctacatccttagagaacacaaagagttttcttcaacaacttgtgttgcatttgcacctgcttcttgcatgacatgggaattagcagaatcaggcaagcattttgtgacaacggttgtcaatggagctgatctggttcccactgtatcaactgcatctattgatgatctccgttctgaggtaacagcttcatcatggttaaatgatctgagggatcaaatacaacagacacgcttcctaaatgtcgtttaccggtcagccactgctttaggaactcgcctgcagtctttttctggtgcgagagagagggttgcaggtgctggagcatttctacgtcctgtttcaaacaaaacccaggttgtgatgaaacaagcacagaatgtcgcacaggctgttgctagaagtcggtctgcattttcctcatggtcatgcatgggtgcacgtcgtcgaggtgtaggtgtagttactgcatgttctaaagatgatatgagagtggaaacccatgtaacatcaacagttgagtcaaagtctgtccttgtagaacattgtggcgccaagaccatagaagaactgcagtatactgcagctagtgtttctgttcatgatgcagcagaggaagaagaggctcttttgagtgaacatgaaacctccagggagaatgccgaagaagaaacaacagagggtgagttgtggtatgagtttgagaaggacttggatcgacaagctgaaatggaggcacgaacaagggaggaagaggcagctgcagccaaagaaataatggaagaggaaagtgctgtgctaaaaggtgtagatgacaggcagtccttcacaccagatagcttggagaggcagcaattctacccccctggtagaatcatgcacatggttgcaatgcctcccacagacgctgacccagatgatccggttgctgctgacgagtgctgtgttggaatatatgagacccctagagatctttacagcaagattcgactctcaaataccatgatcaatgaccactacatgccaatgtataagaaaatgatggaaacattgattgagaagttcgcgagggatgaggactgctattgtacaggttctactgcagaataacatggaagcatgaatgacctatgtacatcgataactgtacaatactccgtgttagctgttattagcctatctgacattgcaatatacaagaggtgatgtcctcctgacccgtgaaaaaaggattttagttagggtcatgtgagtgtgtgatgtgtaaatgtaaaagaaaccagaatcagcaatttaataccttttccagtc

SEQ ID NO: 31996 - DNA, 1501 bp, Zea mays
  Clone ID: UC-ZMFLB73245A11_FLI
tccacgcgaccgcgagagctctcagaaggccctagcacgcaaaaaccccacgagagagacgaatcttccgaatctctcggtggcgatggcgctctccgaccgctcccgcgagtcgctcctcccgagcttcctctacggctcctcggcgcgctctttcgctgccacaggagccgccgcgcgcctccctgtctcctccccggcgcctgccgcggctggagcaggaggcggcgtgccgttctcgatccaggcgcccaaggagaagatcgagatgtactcgccggccttctatgccgcctgcactgccggaggaatcgccagctgcgggctcacccacatggccgtcacgcctctcgacctcgtcaagtgcaatatgcagattgacccagcgaaatacaagagtatctcatctggatttggtatcctgttaaaggagcaaggggccaggggtttcttcaggggatgggtgcctactttgcttggttacagtgctcagggggcttgcaagtttggcttctatgagttctttaagaagtattactcggacatcgcagggcctgagtatgcccaaaagtacaagactctaatctacctcgcaggatctgcatctgctgaggtaattgctgatgtggctctctgcccttttgaagctgtgaaggtacgtgtgcagacacaacctggatttgctcgtggattgagtgatgggctccccaaatttgtccgatctgagggtgttcttgggctctacaagggaattgttcctctctggggtcgtcagattccttataccatgatgaagtttgcttcctttgagaccatcgttgagcttatctacaagcatgctgtgcctgttccgaagtctgagtgcagcaagactacccagttgggtattagctttgctggtggttacgttgccggtgtcttctgtgctattgtttctcacccggctgacaaccttgtgtctttcctgaacaatgccaagggagctacagtgggagatgctgttaagaagcttggtctctggggtctcttcactagaggacttcctcttcgtatcgtcatgattggtacccttactggtgctcagtggggaatttacgatgcattcaaagtgatggttggactcccaacaacgggaggtgttacacctgccccagcagcagaggctgaattgaaagccagtgcttgattttttttttctgtgttccctgagatcatatttggtagagtggaattgtatcagccagtcgagagcttagttcccgaatctttttttaatcgtaacggaaaatttgtccgtcatccttctgatgagaggaactcattaaacaggcgaaataggtcttttttgcgctgggaaaagtttgcgcttgatgcataataatttttaggacggcaacgctcttagagcgcaggttttgttcacctcctgtaccgaggaatgcttactaagtcccatttcacattatggtctttatgaaatagtgcacctcggttaatgttc

SEQ ID NO: 31997 - DNA, 464 bp, Zea mays
  Clone ID: UC-ZMFLB73245B07_FLI
tttggatgtccagtctgagccatcaaagggacagatttcaagaactcgaagagatgctagtaacatctgccagcaatctgtgatcgaccttgattcttttgcatataaaccattaaagaaagatcctgtggcgctgaactcaagaaggtctaagcttaggttacctgccccgaacaaatccaccactggtacataatttgatggagagtttgagacaatggcgatctttgccgtgaagcattgggaagaactttgttctgtgagatatgacatgcggggagatgcagatgttacgtcgccatggagatttatagtttcaaacatccacatggattagagaagttccctgagctgaagtagggtgtaaaatgcatggcctggcagtagaaaattaggatgctgatgtctatatccatttacatgcgtcccattgtcgattatatctatgaacagtttttgcgttc

SEQ ID NO: 31998 - DNA, 1154 bp, Zea mays
  Clone ID: UC-ZMFLB73245C08_FLI
gcgatatcccagagtggtgtggccgccgccggcggcttctttctccccttccattccgctccccgtgacgtcaccgaccaggcaagcactccgctccaccagagccgcctcgcctgtctgtccgacccacacacctaccggagcgcgcgtcccgaggtcggcggagcagggtcgggaggagggtatggcggtggtgggcgtcctcgcgctgcagggatcctacaacgagcacatggccgcgctgaggaggatcggggtgaagggggtggaggtgcgcaagccagagcagctcctcggcatcgactcgctcatcatccccggtggcgagagcaccaccatggccaagctcgccaactaccacaatctgttccctgcacttcgagagttcgtcggaggtggaaagcctgtctggggaacctgtgctgggctcatctttcttgcaaacaaagcagtagggcaaaaaacaggggggcaggaacttgttggaggattagattgtacagtccaccgaaacttttttgggagtcagcttcaaagctttgagacagagctttccgtgccaaagctttcggagaaggaaggagggaatgatacatgccgcggtgtatttatacgggcacctgctatattggaagtaggtccagatgttgaaatattggcggattgccctgttcctgttgacagacccagcattacaatatcatttggggagggtactgaggaagaagagtattcaaaagatcgggtaattgttgcagtgcggcaagggaacatcctcgcaactgctttccacccagaattgacatcagactccagatggcatcgtttcttcttggacatggataaagaatccccagcaaaggcgttttctgcgctctccctgtcgtcatcgtcaagagacactgaaggcctgccaaagaataagccgtttgatctgcccatttttgagtaacgctaaagacaagacaaaccaaaagattgaaggaacgaagaaactgaccgtatttattatcgatcatcatttagccggttacaaaaacagccagctgagaatctgtcatactcagccgaaaaaagtgttgtctggtagctaacttgtacggataaaaaataatcacgctgtgtgctgtacgcaattctcatcagataaagcg

SEQ ID NO: 31999 - DNA, 727 bp, Zea mays
  Clone ID: UC-ZMFLB73245D10_FLI
ccgagtgttgttgcgaaaatttcttctacaatcagcgaattgattcagctaggagccaagactcttgtggttccaggaaaccttcctattggatgtgtcccaaaatatctgatgatattcaagagcaataagaaagaggattatgatccacagacaggttgtcttagatggatgaacgagttctcacagtaccacaacaagcttcttgtggagcagctcaagaagcttcgcaggctccatcctggagtaaccatcatctatgctgattactatggagctgctatggaaatattcctttcccctgaacgatatgggatcgaatatcccctagtggcttgctgtggtgcagaaggaccctacggtgtgtccccaactacaagctgtggattgggagaatataagctgtgcgataatccagaaaggtatggatcatgggatggcctccatccaacagaatctgcatacaaggtcatcgctatgggcctgctactaggttcctatacaagaccgccaatcgcttccaccaccacttcatgtccacagcttatggagctcggctcttctgctgaatacaaacgcctctacgacctgtaataatttatgtaattatattttattgtatgtactccctcgcccacttcaataagtcccattttgcgagtacatgtactttgtaacttttaactaataacttatcaaactagctactatatatttgttagagtgc

SEQ ID NO: 32000 - DNA, 1301 bp, Zea mays
  Clone ID: UC-ZMFLB73245E08_FLI
cgctcactctccctggtctctcgtctcctccactccaagagaacaggcgccggcgaaaggcgggagcagcgcgctgcccattcaccgccccctgatttcttgggagttgcggatcggtctccggggcagcgtggaacggctgggcccctcggatcgccggagatgctgccctacgcgacggcggcggaggcggaggcggcgcttggccggcccatgacgcccgccgaggcgctgtggttccggtacaccgcgggggtgtccgactaccacctctactgctgcaacatcctcttcctcttcgtcgtcttcacggtggccccgcttcccatcgcgctcctcgagctccgggccccggccgcggtctcgccgtacaaactgcagccgcgggtgcggctctccagggccgagttcgtccggtgctacaaggacgtcctccgcatcttcttcctcgtcatcggcccgctccagctcgtctcctacccggcggtcaagtttgtgggaattcacacgaagttgcctttgccgtcccttgcggagttggcagcacagctactggtgtacttccttgttgaggactacctcaattactggatccacaggtttctccacggggagtgggggtaccagaatatccaccgtgttcaccatgagttcactgcgccaataggattcgcagctccatatgcacactgggctgaggtgctgatactcggcatcccctccttcgtcgggccagccattgttccaggccacatgatcacattctggctctggattatactccgtcaggtggaggctatcgagacacatagcggctttgatttcccattcaccccgacaaagtatattccattctatggaggagcagaataccatgactatcatcattatgtaggaggccagagccaaagcaattttgcttctgttttcacttactgtgattacttatatggcactgacaaaggttacagattccacaaaacatacctagcaaagctgaaggatctggggcataatgatggccagaaaggagacggcagcggacccagctatgtgaaactggattagattgcaagatatagtgcatcttgagtgtttctatggtcatcgacttcactgtggcatttcgaaatgggatattgctgagttgggctggtcacgtgtgttctcatttctgtagcaggcatacagctttcagctctgccttctttcttttttttttctagcgtttatgaaattctatggaacttgtacgctgacgaataacaacgcaactctcacgaataacaacgccaattctt

SEQ ID NO: 32001 - DNA, 561 bp, Zea mays
  Clone ID: UC-ZMFLB73245F07_FLI
attccagtggccctgcttccctcgtcgtcactctctctcgagagcagcaccggcacttcggacagggtaagcgggcatcacgaatctgcttcaattcccttcccctgctctcagatctcgccttttcttcctgggatttgagctcgctctcgcgcttcccctacgcatcgtgaactcgtttctttagtggtgacaatagcagcgatttgcccggagggttctcgaggtatttcagcagttgcgctgttgcgttgaatcgagtaggaaaggagtaggaggactcgccccccatccacagtctattcaagaagcttgtggaggtagtgtgcagttccggcgcactgtagtgaggatctgacgacagtttcacttcacctacttctcggatttcgagctaccccctcatcacaccgtcgctgaattccgtagaagaacttttgcgtggtttcgtctgatttgttgctttgcttcccctttgctgtggacgcagagttgaaaagcaaaggtgtgttcttgtcatggagcagccgcagcagaagggagtagcggtctctgcgcagg

SEQ ID NO: 32002 - DNA, 1093 bp, Zea mays
  Clone ID: UC-ZMFLB73245H04_FLI
cgaaaagaaaccgcatatcagcgggcgctgctcgttctcatcgccccccctcgtctctcgcggagccgaccccgtccccattcggacctcagctagccaccaccaccatggcttcttcgaagaggagatttggtgctgccggcggcgcggacaagaaggatctattccatgtcgtccacaaggtgcccgccggcgacagcccgtacgtcgtagccaagcacctccagctcgtggagaagcaaccggatgtggcgatcgtgtggttctggaaggcaatcaactcaggggacagggtggacagcgccctgaaggacatggccatggtgatgaagcagcaggaccgttccgaggaggcaatcgaggccatcaggtccttcaggcacctctgctccaagcaggctcaggaatccctcgacaacctcctcattgacctctacaagaaatgcgggaaagttgaggagcagatcgagctcctgaaacagaagctcaagtcgatataccttggcgaggccttcaacgggaaggcgacgaagaaagcgcggtcccatggcaagaagtttcaggtctcgatccaacaagagacgtctcgtattctgggcaatcttggctgggcttacatgcagcagaacaacttcgaggccgccgagctggtgtaccgcaaggcgcaagctatcgagcccgatgccaacagggcgtgcaaccttgggctgtgcctgatcaagcagggcaggcacgacgaggcacggcaagcgctcgaggacgtccgattgcgcagaatctatggatcagaagatggaaaggtggttgcccgtgcggagcagcttctccgcgagctaaacccgttgcaatgcgtttcatcgccgttccaggttggcctcagcgtccatgaagggatcatgggtaaaccagacctagtagtgatgaacgagtggacgccgttcaggtcgaggaggctgcctgtgtttgaggagatagcaactttccgggaccaaatggcttgttgatgcattactttgcatggtttaatttatctgtcagtgtcacactcacatccctctagaagtttttgttcgtatagagatcagtatatatc

SEQ ID NO: 32003 - DNA, 1148 bp, Zea mays
  Clone ID: UC-ZMFLB73246B08_FLI
aaacagtagttgcaagtgctgccgagcagcctgatgaagactatgagtcagataccggtcttgactcactggatttgcctgaagtcccaaaagctgcaattcgtccaccttctgacgcaccattgaccccagatatttgcccacatgttcagggctctcagtcacttcctcatgagttctcagatcctggtaacttggaggagaatccaacagctggtggtgcttttaatgttattcagatgaaaagcttggagcatcttgtttatgcaccatctgatcagtcaaacataccggatttgccaaatgaaaagaagcagtttattccttttgcatctccaccgcccgttctttctccttcggtgggaaaagccgagacagttccctcaccttctctgtctcctccagtgaagccgacagagccagaaccagaaatcctcacaaagaaaattgatgaagtgaccacacctccagtacttccctcagattatattttcacaaaacagccagaacaagtgcggacaatctctccttctgagagtggggcaaatattgacttggacgacgttttatctgctgcgcagacagctgctgaatcagctgagcgagctgcatcagcagcccgtgctgctgcaaaccttgcacaactgcgcatttcagacctgaagaagaattccaaggtttatagcaattacggtgatagcgtccaaaaggaaagccatcatcagactgaggcgacacaggaaccggtatttgatcaccaggactccttcaccaatgatacacaggactatgtgtcatcccatgtgccgcagaggtcgtcatctttggaggacgatccatatttctcgtatcccaacttgttctcagcgccaaagccctgaaggcggaaactagtggtctgcaagtagttgttcagaatagtctgaaacatgagatatcactttttcagctctgtccggtcctcttatgtttggtcttttctgatgcctccgaaaattctgtgtatgttgagttggtacatagcggacaaaagggagactatgaaacctctgtctagttttgtctctgtaaattgtacatgtgcggtgtttgtatcagttgtctgaaacatttctgcagtctactggtaataacagaaattgaatctc

SEQ ID NO: 32004 - DNA, 3000 bp, Zea mays
  Clone ID: UC-ZMFLB73246C04_FLI
cgacccacgaatgcgtagtcgtggaactcctcccggcctcctgggtatggaagcgacggcggcgacgcgcgattcagagtagcgacgacggcgacgcatggtccctcccgccacccgccaccatcgtcgacagcgaccttttccccgattgtacctgcaccggttagagttggagaagaccaacccccgccgtcttgggacccggtaccatccccgagaggtacttcttgggacccggtacccccattttttttgcaatgagtatggggttaatggagcgcattaggaagagaagacaggaggatgatgatgatatgatgatgttcttccttcccgcattacatttgttgcgttctagttctcttaaagggaggagggttaagaagcgacgacacacatccaagctaagtggcgaggagcatgttttagagttgcttgaagggcatgtcaagaactgccgagtagcattcagaatggaacctgaaatttttagagccctagccagctatcttaggaaggaaaggttggtacgtgacacaaggataaaagttgaggagaagctcggcttctttctatacatgataagccataacgcttcatttgaagatctgcaagaagagttcgggcatagtagtgacacattccaccatcatataaaacatttttttgacatagttgtcccttccctcgccaaacgatttttgaagcctccttctccaatgcaagtacattcgaaaattgaaaggaatcctaggttctatccttacttcaagaactgcatcggtgcaattgatggcactcatgtgcccattacaatttcacctgacaaagctgctccttttagaaacaggaaggggactctcagccaaaacgtgatggtagcttgtgatttcgacctaaatatcactttcatgtctactggatgggagggatccgctacagatgctagagttcttcgatctgcaatgaacaatggattccatgtacctccaggaaagttctatttggttgatggtgggtatgctaacaccacgtcattccttgcaccttatcgtggagttagataccatctaaaggaatatgggcaaggtcaccgtagacctcagaactacaaggagttatttaaccatcgccatgccatactgaggaatcatgttgaaaggactttgggggttgtgaagaagcgctttcccatcctaaaagctgccacatttcacaaaataaggaatcaagtgaagataccagtagcagctgttgtacttcacaatattattcggtcactcaaaggggatgaggaatggttagataatcaaccagataatatttcgccacaaaactttgttgatctaccggatggcgatcaaggcaacgatcaagtaaatgtccaaggaaatagaccatatgttgctctgttctacattttatttactgtcacattgttacctctcttaatatttggtttaatccatttctcattgtttagtatcctgaaacataatatcatctaactgttttcataatagaaattttctttgttcctttagttccaatttcagaatagaaatttcagctaactgttttcagcatagaaatttggtttaatactgtgttatataatattagttaacatgtttggaaggggttctccaagaatcaacatgctcttatcaaaaagtgcaacaaagaagccttctcctaaagctggtgatccaaaaaagcatggaggttctccaaaaggtatgcaagtagaaaaatcaagagaaattaagagcctcttggaattatgcaactggtgtttcttccttgtcttatgtagagaaattaagagccgcttggaactcaactctagagaaaactcttgtggacctcttgcatgagcacaaaacagctgattataggggtcaaaatggatggacaacagaagcatggaacaaaattgtcaaggaatttcatcagagggaacaatatgtctatttcacaaagacacaaatacaagataaggaaagagagctgaaaagggactacaggttgctaaaggatgcaaagaatcaaagtggagctcattttgatgagaagatagggaggattacggctgacccagctttatggaaaaatatactaacttctcatcctaaggctaaaaagttccgcaacaagtcttttcctctatatgaggccttgggggagctttatgatgggcaaacagctgaagggacctacaactacacctccacccaacttccagatcttactcaagtaggaaatggagatgaatttctcaacatagaacatgaacaagatgaattggaagaaatcttgcctgcacatgaagaagatgatgtcaatgtagttaaggcaggagatgcaaccggtgaaaggcatgatccgacgccacagagaaggactactgctgcaagagggaacaatgaggaaacgaggacaaagaggcataaaaagggcgataacctagaaggaataatgggaagatacattgacatgagaatgaagcaagctgaggaagaagccacacatctagcaaaagagagggaggaaaaggaagtgagtcaagctgcagacttctcaatcaagaagtgcatatccattcttggtacaatggaagttacaaaggaggaaaaagcaaaagcctacaatgccttcaaagaccttgacaataggcaaattttcttgagtgcctacgatgatgatgctgagtctgcactgatttggttgagaaacgagatggcttagctgaaattacaacaaggactgcagagaaatccagaatcgcttccttttgatgagatactctactgtaacattggaaatctccattccattggccaacagccagttacctatttcagaactagatcattggataactgcattttgttcatgctttaaactgctttaaactgaaatacgttacagctagaactagatcagctgtacatgcttctgcattgaactacattttgttgaacgtggactgcattttgc

SEQ ID NO: 32005 - DNA, 2239 bp, Zea mays
  Clone ID: UC-ZMFLB73246G03_FLI
ggatgactgactgaccacactagcgcagcgcgcacaggagcaaaggggggcatcctctatcgcgcgcgcgccatggccaccaggccgggccctttgactgaatggccatggcaaaggcttggaaacttcaagtacttggtgatggctcccgtggcggtccacggcgcgcggcgggtggtcgcgcggggctggggcgacatcgacctggccttcgcgctcatcctgccgtcgctgctgctgcggatggtgcacaaccagatctggatcagcgccgcgcgctaccagacggcgcgcagcaagcaccgcatcgtcgaccgcggcatcgagttcgaccaggtcgaccgggagcgcggctgggacgaccagatcatcctcaacggcctgctcttctacgttggctacctggcgatccccagcgcgaggcgcatgccggcgtggaggtcggacggcgccgtggcgatggcgctgctccacgccgggcccgtggagttcctctactactggttccaccgggcgctgcaccaccacttcctctactcgcgctaccactcgcaccaccactcctccatcgtcaccgagcccatcacatccgtgatccatcccttcgctgagcacatggtctactacgtcctgttcgccatccccatgctttcgactctctacatggggaacgcctccgtcctgggcatcgtgctctacatcgcctacatcgacttcatgaacaacatggggcactgcaacttcgagctggtgcccaggtggatgttccagctcttccctcccctcaagtacctcatgtacacgccgtcgttccattctctgcaccacacgcagttccgcacgaactactcgctgttcatgccgctctacgactacgtatacagcaccatggacaagtcgtctgaccagctgtacgagacctcgctcaggggagcggaggagacgcctggcctcgtccacctcacgcacatgaccgacctgcagtcggtctaccacctgcggatcggcttcgcctccgtggcgtccagaccgtctgccaccggcgccatgtggtggtacatgtgggtgctgtggcccgtggcgtggctgtccatggcgctcgcgtgggcctacgggtcctccgcgttcgtcgtcgagaggatcaaactcgggaagctgaggatgcaaacgtgggcagtgccaagatacaacttccagtacggcctgagctgggagagagaatcgatcaacggcctaatcgaaagggcgatactagatgctgatgcgagaggtgtcaaggtgctcagcctaggactgttgaaccaggcgaaacagctgaacggcggcggcgagctgttcaggcacaggtatcccaagctcagagttcgcctcgtcgacggaagtggcctagcgactgctgtggtgctcaggagcattcctcgtgacgcgaagcaggttctcctccacgcaggcccttctaaggtagcgtgcgccacggctgctgcgttgtgcgagaggggcgtccaggtcgtcatgaacccaaacaaggaatatgatatgctcaagtcacagattgcagatagcaaagcaagctatttggaacgacgctccgacaaccaccacacgcctcaggtttggctagtagacagcatcgacgacgaggaacagaagatggcaccgaaaggagccgtattcgtcccaatctcacagttccccatcaagaaaatccgcaaggattgcacctacctgagcactccagcaatgaagatccctgaaaccatgcaaaatatccatgcctgcgagaactggctgccaagacgggtgatgagcgcctggcgcatcggcgggatacttcacgccctggaagggtggaccgtgcacgagtgtggggacgccatggtgcatgctgacaaagcatggtcagctgctattaggcacggattcgttcctttgacgaaagcctgaaagcctgcgaagcccggggttctgtggctggggcctgcgatagatatatgtacgcagatctggacgccattcgacgatggctggaaaactacgtttcagcaatcggtagcacaaattctcccccgctagagaaggcgacttatatggtcggcgtgatgaatgacgaccttgattccaacagcatatagtaactacagttatgttgtggcattgtatgatgcaagtgcgagaaactgctttgtggctgtctgggtgacatatacaattataataaaatgtcgatttggcttgtcct

SEQ ID NO: 32006 - DNA, 1783 bp, Zea mays
  Clone ID: UC-ZMFLB73246G04_FLI
ttcctcctctgtctcatcggggacccctgtccctcgtggcgacggccggtcgaccgccgctgccgaggacttcgccggcgacgaccacccccacgcccactacattatatgttgaagaatggcttggagctaacagtactgacaccaacttttggttatgatcagaagcgactggagtgcagtaatgaatctctaattgtttgcaatataagaaccagatacctcattcaaatggtttttccatgttacagattggtagccaagaacaaagagaaaaacacacaacagtaatgggtcacgaccatatgtctcgtataaagatgcatatggcagaaggttcttttggtgacaggatccggtgccagcaacctgggtgcaatgaggttgtcgatagaagggtagtgtactgcaaaattcacagtggagagttgtcatgccaacagttcagttacctccagagcggactggagagctcaggtttatctgtgcgccctgttaacgacagccaatttaagggatctgtttccattgcagcagtgccatgcactgagcaagagttacatgtcaagcatgaaggtggtgatcgaggtaaactaaaggatagttctgggtacactttgggtcaggctgcacaatttatcttctctggggcaagcatgctttgcaagaacgataactgcagcaagcaagcacacgagaactcaatccactgtaagttgcatagcggcggcgttaacaagggctgcatggcacggggctgtacaagaggtgcgcatggaggcacgcctttgtgcattgggcacggaggtgggaggcggtgtgtggtccctggatgcccaaatgcagcatgtggccaaggccgtagcgaccgctgcgtgaggcacggtggcggcaagagatgtaaattcgaagggtgcgcgaagggcgcgcaagggaacaccgatcactgcataaggcacggtgggggaaggcggtgcaggttccaaggatgtacaaagagtgcgcagggacgcacagatttctgcatcaagcatggtgggggcagccggtgcaggttccaagggtgtggcgcgagcgcaaaatggggaacggatttgtgctctgtgcacaggaagagcctgttgggcggtgacaatgccatccctgaagctttggccgccccttcagaaaaacgacgccgggccaagacgccccaaagggaagcgaagccgtccgaggtcttccaagagaatgtcacaacagcagctactgctggtaacagcacacagcacacgggcttccttctcgtagctgcccctgttgctaaccgtgacatactgaccaatggtatggcagtgacggggcaagctgcaatagccccccaacggatagtggcaccgatgttcatgagatcaccaacgccatctggatcagtggctgcctcggcacagaggtgggaggcgggagcaagcaggggtatgctgggtctgtagaaaggtggtataatttgggaaggcttggagacaccttgcccaagatagttctctgattattggctttcagactgagaaacctctgaaacttgacagccttgtgccgtcaacggactctagtgatgtcctgtgcagctgtgctctctcatttgtattgtaaattgtaatgcaaatctctagttgttcttgtgtatgttctcttgtcgccttgtagtagcgtggaaaccggtcgggggaccatctggaactttggatgataagcaataatattgtggcatggcctagctttgcaggtccagttggactttttt

SEQ ID NO: 32007 - DNA, 843 bp, Zea mays
  Clone ID: UC-ZMFLB73247A09_FLI
gtccgtcctctccggtcggcgagagcaagaagagatcccgcgccgtcctcttctccacctccacctccacccatggcggcctccaccttcagcggcgacgagacggcgcccttcttcggcttcctcggcgccgccgccgcgctcgtcttctcctgcatgggcgccgcctacgggacggccaagagcggcgtcggcgtcgcctccatgggcgtcatgcgccccgagctcgtcatgaagtccatcgtccccgtcgtcatggcgggagtactcggcatctacggcctcatcatcgccgtcatcatctccaccgggatcaaccccaaggccaagccctacttcctcttcgacggctacgcgcacctctcctccggactcgcctgcggcctcgctggcctcgctgccggcatggccatcggcatcgtcggagacgccggagttagggcgaatgcacagcagccaaagttgtttgtgggcatgattctgatccttatcttcgcagaagctcttgctctgtacggtctcatcgtcggtatcattctctcatcccgtgcaggccaatctcgcgccgattagaaggcttgatatacgccacactgagtcatctgccattgtattcaaagtgttcttttctcggtgaacaatgtgagggatcatgttgagcctgttccacctttgtaacattatattgctattatgtgaagacaaacctagctagctgttgcagttatgctgttgtacttgtatttgtttgaaaataataggcagcgagccccggatgtgatgaataataagcaagctggactagttgttaatgttttttctttaatgtggattggttttgtt

SEQ ID NO: 32008 - DNA, 589 bp, Zea mays
  Clone ID: UC-ZMFLB73247A11_FLI
ctcctaaccaaatgggtgccgggaggggtatgggtcctggtgccggtgccggttatggtggtggaatgggaatgaaccggccaatgggcatggggatgggaatgaatcaacaacagatgaggatggggatgaaccaacaaccgatgggaatggggatggggatgaaccaacaaccgatgggaggaatgaacatggggatggggatgaaccaggggatgccgatgcgtcctccaatggggatgggtcctggtggaatgcccggtgctggctacaatcagatgggcgcggcgtacggtggccagcagccatacggtggatacaggtgaggaggggctatgcagtcccccacaccacagatttatgggggcgaggtgttgaagaaacggttttggaggcatctgtattttgctcacctggttttgctttgggtatgatttcttgtttcttttgggggtggaggtgagaagggtataattttcgtcactattcttttacagtctatgttggatactgtacctactttactaaatagcaaaaagcaaacatatgaacaagggcggtgctacaactactgcgttgtgttggatgt

SEQ ID NO: 32009 - DNA, 2232 bp, Zea mays
  Clone ID: UC-ZMFLB73247B01_FLI
gaaaggaccattttctttgtgaagatgaagcatgcttggcaaagaagtttgttgtttttctgagtgaagcagagctgaagaggcataatgctatggagcacggtgggcgaatgtctcgttcccagaggaatgctgcacttcagatacctaccagttttatatatcgcagaaatgagcaagcacaacggcgtggcagaggtagggggcgtaatgctctccatgaccgatttgacagtcatatctcatcatctgcacaaaacggccaagcaactgccgatcgccgtcttgatagtgtttcagggtcatttcagtcattaagcattggatctagttctgggggagctgaagttggccaaggctcgaggactggacaagtgctcgaacagttgtccttcccacctcttttagacccagatattcctgacaacaacgttgattcttttcatgatgaaacctcatttccttcattatccgagcagcaatcaaggtatgcactagctctcagtcagagtgcaaggggcactgcgaggcttggggatgagtcactattcccccctttgcctgggtctagtgggtctaataacaataggggtgctggttcagtccaacagggactacaaagtctagccaagagcacacttgcagcaagacttcaacaacgtagcaagggccctgtgaaggtacttaatactgctcggccacgtccccctgaaaatgttgaagccctctctagttccacccagacatggcctacacctgatcagggcctagtcctgtctggatattctcagcttcgatctggaactcaaccaacaagggaaaatgccatgccaactatctccagtaacacagtgtggaatcctgttgctccaaacaagatgaagcactctgtttctacgcctaatcttgtgtctggtggatcctctgcccaagtatcattgagtacagcttatggtagcaacaaaagtcaggatcctcctcaaggtaaccaaactttgcctgttccagaggatttccgtgctgcaaacaaaactctggttgaaagaatgcgttctgctctgggaatggacgaggacaggtactctgcattcaaagagattgctggtgaataccgtcaaggtatcataggtactctggagtatctttcatatgtcgagcagtttggactgtcacaccttgttcctgaaatggctaggctattgcctgatcctcaaaaacagagggaacttgctgatgcatattatacaaatactcgatttaaaagcctacaagaaaacggaggtggaactagctcacaagagggcaaccgtaaaaagaaggggaaggggaaagctcctgtcacagaaagcagtgctgctaatgatgtgaatagtgcactagcagataacattctggagactgtaagaaggcttcaatcaaaccagcaggctcgggaaggaggagctgaggtgctgtcgaaggatgggtatcgaccttccaagggggtccaaccggcagctggatcttcatctaatctggacagtgatactagttccaacacaaaatcatctggtgcaaaagataacataggcaagggaggaggcaataagcaaccgaagaagacagcaaagtttctcagagctcgtttaggtgacaactcattagccacacttgatttaagtcgtccaagtgcaagccctgaacgtccagaaagggaattacaaggccctgagacagggttgccagcgcgaggtgcttggaagaatggcggggggcagaaactcttttcgagcaatggacggaaataagtcattccaactgcatagccgtggggacggggttgacagcgccaggtgcttggaagaaatggtggccagaaactcgtttttgagcaatggacaaagtgagtcactgcaactgcatttaggtgtgtccatatacctgatcaacaattaggcaatgccctgttcattgctaccggcagactgcgcaaatttcatagtcatccatttcaaattcgtaatgatgtggtgggcaacatttaatgtggtacaaatatactactagattttctgtgcattacaacggaacatgtttggtagtattgtccaaaaaaaacttgtcaagctaaaaccaagatacagagggtccgtgtcaacatgttactatgtgttttcagtgctttgtttttttaaaggaaatatcttgctgaagtatgcaaaccgtaatgtctaattaaacttatgattccat

SEQ ID NO: 32010 - DNA, 1725 bp, Zea mays
  Clone ID: UC-ZMFLB73247B11_FLI
gcggccaccagctttgaccgcctcccctcccctccgctcctgttcctccataccccacccccccgcaggagcggcgcggcggcggcggcggcaaagccaaaggcaagatgttcgggcgcgcgccgaagaagagcgacaacaccaagtactacgagatcctcggggtgcccaagtcggcgtcccaggacgacctcaagaaggcctaccgcaaggcagctatcaagaaccaccccgacaagggcggtgaccccgagaagttcaaggagctcgcacaagcctatgaggttttgagtgatccagagaaacgtgagatttatgatcagtatggtgaagatgcccttaaggaaggaatgggtggtggtgggtcccatgctgatccatttgacattttctcatcattctttggaccctcttttggaggaggtggtggaagcagcaggggaagaaggcaaaggaggggagaagatgtagtccactcacttaaagtttctctggaagatctttacaatggaatctcaaagaagctctctctttcgcgcaatgtcatctgctccaagtgcaagggcaagggctcgaagtctggtgcttcaatgaggtgccctgggtgccagggctcaggtatgaaagtcaccattcgtcagctggggccttccatgatacagcagatgcagcagccttgcaacgagtgcaaggggactggggagagcatcaacgagaaggaccgctgcccagggtgcaagggtgagaaggtcgttcaggagaagaaggttcttgaggttcatgttgagaagggaatgcaacacagccagaagatcaccttccctggtgaagctgatgaagcgcctgataccgtcactggagacattgtattcgtcctccagcagaaggaccactccaagttcaaaagaaagggtgaagatctcttttatgagcacaccctgtctctgaccgaagctctatgtgggttccaatttgttcttacacacctggacaacaggcagcttctgatcaaatcaaaccccggcgaagttgttaaacctgaccaattcaaggcgataaatgacgaggggatgcctatttaccagaggcccttcatgaaggggaagctctacattcatttcacggtggagttccccgactcgctggcaccagagcagtgcaaggctctcgagtcggtacttccgccaaagccttcgtccaagctgacagacatggagatagatgaatgcgaggagacaaccatgcatgatgtgaacaacatcgaggaagagatgcgcaggaagcaggctcatgctgctcaggaggcgtacgaggaggacgacgagatgcctggcggagcccaaagagtgcagtgcgctcaacagtaagcagactaccaaaatgggattcaaggcactttggttgctcttcaattatgcgagtgcgcctgtggactgtatggttctatggttttgctgtcgctgagctacaaagtaggaagctgatgcgcccctggctctgcaagcgggggaatgtatccttttttgctgcaactgaaaaatgctacccaggcaatagctggctaccttataacttttgcttgtgagatttgctagagtgacgattttaatttgtaggtggacttaatgtttgtgtaaggctaggcataacatcatgtctcaatggacgttgccgttgcacattggtgcattttattttaatgtaacgcatgtgcttgtgctgtcg

SEQ ID NO: 32011 - DNA, 1198 bp, Zea mays
  Clone ID: UC-ZMFLB73247D08_FLI
cacgactgcaggcccacggggaacgccatggtgcgcagctccccgagccactacggctggcgcaccatggccgacggggacggcgtgtccatcttcggttccagccacgtctgggtggaccactgctcgctctccaactgcgccgacggcctcatcgacgccatcatgggatccacggccatcactctgtccaacaactacttcacccaccacaacgaggtgatgctcctgggccacagtgactcctatgtgaaggacaaggcgatgcaggtcacgatagccttcaaccatttcggcgaaggcctcattcagagaatgccaaggtgccggcacggctacttccacgttgtgaacaacgactacacccactgggagatgtacgccattgggggcagcgcggagccaaccatcaacagccagggcaaccgctaccttgctccgacgaacccgttcgccaaggaggtgaccaagagggtggagactgcccagaccgtgtggaagagctggaactggaggtcagagggcgacctgctgctgaacggcgcctacttcaccccgtccggcgcgggcgcctcggccagctactcgcgcgcgtccagcctcggcgccaagtcgtcgtccatggtcggcaccatcacctcggacgccggcgcactgtcgtgccgcaagggcgcggcctgctagcgcggatcgcgctccctctccagcaacaggaaaagaaacaggacaacaggaaactaagccacctcaacaccaccaccaccatggttacagtttcttcttcccttctttttaggggtcgcttttgacaagggttatattatatatatatatgatggtcctccttgatattttcaccatttgctcaacctcccccctgctcccgacatggaaagctacctggagcagcaggcgtgaagcgttgctgattggtcgctcggtctctctattagtcgtctgatctgagtgttgcgtgttgttccctctgcctacaagcaagtggtgtatgttgagggcagggggtgcgtgcgtgcgtgttgtgtgtgatacttactcacttggttgttgtgttgagaaaaaaagggtcagattgttagtagtggtagtactacatgttacgcctggacagactgggatggaatggatgtacaagacatggaggaatacccatgttcttaactcttcttcttcttcagtg

SEQ ID NO: 32012 - DNA, 1889 bp, Zea mays
  Clone ID: UC-ZMFLB73247H01_FLI
agactttggtacaataggatttggttttgctattcacttagtttttagttccaaacaaccaacaaattgcatgtcctttaggaaaaatatcacatgaatatcagtaatataacactgataataaaaaatgcttcgattctatatatttttcatgttataaggttgaaaacattctgtctcacggatcagaatgtgtacaaggcgacatactgtgtttacaaatatatttaaccataataaaaacatatttggaaactgaatatcatttaagtccaaaaatgtttttgctgactgttcattaagctagagtaaagagtaaacttagcatttcttttctatatctctctttcgtgctcatgccgccgcagtctcctccatcccacctttcctacgcaggcagctccatctcagtcgttgtacccattcaacgccgagctggtggcagcgatgcaggagatgatccagccgaggtgtacaagtacatgttagtggacgtcacctgccaaagatacacagtttctactggtacacattttatttttttcatggtgataattaattcgtagcttgcgcaaaaccaaaggttgtgtgatttttcaaggcagaaatcagtatcatgataggtgtgcttgagcttttgatagctagtttatttgaacttttatctttttatgatcatggtatattgagacagaaatattttacatgtacctttgcagtttttcagttggagaaaatatttaagacaacattttcatcgtttgttctccatatggggcttgtttcacgccacttgaaggaaggagggaatgatggtgttaagttcggacaatacatctacacatctatgaaatgtacaaccacgatgtagagcatagagtttctaaagttgggtaagctgtttggctgttttatagaaatttgtatcaacatcaacatagatttttagtcccaaacaaattggggtaggctagatttgaaacccaacaagaagtcaccaaaaagagaaagagagataaaggggaggggaaaagcttttgagagaactaaaagagaaaatgcctaatcacggttcgggcacgtggatagcttctttccaagcatttctatccaaacacaactcctttgggtgtgtggggtgatattagaagcttcatgttaggtgtttgatactttcttgaatataggatttttgtgtgtgtggtgtagtataaataatgtccatagttgaataccaaaatgtggatattgtacagtgggagttatggctgccttcttcattgcttgatcttagttgttggttgcaatcttctaacttagagtatgatgcttgaagagatttggatgatgttggagatgtgctttggtgtagttcatctctcccgaatcaaggttcataccccactattttggtttcctaaactgataggcacaactagaaattatcgagtgatgtctaactttcctacctgtcttgcaatgcagagtctggtttatggggctaaggtagaggctgccatcgccattggattcaatgacttcattacatatgctctgagaggcattgggttctaccagaaggataacatggagatcaagaaggccaatggcaatggcacactgatccctgagcagatctttgaaaagactaggagaagttctagatgaattgatgcttggctgaagagggatgtcagatttgtacaatgctcacccacaaagaataatacatttctccaatgtccactgttttgaaaaatacctccattccaatgtttaacattctaacgatgtctgaatttattgtaaagagacacatgattgttcattgttgtaacttatgtacaatatatgcgtgtgtgaaataaagatcatcttggagcaccggc

SEQ ID NO: 32013 - DNA, 880 bp, Zea mays
  Clone ID: UC-ZMFLB73247H03_FLI
cacttttagcaaatgtatatatatatatatatatatttcatagcagtttcatagcccagccgccgcggcctccggctgggcacgaggcccagttgcccgacaggccgtccagggcgtgcctgagaatacagatttgtcttcgaaaatcatctcacctgttttcttttttgcagattgtactttacttggagctttatgcaagctgtgtggagtacatcacgccgctaagagacagcatgtcatcagtgtttccctcagcacatttagcttttgccagcatcgacctgaatgcacacactgtctttgcgatcacaacggccttggcaattctccaaacagtctgtctcaggaacctcagtctcctctcgttcttcctcccttgtgatcagtcaggctacactccttgtccgatgccgttaccactcccatgtgcgtgctacctctccatcaagaagggcgcagtgccattgtgggagatcatcctgtgcatagtcatcataatgatcggcgtcgtatgtgcatgcgtgggatcatacacctcagtcagccagatgattagcagcaccaaatagcgcacgctagctgatatttatctagtgtctacggatccttccaaatgctttgacagagttggaactggcagcttttcgtagctaagtttatttgttccttctttatggcagaaatttggtaagagagagtttagttgtgggaggacaggcggcgaaggagtaatctgagtttagtgtggtgcttttgtgactgatcatctctggagcttttgtgaatgatctagctagctatctgtaaatgatctagttgtgaatgatattataattgtgatgcttttgtgaatatataattgtggtgcttttgtatt

SEQ ID NO: 32014 - DNA, 727 bp, Zea mays
  Clone ID: UC-ZMFLB73247H08_FLI
gcagcagtggctcacttactgggtgttgtactcatttgtctctttgtttgagctaacttttgctccaattatcgagtggcttccattttggtcatatgcaaaactgttctttaactgctggttggtcttaccttggttcaatggtgctgcttatgtttacgaccattttgtgcggccaatgtttgtgaaccgccgaatagtgaacatatggtatgttccaagaaatgagaagctaggtaaatctgatgatgtgctgtcagctgcagagagatatattgaacaaaatggacctgaagcatttgagaagctcatcagcaagtctaccaagtcttcaaaatcaagaagcacaaagcggtcgatcttggaggaggcagaggctgaaagagaatcatggggtgaaaatcccttctacgacaaaaattacagacactaaacctcttcaaaatccacctagcagcttgaagacaacctttgcccacgagcctcatgcaagctttttagttgcatcagactgaagacgaccttcccaaatttctgactctcagtatactataccttgttacattcactgccagtctgtcgctggacaatgatgagttctagagcaattgtggactgtgtttgtaaatggaggcagatgctagcgttgatcatttttcactgtacgtttcttccttctggttggtggtacgtgctctgctgcaatttcaagcgaacagatttcagc

SEQ ID NO: 32015 - DNA, 1041 bp, Zea mays
  Clone ID: UC-ZMFLB73248A11_FLI
cagacatccacccaccagagccggtcgatccgttcgaaacgctccgggaaagattccacgacttgggacttctcacattcccacaccgcactgtgccactgccgccggcccgccgcactagccgttgcttctcccttcccgttcccaaggagttgtcctcgccggcggatccggggcgccgctgcaagaggaggaaggaggaggagaggataccagaatggcgtcgcgctcggcgtccaaggatatcatcacgctgcgaggctctgccgccatcgtcagcgagttcttcgggtacgcggcgaatagcatcctctacaaccgcgctgtgtacccggaggagagcttcagcaaggtgaagaagtacgggcttaccatgctgctcacgcaggacgagggcgtgaagaacttcatcgccagcctcacctcccagctctcagaatggctggaggccgggaagctgcagcgtatcgtgctggtcataatgagcaaagccaccagcgaggtgctcgagcgctggaacttcaacatcgtcaccgacgccgaggtcgtcgagaagggggccatcaaggagaagagcgacaaggagatcatgagggagatccaggccatcatgcgccagatcgcgtcttgcatcacctacctcccctgcctcgacgagccatgcgtgttcgacgtgctggcctacacggacacggacgtcgacgctccgggcacctgggtcgagagtgacgccaagctcatcgacaacccgcagatggttaagctgcactccttcgacaccaagattcataaggtggacacgctggtgtcgtacaagaaggacgagtgggacgaggaggagtagagtttgcaccaaaagttaccctgctgctgctagagcttggcgtgaaggctgtgtgaatcgttcattcacgtctatcgtgtactgcactaatagtatactgctactttggggggaagaaaagtgtgagacgctcctaccatttagaatttcgagattgaaatgccggttttaatataacatgagtcagcgcctttaag

SEQ ID NO: 32016 - DNA, 2235 bp, Zea mays
  Clone ID: UC-ZMFLB73249A05_FLI
ccctgctccattctcagccgccgccaatcccttcccgtgctccgcaaccgctgagtgagaagaagagatggccggcaagggcgatggcccggctatcggcatcgatctcggcacgacgtactcttgcgtcggcgtgtggcagcacgaccgcgtcgagatcattgccaacgaccagggtaaccgcaccacgccctcgtacgtcgccttcaccgactccgagcgcctcatcggagatgcggccaagaaccaggtcgccatgaaccccatcaacaccgtctttgatgccaagcgtctcatcggcaggaggttcagtgatgcgtctgtccagagtgatatcaagttgtggcccttcaaggtcatttctgggcctggtgagaagccaatgattgttgtccagcacaagggtgaggagaagcagtttgcagctgaagagatctcctctatggttcttatcaagatgcgtgagattgctgaagcttaccttggtagcacgatcaagaatgctgtggtcacagtccctgcctacttcaatgactcacagaggcaggccacaaaggatgctggggtgattgctggccttaatgtgctgcgtatcatcaacgagccaacagctgcagctatcgcctatggtcttgacaagaaggctaccagtgtcggtgagaagaatgtcctcatctttgatcttggaggtggtacctttgatgtctccctcctcaccattgaggaaggaatctttgaggtcaaggccacagctggtgacacccatcttggtggtgaggactttgacaacaggatggtcaaccacttcgtccaggagttcaagaggaagaacaagaaggatatcactggcaaccccagggctctccggaggctgaggaccgcttgtgagagggcgaagaggactctgtcttccactgcccagaccacgattgagattgactcgctgtatgagggcatcgacttctactccaccatcacccgtgccaggtttgaggagctcaacatggacctgttcaggaagtgcatggagcctgttgagaagtgcctgagggatgccaagatggacaagagcaccgtccatgacgttgtacttgttggtggctccactaggatccccagggtgcagcaactgctccaggacttcttcaacggcaaggagctgtgcaagaacatcaaccccgatgaggctgtcgcctatggtgctgctgtccaggctgccatcctgagcggtgagggcaatgagaaggtgcaggacctgcttctgctggacgtcacccctctgtccctgggtctggagactgctggaggagttatgacagtgctgatcccgaggaacaccaccatccccaccaagaaggagcaggtattctccacctactcggacaaccagcccggtgtcctgatccaggtctacgagggtgagaggacccggacacgcgacaacaacctgctgggcaagttcgagctctccggcatcccccctgcaccccgtggtgtgccacagatcaccgtgtgctttgacatcgacgccaacggcatcctgaacgtgtctgccgaggacaagacaacggggcagaagaacaagatcacaatcaccaacgacaagggccgtctctccaaggaggagatcgagaagatggttcaggacgctgagaagtacaagtctgaggatgaggagcacaagaagaaggtggaggccaagaactcgctggagaactactcctacaacatgcgcaacacgatcaaggacgagaagattgcgtccaagctgccggccgatgacaagaagaagatcgaggacgccatcgacgcggccatcagctggctggacgccaaccagctcgccgaggcggacgagttcgaggacaagatgaaggagctggagagcctctgcaaccccatcatcgccaagatgtaccagggcgcgggtgaagacatgggcggcgctggcggcatggacgaggacgcccctgccggcagcggcggccctggccccaagatcgaggaggtggactaagcggtttgttgtcagtcttgagtgtgctgcagttgctggctggcccagttgctgccgagagttatcgtcagttggtgcggtgtgtccgcttaaactttatttgtggttggttggtacttttgtggtggttatttttttggacctcgtgatagtcggtcggttcaatgttatcgcggctactggcaaaccttaagtgatacggtattcttcttttcggt

SEQ ID NO: 32017 - DNA, 2279 bp, Zea mays
  Clone ID: UC-ZMFLB73249D11_FLI
aaaaaaggtccaaaagtcaggagtgaactgtcgtttgtactgccttcgaatggcatgcagtgcagcatacagcagtgtaccgtgtgacgctgtggatatctgacccactctcgtcgcacgcaacgcaagtagcaaagcaggacccatcctctcccatctctcggtctccccatcccaacccgccgccgccgccgccgcttctcccgtctccagcgcccacagcgccattgtatccgcggggcgagctgagtcaccaagctggtctagggcccatccatttggaaccctcgcgagaagcaaagcggacggagcgccagcgttcttagatcgattgctcgccaggctgttggcgaggagtcgtcaaccctcacggcagccatgtctgtggagctcatcctgtggcttttctccttcgtctccgtcatggtcctcatcggcctcaccgcataccagcttatctgtctgtcagatttggagtatgattatatcaacccatatgattcatcgtctcgcatcaacgctgtggtgctgatagaatactcactccaaggggccctgtgtgcttctttcctcttgacattgcattggttcccgtttctagtcatgacaccagtaacatactaccatgtcaaactgtatgtattacttgctttgggttgatgttaattctggcagaatactcatgatattcagcattggatatcatgctgttcatacttttggctgtattcacatctttaaataatatttaaaatgatctacaactctcaatggctcaatgaaacagctaagtaagaatatatatattttagaatttagagattgtgatgttatgcttctagagtgataatttgtagttatctgcttgttctgggccatggtgtattgtctggtcctggagcaattccttctctgaaaatgggagaatattgatcatggtattaacaaatgggagaaggtagtgcacctgttctagtattatacctgtccagattttgtaggcctcactaccaaaatttgttagctatttaacttttattattgctggaatatgacaactctgaatcatgctatgtgcactttatttgctgagatatatatattttttatttttactagtatgtgctagagaagaaccataagtaatatttttgttgtaattatttagtattcagcagttcagcatgaactgttgattccacatatagttggcttaacaatgattaatgaaagtggttcttagtttgttctggtagggtacagctataatttagctggactattctctgggtgacaactgattttagtccatcagatatgagcaagcacccaattttttattgttacatgtggaaagaaaatctcccttgaccctgttcttgaaattttacagtcatgacaatagtttctaagcactctgcttgagttttcagttgatttagagttcttttttccactgttgaggattaagtataatgccccctggcattggaactagttttgatctcatgaactagtgaacttattttggtgggatatctgagatgcttttctaaatttaatttttgccaggctttaatatctgaatgaatatgaactagttttttttattcaggtatttggctcggaaacatcttgtagatgtcactgaaatttttagacaattaagtgacgagaagaagtacaggatgatcaagcttgccttctacttctgcctatttattataactatttacaggcttgtaatgacagctgtgatgttgtttattgatgaggacataaatttggcagaaactaggagtatctagacttcgccaccaacttgtcatggggatggagcagagttgtagcttgaaccagggagaccacaactcaatgccttgacttagttgtgagaaacaagatcagtttgtgccctgtagctggaggagctaacctggtactccttttaccctaaatcgtaagttgttttagttttttctagatgcatagcttttacgatgtatcctccagatgcatagtaaaagttatatatttagaaaaaacagaacaacttataatttggaatggagtattcatttcatccatcagattgtgatgtacaatgaattcccatagtttggtccatcggtaccatgtttgtaaattgggcagtcaatgatgtgcatcactgcaggatgaacgcacgtttggtaattgttgtgcaattctttgtacttgtggacaagtgctgtattctacacattgtttgcatacagacgatgtgtggttggtgtcat

SEQ ID NO: 32018 - DNA, 1556 bp, Zea mays
  Clone ID: UC-ZMFLB73249G10_FLI
gagatgacgatgccatggatgtttcagaaaatggccatggcaattcttcattctgcaagaagccgaaggaaggtgatgttcatgtctcttccagttcaactgaagtggcaggaaccattccagagatgaatggaggcgatcatcatatacctggaagctccttttcatgtctagtgaagatctatgacatgcctgatagtcaagtgaaattaaatgatgttattgagtttattggcgtatatacatttgacccagaacttgctgctcctagtgacaacccagatgatataatgttagacctcatcgaagatgtaacagttcagttgcctccgagcaaggtgccacgtcttcactgtttggtatggagaaaattatcattccatgattttatttcaaggcctgttgttgagccttcacccagcctgttaagaggcattcggcaatctttgctctcacacctcacccttgtattaggcaatgacgagcttgcagcccagtgcttgctgttgcatcttctatccagacttcgtaatagggtggatgtggtcaccgttggcagactctccttgaatttcactggcttcaacagggaaagtgcttccatatttgggaatcagctgtattctttgatccagaaattggtgccgtattcacaagccatacctctgtcaattgagtatctcaacacagctacacttcaacctagaaaggacaacaagtcaggaaggttggtcacaggagttctgcagctacctcaaggcactcatctgatctttgatgagactcttctgcagacaggatcattgacatccaaaggtgtggagaataccatgctgctcaagaacctgatggagtcgcagaaggttgactacgattttgagtactacaagctggaaatggcagctgatgtgcagctactcactctctctgaggggaaatcaaacatccttccttcagatttggtagtgcctttccggccatcctctgttcccacagttaatgcaggtgctgaggaaactgagagctggaggtggtttttgaccacagtaaggtctcttcctcagtccactgaacctgaaacttaccagatgattcaggatgaaatggtcagtgccatgcgtgatgataggagcttgggttgttctgaacttagcagatggctaacaatggcacaaataatggcctccagctttggcgagaagagtctttctttggagcactggcagatggtgaaggagcttgagaggcttagaaagcagaggatgcaatgagaatgactcatcattagcatgtgtttttgcactctaattgtttatgttggtatgctgttatgtgtatagtactagacgtttgaatcaagacatggatctaaggcatttctgtaacaactgacaacttttatgatcctatgcatgtcagcatgtgtatctgctgctcattttctttgctcaaatttgagatttactctgggaactatggaatgccaatgtcagacctgtgatttcaggattgtaatgctaaattgctctgcgactacgtaatggatgttttgaaat

SEQ ID NO: 32019 - DNA, 1606 bp, Zea mays
  Clone ID: UC-ZMFLB73250B03_FLI
tttcaggtggtgggtagctggttgggggagctcagaaccttacacttacaactatgttctccttgttctatggtctatggaagcacgtcttcagcaaggcagagttccatgtgcttatcctcggagttcataaggctggcaagacgaccttgctagaaaagttgaagtcgatctacttgaagggagaagggcttccgcatgatcgtattgttccaacagttggccttaatattgggcgtattgaagatgcaaatgtaaagcttgttttctgggatctgggaggccagcctggcctacgaacaatatgggagaaatattatgaggaagcccatgctgtaatatatgttatcgactctgcttctgcatcatcatttgaggatgctaaatctgctctcgagaaagttctccgccatgaagatctgcatggagcgccaatacttatatttgcaaacaagcaggttgacatctacctgtacttgtcttggtttatatactccttaaaactccatgcacttgcccaacagtttttttgacggtccacttgctcaatagttgataattatgttttattaggtgaaaatgagtagtactagaaaaatagttatcatccacatgaactaaatggtagatgtaaattaaactgtgtcatggtttacactgtttgataagaagttagttttgtgaagcctggatctaggaaatatcagaaactgacaactgtggatatattctctgggaaacatatagcaaccttgcgcttttttacttctggttaggaactttcttcaaatttaacagtttttctttattctgaaaggtgtggtgcttaacaacatgagcaagataatgaattgacaacattagtcctactttctggagtcctgcccagttcattttgggatatataaatccacacaagaaatcctccacttgtttcatgaatcttatattctatgtttcatggcttatctggatttttcaacaggattcaccagcagctgtcacggaggaagaattggctagacatctgcatcttaaggagttagacgagaggccatgcatgttccaggctggatctgccttcaatgggacggggatcaaacatggcgttgactggttggtggaagaaatggagaggagtaaacgcaccgaggcactaagggcgcgtacagaagcagctgggaagatttaacacctcaattcagggctatcacctgtgattttccaaatgcaaagcatctgaggaggatggcttctgttaactccatgaatagagacgcttgtccgggtggagccttgtcctttcagtcacgggatccccagaaaagatttcttggttgtgctgctcttgcagttttgtagtagggtgtccattgtagcaatggcaggggtgaccgttgcttgggtttgttgacctgcgtagcacttaagattgtgtatctaaagttgtagggattcatgttcatgcgattatgcttggatatacggagtgacatcgtggagcataaagatgatttgtacattcgtcatgttcatcgagagtcatgtgacttttatcaaaagaaacaaatacattgtgatatcaatcacgatatatgtttttcat

SEQ ID NO: 32020 - DNA, 1066 bp, Zea mays
  Clone ID: UC-ZMFLB73250F12_FLI
aaaacaagttattcaactgaaaaaacacttaaagaagatgcttacactgttgatgagggtgttgcataccgttctcgtcgaaagaggaagaaaacagccacggattcaattgaaaaggcacttgatgaagatgctccagggcttctaaagattcttttggacagaggaataggagttgaagaaatcaaactttacggtgctgaagaagataatgaaatgattgcagattctacagaaagtaactttgaagatcttgaaaacgtgattgcaaatatatttccgaagaggggaaaatgtcatttactgtcagcagctagatacgaaaggggggaaaagtctatttactgcttatcctgtttaatttctcttattgagcagtcacgataccttcgattccgtgactgtcctgtggaatggggatggtgcagggatctgcaatcctttatttttatatttagaagccataataggatagttcttgagcgtcctgaatatggttatgcaacatacttctttgaggtggtccaatcaaggccaatagaatggcagatccgtaggctggttgttgcaatgaagcttagtggctgtggaaggacagctcttattgaaaacaggccgttactggttggtacagatttaacagaaggcgaggcacatgttttggaaggatatggctggctaagaaacactgggcttggcacaatggtcaactaccgtgatcgtgtggtccatgacaggtggactgagaaatctgtttctgattggaggtcgaagatagggaaacttctaatggttggttatgctgagggccaatcaatcacaactcttggcccgaagaaaatactggacatgctggaagctactggggatgctgaatttgaagtgaagttggaggatccttattgagagatccgacgtgtataggtacaatatgtacgtgtagttctgaatgcgtccagataaacttagggtaggagctctctgatgaaataacgtggcacttgtattctaaattctaaatcacaaattcgttcgtgattattttaatttcacggaagttagcatt

SEQ ID NO: 32021 - DNA, 1591 bp, Zea mays
  Clone ID: UC-ZMFLB73250H05_FLI
gcgccattggccagctagagccaaccagaagagcttgcagttactgagagtgtgtgagagagagaggatgatgggtggcagcggcagggctgctctgctgctggccctggtggccgtgagcctggccgtggagatccaggccgacgccgggtacgggtacaccccgacgccgacgccggccaccccgaccccgaagccggagaagccccccaccaaggggcccaagccggagaagccgccaaaggagcacaagccgcccaaggagcacgggcccaagccggagaagccgcccaaggagcacaagccgacgccgcccacgtacaccccgagccccaaacccacgccgccgacgtacactcccaccccgacgccccccaagccgacgccacccacatacactcccgcccctacgccccacaaacccactcccactcctccgacgtacaccccttcccccaaacctccgacacctaagccgaccccgccgacgtacactccaagccccaagccaccggctagcaagcctcccacgcccaagccgaccccgccgacgtacaccccttctcccaagcctccgacacctaagccgaccccgcctacgtacactccaagccccaagccaccggctaccaagcctccgacgcccaagccgaccccaccgacgtacaccccttcccccaaacctccgacacctaagccgaccccgcctacgtacactccaagccccaagccaccggctaccaagcctcccacgcccaagccgaccccgccgacgtacaccccttctcccaagcctccgacacccaagccgaccccgccgacgtacaccccttcccccaagcctccgacgcccaagccgaccccgccgacgtacactccaagccccaagcctcccacacacccgacgcccaagccgaccccaccgacgtacaccccttccccaaagcctccgacacctaagccgaccccgccgacgtacacgccttcccccaagcctccgacacccaagccgaccccaccgacgtacactccaagccccaagccaccggctaccaagcctcccacgcccaagccgaccccaccgacgtacactcccacaccgaagccgccggccaccaagccgcccacctacactccgacgccgccggtgtctcacacccccagcccgccgccaccttactactagaaaccgatgcctaccataccacactgctgtcagtctctggagcatttaggtggtctcgatcgatggaagaattgtgtcctagccagccggcaaaggtgacctgctgatgatgatgatgagaggcgagtcctacgccctagtcctactactaccctctttgtgtgctgccatccatccgtccccgctagacgatcgaggagagaataacgcagagctctgtgctcccggcctctgtcttctgccgtcccggccgtttaatttatagtctctactgtgtgttcgtcccatgtgtttagcagcagcagcaggtgtattgtgcgggtatgtaatggtattgcaactatattgggtgtaaaaccataataaatgtggaaaaaatgcaaggaaaaaaggcttctactgttt

SEQ ID NO: 32022 - DNA, 754 bp, Zea mays
  Clone ID: UC-ZMFLB73251A04_FLI
cgaatcttccacagagaggcagacggcaggactcgcttcaagctcctcatctcgcgcagggggggtcgcctgagatcacagagacaatggtgaaggcagttgctgtcctcgccggcactgatgtcaagggcaccatcttcttttcacaggagggggatggtccgaccaccgtgactggaagtatctctggcctcaagccagggctccatgggttccatgtgcacgcgcttggcgacaccaccaacggctgcatgtcgactgggccacacttcaatcctgttggcaaggagcatggcgcaccggaagatgaggaccgccatgccggtgatcttgggaatgtgacagcgggagaagatggtgttgttaatgtcaatattactgacagccagatacctcttgctggaccccactcgatcattggccgagctgttgttgtccatgctgatccggatgatcttggcaaaggtggacatgagcttagcaagagcacgggaaatgctggcggacgtgttgcctgtggtatcattgggctccaaggctaaagcagttaacctccgaggcaaacaccatagaaggtcgaagcgagcacctcaggatgttgctgttccatttcccctgtattggcaacacaatttgagtactccaaataagcgcctgatccatgatcagagagcactattcatgccattttgtatatgaacaatgttgcgcacctgcttaagtgtctgttccaacaaatgcttaagaagacact

SEQ ID NO: 32023 - DNA, 1428 bp, Zea mays
  Clone ID: UC-ZMFLB73251C10_FLI
ggcgatccaagagccgctcctcttccttctctccgcctactccctcccggagtcaaccatgcgctccatgctctctctctcctcggcgccgcccccgcccccgggcgcgcaggacgccgcggggctccatgctgctgtggcagccctagcgccgccgcacatgcttccccagggattgtcgccagacctaacggcggctctcctcgccaaggaccggggcaacagcttcgccatcatggagccgtaccgacacgggatgtcgctcgagctcctgaaggcgcgggcctacgcagtctacccccgtgcttcgctgttcaaccatgactgcctgcccaatgcgtgccatttcgattaccccgacaggcctgggccagggaacactgacattgtggtgcgtgcactccatgacatacccgaggggagggaggtctgcatcagctactttgcggctaattggaggtatgctgataggcagcgcaggctgctggaggattatgggttccggtgcgagtgtgatcgctgtcaggtggagagtcagtggaaggatgatgatgataacaatggagatgatggggatgacactatggaagaggagggtgaggatgatgttggagatagaggtgatgatgggattgaggaggaagagggggatggtgctaccaatggcggtgatgatgatttcccacatgcctacttctttgtcaggtacttatgtgacaatgagggttgttggggtatgcttgctccattgccaccctcaccaaacggcgacctgtcccatgtgtttgaatgcaatctctgtgggaagctgaggaaggaagaggatgtcattcctgatgagggcacttctggcatggtccattagtttgatgaaaacatactgatccgtgtgctgcttcttttagtggagtatgaacttacgacatgagcctttcaatcaaaggggagaaagttggaagatgatgtctagccatgtaaagagaatgagaattggccaatgtccataactcttccaagatttgagccagagggcagggggtgggggtggagttaaagagttcattgctggcaaaccatttagccttaggggatgatcattgctgctaatctccaccttaatttagtagtgttcatgttaattaggctacaaatcctgtggcgaaggtctaacacaagcttggataagtaagagaagtgagtgtcaaaatggcacattatttcatttttagtttcatggagatacccagtttgagcagtatctaggtacgaggagttacaaatttgtttatgttatgtattgtgctcttgcgtcatactgataagagaaccgtgatgacaaaatccacctgttttggtgtttaccttgagccttgtaaaggttttcattaacatttcatcatgcttcacaatcagatgtgtttcattttc

SEQ ID NO: 32024 - DNA, 1645 bp, Zea mays
  Clone ID: UC-ZMFLB73251D05_FLI
gcctcaacctgggctcctacaactaccttggctttgctgcagcagatgaatactgcacaccacgtgttattgagtctctcaagaaatactcagcaagtacctgcagtgttcgtgtcgatggcggtacgaccaagtttcacaatgagctagaggagttgcctgcgcgttttgttggaaagtttgctgctatcctatttggcatgggttatgttacaaactctgccatcattccatgcctaattggaaagggtggactgataattagtgactctctgaatcataactcaattgtcaatggcgcaagaggatccggtgcaactgttagggttttccagcataactcccctgctcatttggaagaggtcctgagagagcagatagctggtggtcaaccactacaacacatgtgaccttctatgacatttagattacgtcaccaacaatggggctggacgagaatcaaactacgaagagaggctaggcaggcatgacagatgtttgaggaggctgaagatgctattcacagggatgactctagtgatgatgatgaaataggagacgggcaactatgtgttgtgtgcttaaggaagagaaggagagcagcttttattccatgtgggcatcttgtctgctgttccgaatgcgcattaacaatagagcgtacacctcatccattgtgcccactgtgtggtcaagacatcagatacatgatgagggtttatgactcttaagtatgacaaaatggagatgtgaagcgtggacaatcagttggcactgcagccattggtggtccattcaagcctctgaatcatgatggaaaattagaaactaatttgatggtacaaaatggcattctagagaaggcaaatttgaccacgaccttgatgttgtaaatgatggtgacaaacagttgtttgatgggagtaaaggatgcagagatgacagtgcatagcagccaggatgttgcagcggtagtgaagagcagacacagcagaccacgatgaggcctgctactcagagccaggatgaccgtgaggcctgctactcagatgacagacacagatggcagacacagcagatcacgatgaggagatgttggtcccgcatcaggatgacattaaggctgcagccgatgaaacaccttgccgcggtgatagcgccagaacagccgtcgacggcttcaagctcctgcgtgtgtttatttgggcaacagaactagacgtggatcacaagcagccgcattgtttatttgggcaacagaactagacggcattgggccatgttgcctgggttcccaggttcgacggcttcaagctcctgcgggctacctgacgtttgggcaacagctagccgcattgtttatggacctggacgtccatgcacctggacacgtcttgccattgggccatgttgggtcgcttctaaaggcagtaaaatcattcaccaaggagtcgacgacacagctagctgatttgtctgctctgacgtgtatgtaagcaaatgttgtatcaggtcatgtttgtaaggtgtgggaaatgaagtctaggcttatgtagtgccacaagtgttacaacaaaaaacgtagcatgcgctcctctgattcgtcgacattatattatatattatatttattcatcgtcgttat

SEQ ID NO: 32025 - DNA, 1042 bp, Zea mays
  Clone ID: UC-ZMFLB73251D11_FLI
cggctgtctgcctcttctactggcaactgataggtttcttgaataaggcacgcagctcatgactcctgagcggcgcaaagccgtctgggcgatctacgtgtggtgcagaagaactgacgagctagtggacggtcccaacgcgtcctacatcacgccgaccgctctcgaccgctgggagaagcggctggaggatctctttgagggccgcccgtacgacatgtacgacgccgcgctctcggacactgtgtccaagttccccgtcgatatccagccgttcaaagacatggtccaaggaatgaggctggacctgtggaagtcgaggtacatgaccttcgacgagctctacctctactgctactacgtcgccggcaccgtcggcctcatgacggtgcctgtcatgggcatcgctcccgactccaaggcctcgaccgagagcgtgtacaatgctgctctggctctcggcatcgctaaccagctgacgaatattctcagagacgtgggcgaagatgcgaggagggggagaatataccttccgttggacgagcttgcgcaggcaggtctcacggaagaggacatattcagagggaaagtgaccggcaagtggaggaggttcatgaagggccagatccagcgtgccaggctcttctttgatgaggcggagaagggcgtcacccatctcgactctgctagcagatggccggtgctcgcgtctctgtggctgtacaggcagatccttgatgccattgaggcaaacgactacaacaacttcaccaagcgtgcgtacgtcggcaaggccaagaagctgctgtcgttaccgcttgcatatgcaagggctgcggttgcaccatgaaccatccgtagatcacatcttttttttcttttcttttccaaacccaccttgttttgccccacccttccttttttttttgtatataatcagcttcagctgcctgcatggcataagccttgcctgttcagggtgattccatgtccctaaatactcaatcagctcttgttacaaggaatggagaattagaattcg

SEQ ID NO: 32026 - DNA, 232 bp, Zea mays
  Clone ID: UC-ZMFLB73251E08_FLI
cgaacaccaaaattgtctgctaaatggtatagcaagtttatcaagggctatgaacagatagagatggcctctgaagaattgcctaagcatatggtttcctagtacagaaatacagaattctcaaagtccttgtttctacattactcaatgatttgttaaaaatgtttacaccgtaatttttctcatgcccatgtatgccagtgccataataaaatctaagcttatttttttc

SEQ ID NO: 32027 - DNA, 898 bp, Zea mays
  Clone ID: UC-ZMFLB73252C12_FLI
cccaccgaattccctgcgattcctctcccctcgcctcctcgtctccccctaggggatcgtcggagaggaatcgcaaagagggccgtctcatccgagttaaggaagccatggagcacaaggaggctgggtgccaggcccccgagggacccatcctctgcatcaataactgtggcttcttcggcagcgcggcgaccatgaacatgtgctccaagtgccacaaggagatgataacgaagcaggatcaggccaagctggctgcctcctctatcgacagcatcgtgaacggcagcgacgccgtcatggagccggttgttgctggcagcaacacggtagtagctgttgcccaagttgagttgcaaacaatgaacgtgcagcagcccgctgatgttgccggacccagcgagggggtggcggcgatctccaaaggggggaaggtagggccgaaccggtgcagcgcctgcaggaagagggttggacttacgggattcaactgccggtgtgggaacttgtactgcgcactccaccgctactccgacaagcacgactgcaagttcgactaccggactgctgccagggacgccattgccaaggctaatccggtggtgaaggcagacaagctcgacaagatctagggggggttccctacggttgggtatcaggaagattgtaaaccgcggtaactcgtcatgcggaactgctgccttgccccccgcgcctttctcttccatgtttgctgctacaatcttgttgttgggcattgcagtgcacggtgcacacttgtgtagcccgcctcgagaattcctgcctctgcatctggtcagttctaaaatgatttgcatgttggctatgttgtgtaagctctatttatggtggtctcgctgagacgggtatttggctt

SEQ ID NO: 32028 - DNA, 806 bp, Zea mays
  Clone ID: UC-ZMFLB73252D06_FLI
gcatgatttccttcatctgaaagatgaacacagcaagccattgtcttggaacaaccgtgtcaagattgcgcttggatctgcaagagcattagagtacctacatgagacttgttcaccctctgtggtccacaagaatttcaagtcatccaacattttattggatggtgagctgaccccccacctctctgattctgggtttgcaggccttcttgcaaaccaggaattccaggaatcggatgagaactcaggatacagggcacctgaggtgatcttggctggtcagtactccctgaagagcgacgtgtacagcttcggagtcgtcatgctagagcttctgactggccggaaaccgtttgacaggacccgaccgcggcctgagcagtcactggtccgatgggctactccgcagctgcacgacatcgacgcgctggaccagatggtcgaccccgcgctgcaagggctgtacccgtccaaatccctctcccgcttcgccgatgccatcgccctttgtgttcagcctgagccggagtttcggccgccgatgtcggaggtcgtgcagtcgctggtgcgcctggtgcagagggcgaacatgacgaggatgcacgagagccagtcgcggcgccacggcgaatccggcggggactacgagttttgagcgagacaaaactgtgcctttgcctagatttttttcttctaaaagtataaaaatagttataaactctccttgagagttttgaacttcaaatattcacatatagtttccaactatattagacaggtagtagttcagaataagtatttatctg

SEQ ID NO: 32029 - DNA, 1336 bp, Zea mays
  Clone ID: UC-ZMFLB73252E09_FLI
gacgctctaaaattcaatctgtgatagtcttgcaagggctcttcgctcgtgccactcgcagcctttctcattcgtagaggaaggagacaccggtgcatcagggatgataagcttagcagagtatctaggaactaatgtagctgaccacatccctgaaactccaaacaacctgtcagaggagatggtgagatgcatggcggggatatactgcagactcgcagatcctcccttggttcaccacggctcgtcctcttcaccgtcgtcgtcgttctcctcgactagcgcaatctctccgcagtatgtgggggacatgtggagtcccaaatacaggagagaggcgactctggactcccgtctgataaacccgttccatgtcgatggtctgaaggagttcagtggaccttacaacacaatggttgaggttcctatgattagccgggacagtcggaggctgaaagaagccgaggacctgctccagacttacaagttgattttgtatcggttggaagccgttgatctgaggagaatgacagatgaagaaaagatcgcattctgggtcaacatacacaatgctttgctgatgcatgcttatctgaagaatggcgtcccacagaacaatctaaagaaaacatccctacttgttaaggctgcctgcaaaatagccggacgcaacatcaacgccgccgtcatccagagcattgttcttgggtgcaacacacactgccccggacagtggctacggacgctgctttaccccaggatcaaaagcaaggtgagcaaagcggggcatgagtggcgggcctttgccgttgcgcaaccggagcctcttttacgctttgcgctttgttccggcagccattctgatcccgcggtgagggtgtacactccgaagcggctgttccaccagctggagtcggccaaggaggagttcatccgggcgacggccggcgtgtggaaggagcagaagctgctgctccccaagctggtggaggcgtacgccaaggacgtgaagctctcgccgcagggcctcgtggacatggtccagcgctacctcccggagagcatgaggatggccgtgcagcggtgccagcacggcggcaggtcgtcgggcaaggtcgtggagtgggtgtcctacaacccggccttccgctacctgctcgccagggacctcgcgttccctcacctcagctgaccgttcgttaatctttagtagtatatgcgtgtgtgccatagggttagaagtagagaagggatcatgtgcagtttttgtgtggtggttgtcaatggcttttgtagatgatgaacaggaaacaggggaagaaatgagagaaagcac

SEQ ID NO: 32030 - DNA, 1333 bp, Zea mays
  Clone ID: UC-ZMFLB73252G01_FLI
gctcagctcccatatccgctcccctacctctccagcatcctcccgtctccgtcgtctcgtctccgctcctcacctcgccagccatgggcaagatcaagatcggaatcaacggtttcggaaggatcggcaggctcgtggccagggtcgccctgcagagcgaggatgtcgagctcgtcgccgtcaacgaccccttcatcaccacggattacatgacgtacatgttcaagtacgacaccgtgcacggccaatggaagcacagcgacatcgccctcaaggactccaagacgcttctcttcggcgagaagccggtcaccgtctttggcatcaggaaccccgaggagatcccgtggggtgaggctggtgctgagtatgtcgtggagtccaccggtgtcttcactgacaaggacaaggctgctgcacatctgaagggtggtgccaagaaggttgttatctctgccccaagcaaagatgcgcccatgtttgttgttggtgtcaatgaggacaagtacacctccgatgttaacattgtttccaatgctagctgcaccacaaactgccttgctccccttgctaaggtcattcatgacaactttggcattattgagggcttgatgacaactgttcatgccatcactgccacccagaagactgttgatggaccctcagccaaggactggagaggtggcagggctgccagctttaacatcattcccagcagcaccggtgctgccaaggctgtcggtaaggttcttcctgaattgaatggcaagctcactggcatgtccttccgggttcccaccgtggatgtgtcagttgttgacctcactgtcagaatcgagaagggggcctcttacgaggaaatcaagaaagctattaaggctgcttctgagggcccactcaagggtattatgggctacgtggaggaggatctggtttccaccgacttcaccggtgacagcaggtcgagcatcttcgacgccaaggccgggattgccctgaacgaccacttcatcaagctcgtctcttggtacgacaacgagtggggctacagcaaccgcgtcgtcgacctgatccgccacatgttcaagacccagtagagagagatatttctgcctccctatcgtgggtcgtccccaatggcctttggtcgcagaccatctttgctgcttgtctatgctgagaataaatgtgaacggtgcccctggacgctggatccatgctggttttggacacgttgtctttttgtgtttaacttatctgctaccgtcctgtaacgaattcactaagttctagttcttttgtgctttgttaagaatataaacaatgaggtttc

SEQ ID NO: 32031 - DNA, 1880 bp, Zea mays
  Clone ID: UC-ZMFLB73252G10_FLI
gttcaatgtcttcattgcttttttctcagcagcaccagagattagcaccaggccagccgcctcttcagaattacataaacatgcagcctcacctgttccatcaccatcaacctcctgatgttccttcaccaagagacaaacgatcaaggtcaggaagaggaggaaagcacaacatacgcttttctcaacagccttctgatgctggtagccagcatagtgagagttcagggataaagttcagatccaagtacatgtcatctgaagagatcgaaagtatcttaaaaatgcagcactctgcaaatcacagcaatgatccttactttgatgactactaccaccaagcttgcaaagccaaaagatctgtaacttttcagaagtccaatttctgtcctatgtcaataaaggacttcccctcaaaatccaggtctggtgttgatcagcattcatatctacaggttgacgctaatggaggagtttcattctctgccatacgtagacctcgtcctcttcttgaagctgatttgcctggatctggtgatggtttttatgatcataagtcatccaagaggtcactggagaaagaaccaatgcttgcagccagaataaccgttgaagattctcttcgtcttcttctggttgttgatgatattgatcggtttttacagtctagccagccacaggacagcagtttccaactgaagcgaaggcgagaggtcctgcttgaaggcttagctacatcactccagcttgttgacccttttggccccaacaaacatggccattcgggtgggttggcccctaaggatgacctaatttttcttcgtattatttctctgcccaaaggacgtaagcttttggcacgctatcttcgacttcttttctctggaagtgagctgacccgaatagtctgcatggctgttttccgacaccttaggagcttgtttggtggcttaccgtcagactatagtgctgcagaaacaaccatcgttcttgccaaggctgtttcctcttgtgtgcgccatatggaactcagtgctctcagtgcctgtctcgcagctgttgtctgttcttcgcagcagccacctctccggccactcggtagtgcctctggtgatggggcctctctgataattaaatctgtgctggatagagcgaccgagctactggcggatccccattccgcagccaactacagcagatcagcacgttcgctttggcatgcgtcatttgatgctttctttggactgctgacgaagtactgtgacagcaagtatgaaagtatcgtgcagaggtttgccatgcagggatccaactccatgggaggacctgaaaccaccaaagcagtcagcagggagatgcccgttgagctgttacgtgcgagtcttcctcatactaatgagcagcatcgtcagacactgctagattttgctcggaaatctacgcatctgcctggtttcagccctactgctaaccgtggacttgtcaattctgaatcagttccaggttaacgccactgaagaggcctgatggtcgtctgttttgatttatatatggcacgtaaggtgtgagcttggagaagttccattggctcagcgaagctggcattcaggatatgactgtgtaggatgttatttatttatatatagaaaaccaactttatgtatgtatcctgctgtaactgtgtagtgctgaacagaacatctgttggatttggaggtaagctagttgacttatttcctcccaaagagaacaattgtgagtgcatagcaacagcttaaggcttaagcttgtttgggaacaatggaattggagaagattgagcgctggttcggaggaaatctcattctattcaattttaaataacaagagatttttttcct

SEQ ID NO: 32032 - DNA, 1905 bp, Zea mays
  Clone ID: UC-ZMFLB73253A02_FLI
catgatgatgctaggatgaccaatataaatttgtttaaggaatttactgccctaagcagggtaagtgtttcctgaactacaattgttttttttggctttttgcagatctgcacatctgaatttcctattatcctgttgggctgcctcttttttggagtgactgtagcaaccacttctaattcattttcaattgtattgaactggatgttgaccttcctagcataattagctctattttttaaaaaaatagttcattatgtatgtttctattttttatggtaccgcctatgtttatataaatttagcctagcactgcttgaataacaagtgattgaatgaggctcatatgcaaccattaaatcaatatttatgaaccaatgtttgttaaagtaataaaacatttacaaggaccatcgatgacctcaagaagctggtggtggcgtagatgggaacgcaccccgagaagatttgcatctagaggtggtgaccccacctctgtcctcaaccgccacctcgtacctcgtcttcggcgccgccggctcctgccccccttggcacgccttcggggtcctcgctggcggcaagcacctccgtcccggaggcatctgccgctgcagcatagaccaccgcgtcctcgctcagcagcaccgatgtcgatgatggcaacaaggaggacggctccgcgagcacccccgagatctgctgctgccactcccacgcagctcttgcttgtgagatctgtgtgcaggttgatgtcctcgtggcgccacgccgacctcaccgccaccaagcgcgccacccatgtcctcaccgacctcgccaaaaactataagaataggtgtagtcactgtcggggtgtacatccaattgagttttgagttggtgtttagctttcccttaccagggacggatcaaagcaccgtaataagtgtcgatatagctctttcaattgcgcctattgttttgtgcgggctatatggatcaaggaaccctctttgcagcagaggtttgttttgtgttctgctgctagtagtcgcatgtcagtttaatcttttgagttctggaagctgttggtcccttaggtgtttgggagatccttttgaatcgaagcacacacactcaggtgctatgacctttggcatttcatagttgcatatttaactggtgtgcgaagagcaccaggatagcacccttgcagcaggaacttacttttggttgcttttctgttgcctgtcatatcccgatatttgtttcctgcaaatttactttgtttaattgtattctattgattttacagcttttgtacttgtacagttacattgtcatctggtttctattgcacgtgtagctgattagttgtagtcactatcttgcaagcatagatattagggaggtattatgtccagtcaagttttgtgttggctatgtgtagcgaattaggattgcttttcctgggatggatcagagcacatgtactgtggcgatatagttgtttcaatagtatagttgccaaattttatgtgtgtgctatatagaccagggaacccacttagaagcagaaaattttctgtgtgcgcgcgaaattttctgtgtgtgctaacaaattgcaggcaaccatcttaacaacaaaagaggctcgtacaatagcagagatgatgctaaaccacttgtgcatgcaaagtatcaaaaaggagaccagacacatgttgatgaaacatctaaaaaggtcctggaatctgaatgcacaaatgtggagaccttatagaaaagggcacaagcacacatgcatcttgctgatcttgatttggcggaggcagacatcaagaaagctctagataaactacagatccagacatgttaatcatatgtactactgaagttggcttaatgaaatcttttgagaat

SEQ ID NO: 32033 - DNA, 2720 bp, Zea mays
  Clone ID: UC-ZMFLB73253D02_FLI
ctcttccttcgtcgtctcgtcgtcggcttctcgcatccgcctccgcctccgcctccgcctccgctccccgctgcgcgtcaccggaggagaggagagaaagtgagagaggggatccctccgacccgatccaccgacataacctccgccccctggatctcctccgtccccgcgcgacgccaggacagggttggcgaattgaatcagtaatatcagatattcagggatgttcccttcagttgtgccagctggttaattcgctattaccttctctgactgctcgtgcctgcatgtgtattgagaaactccaggacataaatcatgagcacgtgtttgatctggttaaggaggttgccatggagcttgcagcgacaagcgcagtgagttctgtgaatctgctgaaactatcaagtttgttgagtctgtcaacgaacatggaattgtacacggaagctgtttcccttgagaatctcaaaacaagggcactacgatgcgagagtcgtgaagaactggatctagctgagcagatgattccactggtcaactatatgcatgaccatcttctcaaggaaaaacaacaacttagcatcaacggggtgcctattcctgctgatttttgctgtcccctttccttggagctgatgtccgatcctgttattgtagcgtctggacagacctatgagcgggtttatatcaagttgtggcttgatgagggttttactatctgcccgaaaacactccaaagacttggacactccaatttaatacctaattatactgtgaaggctctgatagctaactggtgtgaatcacatgacattaggcttcctgatcctatgaaatcattgaagttgaactttccttctgctgcctccttccttgaggatttgagtgctgcagatggcagccctctacatcctattgtcgtgtcaagggctaatattcctgggtccccagaagttgatgtgtatttgagaaacttgaatggagcatctcctccccatagtttggtcaatcagaattctcatgcgcatgcaaaccgtcatggtcatgaggtctcgacgagtcaaacttcagaaaaaacaaatggttctgtaccagatgtttcaagattatctcttgcaagttctgaagcaagagagtctagtttggaaggaaggcgtggtggttcgattgggcaaatatcagaacattctacggaggaagcattccaatcttctaatttggatagggatctgcaggacaacttagctaattcttctttgaatggtagccttccaaatagtggtcaacttgatggggaatgtgacaatggggtgacaagggttccaagcgataggacaaattacagtagcgatgcatctggcgaagttacaaatggtggtggtgcgcctgtagcctcctctgttcctcaaagggagcatttgatccctccaagactgggtatgggtactaaacaatttatcaggcgacaaccatcagacaggggtttcccaagaattatttcttcctcaacaatggatgcacgtagtgatctctctgccatcgagaatcaggttcggaagctgattgacgatttgaaaagtgattctatagatgttcagagatcagcagcatcagatcttcgtcttctgtctaagcacaacatggagaataggattgccattgcaaactgtggggctgtaaacttgctggttggtcgtcttcattcaccagatgccaaaacccaagaacatgctgtgacagctcttttgaatttgtcgatcaatgacaacaataaaattgctattgcaaatgctgacgctgttgatcctctcattcatgtcctcgagactgggaaccctgaagctaaagagaattcagcagcaactctattcagcctctcggttatcgaagaaaataaagtgaagattgggcgatctggtgccatcaagcctctagtagacttgctaggaaatggcacccctcgaggaaagagggatgcagctactgctttgtttaacttgtccatccttcatgagaataaagctcgtatcgtgcaagctgatgctgtgaatcacctagttgagcttatggatcctgctgctggaatggtcgacaaagctgtggctgtgttggcaaaccttgctacgattccagaaggaaggaatgcgattgggcaggcacgtggcattccagcccttgttgaagtcgttgagttgggttctgcaagagggaaggagaatgctgcggctgcgttgcttcagctctgtacaaacagcaacaggttttgcagtatagttcttcaagagggtgcagtgccccctctagtcgccctttcacagtcaggaacaccgcgggcaagagagaaggcacaagcgcttctgagctacttccgcagccaaagacatgggaattcagcaaggagatagccttctgttttttcccgttttttgttgtagtgtacattaagcgttgcattttatgcccatcatcgcgactgggctcctgtttactgttgttgattggcactggcagatgcgttggctggaattatgcagtgccctgtgctctgtttatagatggagattgttatgctcatctcatgtaagttttgtctgttgagatggtatctttccttttctcgtttttgaggtttttttttgtatagcttaaccattgataggaacttcgaacttacataatcaccgattttgccctgtatataagtatatttgattgtc

SEQ ID NO: 32034 - DNA, 797 bp, Zea mays
  Clone ID: UC-ZMFLB73253D03_FLI
caggaaagcaaaatggaggtggaggtggatgtcgacgacgatacaggcggtacaccagcttccattgcgcagcaggagacccatgtcgaagctccaggagggacgagcatcaaggagagcgtgcaggatgtcgtcctcggcggcggccagcatgttgtcaaggatgtcgcgcttacgatctcacaagcgatcgggcccgtggaaaagggcgtcgggaagatccaggagaaattccaccacatctcgctgaagccaggggacaagaaagagcctcaagttgctgtggaggagcacgtaactgagaacgtggtggatggcaaacctgctgttgcggtcaacgcggaggttgaagtccaacagaaggcgcaggatcgtcgtggcgaggaagaaggtgtgcaactcaaaagaacagagaaggaaggacgattgtcacacctgagagtgccatggtggaagatgcaaaggaagcgggagcaggtgcaggagcaagcggagtcgaaggctgaagctgtgcgagggccggacggtgaacaggggtgattgtgttggcctgcatctaaatgggctgtaagaccaactccagcagcctccgtatacggctctccatccccttttttcactgcgcagtacactattcatcagtccagcagactccgtatccctctccctaaaaagcacgctgtgtacttatactcctcttttccacgtcttctctcctctccgtacaagtctgagaaatggtgcaattaaaagccccgatagagtgtaaatacggagtctgttggaatgcaccatgc

SEQ ID NO: 32035 - DNA, 1543 bp, Zea mays
  Clone ID: UC-ZMFLB73253D09_FLI
gggttctggtattagtggaacttctgtgcgacttactgctggagctggtctccctgttcacatgaaaggtgaactaaacacagctttcataggactgggggatgacggtggatatggtggtggctgggttcctttggcagctcttaaaaaggtgctgagagggatcctaaagtacctaggagttctatggttgtttgcacaattgcctgaacttttgaaagaaatactaggatcaatcttaaaggacaatgaaggtgctctcttgaatttggatcaagagcagcctgcactccggttctatgtcggaggatatgtatttgcagtaagtgtacatcgggttcaactgcttctacaagttttgagtgtgaaaagatttcaccaccagcaacagcagcagcaggctcaaagcaatgctcaggaagagctagcagcagttgaaatcaatgaaatatgtgactactttagcagacgtgttgcctccgaaccatatgatgcttctagagttgcttcttttatcactttgcttacattaccaattttggttctgcgcgagtttttaaagctgattacatggaagaaaggtctttccccggttcatggggacattgctactgcacagagggctcgcatcgagctttgtttggagaatcactcaggatcagcttcgtctgataacaccgagaacagcagtttagccaagagtaatattcatcatgatagagcccacagttcagtagaatttgccctgacatttgtacttgaccatgctcttattcctcacatgaatgtagctggaggagctgcctggcttccatattgtgtatctgtgaaacttcgctattcttttggggacaacaatcatatagctttccttgctatgaatgggagccatggtgggagagcctgctggttgcagtttgaggagtgggaaagatgtaagcagaaggtttcaagagctgtggaaactgtgaatgggtctggtgtagctggagaggtaggccaaggaaggctgcgaatggttgcagagatgatccaaaagcagcttcaactctgtctacaacagctaagagatgacccactttctgcaggctcgactgcatcatgaacttgcttggaatgagctctatcaaggccattgatgtctgtcatattcagcatggcctttggctttgttaacgtgtagatgtgaaggaatacacatttggtagcagtgacagtttcgcctgaggcttgctcagatgacaattttgtacagtataaatggtggcggttgactctgatggacctttagttagcccatttgaacgtggcctgtaacatagctagggtgggtaataatgtgccaaggtggaattgctcagggatgcaaaatgatcttcgggaattggttgtctgtatcatctactgtaatcgtgtcctttttctccctttctgatggatagttcatttttggattcgttatcatctttcttctgtctgtactatgttaatctagacattggtggatctggtatatgtgttgttgtacatgatatattggcac

SEQ ID NO: 32036 - DNA, 1097 bp, Zea mays
  Clone ID: UC-ZMFLB73253E01_FLI
ccccagagagagagagccccaagccaagatccgcgcgaagcaagtcacccggcgaagcaccggctcccatggccgtggacctgatgggctgctacgccccgcgccgcgccaacgaccagctcgccatccaggaggcggcggcggccgggctccgcaacctggagctgctggtgacgtccctgtccacgcaggccgccgcgccgcacagagccgctgatcagccgttcggcgagatcgccggccaggccgtctccaagttccgcaaggtcatctccatcctcgaccgcacggggcacgcccgcttccgccgcgggcccgtcgagccgccgccgccgacgccgccgccgcctcctgtcgtccccggtcctgcccccctggcggccgtcagcgtggcgcagccgccgcagagcctgacgctggacttcacgaagccgaacctggccgtgtcggccgccacgtccgtcacctccacgtccttcttctcgtcggtcacggccggcgagggcagcgtctccaagggccggagcctcatgtcctccgggaagccgccgctgtccggccacaagcggaagccctgcgccggcgcccactccgaggccaccaccaacggcagccgttgccactgctccaagagaaggaagaaccgcgtgaagaggaccatcagagtgccggcgatcagctcgaaggtcgccgacatcccttcggacgagtactcgtggaggaagtacggccagaagcccatcaagggctccccttacccacggggctactacaagtgcagcactgtgcggggatgcccggcgaggaagcacgtggagcgggccaccgacgacccggccatgctggtggtgacgtacgagggcgagcaccgccacacgccgggcgcggtccaggggccgagccccctggcgaccgcgtcgccggtgcccgtcgccgtctccgccggcaacgggctcgttgtctagtctactaaaagctaggattagcttctcgtcttctttgtttttttttgtttgagctgatgtccgtgtaaaacaaggaagaaggttgtagaaagagggagaggaggacaccggaatttcgatgccgcaaaactc

SEQ ID NO: 32037 - DNA, 1401 bp, Zea mays
  Clone ID: UC-ZMFLB73253E04_FLI
ctagccgtcgccagccttggagctctcggacacggcggctcctcctccactccccctcgactcctcctccatccccgacgcgacggctccatccccgacgctgagctccatgtcttccctcacctcggtcctagactcccaggtgaaaacttcagactctgaccctgtccccataacgtgtgcctcctgccctcctcgcagatctgcttgtccgccggcggcggctaccactcgccagcaagccatctcctggagctggaggggtctgcttcctccttgactgcccatcgacatcttcgccctcgtggccttcgcgtcggtgcccctcgcctgtgatgcaggggtctcatccatgtggtgccacactactggttgccaacgaccgggaaggaaggtggtgtggatgccgtgctcgtgtcttcctctacagggatgctcagattccccttcctcactgggctccttagattcgccaacacgaaggtgcttccctgtttctgcttatttatctctgtaccatactagcacttattaggttgtagcttgatagtttaggtactagtcttaaattttcttgctattacagttttgttagaggtgcactatgtttaaattactgttagtataagctaataactattgagatgtgcaacaatataactaaaataagagcttaaatactgtaggaaacttaactatattggagatgagacgtaatcattttgctcactgtaaaatgttttatgcgatgtgacctaattattttggagtcttcgcttgttctgtatggttaggtatatgtgacagaggtagcagcaaggatgggagctaataatatgatttgacttctctggtgtctctatatatgtctgtacctgttcatacatacatgaagtacatacctgttcttggtatatacgactcaaaaagactaattcaattttttaaattttaggagtaataggagctaataatatccaaccatcaatccagcagaatttaataggatatgagttgatatcaaatgcagagtttacattttcaccgtggacaccttttcctaccaagaggttattaccaagaatcctcaatccaaatccaaggcgttcagcatcatagcaatatttcaatagttaataatttttataaaagaaatcaattgtgtttctacctttgaaggttcaaattttactgcaaaatcaacgagttcttggtggtgttggtatggcatccgatccaatggtggcacgtagaagtaaaatctgaaacatttgttttgatggttagcttgcattttatgctataattacctcaaatcacgtgttgcctttttcaccaatttatgacatctattgacatgttttactttaatttacgacatttattgatgtgttttgcgac

SEQ ID NO: 32038 - DNA, 544 bp, Zea mays
  Clone ID: UC-ZMFLB73253E12_FLI
cgacggacgccgcgctgctggggaacttctttggcgccgctgctgtatcgcaggtcggcgtgcccaccttccatcccaagatgttgcaggcagttaaagaaatacttgaagagaagacaaggaaacgatctagtccatgtatgaacggcgctagttttaccttggagaagtcaaatatgcacaacgagttacacgcagctctccaagaagctgcggtgctgatgtctgaacagcagcaggctgatccggcgaacggcagtggcggtgatatttgctcggcataggtacctcacagtgaagctgaagcagtcgaacgccaaactgaagtttgtggcaaaataaccagcactgcagtcctgaactcctgatctcacattgagatctgtaaacatggtgccaacaagtggaggaagtttgtacatacgctctctccggcctttacactactattctgctggcagggccgtcagggatcgtttctaccttgctatcgctgacgaggaaatgaagacaactgaacagttgagctgtggcgcttgcacgc

SEQ ID NO: 32039 - DNA, 1881 bp, Zea mays
  Clone ID: UC-ZMFLB73253F11_FLI
ccgtccctccttcctccctctccatttccgccaccaccccccctctctctctctcttcttcttcttcaatcctccctccccgcgccggagttggaggagggagaggggacaagctttccggcgccgacgccgacgcggacccggcgccgacacgatccggtggatcaagtgcatcacacctttagggaggccccttggacagcagtttgtgctgcaaattctatatagctctgtcgcagcatggcctcggtgggcgtggcacgctcttctttgggatttcagaatggcacaagttctagcagtgacccagatcgtcttcccaacgagttgggcagtatgagcataagggacgacaaggacgttgaagatattgtagtcaatggcaatggggcggagcctggtcatatcatagtgaccagcattgatgggagaaatgggcaggcaaagcagaccattagttacatggctgagcgggtggtaggtcatgggtccttcggaaccgttttccaggccaagtgtcttgaaactggtgagaccgtagctataaaaaaggttcttcaagacaagagatacaagaatcgtgagctgcaaaccatgcgagtgcttgaccacccaaatgtggtggctctaaagcactgtttcttctcaaagactgagaaagaggagctttacctcaatttggtgcttgagtatgtaccggagactgctcatcgtgtcatcaaacattacaacaagatgaaccagcgcatgcctttgatttatgcaaaactgtatatgtatcagatttgtagagccttggcatacattcacaacagcattggagtgtgccacagggacattaagccgcaaaatctcctggttaatcctcatacccatcagctaaaattgtgtgactttggcagcgcgaaagttctggtaaaaggcgaaccaaacatttcttacatctgttctaggtactacagagctccagagctcatatttggtgctactgaatacacaacagccattgatgtttggtctgctggctgtgtgctcgctgagctgcttctaggacagcctctgttccctggagaaagcggtgttgatcagcttgttgaaatcatcaaggttctgggcacacccacacgtgaagaaattaagtgcatgaatccaaattataccgagtttaaattcccgcaaatcaaagctcacccatggcataagatattccataaaaggatgcctgctgaagcggtagatctcgtgtccaggcttctgcagtactcaccaaaacttcggtcgactgctttggaagcattggtccatccgttctttgatgaacttcgggatccaaacacccgcttaccgaatggtcgttttcttccgcctctcttcaattttaagccccatgagctgaagaacgtgccggcggatttcatggtgaaattggtccctgagcatgcacggaagcaatgtgccttcgtagggtggtgatctctggataagaggatgacgactcgatgattagctgaggaccaagttaatgtctgttagaaactgccggagatcgacattgccagatgtggtgtggtataagataggcaatatgtgtgattattttttgttcgaggttatcaccccccttgccccagaaaaaatgagaagatgtcgatgtaacaagccctctgcgcttctgtaagtagatgagtgttgctgcatgccccctgggtacatgtatcggtttgagcagaattctgtttgcctgaatcgtgccatcaccacgcagggatccatcccttgtgtgacgatgttcagcccaacatttgtttatggattcaggctattcgttcatttgtactcctcgcatcctatggatgattaagcaatatttgcaatttttct

SEQ ID NO: 32040 - DNA, 390 bp, Zea mays
  Clone ID: UC-ZMFLB73253G05_FLI
ggcttacccgatggcacggctgcactggcttgaggccgtcctgccgctggggatcatcggcggcatgctctgcatcatgggcaacgcccagtatttcatccacaaggccgcgcacggcaggccgaagcacatcgggaacgatatgtgggacgtcgccatggagcgccgcgacaagaagctcgtggaacaatcctccggcaactagggtattgatcaacctcaaacttttctggatgttgacgaacctcgttcaaaagcacagaagtactgctcttttgtttcctgtacaattggaaccaagacttgtttgttttgctttgaaatatcaacagttcggagaataatctgtatctgacatctgtttaattgaacaaagccaaatactttgtc

SEQ ID NO: 32041 - DNA, 897 bp, Zea mays
  Clone ID: UC-ZMFLB73253G07_FLI
cagccggtaccgcggccagtaccgccagggcctccgccacggccacggcgtctaccgcttctacagcggcgactgctacgcgggcgagtgggccggcggccagagccacggcatcggcgcgcagacctgctccgacgggagctcctacgtcggggagttcaagtgcggcgtcaagcacggcatcgggagctaccatttcagaaacggtgatcggtatgcgggcgagtactttggggacaagatccacgggtttggcgtctaccgcttcgccaatggccactgctacgaaggctcctggcacgaaggcaagaagcagggatttgggatgtacacgttccggaacggcgacaggcgatcgggggactgggattctgggactctcaagacccccttgccccccgctgatccttccgtccagcgtgctgtacaggccgctcagcgtgctgcggagaacgcatttcgcctgcctagagttgatgagcaggtccacaaggcggtcatagccgccaacagggcggccacggccgctcgagtagcggcgatcaaagcagttcagaacaggatggatgggaagttttgcgatacctgtgtgtgaatcgctgcgtgcgagaccatgttctttttgtttctccttctaatctaactgtacattagggtagtgaaggacaataactaatcagagtgaggtcagacgaccggggcagcacaaccgcgtgctccgagtcagggttcatcaacgaacgggagcggacctggcaaaaaaaaaacatttgcgagaaacggctctgatcctgccatatcgccatggccatcggaggttcccttcctccttccttgcaacaagctgtaactgtacatagatccaagtgttgtatcaatggaagagcgagtttttcc

SEQ ID NO: 32042 - DNA, 3929 bp, Zea mays
  Clone ID: UC-ZMFLB73253G10_FLI
cttccccttctttcaccggcctcgagtcacacgcgtgagatctgtgccttccgccgcggccacatgccacacaacgacgcccggcgagcttcaccgcgatagaggtaggcccgcccgataccaaggaggatggcggcagtgggcgttggtgcagcggacgagcggtgggcttcgttgtgcaactgcgtggtgaacttcttgctggaggagcggtatcacctcacggcgctagagctattgcaggagctccaggaggacggccgctccgcgcacgccctccgcctccgcgctttcttctccgacccagcgcttttcccgcccgatctcgtcgcccgctcatcctctgcgccgcccggtgctgatccacagattttgctagaagagaaaatagcagcagaagaaaagttggcactcacggagtatgatctgcgcctagccaaagaagacctttcacagttgaagcttgaattacaaaaacaaaaagaatcatctcctgatgattcaaatgggctccttttgggtgcttctatacgcgaaggatatactaggcaacaagaaaattgggatgtgaaaatttcagcattaggccctctaaaggataatgaacgaaaagatcttaattgcgctgtaaaagaatacttgcttttggcagggtatcgacttgctgttatgacattcattgaggaggttcctgatcaagaccttgatgtttggccaaacagttcagcttgtgttcctgatgcccttcgtcgttattactatcagtatctttcttctactgcagaggctgcagaggaaaaaatatccatacttcaggaaaatgaaacattactcaaggacaatgaacgactcaatgctgaaaatgattccttgatgaagagcagggaaggagctaatagtcaggttgccgctttaaggaagtctttggaagctgcacacaaggatataaaagacaaggaaaaaatgattcaagacttgaggcagtcactggatgtccagaggaaggagctgaatgactgcagagctgaaatcacagccctgaagatgtacatcgaagggactcaatcaatcaaacaattgtttgttggaactagtgatggtgtaaagtcgcattcctttgctaattctgtgggagcatcatcattgaataatgaagatgaagattcaaaaggatctgaagccataacaaataagctagcatcagcagtaaatattactgatgatacgcagaaagatcgccaagttctagaaagtagcgctgaaggttcctcagtttcagaaactccagtgtctttcacagctgttgagaatgacagctatggtacatcaaaagaagataaatctgtgtcaaatatctcatcgaataatgtatgttttcagagtaatctgcatggagcttccatgactggtaaaagccaggggagttcagatggcatatccatgtatttatctattgagaaactagagagcccaagtaaacaaaaatcttcagataagattgctttggagactataaagatagtttcagatgcacttccaaagattgttccttatgtgctcataaaccatcgtgaggaacttcttccattgatcatatgtgctatagaaaagcatccagatagcgatgtacgggattccttgactcatacattgtttaacctgataaaacggcctgatggagaacagagacgcatcataatggatgcttgtgtagaattagcaaagagcgttggtgagatgaggacagaaactgagttacttccacaatgttgggagcagataaaccaccaatatgaggagcgcagattgcttgttgctcagtcgtgcggtgaacttgccgtttatgtccgtccagagatacgagattccctcattttatccattgtgcaacaacttgtcgaagatgctgcaacagttgtaagggaagctgcaacacataacctggcattgcttcttcctatgtttccaaatctggacaaatattataaggttgaggagctaatgttccaattggtctgtgacccgtctggggcggttgtggaagttgcactcaaggaacttgttcctgctgtagtaagatggggagataaattggatcagatatcaagagtactattggctcatatcctggcatctgctcagcgatgtccacctatttcaggtgttgaaggtacaatagactctcatcttcgtgttttaggagaacaagagcgctggaatattggtgtccttcttcggatgttgactgagttgcttccatttattcatcagaaagctatacaaacttgcccctttgcatcagctgatccaacaagctctacaccagagaacttctcagcatcctgcctaaaatcatatgcaacaggtgactctgagtggtcagcatttgagtggatgcacactgattgcctgccagatttgatcaagcttgcctgcttgttgcctgtgaaagaagataacttaagaaccatcatcacaaagtacctcttggaagtatctggactctacggtaaagattatctggagcacattatgctacctgtatttcttgtagctgctggtgacattgatagtggcgattttacctattttcctctatcaatccagccaaaagtccgtggcttgcgtccgaaaacttcaactgctgaaaaacttgccatcatgtgtgtcttcccattattgttatctggtattttgggttctccttccagtcgtcaacagttggaagagtatctgagaaaagtacttatccaaaacaccaaggatggttcattttctatgcatcatactactgagatcattaacgcagttcggtttctttgcttatttgtggagcaccatagtgtcatctttaacattttgtgggagatggttgcgagctcggataccagcctgaaaataaatgctgcggctctactgagagcacttgtaccctacacggatgtgaaaatagcatcaactcatattttgccagcacttgttacccttggctctgatcaaaacttgaaagtaaaatatgccagtatagatgcatttggagctgttgctcagcatttcaaaaatgacatggttgttgacaaaatacgcattcaaatggatgcttttcttgaagatggatcacatgaagcttctgtttctgttattcgtgcacttgcagtagctgtacctcattcaacagataggctacgtgaatatcttttaaccaagatatttaagatgacatgcatcacacctgtcggcaatgatattgaacggcgtcgtgaaagagcaaatgtactctgtgaagcgctccgggctctggatgctacagatcttcctgctatgggtatacgtgatttgcttctgccatcaatacaaaatctgttaaaagatctggatgctctagaccctgcgcacaaggaggctttagaaatcataagccgggaaaggtcagggggtacgctggaaagcattagcaaggtaatgggggcgcatcttgggattgcatcatctgtcagcagtttctttggtgagaacagtctcctcacaaagaaagaaggtggcgaggaacatgatcctgctggccccaccgctcctgagcaaaacctgcaggctcagccagagagcacgaggtttggtcgcataatgaggagcggctttggagacatattgcgaggtcaaagcaaaggacagtgatgcacttagattgaaatgatcaattacatacatagctgccgataccacattctttgtttgtaagttgacagaatatacctcaagggttgtatgttatttgccgagataaaaaaaaaggatttgacgttgcaaatctagcatcaaacttcctgtatgtaagttgcctgtagttagctgctcatttataagatgctaataattgtgtctttgtttcatttgtttttataaataaaatatataactagatatgagac

SEQ ID NO: 32043 - DNA, 920 bp, Zea mays
  Clone ID: UC-ZMFLB73254F02_FLI
cgccaccccaatcgatctgccggcctccagcatggcggcgggggcgggggcgagggcgaaggcagcgggagccctggcgctggcgctcgtgctcgcgctagcgggggccaactccgagggcgacgcgctctcggcgctgcgccgcagcctcagggaccccggcggcgtgctgcagagctgggaccccacgctcgtcaacccctgcacctggttccacgtcacctgcgaccgcgacaaccgcgtcacccgcctagatcttggtaatttgaacttatctggtcatctggtgcctgagcttgggaaattggagcatctgcagtacctggaactttacaagaacagcattcaaggaacaatcccttctgagcttggtaatttgaagaatctaataagcttggacttgtacaagaacaacatttcggggacaatacctccttcccttggaaagttgaaatcccttgtattcctgcggctcaatggcaatcatttgactgggccgatcccaagggaactttctggaatatctagtctcaaagttgtcgatgtttcaagcaatgatttatgtgggacgattcccacatctggaccatttgagcacattcctctgagcaactttgagaagaacccacgcttggaaggtccagagctacaaggcctggccatatatgacaccaactgctagagggggcaccacgaacaaaagaatcgctaggaagaaatgggcgaacaaggttaccaaaaagtgggcgacatagattattaggtctggttctgctgccactctgtaatcccccctgcatagctcttatttgtaacttgctgtctgcacgaaagttggtggatgttttagcagaatgctttctgcccgtgaaagtaaacttgaaactgcttattatgagtgaaatgatgatgttatttcc

SEQ ID NO: 32044 - DNA, 1455 bp, Zea mays
  Clone ID: UC-ZMFLB73255A02_FLI
cagcttcacctcggaagctcagactcagtaggatgcaacaagaacatgcccaaccttcaatggttggtgcgaaggggtgtgagagatgcagggactggcaggagcactactactgggagcatatggatgcgagcaagatccgcttcttcaggtgcatgacaggagactttgctcatcgcattagcgtgccagagaagttcgcaaagaacttcaaggggcagatcaccgaagagtttcacctgaaatcacctagcagcgctgagacatggcacgtcggtgtagagaagcatggcgacaaactattcctcgtgtcagggtgggagaatttcgccaaggctcatgagctggaggagaacgatctcctgctcttcgcttgctctggaaactcttcctttgaggtcctagtcttcggagcaagtggctgtgagaaagtgtcatccctgtttggcagtggacttggtccggacatgggcaaacaattcaatgatgtggtgcgtcgacatggtgtgcatcactctgtgactgtgagtgattctgaggataccgttgcgccgtcccagctggttcgatcccctcgtaacgccttgcctttgaaggaacccagtgggaaggctagaccaagtaaatatgaatcaccaaactccagcaacttcatcgtcaggcatgtggcaactggcaaagagggcactgatgatgagtatgctaactcaaactactactattcgttgtctgccaatcgactaggagacgaggaaaaggaagaaataataggtttggctcccatccgaccgaacaatcctgtatttgtgacccttctgaggaaaaaccatgttcagcgcagaaacaactgtctgatcatcccaagcaagtttgctgctgatcatcttggggaaagagcgcacaacatcatacttcgtaggccgaacaggaaggagaaatggcatgtcagctactatcactcacgccacacccggtgtttccagaacttagcgctgttcaagttcacgcgcgagaacaagcttcacgagggcgacatctgcgtcttcgaactgatgaaaggcgagaggagagtgacgatgaccgtccatgtcgtcagaaaggccaatggccggttcattctggtagtctgatctgacgcagtgcacctgtactgttgtagtttatgcagtgtgtagtgtgtaggggtactatgcaggggtagcattgcaaactggaagtgcctagtgatgcttgcaaggaatgcaactgcggttttgtgtcatgtaaggtagcttcctgatcagcagcatggcaagtagaacaaggtgtggcttgtgtgtaatatagaagtttctaggaaaatgttacactggcttatgcttttgtgcctgcttcagatctcccatctggtacagcagtgcttttgaacttcagaagtattatttcaaggaggaaaaagggattgttggttggtct

SEQ ID NO: 32045 - DNA, 918 bp, Zea mays
  Clone ID: UC-ZMFLB73255A08_FLI
tgcgattcctctcccctcgcctcctcgtctccccctaggggatcgtcggagaggaatcgcaaagagggccgtctcatccgagttaaggaagccatggagcacaaggaggctgggtgccaggcccccgagggacccatcctctgcatcaataactgtggcttcttcggcagcgcggcgaccatgaacatgtgctccaagtgccacaaggagatgataacgaagcaggatcaggccaagctggctgcctcctctatcgacagcatcgtgaacggcagcgacgccgtcatggagccggttgttgctggcagcaacacggtagtagctgttgcccaagttgagttgcaaacaatgaacgtgcagcagcccgctgatgttgccggacccagcgagggggtggcggcgatctccaaaggggggaaggtagggccgaaccggtgcagcgcctgcaggaagagggttggacttacgggattcaactgccggtgtgggaacttgtactgcgcactccaccgctactccgacaagcacgactgcaagttcgactaccggactgctgccagggacgccattgccaaggctaatccggtggtgaaggcagacaagctcgacaagatctagggggggttccctacggttgggtatcaggaagattgtaaaccgcggtaactcgtcatgcggaactgctgccttgccccccgcgcctttctcttccatgtttgctgctacaatcttgttgttgggcattgcagtgcacggtgcacacttgtgtagcccgcctcgagaattcctgcctctgcatctggtcagttctaaaatgatttgcatgttggctatgttgtgtaagctctatttatggtggtctcgctgagacgggtatttggcttcgcagttatctagctatgtgatgtactgttgtct

SEQ ID NO: 32046 - DNA, 1519 bp, Zea mays
  Clone ID: UC-ZMFLB73255B10_FLI
aggcagtgccgtgaccgattcgagacgcaagagaaggatcgagacgaggcggcggttttccggggcagcatcgtctcggccacgaagatgtcttactcaaggggctcaagtgaaaggtatggatctcgctcaccttactcgagaagcacaaggtaccgaagtcgctctaggagtgtcgactctagtgatgctgaaaaccctgggaacaacctgtatgtgactggtttgtcggctcgtgtaacggatcgagatctggagaagcacttctccactgagggtgaggtgattgatgcaagcgttgtgtatgatccttggacaagggaatcacgggggtttggttttgttaccatggctgctgttaaagatgcagatcgctgcatcaaatatctggaccgttctgtgttgcaaggtcgggtcataactgttgagaaggtaaaatcataagattgggagcatctaactttcttatttaacttggctactaaatgatatttatatcattccttagtactctacactgaacattttagtgctctgtccattgaagattttgttgacagcaacagggtagatgttggtagctgctctgcaacaaactgatacaacctaacaccaaaccatgccaacctcagccaaagggttgtatgccctacattgcatattatttttcttaaatatgtttattcagattgtagatgattgctctcttgcagtcttgcttttggtatcaaagacacttccttatttggtcccctattacacaggcaaagagaagacgaggtagaaccccaacacctgggaagtatcttggcacaaaatcatcccgtggacggaggtactccacaagctactcacctgatcggaggggccgttacagttcccgctactcacctgatcggagggactgtcatggtagagaccggtcatactctccatatgacagaaggcgatcatactctccttacggcagggatgaatcatattccccttactatggccggcgatcatactcaccttactacagcagacggtatcgttcaaggtccccatactgctacagaagacgcaggtcaccttctgtttcgccatactaccgccggcacaggtacagatctgtctccaagtcatccagttcatctccaagggccagaggacggagctattcgtgcagtttatcaccacagagaagctactcgcgcagccattccccagaatccgagagatcaacaagctattctcctaagaaagggagtaaaagggaaccctcgcgtagcagatactctggcaagagtcgtcattcaagggaaagccactctcatagccgcagttcgtactccaggtctgtgtccagggagcgctcagcttgatctgcgaggtgtgtcgtcctaggtggttataagatatgcgctgtatttgcatctatcagaacttgtgtacttcgtatattacgaacttgagaactgtatggatgtgtgcattgtgccaaattatgttcattctgtgctatctttctgatgct

SEQ ID NO: 32047 - DNA, 1436 bp, Zea mays
  Clone ID: UC-ZMFLB73255D11_FLI
ccgaatcctaaggccgccggccgccgccgccgccgcctgctcccgttggacacgagtttggagtaaagaaaccaaccctgcatctgtattctgtctgtctgtgctgcttcgaataagccttgcatctcgctgacttgggatataactatgccgaaggacaggagctcccgcgtttcctcttatgagagccgccgggctggtgcctccccatacttctcatcgtctcatggacagagcagttcttgtcgccggtccgaggagtcttgtggggcagcagcggcggcagcagcaaagcaagctgcagagtgggaggatgttcggtgcccggtgtgcatggaccacccgcacaacgccgtcctgctggtctgctcctcacacgagaagggctgccgccccttcatgtgcgacaccagctcgcggcactcgaactgctatgaccagtaccggaaggcctccaaggattcaaggacagagtgcagcgagtgccagcagcaggttcagctctcgtgcccactgtgccgtgggccggtcagcgattgcatcaaggactacagcgcgcggaggttcatgaacaccaaggtccggtcgtgcaccacggagtcgtgcgagttcaggggcgcctaccaggagctgaggaagcatgctagggtggagcatccaacaggaaggccaatggaggtagaccctgagcggcagcgggactggcgccggatggagcagcaacgggaccttggagacttgatgagcatgctgcgttcagggttcaacagcaatattgaggacgacagtggcgggcttggagacaccgaagaagggggagaggaagctgaaatgactccggcctccataaccatggtcttcatcatgccatctagaggctcaatcatgcagtacctatcggaacgcagcagaacgatcattctggtcagtcggaggcgagcaagcagcagcagcggtggcgacgctgaagccactgctccagacagcgaggaaggtgatgaccctatgccatcggcagaggcatctgctggttcacagcattcttccgaacaagaggaggctgacggtgaccctgcccaatgacgtaagtcagctggcaagaggtgtgccatggcatcttcttagcctgaagatcccgaccaacatggcaacatggtatgtggcgaagaaaaacatggatgcaggtgccaccaaggcgtagccaggacaatctgtctacgcaggaaaatcgaggggaatcagcatcgcgcgaaggcttcagaaacgtggtggcctctagtaccaattctaatgtttccgcggggttctgtggcaatggagagagagaaacaattgggtggtagctatcttgtctgaatggatttcattttccttgcattgtaattctctaatatatattatcatatgaaatagattcggccgtatttgcactgcgt

SEQ ID NO: 32048 - DNA, 1273 bp, Zea mays
  Clone ID: UC-ZMFLB73255D12_FLI
atgagcttgccactcctcgaaaagggtctacatctgaagcactcagccaggaagagaagtcagccgcggggggcttctcgccgtccaagggcagccgcttctcgtggtcaccggattccggagaggcatatggccaggaagggctggcgcgactggacgtgagatcacctgacaggctagcgggggagctgcatttcctggacgagacgatcacgctgacgccagaggagctttcgagggcgccggctgaagtcctaggcaggagcagccacgggacctcgtaccgggcgacgctggagaatggtgtgttcctgaccgtgaagtggctgagggaaggcgtcgcgaggcccaagaaggagttcgcgaaggaggccaagaagttcgcaaacatccggcatccgaacgtggtcggcttgcgcgggtactactggggcccgaccccgcatgagaagctcatcttgtcggactacgtcgcgccggggagtcttgcaagcttcttatacgatcgaccaggaagaagaggtcctccactgacctgggcgcagcggctgaagatcgcggtggacgtggcgcgcggcctcaactacctccacttcgaccgcgcgatgccccacgggaacctcaaggccaccaacgtcctgctggacgggctggacctgaacgcccgcgtggccgactactgcctgcaccgcctgatgacgcagtcgggcgtggcggagcagatcctggacctgggggtactgggctaccgcgcaccggagctggccgcgtccaagaagccggcgccctcgttcaaggccgacgtgtacgccttcggcgtcgcgctgctggagctcctgacgggccggtgcgccggggacgtcgtctcggggcccgagggcgccgccggcgtcgacctcaccgactgggtccggctgcgcgtggcggaagggcgggggtccgactgcttcgacgccgccatggcctcggactctgagagcaacccgcaggctgtgaagggcatgaaggaggccctgggcattgcgctgcggtgcatcaggccggtctccgagaggccggggatcaaatctgtgtacgaggatctttcgtcgatctagctagtcggtagctagcctcgtcgcgtagcttttagattaacactgcgtgttaaaattgtgtgcgtgttcgtcttgaactcgtagaactgcgtagcgaatccaagtgttattatggcctcaccttgatgccagaaatttgaaatgaagaatgtgttgcattgttctttttgtctggt

SEQ ID NO: 32049 - DNA, 765 bp, Zea mays
  Clone ID: UC-ZMFLB73255F01_FLI
gcgtttctcctacgcggtccgtgggctgtgcctgcctgcctgctgttgcctcgtctcctcgtttaaacgggcgaactcaagattgcaacagggtcgtccgccgccaccaattgctagcgcaatcctagccctagcccagcgccccctccggccctccctgcttcgtgcttggtagcgatggcgtcgttttctgaagcgcccccggggaacccaactgctggcgagaagatcttcaagaccaagtgcgcgcagtgccacaccgtcgacaagggcgccggccacaagcaaggtcctaatttgaatggtctgtttgggaggcagtctggtacaacacctggctactcttactcttcggctaacaagaacatggctgtgatttgggaggagaacactttgtatgactacttgcttaatcccaagaagtacattcctggaaccaagatggtattccctggactgaaaaagccacaggaacgtgctgatctcattgcatacctgaagaatgccactgtctgacgaggatgctgctgtggctctaaagatgaagagcagcgattctcttttttgcagttaaaataatgacacgaatttactttaatttgacagactggataatcaagaaagctaagaactccaggtagttctgtaacggttttgtctattgctgggggtaaacaccacccttgaagagcttttgattagtggttgaaatgtgacatcaccataatacgtttgacctgacgagcatttaaacacacgtttggg

SEQ ID NO: 32050 - DNA, 1040 bp, Zea mays
  Clone ID: UC-ZMFLB73255F04_FLI
caaattatctgcactgaccagaagaggctcatctatgacacgaggacgatgaaggagtgcaacattcagatatttttagatattttacggccggttcagatcagacaagaaagggtcatctagcaaaggttatcgggatgtcgatctttttgtcaaacaagtagatgggaaaaatgttactgattcagagaaattgagattttgacttggagaaggcccagcttgacctaaggcatggctacaacagggctgagatgaagttcaatgtgaatcgtgttgataacatggtgatccaggcaatctttctattggatatgcttaacaaggacatcaattccttctccatgagagtcagcccctcaaatcaactttggaacccaaatggtcaagcctttggacagaaagttcagcaaaggtaatcgattaaagcggcttcacagcagtggctgagggacccaggagttgtggggcgtcacagataatcagcatggaatttagtagtttataacagtgcctgaaggagctaggatttatgaatcattctccatcaccttgaggtactcaccggagccagaatttttgaatcgttgtccaccatctcgagagacttgggtggctccatcgctagctttgatggcaatggttatacaagtaataagtttaaagacagagcagttcggaaccttggacatctgatcaggaatgaagaggaaaacaaaaacaaacagtttgttcattactactcaaaagaacttggccattcgtatgccatatgatttcctctcgctggtacctgtcattgaaggagctggagggtcaataactgattggagaggggacaagctctattggcctgttactgcagaatcacaacccacaagttttaatgtggtagcagttggggatgcccgtgtccacaaagaggcccttgatgcgttgcggtggcgctagcgtgctctttagataagcattatactaataaccaactatttagacatttacatgtgatatttgtatgaccaataataagctttacctgt

SEQ ID NO: 32051 - DNA, 1834 bp, Zea mays
  Clone ID: UC-ZMFLB73255F06_FLI
ctcttccaaccgctcctccgcttagcgtgcagatctaacgatcgctccgatcccaagcacaacaacttctccaattccaatcaccagccgatcagatttatgcagtcttactgccgcgagcgccagtcatgccgcgcggcagcagcttggaccagagcttgagcgacgacgagggctcggcaggtgttggggcggtttgggttcggcgtcgctggcaatgtccgggatgtccgactccgctgggggtgtgcgcgcgggcgcggagctgatggtgcagcagttccacctcaaggtgctccacgccgtcctcgccgtgcgcacgccgcgcccgcacgccttcgcggcgccagcggcggcgtcgttcaggcggagggacaggtggttccatctcccgctccacgacccgccgccgccgcccgaggcggctgaccgcctggacgagctggtccccggggagccgctggtggtggacgtcctcctgagccccgccggtagtgtgggagcccgaggggaggtggtggagaggtggactgtggcgtgcgagccctggccggacgccgcgggcggcgaggaggttgccgtgaaccgggcgtacaagcactgcttcacgctgctcaggtccgtctacgccgtgctccgcgtcctcccggcgtaccgcatcttccgcctcctctgcgccaatccctcctacaactacgagatgggccaccgcgtcgacaccttcgccgagcccttctcgcgcccccaggaggccgccatgcgttcccaacgctttgttcccgtcgaaacccagctcggccgcctcgtcgtttccgtccagtaccttcccagcctcgccgccttcaacctcgagatcacctccctttcgccctccaagataatcccagactacgtcggcagcccagccgctgagcccatgcgcgccttcccggcctcgcttacagaagccacgggctccggcttcccaccatctaatcagcagcagcgcccgcacagctgggcttcgcctgtgttctggtcgcacacgccggcacaccaggccaggttctcgccgcctccagtgttttacgcgtcaccgacgccatcgcctccccactttccaccccgtctcatgaggtgggagtctgcaccaatgcccataccacaggtgagcgagaggaggagccctgcacaccgccagaatatgctaccaccaccttcgacgagaagaggagacatgagggcagcaggtgctctacagtctccatctgagagtggccggttgattgggaggatggaggaacttcggatagctgatccatatgtgacctcgtcacccagacataagggcaaggacactaaagatggatctggcagattctctgcactctcctcatgcgattcaccacggcaagatgatctggatgatgtggattaccatttcgacgttgatgatgttgatactccagtctcccaacctcggagaattgatgggaaggaaacaggtgatcaggttggttcatcatcccataaatctcaagacgcacaagtaggttctctagtcaacctgctgagaaatgccagcccgctgcgaaatcctagcaattcatcacagatatcaagggccgagtccagcgaagtagcctcagcaagctcggtcacgtcccgcaggacatctgacgcccttgaggagctccagtccttcaaggagataagggagcgactgctgttccggagcagcgcaaaacatcaagagccaccaggaaaaccataaggccattctttgttttgtttctcttaacgtgatcgctgatagactcccaaccgggaaaccatatgcacagcgaactatagt

SEQ ID NO: 32052 - DNA, 1062 bp, Zea mays
  Clone ID: UC-ZMFLB73255F10_FLI
ggccggcacgcacattcccgacgcggactgtgccgccgcggcacagatggcgttcagcggcaacgccgttgccggggagatgcagatgggcggcagcatgagcccggggcggctgccggcggcgacggcgacggaggcgtcgagcctggaggacgccaacttcaagagcgcccgcatcaccgtggaggagaggcgggagaagatcatcaggtacatcaagaagcggaacaaacgcaacttcagaaagaagatcaagtacgcttgcagaaagaccctggcggacagcaggccccgcgtccgcggcaggttcgccaagaatgacgactacggcgagccgtcgtcaagggtgatgcagaaccacgaggagtacgaccaaatggcggccagcatgaaggcagaagacattctcgatcccgacgccgcgcacttcaacgggatgaattcctacttgttcaaccacaccgtcgaatcctggctgtgacgcgaacgaacgccggctaaaccaccctgaattttccggatccttcggcttcctgatcctgtgcagagttctcagcagcgcctttaatttttcgttgtttcggccccatggaataactggtcacgtgtaggttattatataaatcacgcgcgcagctccatcgggcgctagataaatggctcgtcaagctaaagtttagctactaaacagaaaaatagaaaaataactcttcaacagactaactatttaactcgtcagttatccgactcttaaattggcttcaccaccagcggaacttacactctgacgagccaaactagatagatagtctgttggagtaagatgctatatatatagtgcaatctttatgtaaaagtaaaatagaaggttaaatagagagagaaaaaaataaaagtcacttggagatgctctatgtagtctcttgtcactgtatatgcaaatctgatttcaccagcttgcggtagaacctgtgggtatatagttgagagttttgaagaaaataaagcttggatatacaaatttgtacttgatttcttaatagaaacaaagcttgtgggatc

SEQ ID NO: 32053 - DNA, 982 bp, Zea mays
  Clone ID: UC-ZMFLB73255G07_FLI
ctagggttttgctgctctccgaccccgagctccgaaggccgcagcatcaggcgcggcccccctcgcgtgtgaccgagatggcgctgccgaatcaggggaccgttgattaccccagcttcaagctcgtcatcgtcggcgatggtggaactggtaaaactacatttgtgaagaggcatctcactggagagtttgagaagaaatatgaaccaaccattggtgtggaagttcatccgttggatttcaccactaactgtggtaagatcaggttctactgctgggataccgcagggcaagagaagtttggtggcctcagggatggatactatatccatggccagtgtgcgatcatcatgtttgatgtaacctcaaggcttacttacaagaatgttcctacgtggcatagggacctgtgcagggtctgtgaaaacatccccattgtcctctgcggtaataaggttgatgtgaagaacaggcaggtcaaagccaagcaggttactttccacaggaagaagaatctgcagtactatgaaatttctgccaagagcaactacaactttgagaaacctttcctgtaccttgcaaggaagctggctggtgatccgaaccttcactttgttgaagctgttgctcttaagcctccggaagttaccatcgacatggctatgcagcagcagcatgaagctgagcttgctgcagcagctgcacaacctcttcctgatgacgatgatgatctgattgagtagaaaggatcatgagtcttggacttgagcaggagttgtgccttgcacgatttaagttgttctagggtggactctctcttgagttatcattgtctggatcatttttttctccttggacttgttgcaacttttgagtgtggaaatggattggaatagtcgccatgaatttgctggctactttatacatgtctttgttcataaaccttgttttaagatgaagttgtggcaatcctcttagtgct

SEQ ID NO: 32054 - DNA, 1712 bp, Zea mays
  Clone ID: UC-ZMFLB73256C04_FLI
caaatcggcggcagggttcacgccggttaaggcctccccgaccaccaggtctgccaccgctaaggccgctggtctatccgaggtcctcgcccccgtcgaggctacgatggagaagctgccgcagggggcaggcggcgaggatgtagaggaaatcgaggaggtggaggtcgaggaggaagtggaagtggaagaggaagaagaaggcgagagcgaccaggcttcgatccaggcgctgctggattcgttccccaaggaccagctcgtcgagctgttacgcgacgctgccatcgctcacggcgacgtgctaaccaccatccggcgcgtggccgacgccgacccggctcagcggaagatcttcgtacacggcctcggctgggacaccacaaccgacaccctcaccgaggccttcggcccatacggcgagatagaggatctcaaggtcgtcaccgaccgcaacacgggcaagtgcaaggggtacgggttcatcctcttccgtcaccgctccggcgcccgagctgcactacgcgagccccagaagaagattggtaaccgcagcaccgcctgccagctcgcctctgttggccctgtccctggtggtgcgcccaacagcgctgcaccagccccggttcaattgcagttgccaccagtgtcagagtatacacaacgaaagatatttgtcagcaatgttggtgcagatatcgatccgcagaaattgcttcagttctttgcgaggtttggtgagatcgaggaaggcccgcttggtcttgacaaggtcactgggaaacccaagggatttgctctttttgtctacaagaccattgaaagtgccaagaaggctcttgaggagccacataagcattttgagggagtgatgctgcactgccagaaggcgattgatggaccaaagccgaacaaattaggaggagctggaggttttttcggtgctggagcttcaagtgggggcaaggggtttgctggttatggagctactagtcattctctgcccggaactgttggtattgtccagccaatgtcacctctggcacctggattggcttcattgcctggtggtatttctgctgccccaggtgtggatcctgctctggggcaggccttgacagctttgcttgccacccagcaggggggtgggctgagttttaatagcattctgggggtcggtgctaatggatcggggttgcctccgcaggggccaactggtgcattgggtggtagcagcgtgcaggggatgcaaggtggttatatgggtggctacggtggttctggtgggtatgggggtgcttcttcaggaggccctggaagacattacatgggtcattaggatgattataactattttactgtggccagaatgccagatgattctacatgttcctgcttggcacttataaacttgctgttttaagctgtttctggctactcaattatggctgtggtcaaagttttcataggaactttggttccctccacctatcatttcaaaacgaaattaccgtttagattttcaaaagggcatcttatggctgcaagactattgtagaagacttcatgtggatctaaagcattgtggtatttaatgatattactgtttttgtacggttttcaaaaggccaaattaaggcttgcaaaactattgtaaaagacttcctgtgggtttaaagcactgagctatttaatcacaacggttttgtttc

SEQ ID NO: 32055 - DNA, 1265 bp, Zea mays
  Clone ID: UC-ZMFLB73256C06_FLI
agatccctcccgcacctccgagccgccactcccaagacacagagcgtcagagcccgatcccgatccagcgaggcggcgaccctccctcctccccttgcttcgctcgtccagccctgaccacccgcatccccgtcagtcatggcagcggcagcaggcggaggcgcggtgcgtgcgctgtcccagaaggagcaggacatacagatgatgctcgccgccgacgtccaccttggcaccaagaactgcgatttccagatggagcgctatgcctttaagcgccgcaccgacggcatctacatcatcaaccttggcaagacatgggagaaactgcagcttgcagcgagggttatcgttgccatcgagaacccgcaggacatcatcgtccagtccgcccgcccctatggccagcgtgctgtcctcaagttcgctcagtacactggcgctcatgccatcgctgggaggcacacccctggtaccttcactaaccagctccagacctccttcagcgagcctcggctgctcatccttaccgacccaaggactgaccatcagccaattaaggagtctgctctggggaacatccccaccattgccttctgtgatactgactctcccatgcggtatgtcgatatcggcatcccagcgaacaacaaggggaggaacagcattggatgcctgttctggcttttggccaggatggttctgcagatgaggggcactatcctccctgggcacaagtgggaggtcatggtggatttgttcttctacagggacccagaggaagcaaaggagcaggaggaggaagctgctgttgcccctgagtttgccgcaatcactgattaccaaggagctgatcagtggggtggtgaccagtggacctctgatgtgactgcgccgcctgttgctcctactggtgctgattggggtgctgctccagctccggttcctaccggtgatggctgggatcaagctggggcccctgcacctgtggtggacggcactgtacctcctctggttgctcctactggttgggaccaagcagccccgccaccgactgcccaaggctgggagtaggcgttgtccactctgagacctgtcttctgcggctgaagttcagtatttttctgtggtctgaatgtccaaattccggtggcatcttctatagctatgctttgctttgctttgaacacttgtgttttagggctttctagctgaacccgttgtccaatattgctgacgttgaaatttttggttaatcttaaaactgg

SEQ ID NO: 32056 - DNA, 1136 bp, Zea mays
  Clone ID: UC-ZMFLB73256C12_FLI
ggaacactttcaccgattgtggacaatcctgaaaatgcattaatgtctgatgagatgcgtgctgcagtgaggcatgcggcatcacttttcccaactgcaatcattagcggaagatctcgtgataaggtttttgactttgtgaagctaaatgaattgtactacgctggaagccatggaatggacataatgggccctgttaggaagactactgactccaatggcgtggaatgtattcggtcaactgatgtgcatggtaaagaagtcaacctgttccaacctgctagtgagtttttacctatgatcactgaggtgtatgaaaaacttggtgagagtgttaaggacattgatggtgcaaggatggaagacaacaagttctgtgtatctgtgcattaccgtaatgtggcggaagatgactataaaaaggttttccatcgtgtaactgctgttttggaaggttacccttgcctaagactaacccatgggaggaaggtttttgaggtccgtcctgttattgattggaacaaaggtaaagctgtggagtttttacttgaatcgcttgggctcagcgagagtgaagatgttctccctatctatgttggagatgacagaacagatgaagatgcattcaaagttctgaaggcaagcaaccgtggctttggaatattggtgtcgtctatacccaaagagagtgacgccttctactccttgagggatccagctgaggtgatggaatttctgagaatgttggcagcatggaaggagcagtccacctgatatcagttttgctgggtctgagaatgtgggcagtccccaagattataaatattagcaagatatataatatataatgctaatcaaataaatcggctattaggaggactcgagccatttttttgatttggcattttataagaggctaccacatttccatactttttcagtcccactttgttcttgtgttaaatgggttttcaaacagttcaattctttcattatttaggttccttaagtatatatgcaaatattcttaaaagggattttttggttccttctagtgtttcactgtgttgcgatttttgtattctgcaatctgtaaagaaccggttcttcgtataaacagcatttgacaatgcctc

SEQ ID NO: 32057 - DNA, 2133 bp, Zea mays
  Clone ID: UC-ZMFLB73256D04_FLI
gttggaatctttgagagcaaaatttgttgaactacagtcagagatggaagaaagagacaaggagattatatttgcacaaaggaatatgagcttgctatatgaagcatgcgcaagttcagttgctgagattgaaggaattagtgatatatatcctggtaaacacagctatgctgttgaacattctgcagatgaatgtataaaatcaatcgttgaacagttagttatggctgtaaaaacttctcagaacagtaacgaaggtagcacaaaggagctgaaggctattgttcttgagttgcagcaggagcttcaagctaaagatgtccaaattagcacaatcagttctgatctatcatatcagttaagggtggctgaatcttctgcaaagcagttctcagttgatcttgaagatgcaagaatggagctccaaaatttggagaaacaagttgatgtgttgcagaatcagaagaaggatttagagactcaattaaatgagcttaaaaatatggaatcaatggcaagtgaacaacatggaagaattgagaaattgactgatgaattaagcagaaaagatcaagaaattgaaggtttggtgcaagcactcgatgaagaagaaaaagagcttgaaatcttggagaataaaagccttcagttggagcaaatgctgcaagagaaagaatttgccttgaagacctcagaagtttctaggaccaaagctttggcaaaacttgcaacgactgttgacaaatttgatgagctgcatagcttgtctgagaaccttcttgctgaagtggaaaaccttcagttgcaattgcaagaaagagattctgagatctcatttctgcgaaaagaagttacaaaaagcactaatgaactgctaaccactgaagagagcaacaaaaattattcatctcagctaaatggtttcatgaagtggttagaaagagaactgttgcagttcggcttccattctgagagtgccaatgattatgattacactcaatttcctgtctatatggatatgttggacaaaaaaataggatctctgatagccgaatcagatgatttaagggttacagttcaaagcaaagattctttactacaggttgagagggccaaaattgaggagttgatgcgtaaatcagatggtctagaagcttcattgagccaaaaggattcccagatagggttacttcgccgggacagagcatccaatcagcagagcagatctataaatttgcctggcacttcagagattgagcaaatgaatgacaaagtaagcccagctgcagttgtcactcagattcgaggcgcacgaaaagtcatcaatgaccaagttgctattgatgtagagatggagaaggacaagccttttgatgatgaagatgatgacaaagcccatggtttcaagtcattgactatgtcacgctttgttcctaaattcactcgaccggtatcagacagaattgatgggatgtgggtctcaggcgatagattgctcatgaggcaaccgaccttaagactcggcgtcttgatatattggattgcactgcatgctttgcttgctagttttatttgaactctgtaaagatgtagccatctcctggcgagtgactgtacagtactctgtgtctatagcaagttatatctaaacagaagcagtttgcactgataccgtgattcctttcgaaaatgttaccgaatacttgagccgtattggcagctgcagaaatcttcatgatgcattttcacccttcatcctggtgcaaatcctgtctagcttagtttgtgttcaattgatacaaatggatggaagagaactgaaggaagcagcagcaaagaaccccctgtacatacatttttgtttgctctattctttgcttttagaaaaaagatggagggcattctacatgctagcgactacttactacactatatgatacaggattacagggaagtgacatgtagttttggaagttagggttttgggatggtagcaggtcatcccctcccttgagttggccccctcaatcccatcatgccttctaatctttttcgtttacatgtataacacagtgattatatcatttattgtaatccacatagtgtgcaatgggggagcttgcacattttatt

SEQ ID NO: 32058 - DNA, 1336 bp, Zea mays
  Clone ID: UC-ZMFLB73256D08_FLI
ctggcgttccgcaagaagctgcggcgcgcggaggtggagcgcgagatcctccgcgcgctcgaccaccccttcctccccacattgtacgccgacttcgaggcgtcgcactacgcctgcctcgtcatggagttctgccccggcggggacttgcatgttgcccgccagcggcagcccggcaggcgattcagcatctcctcagcgaggttctatgtggccgagacggtgctagccctggagtacctgcacatgatgggggtggtgtacagggacctgaagccggagaacgtgctggtgcgcggcgacggccacatcatgctctcggacttcgacctctccctcaagtgcgacgtcgtcccgaggctgctccgtcacaacagcctcccggcgcagaatggcagcagcgccggtggcgggcgagcggacagcgggaagccgtcctgcgtgccgccgatccagccggtgctgtcgtgcctgttcaacggcgtgcacaagtgccatcaggcgaaggagggcgcggcggcggcggcgagggacggcggcgaggcggacgacagcaccgagccctgcgacaggaacccggagctggtggtggagcccgtgtcggcgcggtccaggtcgttcgtgggcacgcacgagtacctggcgccggaggtgatctccgggcagggccacggcagcgccgtcgactggtggaccctgggggtgttcatgtacgagatggtgtacgggcggacgccgttcaagggcgcggacaacgagaagacgctggtcaacatcatcaagcagccgctggccttcccgcgggtcgtggcggccagcggtagggagtgggacgagcacctgcgcgcgcaggacctcatgacccagctcctggccaagaaccccaagaagcggctgggcggctgcacggggtcggcggaggtgaagcggcacgacttcttcaagggcgtcaactgggcgctcgtcaggtccgtccggcctcccgaggtgcccaagccgccggtggtgccggcgccggcgccggcgctggcgccgcagaagaaggtgctgatgatgagcaggaaggagcggcaggagccgtacaactacaacccccgccccgacgacgaacgcttcgagtacttctaggccgtacgtcgatattggcgtagctagatctcggtcgtttgcgcgtacggcagcgtgtgtttggggtgacggaagtgtacatagagtggtagcacgacgtacgtgcgtacgctccttgaagaccggagatcagtctcgctgcatgcatgctgtagagatcgtggctacgtatcttcagctggccaataaagaagctcgcatttgccgc

SEQ ID NO: 32059 - DNA, 2314 bp, Zea mays
  Clone ID: UC-ZMFLB73256D12_FLI
ggagctgaccgtggacccatccttgaggtcattgtatcaagaatgcgatacatatcatcacaaacagaacgttcaattcggtttgttggtttatcaacggcattagcaaatgctcgtgatttagctgattggttgggcgttacagatgacggtctattcaatttcaagcctagtgtgagacctgtacctcttgaagtgcatatccagggatatcctgggaaattctattgtccaagaatgaatagcatgaacaaaccagcttatgcagccatatgcactcattcacccaataaaccagttctcatttttgtgtcatcacgtcgacagacaagacttacagctcttgatatcattcagcttgcagcatcagatgaaaaaccaaggcagttcctgagcattgaagacaactccctagacatggttctttcacaggtttctgacagtaatttgaggcatactctgcaatttggcataggtctgcatcatgctggtttaaatgacagagacagatccttggttgaggagcttttttcaaacaataagattcaggtgctggtatgtaccagcacattggcgtggggtgtcaatcttccagctcacctggtcataatcaagggcactgaatactatgatgggaaaacaaaaagatacatagattatgatatcacagatattctgcagatgatgggtcgtgcaggtcggccgcaatacgaccaacatggcaaagctgttattcttgtccatgaaccaaaaaagagcttttacaagaagttcctctacgaaccgtttcctgtggaaagtaatctgagggagcacttgcatgaccacataaatgcagaaattgtttctggcaccatcagcaacaaggaggaggcgattatttatctcacctggacttacctatatcgcagattggttgttaatccggcctattatggattggaggatactgaaacaaacacattgaattcttatctatcaaggttagtcgaaactacatttgaagatcttgaggacagtggatgcataaaagtggatgaccactctgtaaagtacttgattttggggaaaatagcttcacagtattacctgagctacctcactgtttcaatgtttgggtcaaatattggccccaacacaacgttggaagtctttctacacatactgtcagctgcatcagaatttgatgagcttcctgtacggcacaatgaggacaatttgaatcgaatactcagcggaaatgtcccgtatccagttgatcaacaccaccttgatgatccacatgttaaagccaacttactctttcaggcacatttctccagagcagaattgccaataagcgactatgtcactgacttgaaatcagttcttgatcagagcatacgcatcatacaggcaatgattgatgtatgcgcgaatagtggatggcttacgagtgcattgacttgcatgcatctcttgcagatgatcatacagggtctctggtttgagagagattatgaatccctctggatgttgccatccatgaatgatgatatattagaccatctcaagagtagaggagtctcaacagtcccctccttactagatctttcccgtgaagaattgcgtagggtacttcaaccattttctgcgtcagagttgtatcaggatctgcaacatttccctcatgttgatgtgaaagttaagcttcataatgaacaggagcgatccaaacctccaactttaaacatcaggttgcaattgaaaaattcgcgacggtcagcatcaagagcatttgcccctagatttcccaaggcaaaacaagaagcttggtggcttgtcctggggaatgctacaagttcagagctgtatggtctgaaaagaattagttttgcagatcgggtgattaatactcgcatggaattgccacagacgttcaatgtgcaggagacgaagctgatcttggtgtcggattgctacctaggttttgacttggagtattctcttgagcatctcaccaagggttgagtgctttattcagagctgtttgggctgtttcattttgtatgggttcagcaaccagctcatcctagattgatcctgtaatcacgagacatgagttcattccatgaatttttgtttgtatgactacatccctcgtgttcatggttatattatatttaatagctatatatacgagtggataggtttataactttcatgaaatatcttttccgtaagcatagtagatgtttgagctctaaggttatgaccaacaaattgtgtatatggtcgtgcaaaatactattttataatataaactatattattt

SEQ ID NO: 32060 - DNA, 2890 bp, Zea mays
  Clone ID: UC-ZMFLB73256G03_FLI
catctatctaatctacttacgcacgaacatgcgtaacatcggcatgctgcgggcgctggtcctggcgctcgcggtggccgccgccgccgccgccgagaagaggaggacgtacatcgtccacatggccaagtcggcgatgccggccgagtacgcggaccacgccgagtggtacggcgcatcgctgcgctccgtgtccgcctcagcctccgccgccaagatgctctacgcgtacgacaccgtcctgcacggtttctccgcgcgcctcacgccgcaggaggccagcgacctggcgtccgccgagggggtgctcgccgtcaacccggaggcgcggtacgagctgcacaccacgcggacgcccgagttcctgggcatcgccggccagggactgtccccgcagtccggcacggcgggcgacgtcgtcgtcggcgtgctcgacacgggcgtctggcccgagagcaagagctacgacgacgccggcctcgccgaggtgcccgcgtggtggaagggccagtgcgaggcgggacccggcttcgacgcctccgccgcctgcaaccgcaagctcgtcggcgccaggttcttcagcaagggctacgaggccgccatgggccccatggacaccgaccgggagtcccggtccccgctcgacgacgacggccacggcacgcacaccagctccacggccgccggcgccgccgtgccgggcgccagcctcttcggcttcgccgcgggcacggcgcgcggcatggcgccccgggcgcgcgtcgccgcctacaaggtgtgttggctcggcggctgcttcagctccgacatcctcgcgggcatggacgccgccgtcgccgacggctgcggcgtgctctcgctctcgctgggcgggggcgccgccgactactcgcgcgacagcgtcgccatcggcgccttcgccgccacggagcagaacgtcctcgtctcctgctcggccgggaacgccggtcccgggagctccacgctgtccaacgtggcgccgtggatcaccaccgtgggcgccggcacgctcgaccgcgacttcccggcgtacgtcgtgctcggcgacgggaagaactacacgggcgtctcgctctacgccgggaagccgctgcccagcgccccgatccccatcgtgtacgcggccaacgcctccaactccaccgcggggaacctgtgcatgcccggcaccctcgtgccggagaaggtggccggcaagatcgtcgtgtgcgaccgcggcgtcagcgcgcgcgtccagaagggcctcgtcgtgcgcgacgcgggcggcgccggcatggtgctgtccaacacggccgccaacggccaggagctcgtcgccgacgcgcacctcctgcccgccgccggcgtcggcgagacggaaggcacggcgatcaagtcgtacgtggcctccgccccgaaccccacggcgacggtcgtggtcgccgggacggaggtgggcgtgcgcccctcgccggtggtggcggcgttctcgtcgcgcgggcccaacatggtgacgccggagatcctgaagccggacatgatcgcgccgggggtgaacatcctggcgtcgtggacgggcaaggccgggccgacgggcctcgccgccgacacccgccgcgtgggcttcaacatcatctccggcacgtccatgtcgtgcccgcacgtgagcgggctggcggcgctgctccggagcgcgcacccggagtggagccccgccgccgtgcgctcggcgctcatgaccacggcctacgccagctactccggcgggtcgtcgctgctggacgcggcgacgggcgggatggccacgccgttcgactacggcgcggggcacgtggaccccgcgcgggcgctggacccggggctcgtctacgatctgggcacccgcgactacgtggacttcctgtgcgcgctcaagtacagctccaccatgatcgccgccgtggcgcggagccgggagtacgcgtgcgccgagaacaagacctactccgtgggcgccctcaactacccgtccttctcggtggcctactcgacggccaacggcgacggcggcggggactcggccaccgtgacacacacgcggacgctgaccaacgtgggcggggcgggcacgtacaaggcgtccacgtcgctcgccgctgccaagggcgtggccgtggacgtggagccggcggagctggagttcacgtcggtgggggagaagaagagctacacggtgaggttcacgtccaagtcgcagccgtcgggcaccgccggtttcgggcggctcgtgtggtcggacgggaagcacagcgtggccagcccgatagcgttcacgtggacctgaacctgatggacggatggattataccatacgacagtggtttttggcgcctcagcctcaaagaaaggcccataatccatcatccatgtgacggcctcgttccctacactacgcagtcaaaaggaccgaagtgtagggtgggaaggtttggagggggtacggtgcaaattggaggtttcttctgtgttgctattattactactaataaggtcattaatcctatcagcgtccgtaggttgtgatttttggatggaaatgggatcggggtggacggttggatggagattgatggtgcttggttgattggaatggaattattagagaggagaaggttttataggttgaggcttgcaagttgggactggaccagagtgtgactgtgcgagggcaggagcagtttcgcagtgactgattggaacctgctgtagtgctgtggggaactgtcgcctcgcctatcagaaatggtctccacaaatgttttccgttctacctttttgaaaagtctcaaattattacatttttgtggctttacctgaaattgtggaaatgtaataacacgcttgttttttt

SEQ ID NO: 32061 - DNA, 1319 bp, Zea mays
  Clone ID: UC-ZMFLB73256G05_FLI
caccaaacccgtgccattctcgccgagctcgacaaacgcttttccgccatcgattccaagtgggagctccgcgtcggtgccctggagtcccaagcgaaagagttcgcccgccaccacgaggacatctcctccacgatccgggcggatgtcgaggcgcacctctcagcggccgatgcggataccctggaccggatccgctactgggaggcatccacaggtgctcgcgttaccgccctggagtccgccatccacctgctcgatacttggcgtcctcgaatggggtcttcagtggatgctttccacacctccatggatacagttcacgctgaactgtccaaaatggagatccaatggtccaatggagcgcgcgttgacggcttctccaggcccagcctccttgacgcgcgcgaatcggcaccggcgcgctcacctgcgcccgtcagcttcgccgatggctcatgttttgggccccgcctttcctctactaaccgggactgtggatttgggccctatgtggtcgatctccacttcccggtcaagggagcgctcccaaatgcaagatttggttcatcagcacttggttcgagcccaactcaggatgcagcgtcaggctgacaaaaacaggtctgagcgctcgtttgccatcggtgattgggtgtacatgaaactctagccctatgtgcagtcatctgtctcgccgcgagctcatcataagctgagttttaaatattttggcccttacaaagtcacagctcaggtcggtaaggtggcatatcgtttggagctgccggtctcaagtaagatccacccggtggtccacgtctcacaactgaaactggcggcaagttacaagggccccgctcctgcaactctacctattgatttacctgagttcagtgttcctgttcaaatccttcagacgcgaggacttaccaaaggcaaccatctcgtacagcaaggccttgtgcagtggtccgacttaccttctgacctggccacctgggaagatcttgaagctctccgtcaatgttttcctggtgctcctgcttggggtcaagcaggatttcaagggagtgagaatgttacaagcccggcgtcagtacctgatcaaccacgggagcagccccagcgtcgcaagcctggaacgtgtgagcgtcgtgctaatgtgcgcgtcacagcaccggagtgggtgtagctgtgtgcatggtgttcctgcctgtctggtggaccagttgtgtctggtggtggaattccttatgtattgtgaagtctgaactagaaaggacataaaacaaacaaaggaaatatctattccggcc

SEQ ID NO: 32062 - DNA, 860 bp, Zea mays
  Clone ID: UC-ZMFLB73256G07_FLI
ggtggtggtggcgcaaatgccttcggagtagcaacatcttatagcaaaccagcagctccttcaatgtccggtgcgaagttccttgtgccaactccagtcaatgttgcttcagaacagatggctgagctaggtgcccacagtgaaaccgcccgacaggatgaatcgtcgtcctcaccagcgatggaaacatcatttagttcgccgccatcactgatacagatgcagtcaagcattccgcggtacccaagcggtgacaacattccacggtacccgagcggtgacaacattccgcggtacccgagcggtgacaacattccgcggtacccaagtatggataacgtcagctcccccacaggcagcattaacagctcgatgtcaaggtcaagagcgtcatcatggagcggaacgtacccagagcagttgagcagcactgccgcttccaggtcacctgatggacagatgacgcagtcaccatcgatgcctggaagaagacctccgcacagccgttccaacagcgcgtcttcttccgcccagctcaatggtttgggtgaggatcttcacgaggtggagctctgacacctggccgcagattttgaccataatgtgatttatattaatagctgcatgtgtctagagagcaaagcaaaggaaattaaagtgcggtgtccctttttcaatttttttacatgtgaaagactgtggatgccgctgcattgtacagatagttgactcgttcgccagatgaaaaatgtataacaagagtcgtaggttcaagatagggagaagatgaaaccgtgatgattcatcattgttaaaaagatggactgtctgttggaaaaataaagctgattaataaccgc

SEQ ID NO: 32063 - DNA, 1508 bp, Zea mays
  Clone ID: UC-ZMFLB73256H07_FLI
ggcaaggcttctccatctggcaaccggggaccggacgatcaactcatccgcgcgactccgcttcgtcacgcggcgtcgccggcctcctcccgtgcccgtggatgcagtgcgcagtgcatctacgaaggtgtccaagccgccgccgaaaccgaagcgaagagccaagtcccctatccccaagcgcgtcatctcggacgtgttcaaggaggcgaaagctgccaccaagaggttctccagcccgcagcggcagaggaagcccatgtccccgcggtcaccagacgacagccctccactcggcttcgcctcgctaagagcaccgagcaagctgaagatcaataccagagcatcctcatggccacgaacaaaccttgacagtggaccggcaagagttgctgcgccggagatccttgagaggtggacggtcgatcgctccgagttgctcatcggccatagatttgcatccggggcctatagccgattgttccacgggatctacaaggaccagcctgttgctgtgaagtttatcaggcagcccgacgatggcgaggacgacgaactgtctgctaagcttgacaagcagttcacttcagaggttacaattctggcaaggctccaacatcgtaatgtcattaagcttgttggggcctgtaattgcccgacggtcttctgtgtcatcaccgagtttctgtccggcggttctctgagggctttcttgcgaaagctggagcgtgaaactcttcctttggagaaggtcatttccatcgctctggatatcgcacgcggcctggaatatattcacctccaagggattgtgcaccgtgacatcaaacccgagaacatcttatttgatggagaattctgcgctaaagtcgtcgattttggagtggcgtgtgaagaaaaatactgcaatttgttaggcgatgatccaggtacttatagatggatggcaccagagatgtacaagcacaagccatatggccggaaggtcgatgtgtatagctttggacttgtcttgtgggaattggtcactggttcactcccttatcaagatatgactccgcttcaggcagcttttgcggttgttaataagaacttgaggccggctattccattgagctgcccagcagcgctgaagcttctgatcgagcaatgttggtcctggcaaccagaaaggaggcctgagttccagcaaatagtttcagtccttgaaaacctcaagacagttcttgaaagagatggaacactcgacaagatcccaggctcgatctgccaggccctggaacccaatgaccagaacaagaagaaggctggcaactggatccagaggctgtcatacgctcaacctgctttctccggacctccacccccaaagttactctagttacacgtcttcttgttcttagcagcttggtatctggtactccagatagcaagtgtgtaaattgaatatttctttgtttcgctgggagaccagagatttcttcatggtatatactcggatacagtac

SEQ ID NO: 32064 - DNA, 756 bp, Zea mays
  Clone ID: UC-ZMFLB73257A10_FLI
ctgcaatgttctctgctgtttgttgagcaaaaaggatatcttttttgacaaaaggcgctgcaggagcaagtacattcctgttgagatcgccacaatgacccaatggatgtgttagtcctgatgcaggagcctgttgttcctggttcgttcctgcgagcaagagcaatcggccttatgcccatgattgaccagggtgaaaaggatgacaagataatagcagtctgtgctgatgatcctgaatatcgtcactacaacgacatcagtgagctgtctcctcatcgcctgcaagagatcaagcggttctttgaagattataagaagaatgagaataaagaggttgctgtcgatgcattcttgcctgcgaccacagctcgagaggccattcagtactccatggatctgtatgcgcagtatattttgcaaagcttgaggcagtagattggaagcaactatttatctgggcgtcttggaatgagtgtgattttaataagtcaaaacacttgatattgtgtgcaaatcttggggttgagaacaatgtcactagctgtgatttacttctgtgacttgcattttttttcttgttaaattatgaataagcgaagtccatacgtctactgtgtggcttcttgctgggttcatcgtctacccatgttcctcaagcttgggaacatggggcttttccccatttccgtgtcttccatgcgaagtaaaatttatttgtatacaatcgtattaatctgttcatgtgagtttttt

SEQ ID NO: 32065 - DNA, 1433 bp, Zea mays
  Clone ID: UC-ZMFLB73257C08_FLI
gaaaagctcagagacctgtccgttacacttgcaccgcagccagagtccgggagcgcagagatcgctggggagatggcgagagaagcagcgagcgaagccaccgcaagccgcgaaagcggggcggaggcggcaggggagtgctggagcgaagcgctcaagtcgttcctggaccacatccccgtctcctccgtcccgggcgcgctccaacccactgcctccccagcggtggaggtcaagctccacggctccgtcctgggcgccctcgacgccatgtacagcagcaacgccgcgggcgcggtgatcatcgacgtggtgcacagcagtctaggcaagtacgtcgatcgcgatattggcttcgtcgagttctcgagcctagtcctgtgggcacttgaggaacttggcaaagtggaaagtgaaccaacagacagtacttctgatttcctctctactctgaaacagcatcatcagattgcagaaacgaagatcgcctggttagcgaagttgttcctgtgggagccattcttccctgttcggacccatgacacgctgttccacgcaatgcttctcttttcgaaacaccacaggctcaacgtggcaccggttgttgagtcaatgaactcgagtgttattggatttgtcacacaggatgcagtgatggagctgcttctccagtcaagtggccttgagtggcttgataaaattgcagacaagcagctttcggaatttaggtttgcaaatgtgaggaagcctgttttggtgtactcagatcaaactctagctgatgggctgcatattctctcaaaggaaaaaacgggggttgcagtcattgacaggaaaaccagccgtctaattggatcattacagtgcagtgatctctacctgtttctagatgacagcacccttttcagcaagcgaacgacaactactctggaagaattaatcagcctgaataacaagaccgacaggaaatgcagcaccgctgaaaattcatgtgcgcctggccgaaacatcctcgcgctcaggagcaggcagtcaggcatggtgggcctaccagccaccaacctggaatccgacaccctaaagcaagcgatggagaagctgacaactttaaggagcagctgcagcttcatcgtcgacgagcacgggcgcgtccaaggagtggtgaccacaagggacatcatctccgtgttctccccgctgtgcatggactcgaggattgacggggccacgttcttctcggctgcgctcgagcaggctggctgccgcgttgagaacgggcagatgtttcagaattagtttcagacaaaactggaatgcagggaggctttagtttgttgcagtgaggaagatgtacatggcacttaccggctatgttgccctgatacgagggatatggatacgggatacgtcgatactctgatacgctatttatc

SEQ ID NO: 32066 - DNA, 1834 bp, Zea mays
  Clone ID: UC-ZMFLB73257D01_FLI
gttccaatctcgatttcttcttttttttttcgcgcgcgcacggcgatggccccagcaatcccggtgaacaacggcggacacttgtcgccctcgtggagctagcactgtgctgacgcgctgtgcgtgcaggtatcgcgccgcagacgacgagcggcgacgggatggcggcgctgctggccggcggcggcgagggcgagcacaaggaggtgcgcggcaggctgtccgcggcgtacgagcggcacattgcgccggcggtgaagctggacgtctgcgcccgggaggcgacgcccggcgggcagcaggcggcgtcgcggcgcgcgtcgaaggcggcgtcggagtggacgacggggtggtggacgcagttcgcggtgctggtgcagcgcgggctcaaggagcggcgtcacgagtcgttcaacaagctgcgcgtgttccaggtgctgagcgtggcggcgctggcggggctgctgtggtggcgcacgccggcgtcgcacctgcaggaccggacggcgctcgtcttcttcttctccgtcttctggggcttcttcccgctctacaacgccgtgttcacgttcccgctggagcggcccatgctgctcaaggagcgggcctcggggatgtaccgcctgtcctcctacgtggcgtcgcgcgccgccaccgacctgcccatggagctgggcctgcccacggcgttcgtgctcatcctctactggatgggcgggctggacccgcgcccggggcccttcctgctctcgctcgccgtcgtgctctacagcgtgctggtggcgcagagcctcgggctcgccatcggcgccgtgctcatggacgtcaagcagggaaccacgctggcctccgtcatcaccatggtcttcctcatcgccggcgggtactacgtgcagcacatcccgcccttcgtcgcctggctcaggtggctcaactacagcttctactgctaccgcctcctgctcggcatccagttccccgacggcggagggtactacgactgcggccacggcgcgctctgccccgtcgccgagttcccggccatcaaggccgtcgggctcaacaaccactgggtcgacgcctgcgtcatggcgctcatgctcgtcggctaccgcgtcgtcgcgtacattgcgcttgaccgcctcaagcccaggtgaaacaagataagagaagagaagagaagggatcaattagtttagtgctctatgcataatacaaccagaggggatgaaatgaatacgatacaaacctgcagcagctgagctctctgttttactccattcacaagggtttccagaactcgtaagctttccttcggctcctacccagcttcccacagccatcgccgaatctcattctccggaacaaaagctccgcgtcgaatagaaccgaatccggtcgagctccgcgtgaccgagactctagactctggtctctggtgccctacccaccatggccatgccttgcagctctcaaacagtgttacgacagggcacgaagagacaatgtaacagaaatagattttctttccgtacaggagaatgtctatatgctattcttctgtaaccgaaacatatgctgctagctgctctgctcttctcaactcccagtgataccacggcatctccttgacataatatggctatagatcttgggtcgatctgcaggacagaagcttcgatctgtcgttgttccgttcccatttccctcattcctacaaactgcttcaccatcagagcgtacagaggatcgatgggctaggtggtctttaaattttacactataaaatgtaagtatcggatcagatactattttaagacacgaacaatttatg

SEQ ID NO: 32067 - DNA, 1351 bp, Zea mays
  Clone ID: UC-ZMFLB73257E03_FLI
cagcttcccccgctcgggaagccgttcctccgctccgcctcctacctcaaggaggccctcctcgcgctcgccgaaggccatcacggcggctgccacctcaaatcaccgctcgacgttgccctcaagctcgcggcgtacaagactttctctgatcactcgcccgtgctccagttcaccaacttcaccgcaacgcaggcacttcttgacgaaattggtggcagcacgtcgtcctgtatccatgtcatcgattttgatcttggcgttggaggccagtgggcttctttcttgcaggaacttgcacactgccgtggcgcaggtggcgcagctctgccgttcgttaagctcactgcctttgtatcagctgcttcccaccatccactggagctgtgtcttgcgcgtgacaacattgcacagtttgctgttgaccttggaattccctttgagttcagtgctatcagtgctgatatgatcaaccctgcagaattcatttctgccactgatgatgaagatgtagttgttgtcctcccgactggttgctctgctcgtgcaccaccactgccagcgatccttgggttggtgaaacagctagctcctaagattgtgatagccatagaccatggcgctgatcgcgctgatcttcccttctcacagtacttcttaaactgctttcagtcttgcatgttcctccttgattcgcttgatgctgctggcattgatgctgattctgcctgcaagattgagaagttcctgattcagccaagaattgaggattcggtgcttgggcggggcaaggtggacaatccaattgcatggagaagtgcatttgcagctgctaggttcgtgcctgttccacccagcaattgggcagaggcagaggccgattgcctcctgaaacgggtgcaggtccacggtttccatgtggagaaatgtggggtcgggctcacactatactggcagcatggcgagcttgtcactgtatcagcatggcggtgctgatcagcaatctacgcctgtgggcaccaatatttcaccaccatttgctagcagcttcaactccagtaacgtgtatttcgtcttgcaatttagtgttgcaaaggtaacaaatatattggtgttgaacccttcatgttgattatctttgcaacttattagctagaagtagaactagcggatttttagcaatgttggtgtcaatgtctctagtgtaatgatgttgctctaggtttttaccctgcttgctctcgggtcactagacattctaatgtgacttgaaacactgcttgtgaggagagggtataattaacctatcaaatgtctgtggtacagtataatacgtgtttcatgttctttt

SEQ ID NO: 32068 - DNA, 2597 bp, Zea mays
  Clone ID: UC-ZMFLB73257E04_FLI
ctttatgattgtaataggtcatcatagtcacaagctcattgatgaaggacatgaatagcaagacagatatgtaccgtgccaatgctattagagttctttgtagaataattgatggtaccctactaactcaaattgagagatatttgaagcaagctattgttgacaagaacccagtggttgctagtgcttctcttgttagtggcatccacctggcccaggcaaacccagaaattgtgaaaagatggagcaacgaagttcaggaagctgtgcaatcaagagctccacttgtccagtttcatggccttgctcttcttcaccagattagacagaatgatcgtttagctgtaagcaaactagtttcaagtttgacaaggggatctgtccgttctcctcttgcacaatgtcttctgattcgttacacaagccaggttatgtgtgagtcaagcatgaacactcaaaatggtgaccgtccattttttgattttctggaatcatccctcagacataaagcagaaatggtggctttggaagctgcacggaagataacagagatggatgttacaagccgtgaattggcaccagcaattactttgttacagttatacttgagttcatccaagcctgtgcttcgatttgctgctgtccggactctcaataaggttgctaggacacgacctctggcggtgacaaactgcaatgtggacttggagagtttgttgtcagaccagaacaggagtatagcgaccctggcaattactactcttcttaaaactggcaatgaatcaagtgtggatcgtctcattaaacaaattacccttttcatgtctgacatagcagatgaattcaagatagttgttgttgaagctatacggtctttgtgcctgaagttcccactaaaatatcgctcaatgttgaattttttgagcaacagcttgagggaagaagggggctttgagtataaaaaagccatagtggattccatagttactttggtcagtgaaataccagatgccaaagaaattggcctgcttcatctttgtgaattcatcgaagactgtgaattcacatatctttctagtcagattttgcactttttgggaaatgaaggaccaaggacatcagatccaagcaggtacattcgctacatatacaaccgtgtgatattggaaaatgccactgttcgtgctagtgctgtcagcacgctggcaaagtttggtgccctggttgatacgctcaagcctcagatctttgttctcttgcaacgatgcctgtttgatactgaagatgaggttcgtgatcgtgctacactctatctccaaacccttagcggtgaagttgccattggtaatgatgagaaggatgtgaaagacttcctatttggatcttttgatgtgccattagccaacctggaagcaagcctaagaacttatgaaccttcagaggagccatttgacatctttggtgtcaagagaagtcaggtcgctaccacctaaagagaaggcagcccctggcaagaggccacctgctggtgctgccgccgccgccgcccctgtttcaactgttgatgcttatcagaaaatgctttcgttcattcccgagttctctgggtttggaaggctcttcaagtcctctgaacccatggagctgacagaggcagaaactgaatatgctgttagtgtggttaaacacatttatgacggctacattgtattgcagtacaattgtgcaaacactatagaagaacaactgctagaagatgtcactgtttgcgttgatgcctcagatgctgaggagttttcagagatttgttcaaagcctcttgcaagcttgccgtataattcacctgggcaagtttttgttgcttttgaaaagccagagcgtgtacctgttgttgggaagtttttaaatttgttgaagtttacagttaaagaggttgacacaactacgggggaagctgatgaggatggtgtggaggatgaataccagttagaggactttgaaattgtttcagctgattatatgctgagggttgttgtctccaacttcaggaacgcctgggaaaatatggacccagatagtgagcgtgtcgatgagtatggactcggggttagagaaagtttggctgaggctgtcaatgctgtcattaatatccttggaatgcagccgtgtgagggcactgaggttgtaccgaaaaatgcaagatcgcacacctgccttctatctggtgtatttattggcaacatgaaggtcctagttaggttgtcatttggactgagcgggcccaacgaagtggcaatgaaattagctgtgagatcagatgaccctgaagtcagtgataagattcatgagattgtcgccagcggataaagtgcaagacatacaaatcttctgccaaaagtgtagagcgggtagatagcctttatacttcgatgcttacagccttgtctcttcgtggacatctcagattatcagttagcatattctataaatttttttgctgtacaaataacatcaggtattatctgatgtttattcaagtactgatttcatggaatattgggaattggaatgtactgtagcctccgtggtttcctttt

SEQ ID NO: 32069 - DNA, 706 bp, Zea mays
  Clone ID: UC-ZMFLB73257F04_FLI
aaagcccaagccccatgcaagcaagaggtcgctggctagtcctggcagcgactcagtcggccggagcagcaccgacaacttctcaaaggaatcaaggcatcccaagagagagagctcaagcaaggctgctaaatccgaccacgtcgaacaagaacctcgcacgagcaacagcaacagcaacctgttgccaagctacatgcaatttacagaatctgcaagagccaaggcgtcgtcgtccccgaagatgagcccagatgtgcaggacagcaacccaaggaaaaggcactcgttgcccatgaccgacggcaagcatgactcgtcgcctcgcatgcagcgatcgtcgtcacatgctcagcaaaacgtcaagagcaacgggcctgctccacacagcgcgtctgacaggaagtggcatatctgatgggtaggccgagcagcgtattcgaatgtctagatggctttcttgtgatgaactcctgccttctccgcacactccatctaactcgtcaagttttttatttttccttgattcgtcgttggaatactgagtatagttggaagaagggcagcagctgcctcttgatatgtgtaaatttgttggttgtgtacttgtgttatgtcactgatgtggtttctgtgtgtaatatatgtcgctttgacttgtcatgcaacattgaagagtatatggattggtctgttgtatttggcg

SEQ ID NO: 32070 - DNA, 1201 bp, Zea mays
  Clone ID: UC-ZMFLB73257F11_FLI
ttctcaggtggcctttccaggcgaggatgagctccgacgcgctgaggcatacagccgtgagttcctctgccgcagacgagcctccggggagctcaaagacaagtgggtcatccccaaggacttgcctggcgaggtcgcttacgcactggacgtgccgtggaaagctagcctgccgcgcatcgagacgaggatgtatctggagcagtacggtggtgccgatgacgtgtggattgggaaggtcctgtacaggatgtctctcgtcaacaacgagctcctcctccggacagctcaagccgacttcagaagtttccagagacaatgcaagctcgagtggcatggcctcagaaaatgggccagcaggagaaacctccaagcatacggcgtgacgtcgaacagcacgctgcgatcctacttcttagccgcagccagcatctttgagccagacagagcgacagagcgtctgggatgggctcgcacggcggtgctcgccgaggccgtctcctcctgcctccgagacggtcgttgtagccgtgccgacggcatgctgagggaactgaccagcggcatccacctacgcaacgacgataatccggcagccagcttggtgcatgctctccatgagctcattggcctccttgcattcgacaatgcttcctacaacagccttcttgatgcctggaagcaatggctcgccatgtggaccgcccagggacacgaagggagcgtagcgctgctgctggttcgcacagtggagatatgctccggccggaggcgtagcgcctctgccaccgacgatggccaagcacacagcctctccgagtactcccagctcgagcagctcacgtcctcggtatgcagcaagcttgctgcagcaggcaccggagatggagacgacctttccccggcaagtgtggaggacgcagcagatcgccaccgtgtggatctggagatgcagacgttggctcggtgcgttctccggagccgcagcagtatcgacgcagtgaccaggcagacgtttctccatgtcgcgaggagcttctattacgtcgctcattgctcagctcgaacggttgatgcccacatctccaaggtcttgttcgaggatgtcgtgtagccaccgtttgggcctcgttttgtatctttaaagcagtgtttggttccagccagatttagtctcggccaaatcaaatgtttgaatggt

SEQ ID NO: 32071 - DNA, 1298 bp, Zea mays
  Clone ID: UC-ZMFLB73257G03_FLI
gaaggtaaggaaaaagctgctagtcaagccagggatagggctgcagcagaaagagctgctgtggagagagctcagcaagaagcgaggaagagagctgaacgagcagcagtggaaagggctgctgctgaggctcgggaaagacaggctgctgctgcaagagataaaacgagcaaaccagatgatctagagtccttctttggtatgggtgctcgagctaatagtgctccgaagcaaagggctccgactgtggactctatgtttcattctcaaacgcaaaatagagggagttccacttcgacatcaatgaaaaaggcatcatcaacaacaaatattgctgatgacttgtctgcgatatttggaggagctcctacatcagaagaatttcaagaagtagatggggagagcgaagaaagaagacgcgctaggatggaacggcatcaaagaactcgtgaacgagcggcaaaggctttggctgagaagaatgaacgcgacatgcagcaacaaagagagcaggctgaaagacataggcttgcggaaacactggactttgagattaagcgctgggctgctggaaaagaaggcaatttgcgtgcattgctatcaactttacaatatgttctttggccagaatgtgggtggcaacctgtatccctcactgatttgatcactgctgctgctgttaaaaaagtgtacagaaaagcaacactgtgtatccatcctgacaaggtgcagcaaaagggtgcaaatctccaacagaaatatatcgctgagaaggtttttgatctccttaaggaggcgtggaacaaactcaactctgaagagctcttctaaacagcctcacgactgaacatagggtcgcccctcagggtctgcacaaggtactctcggaagaaactcacaagctggagtggcttgaggttggtcggggggaaccatgaagcgaccaagcgaaacctgagctatggttgttgtaatcaccgatgtttgtttcactcccccaattttctttcccaactgtatgctgattcaatcacaactcacagagacatgtggcagctgcccaagctggacctcatccagtaggccagaaggtgtagtatttatcctgggctgtatgcaccgtcagagcgggggttttcttaggccagtgttgtggttatagattaggtacaggttttttttaagcatggagagacgttttactagataatgatgaatgttgcttgtctgatgccattggcatcgtggcaagttcggttgtcttgtttatagtcaatttctggaacatcacttgacct

SEQ ID NO: 32072 - DNA, 822 bp, Zea mays
  Clone ID: UC-ZMFLB73257G09_FLI
ctgcaattgagaaggctggatacactggcaaggttgtcatcggaatggatgttgctgcttcggagttttacagtgacaaggaccaaacctatgacctcaactttaaggaggagaataatgatggttcacagaagatatctggcgatagcttaaagaatgtatacaaatcttttgtgagcgaataccccattgtttcgattgaagatccttttgaccaggatgactgggttcactatgctaagatgactgaagaaattggagagcaagtgcagattgttggtgatgaccttctcgtcaccaaccccactagggttgctaaggctatcaaggagaaatcatgcaatgcccttctgctcaaggttaaccaaatcggatctgtgactgagagtattgaggctgtgaagatgtcaaagcgtgcgggctggggtgtgatgactagtcataggagtggtgagactgaggacactttcattgctgatctggcagttggtttgtccacgggtcagattaagactggagcaccctgcagatcagagcgtcttgccaaatacaaccagcttcttaggattgaagaagagcttggcgctattgctgtctacgcaggtgccaaattccgtgcacctgtggagccctactaaacgggcgggatgcaagtgcttttatgtctgcacaagtcctgtgaaactgtttactgcgacctgcagattttactcttggagtgccctgagtagattttagcaataatatccaacatgtaacatgttacggacatgtacccaaacgtgatccagttttagttaatgtgctccatgcttgacgttt

SEQ ID NO: 32073 - DNA, 1645 bp, Zea mays
  Clone ID: UC-ZMFLB73257H05_FLI
catactatcgtgacaatggttttatgccatatgcccgttcagttcttgtgatacacaatatagcacatcagggccgtggcccgatagatgatttcaggtacctggatttgcctggtcattacatggatcagttcaaactttatgatccattcggaggtgatcatctaaacatttttgcagctggtattagagctgctgatcgtttgcttaccgttagtcatggttatgcatgggagctcaaaacacctgatggcggctggggccttcatagtatcattaatgaaaacgattggaaattccagggtattgtaaatggtattgatactgctgattggaatcctaggcatgatgtccatctacaatctgatgggtacaccaactattctctagaaaccgttcagactggtaaagcacagtgcaaggaagcactacagaaagagcttggactccctgttcgtggcgatgttccggtcattgcttttattggacggctggaccatcaaaaaggtgtagatctgatagcagaggcaatgccgtggattgctggtcaggatgtacaattaattatgttgggtactggaagacaagaccttgaagatacattgaggaggcttgagagccagcattatgacagggtccggggctgggttgggttctctgtccggttggctcatcggatgacagcaggggctgatatactattgatgccatcaaggtttgagccatgtgggctgaaccagctatatgccatgatgtacgggactgttcctgtagttcatgctgttggtggtctccgcgacacagtccaacattataatccctatgaggaggttggagttggatggacttttgagaaagcagaggcaaacagaatgatcgatgccctagggcactgcttgaacacatacagaaattactggagcagttgggaaggtatccaacgtagagggatgatgcaggacctaagctgggataacgctgctaaactctacgaggaagttcttcttgccgccaaatatcagtggtgactgttgttgaactgtccaaggaactgttgatatttgtcattcatagacctgaaggctttctgtcgcatagaagtcaccgactgtttcaattcttttggtgactgcttcacacagctgctgcatgctttgtcctgaattttgcaggacggtgtgcgtcgcaacagccaaattttttttgttgttgccagttcctaataatcgcatcagatgtgaatgtgaattctgagtctacctcctggacaaacacagtggatgaggcttttgctggaaacaggttaatgctggaggaaagattgaggggaagcgtcgtgcactttttgcaagtgtttacgaattcatttgttctacagggagagctcatttagacgctttggtacaggagggtggtagatagcagagaaactgatgctttgtatcttgagtagttttgttgtatctctaaattaggatacttgttacaatgttcagttcttcatatttttttccgtgcatatcctgtagatgatttagtgttccggtcttccgaatgatcgtaaaaaaggggtttgcaggttgttgagaataatatataattatgaaagggcatcggaatccctgaacaatactgaagttctctg

SEQ ID NO: 32074 - DNA, 1438 bp, Zea mays
  Clone ID: UC-ZMFLB73257H08_FLI
aagttcctcggaagaattcatggccaacacagtttcagaaaaacggtccaacttatgacaacataggtctttttttctttgctagagatgttcaaagctatgaaaatcactacagtaaattagttgagaatatgctgaagaatgatttagttctcagaggaagtgttggtactgttgagttgcttatattcccttccaatatcctatcaaagaacttccaaaggtggaatatgttgtactttctatggggtctattcagagttagcaaaaaagattcctctaacctcccatcttatctatccacaagtagagtagaacgaaattttaatgatgatctccaggccatggattggatgccatctacccattcattctcacagaacaggagtgatttagctgaaccggaccctgatttgttaaagtcaactaattttgaaccgagtttggaagccagtcgtgaggtgtgtttggatggagagaactctttgaatcaacttgtacgcagaagagctctagatgatcacctagattcagatgcaaaagcatgttcaacgattagcaatggtgccatgggttcctctgccatgtctatgcaaagaaaacatcagaaacctgattatccagaacatcaagataaaaagagggacacttttggtggtaatgttagtgaaagagatttcgatgtgaacacggtgccagttacttgttctgtctccttaactcaccttcaggaagaacctggtaagctgagcacagccatcgacctcatggatatagaccatggggttagcgcaggtgcactggatcgttcacatgcatcaggtggtgcaggtaaaagaagttttgagacggccgaagtagctgctgaagtacccgagcataagaaaactaagctggataataatgttgtgcctataagctctggtccacgcgagaatgcctgtacgaatgatggcaatagcgataaactgatgcctggaagctcaagcagtgatggcaagcgcgtgtttccacttgatctaaatgcagtgggggatgaggacatcgtaaatattccagccttcaggtgatgaagagttcgctgttccatgacaaaccaaccgtggtggtttggttcagaatgagagatgtgcattgtaaatcgcatgtgcagtttttgacctaatgttttcagacaacacttacagatgtgatgttcccctctttggcagtgaataattctgctccagaatatgcttacagatgtgatctcatctgccagattccttgtgatgtcatgctaatatcgtacaccacctggcttcgcttggcaggatacacgtccatcaagttactaattaggatgcgtgtatgcacgtggagacaccgttcaaacggacgtgtaaaacactgttttctactctgtaggtgacaatttatagatagccttaccatcttc

SEQ ID NO: 32075 - DNA, 440 bp, Zea mays
  Clone ID: UC-ZMFLB73257H10_FLI
ctagcatcttgctggagatggaccggatactcagaccaggtggtaaagcatatattcgtgaccggaaagaagttatacaggagatcaaagaaataacgaatgccatggggtggcgtggtactatacgtgacactgccgaaggcgcgtacgccagtaggaaggttttgatgtgcgacaagcctatggcgcgttaggcgatcaggtgaagacaagcaggggtaattttaggtacttttgcaactgaaaagagctgctgtcgggactgacatttgtgctgtagatagggtaggtcaaggactaatttgtaactatttgattgatcatccatttgtaaaatgatgatctgtgtagtttctgacatgtgccaatttcttttgttgaaacattgtcatggaaaccctacaaaagtgggggaaatacgaagagaccgttttaaactc

SEQ ID NO: 32076 - DNA, 1212 bp, Zea mays
  Clone ID: UC-ZMFLB73258C12_FLI
catcccctttgcaagtatagtctctctgctaagcgaagcgaagcttcaagctagtctcggcggctctagaagacgatgggcaaggacgacgtgatcgagagcggcgctggcggcggcgagttcgctgccaaggactacacggaccctcccccggcgccgctgatcgacgcggcggagctggggtcctggtcgctgtaccgcgccgtgatcgccgagttcatcgccacgctgctgttcctgtacatcacggtggccaccgtgatcgggtacaagcaccagacggacgcgtcggcgtcgggcgccgacgcggcgtgcggcggcgtgggcgtgctgggcatcgcctgggccttcggcggcatgatcttcgtcctcgtctactgcaccgccggcatctcggggggccacatcaaccccgccgtcaccttcggcctcttcctggcgcgcaaggtctccctggtgcgcgcgctgctctacatcgtggcgcagtgcctcggcgccatctgcggcgtcggcctcgtcaaggcgttccagagcgcctacttcgacaggtacggcggcggcgccaactcgctcgcctccggctactcccgcggcaccggcctcggcgccgagatcatcggcaccttcgtgctcgtctacaccgtcttctccgccaccgaccccaagcgcaacgcccgcgactcccacgtcccggttctggctcccctccccatcggcttcgccgtgttcatggtgcacctggccaccatccccgtcaccggcaccggcatcaacccggccaggagcctgggcgccgccgtcatctacaacaaggataagccctgggacgaccactggatcttctgggtgggccctctcgtgggcgctgccatcgcggccttctaccaccagtacatcctccgggctggcgccatcaaggccctcggctccttcaggagcaacgcgtgatgagcggggcttggctgtggagcaatggcgggcgacctacgggcggggggccgtgagcgaggagaatgccatcattcatcgatcgacttgggtgccggtggttggttcgggtcgccttttttttgtttcagcagctgctgcgttgcgcgcgtgcgtgagatttggtttggtttcgttcccctgcaatgtaatcatgtcgtgactctcaagggattattccgctctgctcttatggtctctgttttctatttaatgattgttatt

SEQ ID NO: 32077 - DNA, 1663 bp, Zea mays
  Clone ID: UC-ZMFLB73258G03_FLI
ggcgccgtgaagaaggcggggagcgagaagcttacccaggtgggcagcggcaacgcagcgctggcgttgttgaggagggcaaccaagatgacactctcggtgctgtccaacctcccgctcgctatctccgagatgttcgccattgccgccctcatggctctaggaacggtgattgaccagggagaggcacccagctactacttcgagaagttccccgaggacaacccggtcttcggcttcatcacgtggaggtggatcctcacccccgggttcgaccacatgttctcctcgccagtcttcctcggcctccttgcgctcctcgcgacgtccctcatggcttgcacctacacgacccagctccccatggtcaaggtcgcaagaagatggtcgttcacacattccggagaaagaatacggaagcaggaatttgcggactcgcttccccaagcatccattcaggatttgggagtcatcttgatgggtgctggatatgaggtattcaccaagggtccatctttgtatgctttcaaagggctagctggtcggtatgcgcctatcggcgtgcacttggcgatgctcttcatcatggctggtgccacgctaagtgcgacaggaagctttaagggctccgtggatgtgcctcaagggctgaactttgttataggagatgtcatgaaacctagaggggtcctctctgttgcgccggatgttttcaatactgaagtccatgtcaaccggttctacatggagtactatgacagtggagaggtctcacaattctacagtgacctctccctattcaaccttgatggtaaagaagtgatgagaaagactatcaaagtgaacgatcccctgagatacggaggggtcaccatctatcagacagactggggattttcagcattgcaagtgaagaaaaatggtgaaggccctttcaatttggcgatggcccccttgaaactgaatggggataagaagctctttggaacattcttgccacttgaagattcagactcgtcgaatccaaatgtcaaaggaatatcaatgcttgctcgagatttgcagtctattgtgttgtatgatcaagatggtaagtttgtaggggtccgtcggccaagctcaaaactgcctattgagatcaatggcaatgaaatactcattgaagatgctattggtagtactggactggatcttaagactgatccaggagttcctattgtttatgctggttttggtgcgcttatgttaacgacctgcattagctatctttcacactctcagatatgggcattgcaagatggaagtacagtggtcgttggaggaaagacaaatcgagccaaacttgaattttctgaagagatgaaccggctacttgataaagtaccagagctgatcagcgccgatgagaatctattagataccaaatcgacagccacatgaaacatttttttgtgtgtttttgtttgggattgctgaagatgcagtagctctgttcaggtgaacacacgttcgaattcacaaaacatggccttcaagaatagaaaaactgttacaatctttcagtagaacttcttagatcacacttcaattgagctctttgtacatctttgaatgaggaaactaaactgatagcttgttatattaccaatttaccaattaccat

SEQ ID NO: 32078 - DNA, 751 bp, Zea mays
  Clone ID: UC-ZMFLB73258H01_FLI
cgcgtgcgaaccaagcagaccacaacaagaagaagcgtagtcgtcgccggaaggaaaggcgcggagcaagatgtcgtggcaggcgtacgtcgacgagcacctgatgtgcgagatcgaaggacagcatctcagcgccgccgccatcgtcggtcacgacggcagcgtttgggcgcagtccgagagcttccccgagttaaagcctgaggaggttgctggtatcataaaggactttgatgaacctggtactcttgcaccaactggtcttttcgttggaggtacaaagtacatggtgatccaaggtgaacctggagttgtcatccgaggaaagaagggcactgggggcattactatcaagaaaaccggcatgtccttgattattggtgtctacgacgagccaatgactccagggcaatgcaacatggtggtggagaggctcggcgattacctgatcgagcagggcttctaaaagttcgtcatgttctgttttggtcatttgggcaccaaagtttgcgcctcatttggttctgtaatccgtgagctcgtgcatgtacttggcgtattgcatgcagtgaataatttagcttgggtttgtttgttgggggcagtgttggggacggatttggattggggtttatgcttggcatcgcgtcgtatcgaaactcagctgctgtttcgctgagtaatgtacatttccctggtaatggtacttgtggactctgatgcttttatgggaacgagtgcattttactgc

SEQ ID NO: 32079 - DNA, 438 bp, Zea mays
  Clone ID: UC-ZMFLB73258H06_FLI
tgattgctcatctattcaatacaaaatgaatttatttgcttgacaccgacagaaaggagagcttcctccaggcagaacagcagtcagcaactcaggtgctgggcgccctttccccgacctagagattgagagcgagctaaacgagctgcggaggaaagccaaggaatattaggttcattccttgtcgattcagcaggcctgacggaatctcatttccaagaaaatatagtgcagctgcagattgctccattgcgcgtttcgaaagttgaaacacaagtgcgcattgactgtttgttaaagagtatggaatcggctaatttctcggcattttccccctcgagtgacatttgtacagctatccataaaattgttgtaaatcactactctctctagagcctttttttcatactatatataaagtcaaagttcgaagttccc

SEQ ID NO: 32080 - DNA, 3185 bp, Zea mays
  Clone ID: UC-ZMFLB73259A08_FLI
cgacaagggctcggccgcgatggcgaacgagatcaaggcggatctggagggcagcgatggccccgccaaggccgacgccatgcgccgcgccatctcgctcctcctaaacggcgagacgctcccgcagctcttcatcaccatcgtccgctacgtgctcccctccgaggaccacaccgtgcagaagctcctcctcctctacctcgagatcatcgaccgccgggatccggccggccgcgccctgccggagatgatcctcatctgccagaacctccgcaacaacctgcagagtcccaacgagtacatccgcggcgtcacgctgcggttcctctgcaggctctccgagcccgaggtgctcgagccgctcgtgccgtccgtgcttgcgaacctcgagcacaggcaccacttcatcaggagacacgctgtctcctccgtatccgcgatctaccgcctcccgcatggggaccagctcatcccggacgcgccggagctcgtcgagcggttcctcgcatctgagcaggacgcgtccgcgcggaggaacgcattcctcatgctctgtgcatgtgcacaggaccgcgctgtcgcctacctgctctcaaacgccgaccgggttgctgagtggcccgatctactgcagatggccgttgtggatctcatccgcaaggtctgccgatcccagaaccgtgccaacaagggaaggtatatcaccatcattacctcgctgctctccacgcccagcacagcggttgtttatgaatgtgctggcgcgctggtgtcactctcttcagcacccacggcagtgcgagccgctgccaacacctactgccagttgctctcttcgcagagtgacaacaatgtgaagctcattctactggatcgcctcaacgagctgcacactttgcaccgggatgtcatggtgggggtggtaatggatgtgcttcgtgcactggccagccccaacttagatgtcaagagaaaggttcttgatttagttctcgatctgctcaccccgcgtaatgttgaggaggtggtgctttatctcaagaaggaggtggtcaagacgcaagctggagacctcgagaagggtggcgagtaccgtcagatgctggtgcaggccatccatgcctgtgctgttgagtactcagaggtggctgggtctgtagtacacctccttatggacttccttggagacaccaatgttgctgcagctgttgatgttgttctgtttgtacgtgagatcattgagaccaatccaaagctgcgtgtttccatgatccagaggctaattgatacattctaccagattcgagcatcccgggtctgctcatgtgctctctggattcttggggagtactccctctctctatcagaggttgaaagtgccattgctaccattaaacaatgtcttggggatctaccattctacactgtatctgatgaaggggaggcaactgattctgctaagccagccaaggcagtggtgaactctgtcactgtatcttccaggcggcctgttgttcttgcagatggcacttatgccacacaaagcgctgctactgagaccattttgactccatcagttgctcctgggtcattggcatcaaccctgaacctcagatcactcattctatcaggtgatttctttctggctgctgttgttgcatgtaccctggccaagcttgtgctgaggctggaagaagtgcagccatctaaggttgagtcaaacaaggcttgcactggagcattgctgatcatgacatcgattctgcagctgggccagtcttcttaccttccccacccaattgataatgattcatatgataggattgtgctgtgtgtgagattgctttgcaatactggtgatgatgtcaggaagatttggttgcagtcatgcagacagagctttgcgaaaatgcttgctgagaagcagttcagggagacagaggagatgaaggcaaaggcacagatctctcatgcccagccagatgatcttattgatttttaccacctgaagagcaggaagggcatgagccagcttgagttggaagatgaggtgcatgatgatttgaaggctgcaactggtgggtttaccaaggatgcagatgacgcaaacaagctcaaccgcattcttcaattgactgggttcagtgatcctgtgtatgctgaagcatttgtaacagttcaccattatgacattgtacttgatgttactgtaattaatcgcacaaaggagacacttcagaacttgtgcttggaattggctacaatgggagacctcaaacttgttgaccgccctcagaactacaccttggctcctgagtctagcaaacagatccgcgctaatatcaaggtttcatcaacagagactggagttatatttggcaacatagtttacgagacttcaaatgtgatggaacgatcagtggttgtcctaaatgatattcacatcgacatcatggattacatctcacctgctacctgtgctgatgttactttccggaacatgtgggcagaatttgaatgggaaaataaggtggcagtgaatactgtgattcaagacgagaaggaattcttgaatcacattatcaagtcaacaaacatgaagtgtctgacaccaccgtctgcactagacggagaatgtggtttccttgctgctaatctttatgcaaagagtgtgtttggtgaggatgctttggtgaacatcagcattgagaagcaacatgatggcaagctcagtggttacatccgaataaggagcaagacccagggaattgcactcagcttaggtgacaagattactctcaagcagaagggtggcagttaactttgacaagtgctgcagttgtatcatcatttttctcttttaggaaatccacgtgccagagataccagtgccgtggcattgaattgagtataaatgtttttttgtacaaaaggatcaaagaaacagataagacgacagttatgaggaagtcacggtgttagatccctgagcatgaagttctcggtcgaagatccatgttgctgtagtaacgatgctgttccaacttcctttgctgataaaatgacaatgtagaaatagttctgaagttcatgttgatttgtcgacaggtgggtcaattgtgatcctgtactattgttatgaatccctcttgttttgatgttatatttgctcttattttaatttt

SEQ ID NO: 32081 - DNA, 970 bp, Zea mays
  Clone ID: UC-ZMFLB73259B09_FLI
gttgctgtctaacattccttcagaacttgtcggggatccaataaaacaagaacgactatatgatgccgttgattgcctcctttctttcgtgaacaaagatggtacattatcatcagctgaatgtaaacgaacaacttcatgggtggagtttatcaatccttctgagagttttcgtaatatcatcgtcgactatccatatcctgaatgcacatcatcattaattcaagctttagtgctgtttagaggcaagcatccaatatatcgtcgtgatgagatagacaaaattatcaaaagtggtgcatcattcattgagaaagtacaacgaaaggatgggtcctggtatggttcttgggctgtgtgtttcacttatgcaacattctttgctataaaaggattagttgctgcaggaagaacataccggaatagtttggctattaggaaagcatgcaacttcttgttgtcaaagcaactaggaaccggtggatggggagaaaactatcttggttgtcaaattgaggagtatgttgacagtggcagtccacatggagtcaacactgcacaggcgatgctagctttactctacgctgggcaggtcgaacaagacccagcgccactataccgtgctgcaaaagaattaattaacatgcagatggagaacggagaatttccccaacaagaaattgttggcaacttcaactcctcacttttcttcaattacccgaactaccgaaacttatttcccatctgggctttaggagaatttcgccgccgacttgttgcaaaaaaaggttaagatgggtatcttaagctatttctaataattgtatttgggatacaagtatccatgtatattttatttttcgtgatgatgggaatgtaacacaaaataaaatttatatttagtacgtatatgttaatatttgtaagattatcacaaacaagttgataatcatcagtgatctggttcctc

SEQ ID NO: 32082 - DNA, 645 bp, Zea mays
  Clone ID: UC-ZMFLB73259F08_FLI
gttttaaagaaaccccaacagtccaataccattcttcacatcatccaagcaccaaaacgtggcttgaacccaaatgcaaagatgtacagtacagtaagcagcaggcagtctctgtatgtaatgcaatgcaggtcagtcagtatactgattgggccccgcccggcctgtgtagttcaggccaggaggccaggacgacggcagcaacattttcgccttcgcctccagctccagatacaaactccacttgccactccaaacaagcagacaccaagctgcagtgcccgagccccagcttgccttcccggaagctcatcacaagaaatggaagtactcgatgcacctggactggccgatcggtagcagcgtcctggacggagcgttgccggtggtgctgccgtacgaaccgctcggcttctgcgtggactccgcgacctccatcttagcagggccgttgcttgtgggagatggcacaccgcctgtccaccactggggctgttggttgtaggcgctcctgtcgggctgtcggttggcgccgtaggagtgcataaccggcggcgcgaccgtagtcgtcgtcaggaacgaggtctgctcggagggggcgtgcgggctgaagcagatcgacaccgccttctttgaagacgactg

SEQ ID NO: 32083 - DNA, 2552 bp, Zea mays
  Clone ID: UC-ZMFLB73259H01_FLI
gttctcggatggctgagtatgagaatgaactttctacttccgatccagccaaggcacataaacttttcaactcaaaagcaaaggatttttcatttcagaaacggaaaatagacagtgtaaagaatctatattatgcgatgagaaaaagagtacgcaatgatccacgcaacagtggcgaccttggatttcttgtcccctgttcgtgtacggcaattggtagtgagtgtatctgtggaggcctacctaacaatattgaaccagagctgaattcagtaagccgctatgggcaagtaggttcaaggtacaccattggacattcatattctgaaatgaacgaacatgcttttcatacgaagcatactgaaagcatgacaagagatggggatggcaccagtaatgttgtgtatggctactcagatgtaggccaactatatgaacatcatgcgtacacagcgaataatcatgggaatagagaagggaacaatctttctctaaagagtatcacaaattttcaggattctatgcagtttcagcagttggacaacaatcaatgtggtaatggggtggtagactcaaaggctttggtgatccctaaccatttcagtggaagtgtgcaggaacctatgcctctccaaatgattggtcaacctgagggttctgaagcaccaggtggtgcaatcttgagtcttcagcgaagcgacaggctcgctcttgctgatgataaggatgtaaaatcagaagacagggaccctctcacatttgaagcgcatttagatggtgggatatctggtttagatcacgctactgagtttatggacttcccatatttcactaatagtgaagaccttgatatcctgaatagtgaaaatcttttgaattctccaagtgagggaatccaggaggatttagacgatactgcattagttgttcatggggttagatcaaccatgcaaaatctggttcatgctgatgaagccaatatgtcctgtgatcaaatagatcttggtgatgtgaaaaataatgtagatgcttctggtataatcttatttcctacttcattagtagtgccctgtcctggcctgtatgttgagtgcaaattgaacacagaagatactgaaattccttgcaacgacgatgtttctacaccaacagagtatcctcttgaatgctgtacttctacctttgggcagaaatctgagaatactatctattccgtctcccctgcaatcagccctccatcaattgctgaacagcccaacccatccacttcagaacaaaaagaagattcagtggctcatgacgaaggtggtgtcctaggagctaaaccatcagaaggtgctttaacagttggaggccttttgcctggtaacattgacacaaatgatgcaaacacatgcatgctagctttgccttcttttagcactgctggatttggtgaaggatcaccttgtagtttaggaccacacgagagctttgataactctcatggtttgactttgcaaaattcagttcaagctcctgatcagatgcaacacaactcacttgatggtaaaccagaattaggtgacaaggctgctctacagaactgtatgccatcaaatgcactgcccgatttggatattcagaacactattgcaaatgcgccaacaccagctcaagcagaagaatgccctgactatgaaaaagatgttccaaattactatgatctagaagctttgattcttgaccaggatcttatcccgtgggaccaagactccgattttatgcatcctgaagttaccggatttcctcacccggaaagcaggaaggcattgattagattggagcaaggtgctcggtcttgtatgaacagagctatcatgtcgcatggtgcctttgcagttatctatggattgcacttgagatgctacataaaggatcctgaggttactcttggaagagagacagaagacattaaagttgacattgatttaggaaaagaagggagggcaaataagatatctcgccgacaggcggttatcaagatggatgaatctgggtattttcatattaagaacactggaaaatgtccaatctttgttaatagcaaggaaataccaagctgcaaacgcatcaacctaagctcagactcattaatcgagataaaggacatgaggtttattttccatgtaaaccaagaggctgtgaggcagtacattgatcgtgacctgaagccagaacgctaatttcccctggctttccagtcagcagcagcctgtgagtgactgcctcattaacagcaatagaagtagcatagcagtaaatttgagtaagcattgctcgtttaggatgttccttcatatgatgttaacaagttaggttcacttggctccggtctgtaaatggttgtagtttgttgcgttttctgtctgtttggcgggcataaatcatgcatataaccagcgcatttgcttccagtttgtacctacactcccaggaatgatttcatttgtaatactggcaccctagattgtggtgactgccgccaagagcaagaggcaaccaatgcaatt

SEQ ID NO: 32084 - DNA, 1389 bp, Zea mays
  Clone ID: UC-ZMFLB73260A09_FLI
agcaccctccacttggtgttgcgtctcaggggcggcatgcagatcttcgtgaagactctgactggcaagactatcacccttgaggtcgagtcttctgataccattgacaatgtcaaggccaagatccaggacaaggagggcatccctccggaccagcagcggctcatttttgccggcaagcagctcgaggacgggcgcacgcttgccgactacaacattcagaaggagagcaccctccacttggtgctgcgtctcaggggtggcatgcagatcttcgtgaagacacttactggcaagacgatcacccttgaggtggagtcctcggacaccatcgacaatgtcaaggccaagatccaggacaaggagggcattccaccggaccagcagcggctcatctttgctggcaagcagctggaggatggccgtacccttgcagattacaacatccagaaggagagcaccctccacttggtgctgcgtctcaggggtggcatgcagatcttcgtgaagactcttactggcaagacgatcacccttgaggtggagtcctcagacaccattgacaacgtcaaggccaagatccaggacaaggagggcattccaccggaccagcagcggctgatcttcgccggcaagcagctggaggatggtcgcaccttggctgactacaacatccagaaggagagcaccctccacttggtgctccgcctcaggggtggcatgcagatctttgtgaagacattgactggcaagaccatcaccttggaggtggagtcgtctgacacaatcgataatgtcaaagccaagatccaggacaaggagggcattccaccggaccagcagcgcctgatctttgctggcaagcagctggaggatggccgtaccctcgccgactacaacatccagaaggagagcaccctccacctggtgctccgcttgcgaggtggtatgcagatctttgtgaagaccttgactggcaagaccataaccctggaggttgagagctccgacaccatcgacaacgtgaaggcgaagatccaggacaaagagggcatccccccagaccagcagcgtctgatcttcgccggcaagcagctggaggatggccgcaccctagcagactacaacatccagaaggagagcactctccacctggtgctccgcctccgcggtggtcagtaagccatggttcatttaagctgctgctgtacctgggtatctgcgtcgtctggtgccctctggtgtacctctatatggatgtcgtcgtctaataaacatctgtggtttgtgtgtcatgaatcgtggttgtggcttcgttggtttaatggacctgttgtgtcctctgtgttgtacccaaaactcttctgcagcagtatggcttgaatcctt

SEQ ID NO: 32085 - DNA, 1442 bp, Zea mays
  Clone ID: UC-ZMFLB73260A11_FLI
ccacgagcgtgggctctctctctcctttctcgacgacgactgggccaccgtcgctgccgcctgccgccctacgccaggtgccaagcagccaggtgttcttggggcccttcgccggcgacgagcaccaccagctgaaatatggcgaggataccgtctctgaagagcctcaatgcgtttccacatgcggaagagcacttgttgaagaagacttactctggcgctgttgtgacaatttttgggctacttataatgattacactgtttgtgcatgagctgcagttttatcttaccacctacacggtgcatcagatgtctgtagatctgaaacgaggagaaactctgccaatccatatcaatatgtcatttccttctttgccatgtgaagtattgagtgtggatgcaattgacatgtctgggaaacatgaagttgatttgcatacaaatatttggaagcttcgcttggataagtatggccatataatcggtacagagtacttgtctgacctagttgaaaaggggcatggggcacatcatgatcatgaccatgatcatgaccatcacgatgaacaaaagaagcatgaacaaaccttcaacgaagaagcagaaaaaatgatcaagagtgtgaaacaagcactcggaaatggtgaaggctgccgagtctatgggatgttggatgtgcagagagtggctggtaacttccatatctcagtgcatggtttgaacatttttgttgctgaaaagatttttgaagggtcaaaccatgtgaacgtcagtcatgttatccacgagctgtcatttggcccaaagtatccaggaattcataacccactggatgaaacttcaaggatacttcatgacacaagtggaaccttcaaatactatattaaggttgttccgactgagtacaaatatctgtcaaagaaagtattgccaacaaatcagttttctgtcactgagtattttcttcccatccgtccaactgacagggcctggccagcggtttacttcctgtatgatctgtcaccaattacagtcaccatcaaagaggaaagaaggaacttccttcattttgtaactcgtctatgtgcagttcttggtggcacatttgccatgacaggaatgcttgaccggtggatgtaccagcttatcaagacagtcaccaactcaaagaccagaagtgtactgcggtaattgcacaagtcatgatggatggaaaaccgttggtagtgtggtacccgtggctaatggagcccatagatctttgcccgaagctaactgatcaagccatgttgatttttgcatgttttattttcttcttacatggttaacttataatacgtcgttgttttttttttcatcaactatgttagattaacacagtccacggactacattgttaactatgttggtagtggaactgaaatgccaagccgatcttgatc

SEQ ID NO: 32086 - DNA, 2051 bp, Zea mays
  Clone ID: UC-ZMFLB73260B03_FLI
gcggccctgcctccccatgttcgcatggtcacgcccacggccgcaccaaccaccagccccgatttcctcctcaatcacacccccaaaccaaaacccaaacagcacttctcctgcaatcgccgacgtcgacggaggcttcgccggccggagcagcgccgacggttgttttgcccctccctcgtccggcccagcagcccaggcgagcatgccttcgattgcgccaccgtcttcctccgtcgctgccctcacccgccaaccggtgcaattcttcaaagggtgcagtgtatccaaggagacaaagggaccggtccgcagtttcttcactgcaaattcaaagagcaccacggtgaaatcagcggacttgaaagtagcatcatccttcaaaaatgatggtggttatccagctggcggtgtctcttggaaggacgacactctattgccaaaaagcacaaccattcgtggccaggaccatccggttgctgaccctgtactcccaatggattccatgattacgccagaaatcctctctgctaatgtggaacgtgttatagacatgtttgcagacgatgacactgatactgaacttgatttggatagcccgacagaggacttcacatcaattgcagaagccattgaggacatacagcaaggaaaacttgtgattgttgttgatgatgaatcaagggaaaatgaaggagatctgataatggctgcctccttggttaccccagaggctatggcttttatagtaaggcatgagacaggaattgtttgtgtcagcatgaaagaagatgatctggaaagactgagccttcctttgatggttaccacaaaagaaaatgagaagctatgcactgctttcactgttacagtggatgcaaaagagggcacaactactggggtatctgccaaggacagggcaaaaacagttctgaaacgggctggacacaccgaggcatctgttgaccttgccatgttggctggattacctcctgttgctgtcctttgtgaaattgtggatgatgcagatggttctatggctcgcctaccaaagttgcatgtctttgctgaaaaggagaacttaaagattatatctattgctgacttgattagatgagttgaattaccaaaacttcagcttctggtataggaggaaaagagacaggctaattgaacgcgcttctgttgcacgcttgcctttgaaatggggcaatgtccatgcctattgctacaaatctgttattgatggcattgagcatattggcatgatgaaaggtgatattggtgacagccaagacattttggtgagggtgcactctgagtgcctcacaggcgacatttttggatccgcaagatgtgattgtggcgaccaacttgcgatggcaatggagatgattgagaaggctggaaggggcgtattagtctatctccgtggacatgaaggaaggggtattggtctgggccacaagcttcgtgcttataacttacaggatgatgggcgtgatactgtggaagctaatgaggaacttggtcttcctgtggactcacaggaatacgggattggcgcacagatattgcgggatctaggagtccgttcaatgaagctgatgactaataaccctgcgaaatatagtggtattaagggctacggattgagcattgcgggcagggtgcccttgattacgccaattaccagtgagaaccgtaagtacctagagactaaaagaacaaagatgggacatgtatatggattggccaatgcgcaggccaaccaagcaaataaatggcagccagagcacagaagagaatcattaggcccccaagcatgtttccattattattccagcaatccagcttcgtggcacaaaagagtgatatgattcttcgtttggggagttcctgaaatcttctccccctatatttccgtagattctttcgcaaaaaagccgatatttcggtagatcgatttcttcaattgtaacggtaggttttaaggtggctaatctctactacttattaagttagcaatagtagcctgcctttttgtgttg

SEQ ID NO: 32087 - DNA, 742 bp, Zea mays
  Clone ID: UC-ZMFLB73260B10_FLI
gtcgttttcacctcctccctctctcacggcggcttttctggcgacggcggcggcggcgacgacgagcagccacctggggaagagcaggtagcaggaaatggcggcgttcctgaggtcaaaatgttcaccagttggacgtactttgatgggaagccttggaaatagtttgtttggggctgccaactcttctgttggggcaataacaaggccttctcattgcgatgctatcagtcagcaaatcagaacattcatccagatgaggactaacctgaaggtggtcgataactccggggccaagcgggtgatgtgcatccagtccctgagggggaagaaaggagcaaggctcggggacatgatcatcggatccgtaaaggaggcccagcctcgtggcaaggtcaagaaaggagacgtagtctacggcgtggtcgtccgtgccgccatgaagaaaggacgcagcgatggcagcgaggtccagttcgacgacaacgcggtggtcctcgtgaacaagaagggcgagctgatcggcacccgcgtctttggccccgtcccccacgagctgaggaagaagaagcacctcaagatcctggccctggctgaacacattgtttgaggtgtgtcgcatagccaagtgtttgtgggaatgtttttttttgtgtgttctctgtttgaataatgcattgtgaaacgatagcatggaccgtttgaactattttgatgacattgctcgtccatttggatggcc

SEQ ID NO: 32088 - DNA, 2612 bp, Zea mays
  Clone ID: UC-ZMFLB73260D01_FLI
cttctgtgtaagcagctagaatgtattattctgtaaagaagtcttggtattgctaactcttgctttggactaaaaaggctaggttgttgctgttggattcttggcaatttcaaagcattgatatgtatcaattttaagttccggtgtccagataggtttccgtctgtgtattttgaaggcatgttaattgtttgcaaggaaatgataactcctgtgcatatgccactaaaatgaccacaccaagttactgctgaacaagtcatcaacaaattattaaggaaccttagtgagtttgacttgcctaactgtttttgttctctggatacaggcattagattactgccattcacaaggtattatgcaccgagatgtgaagccccacaatgttatgatagatcatgagcttcggaaactccggctgatagactggggccttgctgaattctatcatcctggcaaggaatataatgtccgtgttgcctccaggtagctgcagatatactagactttcattgttggttcacagttaatgacctttgaattgtggaattctgaagtggtaattagtgaaactataaaatgttttgtcacaatttatatgtttctgcttctgcccttattttggatccaaatttcagttgatctgaactcacatctgtcatttgtggtttgttcatgtagtttgtttattcagcaaccatataaattaagaacattctgataaatagtatttatgttttaactgcactatagccgcctgacgtcacatattaagttgacagaatgaatgaatgcttttctacagtgaatcatatggcttacatcacatgtctctagaacataaatttccatgttttctctctggcagccctctttccctcactattttctttccaaacattttttcaactggaattcaggtacttcaagggtcctgagcttcttgttgacttgcaagattatgattactctctggacatgtggagtctgggctgcatgtttgctggaatgatttttcgtaaggagccatttttttacggtcatgacaaccatgatcaacttgttaagatagccaaggttgacattcagtctatttgttctttgcaatgaactagtcaactagctatgttgtttacatttcccatgtcatgtagccagagatttcatttctgtcaagtgcgatctcattagcttgcagtcagaaacgaacagtttgcatccctctcggaacttatgctctggacaaatttagttttttatctttagtaagagctttgcacatgtactagatgctatgttgttggctacatatgctgttattataccgtgcatgacgtgagaccatttagatctattaaatgcctctctgttagttattgctacatccatttattatcaggtacttggaacagatgggctgaatgtctatttgaacaagtacagaattgagcttgaccctcagctcgaagcccttgttggaaggcatagcaggaaaccctggacaaagtttattaatgcagacaaccaacacctagtgtctcatgaggccatagatttcctcgacaagcttttgcgttatgatcatcaggacaggcttactgcacgtgaagctatggtaagtttccctgtgcttaattttggtggcatgtaatttggcagcgcaaagtacactggcttttctcactattgctaaatatttggcgtaaagtatactcctagattttactagtgggtatctctatctctgaaaaaaaggtaactcgagtcaccatatcctgattgttgtgcatgctgttctgtttaagcaacgtttcagaagtagagtttttttttttaataaaaaaatctatgatgaaaggttttagattgtacttatttggaggtctagattgcaatgccttgccttaggccccgtttggtttgagggactaaagattagtccctccattttagtctcatttagttcctaaattaccaaacggtaggactaaaacatggactaaactgctttagtccctaatccctcaagatgtggctaaaagggactaaactatattaattctatatttgccactcatttagttcaattgtactaatagcatgtgaatgttaaaggccattttagtccctataaccaaacatgttatggactaaactttagtcccctaactaaactttagtccttagactaaagaaaccaaacatgaccttattctcttgacgcttttatattcttgcagacacacccatacttccaacaagtgagggctgcagagaacagcaggacgcgggcatgagaggccaaagaccaaagaggcaaagactggtgctaaccgtggatcagatcatctgctcttggtggagccatgctcttaccagtgatgaatagtggtttgggggtttacttggcaaaaacaaacagtagctatggcgcctgttgtacccttaaccgcgtcgagacgtgactgaattactcaggtcatcggcttgtgggacgtgattgcgaacgagattattcatgtaagatgtttgtcataaaaggtcgtcgttggctgattgtgctgtttgtattgttgagctagtaaagaatatccaaaatttgtttggacttc

SEQ ID NO: 32089 - DNA, 960 bp, Zea mays
  Clone ID: UC-ZMFLB73260D10_FLI
atgacgccgaactcgaaggcggcggcgccaccggcgacgtttcgcctcgtgaacttcatctccgaagaccagcttgacgaggtgaagcggacacgaggggagcgtgtggaggacggcaccgcgcagcgcgacaaacccctcttccagatcctacaggagaacaaggagaagaaggacgccgagttcaatgagcgtttcaagcacagacctccaaaggctttggatgaggatgagacagagtttcttgataaattggctttgtcaagaaaggaatatgaacagcaggtggccaatgaagaagcagaacagctccgcggtttccatgaggctgtagctgcacggtccaccgttgttcatgaactcgagactcctacagtatctagacctgaggagagcagacctaagccacctacaaagaggagccagcctgcgctcctgaagaacataataatttccgtgaagccgcatgccaagaaaccaaaggttgagacggaagctaaacctgctcccgaggagcggcggccttcagataggcacggctcagatcagaagcaaccagacgacacaaaggcaacgcttggctctctagtggcttatgacgacgacgacgacgaaagtggtgaggacgttgactgacagtggcggcgtttgagaattcagctgtggataacccgcaagatgatggataactgcgttcgagtgttcaggtatggatatggataccgcaagaggttactgggagagatgctgcagccttttgggttttcctcgaggagaggcacttctattgcattctaaaaatcggaagcctttacagaaattttcttgtatgtattgtacaatttgaaaacgagccgggaacattactaatggttggtacgtacgttggtaccacgttgtttgacgaaggaactctgtagatagttgttgtagtttatctgatgagcgcattttgctttc

SEQ ID NO: 32090 - DNA, 1719 bp, Zea mays
  Clone ID: UC-ZMFLB73260E01_FLI
cgctgctgcgtgcctgcggggacactccatctcctcctccagacctccacgatccggcctcccccacctctcgccggccgaggacgatccgccggcatcagagcgcgcgccccggagccgaaaagcggggggcgtcatgaagcccccggccggcgccagcggcaagggcggcgcggtggacccctctctgccgcggttcaggtgccaggagtgccgccgcgccctcgtcgtcgtcggggtcgagtcctacgccgacagactgcccgcacacgccgcgcccggtaatcatgcatcttctgttcagggcagtgttatgggtgcaagcaagatggacaactcttatgttgtgctatctagacagaacaaatctcagggtcctagaattcctccacgcccaccaagtgcagcagcggcacatgctgatcccagccaatcaacaagagcgatagaggggtcatatatagtgcttccacctcctgccgcttccatatacaggacatctgcctctgaaggtggtgcacagctcacaccatcaggtgtaatctccagtagcccctcgctgggaaacaattctgggtttcactctagtgttactgtgctgaaaagggcctttgagattgctagctcgcaaactcaggttgaacagccactttgtctggaatgtatgagggttctttctgataagatggataaggagattgaagatgttaatgctgatattaaagcttatgaggcttgtcttcaacgtttggagcaggaaccttacaacatcctcagtgaaacagattttcaaaaggagaaacaaaagattgaggaagaggaaaagaaacttaaagctgctattgaagaagctgaaaaacaatattcagaagttagatctgagatggaaaatcttgaaataaagtctaaacaatttgaggaattggaagagcggtattggcatgaattcaacagttttcagtttcagttgacatctcaccaggaagaaagagatgcagtttttgccaagatagaagtttctcaggttcatttggaactgttgaagcgtactaatgttctcaatgatgcattctatatatcacatgatggagtaatcggaacaataaataactttcgcctaggacgtctttctaatgtagaggttgagtgggatgagataaatgctgcatggggtcaggctgcactgctgttgcataccatggctcagtatttcaccccaaaattccaataccggatcaagattcaccctatgggaagctatccaagagtcacagacatccagaataacacatatgaactgtttggtcccgtgaatttgttctggagcacccgatttgacaaagccatgacatggtttcttacttgcctgcaagagtttgctgagtttgccataagtttggataagcagaacaatgttccccctgaaaaatcactgaagcttccctacaagattgatggtgacaaagtagggagccacacgatcgtccttagtttcaataagaatgaaaactggaccaaggctctaaagtacatgctgtgcaatctgaagtgggttctctactggtttattggcaatacaagttttgcaccaccctctgtatcactgcacacacaatctctgaagaacaagagttgatgctgttctctctctgcaacaactgtacatagtttgtgtactcgaccctattcgttggatatagccgcagtgacaataatgac

SEQ ID NO: 32091 - DNA, 1116 bp, Zea mays
  Clone ID: UC-ZMFLB73260E03_FLI
cacaccgcacctagccacctaccctgctgtcccccgtgccgtcgccgatggagtccttgggcgtgctgctgctccaccccttcaacgcgtacctggagcaggagctggaccgccgcttccgcctgtaccgcttctgggagacgccccgcgaggagttcctccgcgcgcacgcgggcgccgtgcgcgccgtcgtcggcaacgccagctacggcgccgacgccgcgctcatcgacgcgctcccggcgctcgagatcgttgcctccttctccgtcggcatcgaccgcgtcgacctcgccaagtgccgcgaccgcgggatccgggtcaccaacacccccgacgtcctcaccgacgacgtcgccgacctcgccgtagggctcgccatcgccgtgctccgcaggatcccgcaggccgaccgatacgtccgcgcggggctctggaagtccaggggagactacaccctaaccacgcggttcagcggcaagcgggtgggcatcatcgggctgggcaggatagggcaggcggtggcgaagcgagtggaggcgttcgactgcccggtgagctaccaccagcggacggagcagcgggcgacgtacccgagctacacctactacccgtcggtggtggagctggcggcgaacagcgacgtgctggtggtggcgtgcccgctgaacgcgcagacgcgccacatcgtgagccgcgaggtgatggaagcgctaggccccagcggcgtgctgatcaacgtcggccgtgggccacacgtggacgagcgcgagatggtggcggcgctggcggacgggcggctcggcggcgccgggctggacgtgttcgaggacgagcctaacgtgcccgaggcgcttctggggatggacaacgtcgtgctgctgccccacgtcggcagcggcaccaacgagacgcgcaaggccatggccgacctcgtgctcgggaacctggaggcgcacgtgctcagcaagccgctgctgactccggttgtctgacgtttccttgtttctattacgaaataacaagcgcctgcgcctgacagcgagtggggattaaattcaaaatgttttgttttgatttgatcgccgctggtgaatggaactgaaatgtgctgtc

SEQ ID NO: 32092 - DNA, 1990 bp, Zea mays
  Clone ID: UC-ZMFLB73260G04_FLI
cgaacgctcacagctcacagctcacgcacccatccacctccaaagtccaaaagcggaacccacgcctgccgcaacggcgaaaccgtcggaaccctagatctctctcgcccgcgctccgaaaccccagatccgccatgcaccagcctagagctcgctacccacccggctatggctccggcggtggaggcggagccggacgtggcggtggaggcggaaatggaggaggtggcggaaaccacaactactacggccgaaacccgcagcaacaccactaccaccagcagcagcagtcgcagcactctcataggaactcttcgtaccagcaacagtggctgcggcgagaccaggcccccgccgttgcgggggcagcgtccggaaacgctgtggccaagacggcgtctcagcttgacgccgtaggctcgagctcccaagactggaaggctcaactaaatataccagctccagatacacgctacaggacagaggatgtcactgcaacaaaaggcaatgagtttgaagattatttcttgaaacgtgaactgcttatgggaatctacgaaaagggatttgaaagaccatctcctattcaagaagaaagcattcctattgcgctgactggaagtgatattcttgcaagggcaaaaaatggcactggaaagactgctgccttttgcattccggcacttgaaaaaattgatcctgaaaaaaatgctattcaagttgttatactagtaccaacaagggaactggctctgcaaacttcgcaagtctgtaaagagctcgggaagtaccttaacattcaagttatggttagcactggaggaactagcttgaaggatgacatcatgcgtttataccaacctgttcatttacttgttgggactcctggccgaatacttgatcttaccaggaagggcatttgtgtgttgaaagactgttcaatgcttgtcatggatgaggcagacaagctattagctccagagttccagccttctgtggaggcacttattcatttccttccacctagtcggcagctgttgatgttttcagcaacctttcctgtaactgtcaaggaattcaaagataaatatctgcctagaccttatgtgattaatctaatggatgaactgaccctgaaaggaatcacacaatattatgcttttgtcgaagaaaggcaaaaagttcattgcctgaatacacttttctcaaagcttcaaattaatcaatccattatattctgcaactctgttaatagagttgagctactggctaagaaaataactgaactcggttattcatgcttctacattcatgctaagatgttgcaagaccacagaaaccgagtgtttcatgattttcgtaatggtgcttgcagaaaccttgtgtgcacagatctgtttaccagaggaattgatatccaggctgttaatgtggtcattaattttgacttccctaagacatctgagacatacttacacagggttggccgttctgggagatatggacaccttggtttggcagtgaacttgatcacttatgaagaccgtttcaacttatataggattgagcaagaacttggaacggaaattaagacaatacccccacagattgacctgtccatatactgccaatgatatgtgacagtttcaatgagcatcggacacattttatttattttgagaacatctgtacatagcaacccatcaagtgagttctccaactaaggcgcaactatttcagaagctacctaaatggctacattcctttgtcgtcacacatcaatttctcccccattctcgtcgggttttgttttaatgccttgatgtcgtttgtaagcttacttggattagtagaggaagtgtttcctgtaggctctgatctggtactaacctgtttagctgaggacatgcacattgggtgggctgcttggggcccaaaactatgatgagatgagacattatcttacctcgcttgacattttcaatttaac

SEQ ID NO: 32093 - DNA, 891 bp, Zea mays
  Clone ID: UC-ZMFLB73260G05_FLI
atcgtcgggatcggcaggctgacgaaagggcagtactggatccccaccccgtcgcagatcctcattgggcccacccagttctcctgccccgtctgctacaagaccttcaaccgatacaacaacatgcagatgcacatgtggggccacgggtcgcagtaccgcaagggcccggagtcgctgcggggcacgcagccgacggcgatgctgcggctgccgtgctactgctgcgcggcgggctgccggaacaacatcgaccacccgcgggcgcgcccgctcaaggacttccgcacgctgcagacgcactaccgccgcaggcacggcatcaagcccttcatgtgccgcaagtgcggcaagcccttcgccgtgcgcggcgactggcgcacccacgagaagaactgcggcaggctctggtactgcgcctgcggctccgacttcaagcacaagcgctccctcaaggaccacatccgggcgttcggccgcggccacgccgcctgcggcgtcgacgactgcttcgacgacgacgacgaccgcgacgacccgtcgtcatccgaggtcgaccacgcagccaccaacactactagtaacagcaccactactaccgctgccgccgccaatgctcaccaccatcaccacaccagctggaagccgccgccgccgccactgtcgtcgtcgagcagaggctccggcgacgaccgactactatagatcgacaagggtgagtacgtacggtcctactacatacatcctacacagcaaccagtcgatctgtagccaaatgcaaacgtatgcttgtgtgcgtgtgtgtataaccatgcatatcatccatctgtccgtgtcttactcagtgtttaaaatagcgggctaaggcatttatcctcggccttttttaac

SEQ ID NO: 32094 - DNA, 1028 bp, Zea mays
  Clone ID: UC-ZMFLB73260G08_FLI
acccaaactgccatgcatgagaatagatagacagaaagaacaggaaccaaccaacacaagacacaacaagctgcagcagcggcaggcatggggcaccgcgccactgacaccgggccccaccaccattaccacccgacgcacactttatttagcccacgtcactcgcagcccgcaccggacacgtccacgcgacagtcactgctagctacgtaccgggctacgtacgagacacacacacacacagagagagacgccaataataaccgtagcgtactgaacagcaaaatcccgtgtcatactgccatgtacgcgcgcgagcgactaccccgccacgcgcgcacgccgatcccctgggccctggccgccgccgctgcgtgcgcacggcctcactcgctggccttctcgggctcctcaggagcagcaacctcctccgcctcggcggccggctcctggggaccagcaggagcaggagcctccggctcgtccgcggcgagctcctcgggagcagcagcctctgcctcggcgaccggctcggccgcggcgggctcctcggcaccagcaggaggagcagcagcagcctcctcctcggcggctgcctcctgctcggccgcgggagtctcctcgggaccagcaggagcagcagcctcagcctcggcggccggatcggccgccgcgggctcctcggcaccagcaggagcagcggcctcgggctcggcggctgcctgctgctcggccgcgggaagctcctcgggatcagcaggagcagcagcctcagcctcggcctcggcctcggcctcggcgggggcagactcctcgggcacgacggccggcggcggggtctccaccacgggcgcttcctcggccgccacgacggtcggggtctggacctcggcagtggccattggtggcgatgagaaggctgatggctacacgaaggagtggcgcggctagctagagcctagagctaagagcctaagactgagtgaagggtggagctgcaagagtgagcgaccagctgagagtgagac

SEQ ID NO: 32095 - DNA, 1810 bp, Zea mays
  Clone ID: UC-ZMFLB73260H04_FLI
gtccaattatatttcagagaacgaaagcaacatgttttgcttatggccaaacaggtagtggcaagacgtacacaatgcaacctttgcctctgagagctgcacaagacatggttcgtctattgcaccaacctgtctatcggaatcagaattttaagttgtggcttagctattttgaaatatatggtgggaaactatttgatcttctatctgacagaaggcaactactgatgagggaagatggcaagaaacaagtttgcattgttggtctacaggaatttgaggtgtctgatgtacagatcgtaaaggaatatattgaaagaggaaatgcagctagaagcacagggtcaacaggggccaatgaggaatcatcaaggtcacatgctattctacaactggctgtgaagaagcatatcattgtaaaagataccaggagacagagagatcgtgatgctaatgaagctaaaaatacaaaggctgtggggaaaatatcatttattgaccttgctggaagtgagcgtggtgctgatactaccgataatgatagacaaacaaggattgagggagcagagataaataaaagtctgttagctctcaaggaatgcattcgagcacttgataatgatcagatacacattcctttcagaggaagcaagcttactgaggtccttcgtgactcatttgttggtaactctaggacagtgatgatttcttgcatttctccaaacgcaggttcatgtgaacacacactaaatacattgagatacgctgatagggtcaaaagtctttccaagggcggaaatacaagaaaagagcagtccacaggaccaactaccacttctagccgggattctttgtcagctttatcatattcattgcctgctgaagctgaagaaattcctaatcaagttcaagagaagagaccagtcgatacttataggaagggcactgaaaattttatctccaacccttctgtggagtctgaccgaaattcctttagtacgattccaaattattccaatagagggagagaagaaaatggtgcagcatctggtaatgacagggagagctatgatttgaagtccagccaacctgcttacactagtaagccacagttggttcagaattcagcaaacacacaggaggaggagaaagtcacaaaagtctcacctcctcggagaaaggcttatagagaagacaaatctgataggcagagcaactatatgaaaaaggataatggtcctgagacaagtcgggttgggtataagatgcagcaggcaaagcagctgcaacagcaacaaagaccagcatctgcttcagcctcatcaaggcaatctgaaaaggaaagttcttgtgatgatgtagaaattgatgcaattcttgaggaagaggaggccctcattgcagttcacaggaaggagatcgagaatactatggagattgtgcgggaagagatgaaccttttggcagaggttgatcaaccaggcagcctgattgacaactacgtgacacaactgagctttctgctgtcacgcaaggctgcaggtttggtaagcctccaatcacacttggcacggtttcagcaccgcctcaaagagcaagagatccttagccgcaagaaaccttccagatagtatgctcaacaatggctctggattttgcctggaaatcttattgcttggagctcaatcgcagtctattagttggttttctcctgtgcgctccagtaaatgttagacccaagcaaagcagtgatagagaggacacatgggagttgcttgagggtgtggtgatcttgatgttgaggatggtg

SEQ ID NO: 32096 - DNA, 1011 bp, Zea mays
  Clone ID: UC-ZMFLB73261C12_FLI
ctgcaaatggcgactttcaaagtttactctcttcggttaagaagacaattcattggagggaaacatttcacatacttacattgcaagaacttgatagatggtctcacttagtcttttggcatgggtttgacacgatgcttcggccttgtttagtagttcgtcttggacttgcatgctctagcatacctcctcatgatagaccccgtttcgggcaagcagtagtttctcaaattgaccatggcgttgtaaatttgatcaatgaagaagattcaaggattaccgttttactggattgccatgggatttcgccattcagatttccaatgcaaatgatgaggtcgttcatcactgtggttcaagaaaactacccgaatcgtcttggggtattgtttgtcatccgtcttcctccagttgtcagagttattgcacagacatttcttcaagtcttgaaaccagctacaaagcagaagttgcgttttgagggagattcgtacaagaaggcattggcggagttcctgcaggctgtgccagcgtttctgggcggtaaatgcagctgcccgcgatgtgagagtcctcgtgatgattcagtgatacaggcaggggaagggagcaagaagcagccccgcttggtcagcgttgatgacgggttacctgtcacagacttggacttcgacttggatgaagagatcccatcaccttatagctgcgagaacgccatcagggctgcgataatcggcctgctgatggtgtgcatcttcgtcgcgtttctggctgggatgatcgaccctgcatccgttccagccagtgcctgagagcttgtggaatagagcatgcacgtacatgtgttgctaattaggatgcagggtgctgtatttcttggcaggcttcttgtatgttgtcgtcagaccgccatagagcgctttctcccagtgtgagcgagcgcatgaataatatatatcctctgtgtcaaatgttggttagcagttcaattcgggcctactagatttcact

SEQ ID NO: 32097 - DNA, 1009 bp, Zea mays
  Clone ID: UC-ZMFLB73261D03_FLI
aaggattgttgttgctggcgctggcagtgctggtattggagtggtgaatgctgcaagcagaaccatggcaagaatgttgggaaacaatgacgttgcttttgagagtgcgaggagtcaattctggatagtggatgcccatggcctaataacagaagaccgagaagatatcgatccagatgcacggccttttgctagaagaaagagtgagcttggtcaccagggcctaagtgagggggcaagcttagttgaagtggttaaaaaggtgaagcctgatgtcatacttggattatctgctgttggtggtttgttctcgaaggaggttctagaggcactaaaagattcgtcctcgtcaaggccagcaatttttgcaatgtccaatccaactaagaatgctgagtgtacacctggggaagcattttcaattctaggtgaaaaggtcatctttgctagtgggagcccatttcatgatgtggatcttggtgatgggaagattggccattccaatcaagggaacaacatgtacctctttcctggaatagggcttggaacccttctgtctggtgctcgggttatctctgatggaatgctgcaggctgcagctgaacgtttggcttcatacatgaaagaggaggaggttctcgaagggataatttatcctccaatttccagaatacgtgacatcactaaggaggtggcagcagcagttgtgagggaggcagtagcagaggatctagctgagggataccgtgacatggatgcacgtgagcttgcacgactcagtgaggaagaaactaatgaatatgtcaagacgaacatgtggagtcctgtctatccaacaataatatacaagaaggactagatagctctatttgctattttgcatatgttcaatgatcatgtatgatatactttaggctgcgttctggaaggcactccagaagtgtaggcacgttagttataagaaaacagccttcattgttcattgaccttacttttaattgaatttagt

SEQ ID NO: 32098 - DNA, 654 bp, Zea mays
  Clone ID: UC-ZMFLB73261G03_FLI
ggcagcacctcggcgcctcccgcgtgctggtcaccgtgtcggggcaggaccgcctcagcccctggcagcgcgggtactacgccgcgctccagggcagcggctggcccggcgaggccgagctgtacgagacccccggcgagggccacgtctacttcctcaccaagcttggctcgccgcaggcgctcgccgagatggccaagctcgtcgccttcattaaccgcgactagcagccgccggagtaaatccggtacatgcaggccgctgcagtgccgcgacaacatcagcatacctatagtaactagcgagagcgaggtgattggtagtggtaattacatttttttttgggtccttgatgatgattactgtgcgtcggaagaaaagaacggttcctctctccagaaacctcgtccggacggataggaggggaccggtgtgttcgcttgcgcggcgttgcgtgtcattgactgcagtctacaggctaccgtgccgtgcactgttaactgcgtgtagcgcggtactgccagactgccagttacagtagtcttcagagtataatattttttagtatagaagcgtcactctactaccgacccaatgcatcgtgtaacttttgtgggactagtgctatatggtggtgattttgtcggagtggtc

SEQ ID NO: 32099 - DNA, 756 bp, Zea mays
  Clone ID: UC-ZMFLB73261G06_FLI
gttcagcggaaactgagccgtgagcaccgccgccgccaccacctttgcgtttgcggtgacgacacgacaccaataatggcggcggcaaggacaaggagcctgctcgcggcggcgttcctggcgctggcggcggtgccggcggtgctctgccaggcgccaggccccgcggcggcggcgccgcccaacaagggcccgccgaacgttacggcgatcctggagaagggcgggcagtacacgacgttcatgcggctgatgaagtcgacgcagcaggacacgcagctgaacggccagctgaacaactcgttcggcagcgggtacacggtgttcgcgcccaccgacagcgccttctccagcctcaagcccggcacgctgaacaagctgtcgcagcaggagcaggtgtcgctggtgcagtaccacgtcctgccgcagttctactcgctcgactccttcgagaccgccagcaaccccgtgcgtacgcaggcgtcgggctccgacgggccctacacgctcaacatcaccgccgacagcagcggccaggccaacgtgtccacgggcctcgtcgccacccgcgtcggccaggccctgcgcgcgcagcagcccctcgccgtctactccgtcgaccaggtgctgctggccaacgacctgttcggcgtcaagcccccggcgtccgcgccgcccgccgccaggaagccggccaagggcgggtccgtcgccgaggcgcccgccgccggctcggctgacgcgccgccctccggc

SEQ ID NO: 32100 - DNA, 928 bp, Zea mays
  Clone ID: UC-ZMFLB73261H04_FLI
tacctactacagcttggctacagttttgataaactacacacacatggacagcagtcagcagcagcagaaacaagacgacgtcgacgtcgacgtaatggaggtcccggaggtccacggcgacctcctcatggagctcctggacgcgtccctcgccgccgagaacgctgcccaccaccaccaccaccaccaccaccaccaacagcttggtctagcgcccgacggcgacggcgacggcgactgttggatcgacgacaaccaagagaactacgacaatatgcacgcgcaccagggctgcgaggactgccgcggcctcctcgacggcatactgtccgacttcgacgactacgacgggggcccatcacggccgaggtccccgccggcgccgtaccgcgtcgtcttcggccacgacgacgacaccctgctggagctggagtgggcggaggaggccgccatggacccgttcgccaccagcgagtccgcggggggctggtacatggacggcctggtcatggccatggcgtgggacgagcagcaggacggcggcggcttcccgttcgagccctgctacggatacgaaggggaggcgggcgccgccgggcagctctatgatgccagcccgctgtgggagtgagagtgaagtagtgtacccggttacgtcgtcgatcacacgtgtccgcgtcgtctgggccgtgccgcgctgccgcgccggcctaactactcctccgtactttacttttgcgccgcttttgcaaatttttttgaggatatgaatttgctgaagagaactggacttgtgtgcctcttgtgctcattagtgttgtgtggctcagattatcagaagcattctagtttttgttctttgttttattttttttgtttgaaagctttgtgctaaatgaagtgcattgtctacattcaggtttgcttt

SEQ ID NO: 32101 - DNA, 1164 bp, Zea mays
  Clone ID: UC-ZMFLB73262A01_FLI
ttaaattagttcatttttccttgagaaaatggagtttctaaactagttcttatctttttttcccagttttatccttagagggcagatgctgctgcagctcaagatagccacacacacagacagtgacacacttaagagctcgagatctcactctcctcacctcagctctcagagaggaaggacactgcggccgggcgatggcgagcgtggagggcaagagggagacggtgctggtcaccggcgccagcggcttcatcggatcgaccctcgtcggcctcctcctcgaccgcggctacaacgtccacgccagcgtcctcaaccccgatgacaaggcggagacggagcacctggtcgccctgggcgccggcgccggcgagggccggctgcgagtcttcccgggcgacctcctcgacggcgccgcgctcatggccgccgcgcggggctgctcgggcgtgttccacctcgccaccccctgcaccgtctaccccgtgagcgacccgcaggggcagatggtggtgccggcggtggagggcacgctcaacgtcctgcgcgccgccaaggaggcccgcaccgtgcggcgggtggtggtcacctcgtccagctccgccatcatacccagccccgcgtggcccgccggcgagccccgcgacgagcggtgctgggccgacgtcgactactgcaagaagaacgaggtctggtaccctgtttccaagacgctggcagagaaggcggcgtggaggtttgcggaggagaacggggtagacgtggttgtcgtcaacccggtgactgccatgggcccaatgattccgcccaccatcaactgcagcatgatcgtgctcctacgcctgctacaaggctgtccgggattcttccgtcctaatggggaatgggtcacatgcttctgttcatggcattggcacggtggatctgaagtttacttcgggaaagatcgtgtagctgaagaacgtgcatcatgtcccttctatacacaagaatctcgttagcggaacccttctgtgtagacatgggttcaaggtagttttggagtccaataaattagttgtgtctaagtctggacaatttattggtaaaggctatgattgcggaggcttgttccgcttttctctgttagattttaataataagtctgtgaaccaaaaaaac

SEQ ID NO: 32102 - DNA, 1689 bp, Zea mays
  Clone ID: UC-ZMFLB73262D11_FLI
gctttttttatgtatggttacattttttcttgagcgctagtggtctcatgttgacgtaacgttgtttgattctagttatatttgtacaaattaggataggtatcctgcattttcactttgtggtcattattagcgctttactttttattattgatccgtaatgaacacagcaaccggacactgttagaaccattacagtttatcctgtatttagtcaactttgaaactgtgctcaagccctccattacctgggatctgggaaactcttctgttatgagaatgtttggttcaatctctgatgaaagacgatggatgcattacatttgaataaccgagtgatttcagagaaaatacatgttctatcaatagagaaggacagcttttgttttttgagaccagagagggccaatcttggcttcatatgtgaacaaggtgttttgttttctgctcgaaaaggtttgttttaccctcgtaagttgtaaggtttatattattcaaactgcagtcacatattgggttcttttatactcttggtaggctgcaagcttcctttgatttagcttagtacggagttgatcgagtgatctctcctgtcatgttgggtgcttttattcttgttcatttgctacgttatcttgaaagttcctgggaggcagctgaggcatgcactattcctcaaatttgcagtactgtgtcttccacatgtgttagttatgtatcctagatcaatgggtctttgttctctaaaccttttacttattttgtttgcaggaaccccagccgattgattgggagtactacagaaaaggaattggatcaaaagtggtggatatgtacaaagaggcttttgaaagcatcgagatcccgaagtacgtcgacacagttactccccagtacaagccaaagtttgatgctgtggtcagcagctgttgctctcacacttttgtattttaaagtttattgcctgaaaatctattctgttttttgtgttttctatcttgagttgctctaccaacatttcctagatgagtgcatccaattttttagttcccgtattaactccttaccttattgctgatgtgcttctttttggttcttatatttatgttacctgtagattgctgaattaaaggaggctgagaaagagcatcagaaggagtcagaaaggatagagaaggaacttgctgaaatggaggaaatgagggtaggggatattcttcagtgttcatataattccatttccagaatcattagcatttatcgtcatttttaaagacaccataccctttcgctttaatatcttgtttatgtgtacagaaaaagatcagtacaatgacagcagatgattactttgagaagtaccctgaactcaggaagaagtttgacgatgaaatccgtaacgataactggggatattgaagagattggagagaactcttatgatgccatttccatgtccgtgaagaaccaataattttcctgtgccctgaattgggtggtttccatagcatgtgcacggggtttgggtggaatgcctacagaatcgactgtgtcaagctttcttgattccgtagaaacatgttttgtttgacctcatcatagaggatctccgcttttatcgtacaaagattgtgatatgttcttagcttctttctacctgaataagaggatttctgcagacccttttcc

SEQ ID NO: 32103 - DNA, 1653 bp, Zea mays
  Clone ID: UC-ZMFLB73262F04_FLI
gtgcagagctgtctagaacctgccgaaacaatctggagtaatatattaattgtgcagcgtgccaatctaatatgagttatgttctttttggtgttcctttcaagggaaacgctcggcggcgaagctaaagcagagcttgcgctacacgcgctgcgagcagtttctgtctaaagggcaaggtctgatctcatatttgagctccccgtggcactgctcgcccggccagccaccatcccggtcttgcgctcggcggcgtgcatggtgtgctcgtccctgacagtggctagcttctgttttcttaattgatggctagcttctgttttcttaattgatgatttgttttttccttttctgatcgtcaatagggaagagacgacgataacatggacactgttttctaaatggatcagtatttttggtatatacacatgcttttactagtagaggagtatttattttcatttgtagcagccaaggaacttgtgcattccttatgaatcatgagaagaccatgaagatgcacacaaatttgcttgacttctgaccagtaataattagcgaaagaaagaaaatccagaaccatgaatcagcttgatagcagtaacaaatttgcttgacttctgacgagtaagaaattggcagcaagttcagcaggggccagactaataaatcagcttgatagcatccttgcagcggtgccttggactttggcggttagaagaggtttataattttatatgatgaaattatgtgcatcttcagttgtttttgcctcactgctctgtaaggacatataaaattggtatttgtactttctaaggttctccttggaatggtagagttttacagggaaccttccatcatcagttgctgacatagctcgaactcgacgtttcttcttcgccagttgcggctctggataaactcgaagctgacctatccaagttcgacgacgggcccttcttcctaggccaattcagcttggcggatgtagcgtacattacgattctggaaagggttcagatatactattcccatcttaggaactacgacatcgccgaaggcaggcccaacctccaggaattcatcgaggagatgaacaagattgaagcgtatgcgcagaccaagaacgatcctctgttcttgcttgatcttgccaagaaccatcttaagattgcctgaagatgtgacaaagcagcattagtccgttgatcggtggaagaccactcgtcagtgttgagttgaatgtttgatcaataaaatacggcatgttgttgctgactttggacttgcaaagttcactactgataataacacccatgtttcaacaagagtaatgggtacttttgggtatttggcacctgagtatgcagcatctggcaagctcacagaaaaatccgatgtattttctttcggagtcatgcttcttgagcttattactgggcggcgaccaattgacacaacccaattggcactgcttgttataagcacatatgtacttccatttgcatgttgtataatactaataccaattgcaaaattatagttattttttctacccttgttagttaataagcatatttgtggtcaataggttgtattcttattcttgtaaccgtgttaattaatgttatggacttgtagtcttgtatt

SEQ ID NO: 32104 - DNA, 996 bp, Zea mays
  Clone ID: UC-ZMFLB73262G02_FLI
caggaggtggcctgacagtcatggaggagccctcgtcatgagcgggtaagtattggcatctttctctggcatcccagagctgggtcgaagtaagacaggagccaaatcagcccttgaggtgtccttatggggcgagcgtaacccagccatctccagcgacctatcaaacatatactgctggggcgaaggcggtctaggtgagcccaatggcccaatagaccgcgggtcttcaactaagttgtcctaatggggtgagctcagcctagccatctccagcggcccatcaaaagatatgagctgaggtgaaggtggtctggttgagcctagcggcccaaaatgtctcggatcttcgatcagggtgtcctgatggggcgagcttagcttagccatctccaacggcccagcaaaagaaacatgctggggcaaaggtggcctggttgagcccagcgtcccattctgcagtgcagaggttttcgagtcaggttggcctgatggcacgagctcgccatagtcccctccaggctccagcggcccagcaaataagctatgctggggcgaaggtaacttgggcaagtccagcggcccatcaagatcttcagaaatcgcccctcactctgtgcaagtatccataggcctaactgaatgctcctcgtgtatgcagcatgtctccttgtcttctaaagcttgtggtggcgtcaaccccacatccctagtcgcattcatgacacgctcgtggcctgaaggctgttgccgtcccagtcgatgctggataggctaccgagaatcctcggtcatgtccggacgtcgaggatggaagtcctagttaccgacttaccgcggtcctctccttcatcaggcctcttgctagtcgccaaggaggggagaggtggagcatctaagactgttgagtgtaaattcattggagttgctctaatggagatcttatatgtcaaacatctcttctcatgagtggctaaccccgattcaatggtatgc

SEQ ID NO: 32105 - DNA, 1325 bp, Zea mays
  Clone ID: UC-ZMFLB73262H01_FLI
ctcaaaagagcggcgtagcatcattccagctggtgatacgtctcagttcataccgtcaagagaagctgatatagcaatattggaagaaccagaacatctcaattggtatcatcatgggaaacgctggactgacaagttcaaccatgttgttggtgtagttcatacaaactacctggaatatatcaagagagagaagaatggagctcttcaggcctttctagttaaacacatcaacaattgggtgaccagagcatactgtgacaaggtcttacgtctttctgcagcaactcaagatttaccaaagtctattgtttgcaatgttcatggtgttaacccaaagttcctgaagattggagaagaaataactgccaatagggggagtggggagcctccattttccaagggagcatattttcttgggaagatggtttgggccaaaggttatagggaactcatagatttgatggctaaacataaaagcgacttagaaggattcaagttagatgtatacggaagtggtgaggactcgcaagaagttcaatccactgccaggaggttagatttgagtctcaattttttcaagggaagggatcatgctgataattcactccatgggtacaaggttttcataaatccgagcattagtgatgtcctgtgcacagcaacggcagaggctcttgcaatggggaaattcgtgatctgcgcagaacatccatcaaatgagtttttcatgtcatttccgaactgtttgacatacaagacttcagaggagtttgttgcgagagtgaaagaggcaatggatagagaaccccaaccgctaacccctgagcaaagatacaacctttcgtgggaggcagcgactgagagattcatggagtactcagaccttgacaaggttctgaacaatgaggctgctcagcctggacaaggtaggaaaagaaagaataaaagaacctcacagcctaatttgtccgacataatggatggcggtctagcgttggcccatcgatgcttaactggcaatgaggttctcaggctggcaaccggagccattcctggtacccgggactacgataagcagcactgtgtggatatgggtctcttgcctcctcaagtacagcaccctgtatatggctggtgatatggccggtgatgactgatgagcacccaaagctaatcgtaggtatatatgtacataatacaccatgtcgcccttatgtcgaccaatgtttggagtattgtaattgtagcatgcatgacgacctttgcccattgttttgtactctgtaataaggttctctccttaaattggagttttatcgcag

SEQ ID NO: 32106 - DNA, 1688 bp, Zea mays
  Clone ID: UC-ZMFLB73262H05_FLI
gtcgccgtctcctccacccctcacctccttctctcaaccagaacaaccaagtgaaaccgcgcaaacccttgctccgatccccctctcctcggtctcctcgacggaagtagtagagcaggggccgaggccatgtggcccggctgcggtgggcggttctactgggcgccggaatcggcgccgccggggcaagcgaggggtgtcgcggtcttgttcgcgtgggtgtggagcgacgaggcgcagctgcggccgttcgttgagctgtactcctcgctcgggtggcgctgcctcgtctgccaccccgacctcgtcgcgctatatctctctgagaaagcaacatctctggcaactggtgttattagtgagctggttaaggaactgagagtaaaacctgtgccaactgttcttgcttccttttctggtggctcaaaagggtgcatgtacaaggttattcagttactagctggaatatgtgaaggagatgcaaccatgaaggattatcggttagtgagaaactgtatctgcgggcaaatttatgactctagccctgtagattttgtcagtgatgtgggcacccagtttctccaaaagcctgctgttggaaatttatctcagtcaactatattacgttcatggatggcaaaggttctagcttctggcatggatactctcttcccaagcaggattgaagctcagcgtgcagagtactggcacacactatactcagcagcaggattgggtcctgttcttatattttgctcagaagatgataatcttgctccatgccatattatctgtggctttgcaaggcgattgattgaactaggcacagatgttaaacttatgaaatggagcgactcccaacatgtcggccattacaattcacatgaaattgaatacaggaaagctgtagatgatacgttgaagaaggctcttgttaccttctgccaccgaagccaactatatgactcaaatatggctggtgaccaggagtataagatagcgcactcagtgtgcagtctacacaatgctgcagccaattcaaatgagagcttaagaagggttgctaacagtcctagtgatcacttcttcttgccaagttcgaaggaccatgatgaatctcgggaacccagttctctaattgaggatcagaggcgccacatctcacatccaccctgcatggagcctaaaggagtccttggccaaatcctgtttgatgtttgtgttccaaataatgttgaaggatgggacattaagccgacagtgtccccgaatggacggccaacgtttgcttctgcccggcaacttggtccattcaatcccataaggtacttccggcgctcaagactgtagttttctgcaggagttgaggtttttgtatatatataaccgaggcaaggtggctagtagcaactctgagcaagattttacctatgtaagttccctgtaattgtttctgtttctgcttttgcaccgcttggcgagagaatgcacatatgctttgtatatcatatgagtgtgtgtactagaagggagatcctggacatatagtttctaggcgggttgcaaggtgcacgctaacattgtagccaaggggaatggattattatgttcctgtagtttcctctatatttcatgtttgtgaaatataattattgggaaaaaaaaacttatcttcatttttagcgatc

SEQ ID NO: 32107 - DNA, 941 bp, Zea mays
  Clone ID: UC-ZMFLB73263C05_FLI
gtgaggctgcatttgcacttggacaaatgcaggatgctgaggctattcctgcactggtggcagttctcaaagatctttcgctacatccaattgtccgccatgaggcagcggaagctcttggagctattggcctggaaaagagcatccctgtgttggaggaaagtctaacaactgatcctgctgtggaggtccaagaaacttgcgagctggcactaggacgaatagaggagaataagaaagttaatggggctgagagtacaaccacttcaccctttctctcagttgatccagcgctgccttcaaagcatgggctttcagtagatcaattaaggggccttcttctcaatgagcaagagagcatgtaccaacgttatgcagctctttttgcgcttaggaatgatggtggagatgctgctgtttctgctattgttgcagctctgagcgtcaaaagtgctcttctacgtcatgaggttgcttatgtgttaggtcagctgcaaaacaaagccgcttcagatgcgctttctacagtcctgaaggatgtctgtgagcatccaatggtcaggcatgaagctgctgaagcccttggctcaatcgcagaccaagaaagcattgcccttttggaggagtttgcaaaggatcctgagcccatagtctcgcagagctgtgaagtagctctcagtatgctcgagtatgagagatcggggaaatcctttgagtttctcttccttcagactcctcatgtgcagtcctaggttcctcttcgtcgatgatcactcaatgcgaagtgactgaaagcttcttgtattggttaatgtgactggaccagccatatatccactggctttgatgatactctttatcctgataggattttttttttggttaatcgtgatatggaggttgaaacacggagcagcatgaaaacaaatggaaaagaaccc

SEQ ID NO: 32108 - DNA, 211 bp, Zea mays
  Clone ID: UC-ZMFLB73263D05_FLI
gagatatcctggtggggactgcacctctgatatatggatctgaggtcaaggattcggcgtaattaacaggctgctggagaatccctgttgttgtatgcactgtaattaacatggtatccgtgcggtgttctgtcttgtactgcgactgttgccagtggaataaggcatggtttcatgagaactctagattaataaaagaagtcctgattct

SEQ ID NO: 32109 - DNA, 1984 bp, Zea mays
  Clone ID: UC-ZMFLB73263D07_FLI
agagcctacagagggacaaaaggagatccttgaattgagagaaagattaaaagagcagattaggcgaaaggcaaaggctgctgctgcctgcacagctggtcgatcatcttcttcacaaatacctcaagccagggacaaatttggctctttttttgggccatccaagccggtgatttctcgtcgagtgatagaagaaagaaaatcattgaaagaactgcatagcacggttgcaagggagccaaggccttctggagtacataaggatattccatcgtcctctaaagtgcaaagtagagtaaatggacatcagcataaacaaaagattgttaatcaggtaaagaagaaggctgaggcacttaaggataaccgggattattcatttctactctcggatgatgctgacctgtcatcctctccaaaggagaaacctgctgctagatcttccttgactcaaagggctgatcgtgaggtgacacaatcaacagtaaagaggaaggcaccaacaagtcaacctgcacgcttgtcaaatggatatggacctaagaacacaatgtcaactcaaaggcatgctgaaggtaaggtaaattccatgagaagggaggatttctcgaatacagaaagggttgtttcacgtgacaatgagaggatgtatgaaagggttgtttcacgtgacaatgagaggatgcatagtattgcaagaaatggatccaaccaggcaagtactagcaaaaccacaatccaaaagcatccaagcaggggtcccattgctaataagcaaccgtccaaggattcgaatgatgcaactctgaggaagagcagtgtagcctcaaagcaccatcccttagagattgacagaccaaaatcctcgcaaagtcagaggatgcagtcagctggtcagagaccacagcattcttcccatggtcagacgccacatcaatccatgcagcataggacgcagcagtcattgcagagtcggaggccacaacaaatgacacagggtcagaagccacaacagtctttgcagagtcaaaggactcaacagtccttgcagaatcgaaggccacagcagtcctcacatattcagaaatcgcaatcctcacaagcacacagaccacagtcattaagtaacaggtctcaggctttacaaggacaaaggcctctttcttcacagggtcaatatccggagcaaagaagagtacatgcaagtgacagagtcaaacaagctgaaaggcagattcggcctccttccaagtccatgccatcacggccagtctcttccaatggaattcgtgatgatcatgcaaaaaggaagcaagtggcaaaaagaagatttgatgaagatgatgaagaccccttagcaatgatcagaaatatgtttgggtatgatcctagtagatatgcaggcagagatgaagatgtcagtgacatggaagccgattttgctactatagaaatggaagagaaaaggagcgcgaggattgctaggcaggaggatgaagaacaacttcgcttgattgaggaagaagagagacgcgagcaggagagaaagaggcgaaagatggcacgaggccgatagtcgaatacactcctatttggatgttataatatactaccttcgttctcgaatatttgtcgtccgctggttcatttttgaactaaaccgtgacaaataaaaaagaacgcaggagtatctggcaggcctgattgcctgaatacgaagccccatggcggatcagacaggcacttctcttgcagtcctgtttacccttaccacgatgattatctggaggcaaatcaagggaaaacgacaggtgaccaacactgggcacgtgtaacagcagactgtagttgtagtggtttagttctcgaagctgacatggactatatttaagttctcgtcagattgtttggatagcagaaggtttccattgttgcagcgcctcaccagattgtttcttcatatgatatactgattctttcagtc

SEQ ID NO: 32110 - DNA, 594 bp, Zea mays
  Clone ID: UC-ZMFLB73263E06_FLI
gttttttctttcatgtattacaccgcatgacatagttctttaactaatggcagtgtacctttttaaacctttagatggctgaattgaagggagaagatgatttatcagcaggctctatgagcacaactgcatagtcaagacataattcttcggcccctgcagacttcaagcagctaagaagtgttacgcccattgacatctttccacgacaagagacctgggcaagagaatccggacgtgctgagggggagaggaaggagaggaggaagatatcgggcaagagaacccattgacatccttggatagggtccgtctgatgccattcatcgctgtctttgatctcaggaaggcatcttagccagctcaattttattagaaatattgttgttttaagatacagagtccatggttactattgtacgcttttctgagaaacttgtcatcccaataatttggttctggagctatatactgatctagcttgttttagtaacaaatgtaagttgctcacatttcctttagactgtcactagaactttgaacgatcaactcgtgcttctaaatcaagaattaccatatgtgttttttgagttc

SEQ ID NO: 32111 - DNA, 1048 bp, Zea mays
  Clone ID: UC-ZMFLB73263F05_FLI
ctcggcacgtctctccgcgggcggcaggagcctgctggagctgtacaagccgccggccagcgcgatcctgacgtaccacaacggcgccgtgctgcagggccgcatcccggtgtccataatctggtacggccgcttcacgccagcgcagaaggccgtggtcaccgacttcctcgggtccctcaccaccgccgccgcctcgccgctggcaccgtccccgtccgtgtcgcagtggtggagcaccatcgaccagctgtacctctccaaggcgcggggcaggggcagcggcggcggcggcggcggcgcgcgggtggcgctcgtcggccaggccaccgacgaagggtgctcgctggggaagcgcctgacgctggcccagctcccgcagctggcggcgcgggccgggccgaggaagggcgggatcgcgctggtgctcaccgcgcaggccgtgggcgtggacgggttctgcacgagccgctgcggcctgcacggctccgacgcccgggcccccgggaccgcgtacgtctgggtcggcaactccgccacgcagtgccccgggcagtgcgcgtggccgttccaccggcctctgtacggtccccagacgccggcgctcgtgccgccgagcggcgacgtcggcgcggacggcatggtgatcaacatcgccagcatggtcgccggcgcggtgaccaacccgttccgcgacgggttctaccagggcgacaaggacgcgccgctggaggccgccactgcctgcacaggggtctacggcagcggcgcctaccccggtttcgcaggtaacctggcggtggaccccgcgacgggggcgagctacaatgccaatggcgcgaatgggaggaagtacctgcttccggctctgttcgaccctgctacctctacgtgttcgactttggtgtagtaaacaatcctgtcgggattgtgtagcaacactgtgtatatagtatagtatgaggattaaggagtgtactgtgctaagtgttgataactggatcataacacgacataaaaaatagatatgtaccgtccacttttgaag

SEQ ID NO: 32112 - DNA, 835 bp, Zea mays
  Clone ID: UC-ZMFLB73263F09_FLI
ggttctggttcatcatcttcccgttcctcaccgagaaggactacagcctcaacttcctgttgatcgggatgcattcggtgaacgcagtcttcctgctgggcgaggccgccctgaatagcttgaggttcccgtggttccgggtcgcctacttcttcctctggaccgcgctctacgtcgtcttccagtggatcgtccacgcagctacgccgatgtggtggccttacccgttcctcgacctgacatcgaacctggcacctctgtggtacctcgcggtggcggcgctgcagctgccgtgctacgtggtgttctggctgctgatcaaggtgaagcaccacctgctggccaggtgcttcccggtctcgtacgtacgctagctaggggctagggcacaagcaggcaggcccgtcttctccgccgccaacggtgagagcaacgcaagctagctagagaataatatatggcgggtccgggctgtttataatttggtggtggtggtggtggactggtgatggggagtgaggggacgagcgtttcgtgtgcaggtgccctccccgatcaagcgaagaacagaggggagtggcgcgtggtggaagggaaggagatgcgtgcagtttttttacagggggtataaaaactataaaatagtttggtgtacattggaaggaagctaagcatggtggtagtctttatttgagaatttttttgtattttttttgccgtggtggagtggaagtgaacaggagagaggttcagggcagcagggaatggctgtgtatagctttgactgattggatgagattgaaatgaaatgaaatggagaagatactgttccttg

SEQ ID NO: 32113 - DNA, 1688 bp, Zea mays
  Clone ID: UC-ZMFLB73263H10_FLI
agaaagttgaagaacatactgctatgggaaaagggaaaagaagccgcaaacagatggctgccgctgatgaagatgacattcatgatttaagttccgaagatgaggattactcattggaggatgacatttcagataatgacacaagtttgcaaggaaatatttctgggaagaggggccaatattctaagagaaaatcacgtaatgttgattctattccattgatggagggcgaaggacgtaccttgagagttcttggattcaaccatgctcaacgagcaatgttcctacagacactcaatagattcggttttcagaattatgactggaaagagtatcttcctcgtcttaaaggaaaaagtgtcgaggaaatccagagatatgctgaacttgtcatggcacatcttgttgaagaaattaatgattctgactatttttcagatggcgttccaaaggaaatgatgcgtgttgatgatgtactagtcaggatagcaaacatatcccttattgaggagaagatggctgccacaggaccaggaaaaattacaaacatttttcctaattacttgctctatgagttccaaggcttatctggtggaagaatatggaaagcggagcatgatctactgttactgagaggcatactgaagcatggatatgcaaggtggcagtatatatcagatgacagagagaatgggctttttgaggctgcacgacgagagcttcatctcccttcggttaatgaaataattggtgctcagttgaacgaggcaaatgggaatttggaaggtgcacaggaaggccaagcgaacacaacaagcatgtcgcattacaaggagatccagagaaagatagttgagttcttgagaaagagatatcatcttatggagagagccttgaatatggaatatgctgtgataaagaaaaaaattcctgttcctgatgatattactgaacaaggtgttccagcaggacatgctccttttattccagatatcagtgaactgttgcgggaattgcccaatcttgagccaatttctaccaatgaattggtttctgagggcacagctggtcagttacaagttccccatctctacaataagatgtgtggagtgcttgaagagagtggtgcttatgcgctcagttccttctttggagacaagtccgcatcttctagtttggccaatagccttcgacagtttgaaactgtgtgcgagaatgtcgtcgaggccttgcgaccacaccaaaatggtactggcagtgccatcaaagaggaattggtagatgcagccaccaaagcagcagcagcagcagctcctcaacaagattcaggccatgatgcaccgcatgggcagtcttcgacagccaaggcggacatggaaatcgatggttgatttgtaggttccagagtggtaagaaagggaatccccctctaatcattatgtatactgtggtcagaatgtgcgctatatattgtaacatcaaagaaagcacctccaggcctgagggtgttactgctaatgcgtttggtttacttgttgtccttgtaatatgcatacacatttagaactcatgcagccattttgtgtgctcgaaccggtggatcgctgccctgttgtcttgtactgtgtttagggcctgtttggatacgaatggttaattataagacggggctaaagataagtacggat

SEQ ID NO: 32114 - DNA, 1936 bp, Zea mays
  Clone ID: UC-ZMFLB73264A02_FLI
cagaagcgtttccggcagcgaggtttcctcccatcgatctgtacgccctccccaccggtgggtcgcgcacctccaccaacctaccttcccgccccgcccgtcgccgtcgacgactcgccgtccgtttccgccctccaaaaccctactacctcttaccttccagccccgcgtcctccatggccaccaacggcagctctccgagggttcgggacacggagagcagtctggagaaggtgaagcggcagctgtcatcggggtctgggaggtacctgctgcaagggcccctgctcaagcgatctgagacgttacggaaatggaatgagcgttgggtcatattggacccgacatcaggaaagatggaatacaaactccggagaaatgaaactgccattaaggggaccattctgtttgacgcctcgagcaccattactttatctcctgtgaactttcaagggatgccaaaatataatggctgctgcttctacatcggaactcctcaaaagaaggattactttctttgtgctgaaactcctggtgctgcgaaagcttgggtatctacattacatgcaactcagttagtcttacgagctcataaagaggcagtaaattctttggctgggaatggctctccagctacattaggcacagttgctactgcagttgctaatgctaatgcaacagccatggaggctaccaaggagatagaagctgcactaaaggtttcaatgagggcagctcttgggttggatacaaataactccaacgagggccaacttgatgacctaacaatcatgaaggagaccctacgagtgaaagatgaggaattgcaacatttggctaaggatattcgttcccgagatgctacaataaaggaaatagcggacaaactaacagaaactgctgaggctgcagaagctgctgcttctgcagctcatacaatggatgaacagaggcagcttttgtgttcggagattgagcgactaaaacaagccttggaaagacaaatagaacaatcagtggttaagcttagacaatccgaagagaaggttatcagcctgagcaaagagaaggagcagttgatgaaggaaagagatgctgcatttcaggaggctcatatgtggcgcattgaactagtaaaagccagggagcaagcagtgatacaggaagcaactattgcccgagcagaggagaaggctagagtttctgaagcagatgccgcagctcggatcaaggaagctgctgaaaagttgcatactgttgagaaagaaaaggaggagcttctagccctggttggtgttctccaatcacaagtcctgagagagcagagcagcacaaagcaagtatgcgaggagaggtctgaatcatgctcaggcgccgataattcacctctgttgacaaagcatgttgacgcatcagacgatgatgtggacaaagcctgcgtaagtgactctagatcggtcccggtttcgagcgatagcactgaggtccagctggctgtggatggggtggacatccgtcctgttggcgatgcagagtggagtagcttccagcagccagaagcgctgatcgctgatgtccgggaggtctccccagaggcggacggcggcagcttggatattcctgtggtcaatcccccaccagtcagtgatcatatccagggaggcggcggcgcaacccatccctgaaggcctgaggttgctgctaccttccgagattggtgtggttgctgagaacccaatagatagggatgtctaaatctggagagaagtgccgttgagagtgtatgcggattgtatgtccattgtattcggagtataagaccgaataaaaagatcgcagctgtgtttggctgtgggattgtaaaaaacttttagcgctacacctcaacaggactgggccctcttgggctaccggccggcactgccctgctgctcgt

SEQ ID NO: 32115 - DNA, 1239 bp, Zea mays
  Clone ID: UC-ZMFLB73264A05_FLI
ctgttaagcaacccggcgagcgaggtggtgagagaacgagcgagagggagatggcagccacggtgtccttcccggtggtgaacatggagaagctggagaccgaggagagggacacggccatggcggtcatccgcgacgcctgcgagaactggggcttcttcgagctgctgaaccatggcatctcgcacgagctgatggacgaggtggagcggctgaccaaggcgcactacgccaccttccgggaggccaagttccaggagttcgcggcgcggacgctggccgcggccggcgacgagggcgccgacgtcagcgacgtggactgggagagcaccttcttcgtccgccacctcccggcctccaacctcgccgacctccccgacgtcgacgaccactaccggcaagtgatgaagcagttcgcatcggaggtgcagaagctgtcggagaaggtgctggacctgctgtgcgagaacctgggcctggagcccgggtacctgaaggcggccttcgcggggtcggacggcggcccgacgttcggcaccaaggtgagcgcgtacccgccgtgcccgcgcccggacctggtggccggcctgcgcgcgcacaccgacgccggcggcctcatcctgctgctccaggacgaccaggtgagcgggctgcagctgctcaggggcggcgacggcggggagtgggtggacgtgccgccgctgcgccacgccatcgtcgccaacgtcggcgaccagctggaggtggtcaccaacgggcggtacaagagcgcggtgcaccgcgtgctcgcccgccccgacggcaaccgcatgtccgtcgcgtccttctacaacccgggcgccgacgccgtcatcttcccggcccccgcgctcgtcggcgaggaggagcgagccgagaagaaggccaccacgtacccgaggttcgtgttcgaggactacatgaacctgtacgcgcgccacaagttcgaggccaaggagccccggttcgaggccatgaagtcgtcggccatcgccaccgcgtgagcacataatactgccgtgttctcccttcgtggggtgcatatgcttgagcttgaagagccatgtgcctgtatgtagtggcacgtacggtggttatgcgtgtatcgtggaatggcgcggcgtgatgtattttggttgtctcagatctaagtgtgtgcgtatatattgtgtactgtaaagtttgcagcgtctgattaatgtacgagcagtgtgtgtacct

SEQ ID NO: 32116 - DNA, 2200 bp, Zea mays
  Clone ID: UC-ZMFLB73264B06_FLI
acttctcccgccgccgccaatcccctcccgttctccgccaccgccaatcccctcccgtcctccgccacctctgctgagagcgagaagagatggccggcaagggtgatgggccggcaatcggcatcgatctcggcacgacctactcttgcgtcggtgtgtggcagcacgaccgtgtcgagatcatcgccaacgaccagggtaaccgcaccacaccctcgtacgtcgccttcaccgactccgagcgcctcatcggagatgcggccaagaaccaggtcgccatgaaccccatcaacaccgtctttgatgccaagcgtctcattggcaggaggtttagtgatgcctctgtccagagtgatattaagctgtggcccttcaaggtcattcctgggcccggtgagaagccaatgatagttgttcagcacaagggggaggagaaacagtttgcagccgaagagatctcctccatggttctcatcaagatgcgtgagatcgctgaagcttaccttggcagcacgatcaagaatgctgttgtcacggtccctgcctacttcaacgactcacagaggcaggccacgaaggatgctggggtgattgctggcctcaatgtgctgcgtatcatcaatgagccaaccgctgctgctattgcctatggtcttgacaagaaggcaaccagcgtcggtgagaagaatgtcctcatctttgaccttggaggtggtaccttcgatgtctccctccttactattgaggaaggtatctttgaggtcaaggccacagctggcgacacccatcttgggggtgaggactttgacaacaggatggtcaaccactttgtccaggagttcaagaggaagaacaagaaggatatcactggcaacccgagggctctccggaggctgaggacctcttgtgagagggccaagagaactctgtcttccactgcccagaccaccattgagattgactcgctgtacgagggcattgacttctactccaccatcacccgtgccaggtttgaggagctcaacatggacctgttcaggaagtgcatggagcctgttgagaaatgcctgagggatgccaagatggacaagagcagcgtccatgatgttgtccttgttggtggctccactaggatccccagggtgcagcagctgctccaggacttcttcaacggcaaggagctgtgcaagaacatcaatcctgatgaggccgttgcctatggtgctgctgtccaggctgctatcctcagtggtgagggcaacgagaaggtgcaggacctgcttctgcttgacgtcactcctctctctctgggtctggagactgccggaggagtgatgaccgtccttatcccgaggaacaccaccatccccaccaagaaggagcaggtgttctccacctactcggacaaccagcctggtgtgttgatccaggtgtacgagggcgagaggacccggacccgcgacaacaacctgcttgggaagttcgagctctccggcatcccaccggctccccgtggtgtcccccagatcacggtctgcttcgacatcgacgccaacggcatcctgaacgtgtctgccgaggacaagacgacggggcagaagaacaagattaccatcaccaacgacaagggccgtctgtccaaggaggagatcgagaagatggtgcaggacgcggagaagtacaagtccgaggacgaggagcacaagaagaaggtggagtccaagaactcgctggagaactacgcctacaacatgcgcaacacgatcaaggacgagaagatcgcgtccaagctggctgccgacgacaagaagaagatcgaggacgccatcgacgcggccatcagctggctggacgccaaccagctcgccgaggcggacgagttcgatgacaagatgaaggagctggagagcctttgcaaccccatcatcgccaagatgtaccagggcgcgggtgccgacatgggaggctccggcggcatggacgaggacgctccggctggaagcggtggccctggccccaagatcgaggaggtggactaagcggtttgtgtcagtctcgtgtgtctgctgcagtggctggctggcccagtcgctgctcgatttatcgtcgtcgtcgcggtgtatccgcgttagaaccttttgttggtgaacaatattatcgtggcacgcgttttaagtaatacggtattctggttcggttt

SEQ ID NO: 32117 - DNA, 1206 bp, Zea mays
  Clone ID: UC-ZMFLB73264B10_FLI
aggatgagaggaacacccagcagcaccagggcggtgagcaggcccaggaccaggagaacgaggtgaaggacaggggactcctggacagccttctcggcaggaacaagcacgacgaccaggagaagaagaaccagcaggaggaggaggagctcgcgaccggcatggagaaggtcacggtggctgagcccgaccacaaggaggagggacacgaggccgccgagaagaaggacagccttctcgccaagctgcaccgcaccagctccagttccagctcgtcgagcgacgacgaggaagaggaggtgatcgatgagaacggcgaaattgtcaagaggaagaagaagggccttaaggagaaggtcaaggagaagctggcggcccacaaggcccacgatgagggcgaccaccaccagccgggcgtacctgccccggcgcccgcaccgcccgtggcggtggacacgcatgctcaccaccaggagggagagcacaagccgcacttcccggcgccggcgcctcccccgcacgtggagacgcaccaccccgtcgtcgtccacaagatcgaggacgacgacacgaagactcagaccccaccacaggcaccggaggaggagaagaaaggcctgctggacaagatcaaggagaagctacccggtggccacaagaagccggaagacgctgctgccgccgccgccgcgccggccgtccacgcgccaccgccgccggcgccccacgccgaggtcgacgtcagcagcccggatggcaagaagggcttgctgggcaagatcatggacaagatacccggctaccacaagagctcgggtgaagaagaccgcaaggacgccgccggcgagcacaagaccagctcctaaggtcgcagcgtgtgcgtgtccgtcgtacgttctggccggccgggccttgggcgcgcgatcagaagcgttgcgttggcgtgtgtgtgcttctggtttgctttaattttaccaagtttgtttcaaggtggatcgcgtggtcaaggtccgtgtgctttaaagacccaccggcactggcagtgagtgttgctgcttgtgtaggctttggtacgtatgggctttatttgcttctggatgttgtgtactacttgggtttgttgaattattatgagcagttgcgtattgtaattcagctgggctacctggacattgttatgtattaataaatgctttgctttcttct

SEQ ID NO: 32118 - DNA, 738 bp, Zea mays
  Clone ID: UC-ZMFLB73264C04_FLI
atcgagtacagtcggctaggtaatctggtggtacgacgacatggcggccaccagcagcaagtcgtcgtcgtcctcgagctcggcgcagcgggcagctgccgcactgctcgtggccgccgccgtggcggtgtccgtcctggtggtgggcgcggcggcggtgtgcgacatgagcaacgagcagttcatgtcgtgccagcccgcggcggccaagacgacggacccgccggccgcgccgtcgcaggcgtgctgcgacgcgctggcgggggcggacctcaagtgcctgtgcggctacaagaactcgccgtggatgggcgtctacaacatcgaccccaagcgcgccatggagcttccggccaagtgcggcctcgccacgccgcccgactgctagcagtgtgctagccaagccaagccaagcaggaaggcccccggcattgctagctgtacgtgtctgtgtgtgcatctgcagcagggtgcaggcaggggcccgtacgtacgtgtctctttctctctctcatcttgtcaccgtacctatctagagtgtgtgtgttcgtactaattaaaatgttcttgtcgtcgtcgtctgtgcatgcatgtaccatgtcgtcgtgcatgtctattatgtgtgtgtcgtcgtgtcgatcggtacgtatagatgcctgttgttagcatgtgtgtcattacctagtcgtgtgtagtgtatgtatgtgcttgccgggcaaaagttgcatctagctaaac

SEQ ID NO: 32119 - DNA, 777 bp, Zea mays
  Clone ID: UC-ZMFLB73264C07_FLI
ttttagttttacatattttatgttatttgaataactatagatatatatccaaactgcactagtagagaaaactcttaaaacgcatgtcccaatatagatataatatgaaggattattgtgcttaaacaaattttagattatgggcatagcctacttagttcatactgaaatgaataaatttatgcattttcaaactaaattttacgacacttcttgttgtgttttatgtttctattaaaaaacagtcttactgcgttttacaccaaatttatgacactttttgatgtgttttacagcaatctaggtgccaccagtgtgggcgcaacccatcacgaggcgatgctggcgagccagccatagcgcgacatctccgtccgcgtcgttaatccctatgggtgtgcaacagcagcggtattcaacatgttaggtaaaagtatcgatgcagaccaaagattaacacttgatggagacaagttgaccactgaccttgctggtctatttactagaacatcaaagagtcctgcataccatgtttatgtcatgagaagtaataggaagtagaggatatctaggtggttttggcaatgtatttagtgattttaaccattcaccctctaatgcaaaggaatacccccttgccttgccatcacgattattttgtcctctttctgttgccttggcaagtcaagattctacatatgcatattttaaaattgctggactcatgtatgctaaaaattgtacttatttacgcagttttgattctgttttatgctt

SEQ ID NO: 32120 - DNA, 462 bp, Zea mays
  Clone ID: UC-ZMFLB73264D05_FLI
acgacaactagtcctggcagccagttgtagtgaggtgacatggctgcatacagacatccaaccaaaggaaacagagggtgtggtgtggaaagaaggggagagtggacaaaagccagacatggctggcgctgctgctgcataggcacaggcacaggcacagggaaaggtgatgagacgagaggggtggggtggtactctgctgggaccggcgcactcacgggtgcggagaatcagcttcgcctcacgagcgatgcagcagcggagacacagacacctctcgtctgcgtactgtttcgcccatgctcttgtcttgtacgcatgcagcagcgctccttgtcctttggctccatcgatgtattacctgctcttcttttcaactaggagtttagcggacaaagaaatgaaaaagtaattagcagtcatttatcttggtcaatggagtttatgttttggttggttctt

SEQ ID NO: 32121 - DNA, 1998 bp, Zea mays
  Clone ID: UC-ZMFLB73264D12_FLI
ttattagggttttttttgtctccttagatttgcgcctgttctcacctgtgcgcatactagtctctgcatcagagagtagagacctcggagccgatcttcaacacgcagattgggcagagctgcctgccggagggagagtggagagagagagagagagagagagagagagagctcaaggggggcaaaaggagtttttttttatccagcttgttagcttgattctctttgatccgggagagcagccgccagtccaactaatcctagctattggtgtgccggggctttgattgttctccagatccgagccacctgctgggtggactccaggaatccgagcacgaagttgacaggggagttctcagggaaaaggggaggaaggaagagcctgaaagggcggtgcggagagaaagactataagagcgacctgggtcccttgaggatgccgtcaagaaaccgcgtggagaggagggcgatgagatgagggatgctggccgcggtgatggactatttcagctcctgctggggcccgcgatcgggtgacgggcacagggggaagggccccgacgccgccggccggcaggacggtctcctctggtacaaggacgccggtcagctcgtcactggggagttctccatggccgtggtgcaggccaaccagctgcttgaggaccagagccaagtggagtccggatcgctctccctggctgacccgggcccgcagggcaccttcgtcggcgtctatgatggccatggcggtcctgagacgtcccggttcatcaatgaccacctcttcaaccatctcagaaggtttgcaactgagcacaagtttatgtcagcggacgtgatccggaaagctttccaagcaactgaggagggctttctttctctagtcagcaaggaatggtctttgaagcctcagattgcttcagtgggctcctgctgccttgttggtgtaatctgtgctgggactctctatgttgcaaacctgggtgactcacgtgcagttcttggaaggcttgttaaggcaactggagaggtcgtggccatgcagttgtcatcggagcacaatgcgtgctatgaggaagttagacaagaactgcagtcatcacatcctgacgatccacatattgtggttctcaaacacaatgtttggcgagtgaagggtctcatccagatctcaagatctattggagatgtatatctaaagaaaccagagtacaacagagaaccacttcacagcaagtttcggcttcgagaaaccttccagaggccgatccttagttctgaacctcaaattactgaacatcgaatacagccaaatgatcaatttgttatatttgcttctgatggtctatgggagcacctcagcaataaggaagcagttgaccttgtccaaagtagtccacacaatggaattgctcggagactagtgaaagcggcgatgcaagaagctgccaagaagagggagatgagatactcagacctcaagaagatcgaccgtggtgtgagaaggcatttccacgacgatataacggtcgtcgtggtattccttgatttgaatgccatgagcaaagctagctggagcaaaagcccctcggtttctctccgagggggcggtgtcaccgtccctgcgaagtccctcgcacctttctcagctccggcacggctgaacagcacctactgaagttgctaccactcttgaaaggaagaacacggtgcagatctgcagtggtgagagaaaaaaaaacagcaatcaagtgtagcgttacagttacacctgctgtgttgttgctctttgcaaaactactgtctagactccgcctggtaattagtgtactgatagcgaggtaaaaaaaagttagattatttgttagcagcggcagtgatttgacatctaaggaacaacaacacggtgtccaccgattctgctatcctgatggctcgcggcagcctggctggtcggcacacgacacgaagtgaagctgttttactggcggc

SEQ ID NO: 32122 - DNA, 974 bp, Zea mays
  Clone ID: UC-ZMFLB73264E03_FLI
cggcctgcctggccgcgctgtccaacctgcagttcctgaccgtctcccacaccaacgtgtccggcgccatcccggagtccctggcgcggctgcgcggcctcgactcggtggacctctccagcaaccagctgacgggcggcatcccggcgtcgttcgccgacctgcccagcctccggtcgctggacctcgggcacaaccagctgacgggcagcatcccggcggggctggtgcaggggcagttccggtcgctggtcctgtcgtacaaccagctgacgggcccgatcccgcgcgacgacgcgcgcgacgagatcaacaccgtggacctctcccacaacaagctgacgggcgacccctcccacctgttcgccgccggccggcccatcggcaaggtggacctgtcgtggaactacctcgacttcgacctgagccagctggtgttcccgccggagatgacgtacctggacctgtcccacaacctcatccggggcaccgtgccgctgtcgctggagcggctgtccacgctgcagaagctggacctgagctacaaccgcctgtgcggcccgctccccaagggacacggcgtcatcaagcacgggtgcaagccgtacgcgcacaaccagtgccgcaaagggaccccgctcgcgggctgccaggacctggagtggagtgagtgagccggccggtatggttttctatactctgctctgctctccctcgccggcgtgcttcccgatcgtggtgtgtgtaaggaactaaggacgacggtgcctggtttaggcgtttagctatagacgaaagcacgtacggccgcgtgcctggtctagctacgcggccggttgatcttgagcagttaagcgtgtacgaaacgacagcgctgtgtacgtgtactgtctgctgaagtgtgagatgtactgtctgtgtgtatttggtatggatccgatcggcctgatgtatgaaaaggatgtttacgtact

SEQ ID NO: 32123 - DNA, 1921 bp, Zea mays
  Clone ID: UC-ZMFLB73264E06_FLI
cggaatactccgaggagggtgctcgaggcgaaccaagggcgatggttcatctcgctttcgtctcgctgcgtgcgctctctgtcactccccctctctctcctcatcagatccggccacttcctgctcgcctcgccaccggtcccgcgccccggaaccctagagctctccccgcggcagggccgccggagtccccgggcgcgtggagaaaatggaggcggcgctagaggcggcgtgtcaaggacaccaaggagcgtctggccggggtcaagcggctgcacgaggcgcttgacgccgcggcgcggcgcgcggcggccgaggtcaccacgctggtggacacctgcatggatctgacgcgggatgccaacttccgcatcgcccagggcggcctccaggcgctctccgtcgccgccgtcgtcgccgacgaccacttcaagatccacctcaacgccctcgtccccgccgccgtcgagcgcctcgacgacggcaagcaacccgtccgcgacgccgcgcgacagctcctcatcacgctcatggaggtttcttcaccaacaatcatagttgaaagagctggtagttatgcatggactcataagatttggagggtgagggacgagtttgtacgtacggtggcatctgcagttgggctatttgcttctacggagatttccttgcaacgagttttgctttcacctgtcctgcaactaatgaatgattcgaaccaaagtgttcgagatgctgctatctcttgtattgaggttagttgattccatattcgatactgtatagacctgtttcagccgacatttttcttttttcccttacacccatgatgactggtatgatctctatttctattgatcttgttcaatttcccattagttccatcccacatttacaagctggagagactgaatcattttgtatgacaacattcattgtagctccaagcccctttgcttctagttgaattgttttagtcccttgtgctcagattcatcttttctttcatctaaactattcagtgttcacagttattggctgggacacacacctgctatctaggcagcataaagtttttctagtaagccttcatttgtttttcactacaggagatgtacaagcacatgggatcacaatttcatgaagagttgcagcgccataatctgccttcatatatgctaaaagaaataaattcaaggttggataaaatagaaccaaaggttcgatcatctgatacagcaatgcagtataaggctgtagagtctagaggcaatgctgggatgtagcctgttggtagtgggacaccttcaggttctgttattgatctggaaaatgaggaatcaggttcaaaaggtaaaaggccattaggatgggactccatgaaagcatcaaggaagaaggcaatgtccagttcctcccagtctactgactaccttttaagaattcatgacattcaaatagcaagactgaagcaaagtgaagaaaaatcaggtaagaaacaacagaatattgagttcttgaaggaagttgaactgaaaaagttggaggtccaaaccaaggaactagaaatgcagcaaaccaaaatgatgattgaagaaaggatccgaaaggacgcagagctgaaggaactcctagctatggaatgttttaccagaggatgtgagacctgtatacatcgcgaggagaaaaggtttaatcgagtttttcatcaacaatcctgtctgaagagtactattgtatttcataatttgttgcgaacctagtgtcggcgtaacgtggtccggtgtgttcggacatatgtcatttcgagatttttgaacatttgcttaattgtttgagaacagtagcttggtttttgaactcgtgtcgtgtactagaagattgcgaaatttttattattaaaaaacatataattccaact

SEQ ID NO: 32124 - DNA, 1567 bp, Zea mays
  Clone ID: UC-ZMFLB73264F02_FLI
ctccaacctccctctccctcgcggcccgcgcggccaccagggcagccgccgccgccgccgccccgctgcgcaggggaggcctcgccacggcgtgccagccggcacggtctctggctttcgcggcgggcgacgcgcggctcgcggtccacgtcgcgtcgcgatgccggcaggcgttctccgggcgtggcacgcgggccatggccaccatggcgaagaagagcgtaggggaactcacggaggccgacctcgaggggaagcgcgtcttcgtgcgcgccgacctcaacgtgccgctcgacgagaaccagaacatcaccgacgacacccgcatccgggccgccatccccaccatccagtacatcctcagcaagggcgccaaggtcatcctctcaagccacttgggtcgccctaagggttttacacccaagtttagcttagctccccttgtaggacggttgtctgagcttcttggcattcaggtgcaaaaagccgacgatgttattggccctgaagttgagaagctggtggcggccttgcccaacggtggggttctgctgcttgagaacgtaagattctacaaggaagaggagaagaatgacccagagtttgcacagaagcttgcctccctagcagatctttatgttaacgatgcatttggaacagcccacagggcgcatgcatcgaccgagggagttaccaagtttttgcagccttctgttgcagggttccttctgcagaaggaactcgactaccttgtcggagctgtttcaagccctaaacgcccttttgctgccatcgtgggtggttcaaaggtgtcatccaagatcggggttattgagtccctgttggagaagtgtgatatccttctcttgggtggtggtatgatcttcacgttttacaaggcacaaggtctccctgttggtgcttcattggtcgaggaagacaaactcgagcttgcaacgtctctacttgcaaaggctaaggaaaagggtgtctcccttatgctgccaaccgatgttgtcattgctgacaagtttgcccctgatgctaacagccagattgttccagcatctgcaattcctgatggttggatgggcctggatattggcccagattctgtcgcttcattcaacgcagccctggatacaaccaagacggtcatctggaacgggcccatgggtgtcttcgaatttgacaagttcgctgtaggaaccgaggctgtggcaaagaagctggcagaactcagcggcaagggcgtcacaactatcatcggaggcggagactccgtcgccgccgtcgagaaggtgggagttgctgacgttatgagccacatttccacgggaggtggcgctagcctggaattgttggaaggaaaggagcttccgggagttgttgcgttgaatgaagccgccactgtgaccgtatgaagcatgctttcattttgtttcgtcttcgtcttcacgtgccgttgtatacttgctacattctcgcttgcacttgcacctcctcagccgctcgcccgaaatgtaagagaccaatgttttatagagctaatggaaatcgtttgaac

SEQ ID NO: 32125 - DNA, 1540 bp, Zea mays
  Clone ID: UC-ZMFLB73264F03_FLI
cgacccatggtgcaagcttggtcactgagtcaacctgattggacctgcaagattgatgaaggtccagcagggattgcatatgctcgctggagtcctgacagtcgtcatatattaactacatctgagtttcagctccgtctcactgtgtggtctctcgtaaatacagcatgcgtacatgtccagtggccaaaacatggttctaaaggtgtttctttcaccaaagacgggaaatttgctgcaatctgtaccagacgtgattgcaaggattacattaatttactatcatgtcactcttgggaaataatgactgtctttgctattgacacggtagacttagctggtgttgaatggtcaccatatgatagtgctattgttgtttgggattcacttcttgaatataaggttctgatatattcgccagacggaaggtgcttgttcaagtatctagcttatgaaagtgggttgggtgtgaaaactgttgcttggtcaccatgtggacagtttttagcagtgggcagctatgatcaagcagtacggactttgaatcacttgacgtggaaaacttttgcggagttctcacatgcagggtatattcgtagtccttgcaatgctgctatatataaggaagtggatgacccatggcaacttgatatgtcagaattatgtctaagtgaaggcctctctcgaaacatgccagacaatggtgcagaaaatggcaccgagggaggaggctctagagttaaatatgctgtgatggatgttcccatcaccttaccttcgttgaaaccagcttttgacaagcctaaccccaaacaaggcattggtatgctgtcatggagcagcgacagccactatttcttcaccaggaatgacaacatgccaactgttctctggatatgggatatatgccgccttgagcttgccgctgtgctcgtgcagaaagatccaatccgtgctgcagcatgggaccctacctgcacacgccttgttttatgcacagagagccctcacttgtacatgtggacgccatccggtgcctgctgtgtcaacatcccctttctgaacttccgaatcgttgatttgaagtggagctcgaatgggagctgtctcctcctgaaggagcgcgaatctttctgctgtgccacaatcatatctgccctgcctgaggaagaacctgatcattctgatgatacttctgaagatgaatgagtggcctcatggtatgtctagcagcttatgcgaatggaactgggaactaacagtacaaatgatcttgtgatggtgaatgagtgacactgactgactacttagctacttgtagaatccagagtggattgcgataccatgaatcgataaggtcatttcgctgcttagatggcaaatgctctatcaccaggcactacagaatggacagagaactgtgtggttctatttgttgtattcttgctcttgtttgtctgttgtagtttctccaaggttgtactgcttgaccttacttgttggatcttaatcttacatatccagtcaccagggtattttc

SEQ ID NO: 32126 - DNA, 2428 bp, Zea mays
  Clone ID: UC-ZMFLB73264F06_FLI
ccttcacaagcatctgacagccgaaccatgtgggcttccatggcacatttgttaccaaataataaaagggatttgcctgggcttgcactacctacatgacaagaacataattcatctagatctgaaaccggacaatatattgcttgatgatgacatggtgcccaaaatcacggacttcggtttgtcaagactcttgggtaatggaaaaagccacaccattacacaaacaagaataggaacatggggttacatggcacccgagtacttggatgatggagtgatcacaatgaagacagacatctatagcttgggtgtgataatcagacacatggtgaagggacgtaactcggcagacaccactgatgaagaagtactggcaaactggttgattaggctggaaaaggatccatcacagatgatgaggcagcagacgacccgattattatttgaaacagagtacaaagagcaaataaaagcgtgcatggatatatcatggaggtgcacgctgcgtaaaccaatggacaggccaacgacgcagcacatcctacttacactggaggaaacagaagcaaagatcaaatcggtcgttgggcctactccaccaaatgccgggcagcttcagattgccaaatttgggccgtggggtggagatggagggaagacgcgagacataagaatgacgccttgccatttgcatagcgtaacaattagcagtggaactattatcgattctatcgggttttcattcactgatcactatggtcagcaccacacaacagggccttggggcggtaaggagggtacgaataagattgaactaggcccttcggagtttcttacaggagtatctggaacaagcggcccattcaaaaatctaacaaatgttgtaacgtcacttacgtttgtcaccaatactcgtagttacggaccctttggaaaagggcgaggaacaccgttccacatccaaacgcagaacaacggcaggatcgttggcttctttggccgttctggccagtatctctatgcgattggggtctacacgaaccaagatgctagggtcgcaaggatcgggcgacctttgggtggagatgaaggggttcttcatggcatcacagacctcagtgggcagcagcgcagcagaggtggaggtccatcgggagaatgtggagacagcgacgacgagcccaacggtgatttcgccaaattcggcccgtggggcggcgacggaggacagccgcaggacatcggaacactaccctgccgtctagacaggatcaagatcagcagtgggcttatcatcgactcgatcgagttctcgtacgctggccctgacagccagtaccgcaccgcaggcccttggggtggtcatggaggagacaacagctcttttcagctagctggttcagagttccttacaggtgtgtctgggtcaatcggcacattcaacggccatgcaaacgtcataacgtctctgacgttcgtcaccaacgctcgtagctacgggccgtttggaagagggcgaggcacatccttccacatcccagtgcagggcaatggctgcatcgtcggtttctttgggcgctccggacggtacctcaacgcgatcggtgtctacacggcgccgaaacccgaaccaaaagcaggtggtgatgaggccgtcgtcgccaggattgggccttggggcggggttggaaatgctctccatgacatcgcagagaggccgcatcgcctgcacagagtgacgatcttcagcgggacgatcgtaaactcgctggagtatctgtacagcgatggcgacgggcagcagcacaccaccggtccgtggggcggctgcggaggaactggtcgaaagattcatcttgcccctgaagagttcatagtggaagttactgggacattccatccatgcgcgtgggacagaacaatacccagtgtcgtgtcctctctgacgctcgtgaccagcacgggcaaaacacacgggcctttcggaacgcagctgggagccgcgttccaggttccggtgcagagcgacagcaggatcgttggcttcttcgcccacggagacaattacatcgaagcaattggcgcctacgtgaagaaattgacagaatccagcaaccgttaactcttggaacaacttgcagctgttcacactgtttcttgggccattgctccttaaatttagtccagatggccaaggagcaaccaaacagaaatcgctatggcagggaagatggactaaactggactgtggcacctccagcatagcctgctcttagattagtgaccagacatcatcgagatatttcgatattataataaatgaggaacccatctcagatgtttatgttagctcctcagtttttgcttctgaatgattaatttagatcttccttatttttgcaataaatgaggattcttttctgtc

SEQ ID NO: 32127 - DNA, 980 bp, Zea mays
  Clone ID: UC-ZMFLB73264F09_FLI
agtttaacatatcaatactattgcttcgacgcagagatgtacttacactgcataagctcttaacacatacagttgcacatctttattgctagctaacgcaaggctactttaccctacgttaaggcacacaagtcacttcaggctaattaaggacgcacgacgatcttggtgttcttcgtcatgtcggtggtggcgaggccgccgccctttccggcgagcgggaagtagaaggggtagatctcgtagcgcaccctgcagctgctgtagttgatctggcagccctgctgcgcgccgcagtagtcgccgaacctggacagcgccgtggacaggcactgcgcgcaggtcagcggcgcgaggtcccgcgtgcactgcgccagcccgtagatggacacgaacggcgtgtactgctccttgtcccgcccgagccccgcgctgcccgccgccgacgcctgcgccgtcgccttgcccatcaccttccccaccgccttctcgaacgccttcgggttgtccatggcctgcacgttcaccaggatcacgcccgcgtccgtgtccgcctgcccgaagaagttggcgttctcgtaccgcatgaagcagtagtcgtaccatatcctcgcgtcggaactgtagctgcaggtgctggggagctgcttggcggcgtcggcaaggcaggacgcgcagtcgctggcggagacgtcgccgcggcattgcgcgaggccgtagatgatgctgttgttgcccttgccggcggtggacgtggcgtagcccccggtggaggaggccgaggcgacgaggtcggcgaggacggagttgatgttggccacggccttgctgctgccagcgtagctgcttcctgagcagtagctgccgatggagtccgcggccatgcccagcgggagcagcagagccaaggaaacaacaagcagcatgcagcagcgcatcctgctggactccatggcagtgtagggtatgattgaatctag

SEQ ID NO: 32128 - DNA, 986 bp, Zea mays
  Clone ID: UC-ZMFLB73264H01_FLI
taagaccgtgctgcgcctgcgctgcgcagctccagcaccacagcaccagagctcgatcgacctccctctccaatgccgtctttcatcgacggccccactttccgggcgctgctccggccgtccaccaacgggcgccggaccaagatctcggacagcggcggcggcggcgggggcatcttcaagatgttcaagctcatgcccatgctctcgtccgggtgcaagatggtggcgctgctgggcaagcacaacaaccgggcgctgctggccgaccacgcgacgacggtgacgctgttcgggccgcgccggggccgcgtgagcctggccatccacgaggacacgcgcgcgccgccgctgttcctcatcgagctgcccatgctgacgagcgcgctgcaccgggagatctcgtccggggcgctcaagctggcgctggagagcgacacccgcagcgcgcgccgccgcctcgtggaggagtacgtctgggccgtctactgcaacggccgcaaggccggatactccatccgcaggaaggaggcctccgacgacgagcgccacgtgctgcgcctcctgcgcggcgtgtccatgggcgccggcgtgctcccggccgcccccgagaaggagggcggcgtgcccgcggggcccgacggggagctcacgtacgtgcgcgcccgcgtcgagcgcgtcgtcggatccaaggactcggaggccttctacatgatcaaccccgaggagggcgggaacggcgccgataataacgggggcggtggaggcgccggcggcgcgccggagctgagcattttcctagtaaggatgaaatgaataaaccgtcatattattactgctacagcataaatatatataaatataatagggtgctatattgttttttacacacacccttgtgccttgttgcacacagcagatgtgttctatgaaactgtccatagatcgagtttgtaatctaactgatgtatatctccatgttagat

SEQ ID NO: 32129 - DNA, 1233 bp, Zea mays
  Clone ID: UC-ZMFLB73264H08_FLI
tgtgtagcttgctcgtcttgctgaaatggaggttaagtatcgatgcaaccaaatcctagagatcggtcttccaatgggaggacttgcaaaattgtttgcccaggattgggagggtgatgtgaccatggttatgccagcaacacttgctcagtacttgaagatcattcagaatccaacatacgcggagctccaaatggctgccaaccaaggccgcaggtgcacatgggagaagctctccgcaatcagagcgaactgcgccattgaacttgcacttgacgaatccatagcggttctaaaccacaaacggaggctaaaacgaagcatggagaggacggcggcggcttcgcagggtcactctaactatgtccgacccaagactccgaggaggataccgtcatggagccgcatcagtcgagagaactctttggagtctctctcggaagagatctctgcggttgctgcttcgtccatgcagcaaggcgctgctcttgttgtcggcgcaccaccaacgactctttctcagcatgttcggcgcagttctcatgacggaagtgagagtgagtcagaaaccattgaccttaattcctggaccaggagtggagggcctctaatgaggacagcgtccgccgacaggttcatcagtttcatccataacattgagattgacacagaattaagtaggccctgtgctgtggaaggtgatgctgcaggtattttgtcagaatctaccttcccaaacggtccacgaccgaacaatagctcaagtgttagtatgccaggtagatgcacagaaaattctgggaccgagtcgtgcaacactgtcaacaccagagcttctactcccacaagcatggctgttcgtgaaggagatttgctgccgcctgaaagcactactgataatgtcctacttaacattgtgaaaagagacgccctgcaggatggtgtaactgaattggcggaaagctcctgcgctgaaggatatgcggcaaactgtgacaccgtctcagggctagactgctgaaggtaacaagacgctcgctgctgacttgagcaatcaacaattagctgatgattagattcttcttgattttgatgatgaaaggtcatttatatgtagctcactacagcaacgcagtgtaggaaaattgtacctgctcgatttaaactttaaagagcatgccatgagtagctttgttaatgttaatattcacatccattgtggaattgttggtt

SEQ ID NO: 32130 - DNA, 1815 bp, Zea mays
  Clone ID: UC-ZMFLB73265D04_FLI
ctggggcttccatacaccaagagtgcagcaagaggatagatagcatttgttgcagcgctctctaggtcgtctctctctctctctagctagctagcgtcgtctcctccggtgaggtgatgaacagaggagaattccagacctcccttgtccagcagatgatctggagcggcggcggcggcggcaataccacagcggcaggcagcagcaacatcatgagcagcggcttcaagcagtcttgccatgaggatcaacaagaggcctcccgcaacctgcagctgctgccctccctatcgtctccgtcgtcgctgctcttctccaatgcccagcagttcccgcacaccacctcttcgggccagcagctagcccacaccaacgccggcggcgcagcagctggttctctcccaagtctggacgacgacggcggcagcggtcaggacagccacatgccggaatcgtggagccagatgcttctaggggagttcgctggagagcgctacgccgccaccgcatgtctgctgtcaaagggcgtagaggactggggggatcacgctgcggcagctgcaagcgcgtgcatggtgggtggcggcggcggcgtggaggaggagggctcggccgccatgcctctgtacagcttatatggtggtggtagtcacagtcacagccacctcgctgcagctggtgaccatgagatgccgccggcgccagcagcagcagcagcaggggccaataagtctcagctgagccagatgctcctcgcctcgtcgcctaggtcctgcgtcaccaccagcctcggcagcaacatgctcgacttctccaacaacggcgtgcccccggcgcccgatcagctgaagagccaccaccaccatcaatccgataactcatccgaggtgaggaaggagagactgggtgacagaataactgccctacaccagatcgtttctccgtttggcaagactgacacggcgtccgtcctgcaagagaccattggctatatcagattcctactgggacaaattgaggctctcagctacccctacatgggccacggcaatgggacctccattcaaaatggaccaacaactggagaaaggaaccatgcagggctcctaccagatcaataccccggccagttgctgaaccataataacaacactggagcacggcagcctgcagcagtcggccagcctgatgagcagcagcagcagcagggtggtgctaataataatgacgagacgaagaaggacctgaggagccgggggctgtgcctcgtcccggtgtcatgcacgtcgcacttcggaggggacaacgccgctgactactgggctccggcgccgctcggtgggatcctccgctagagcgagcgcgccattgaagcatgcatatgcgttttctcgtttagatgtggcgagctagctgctgttcgttccgtacaagtatatgttcgtcaggctgctgcagggtagctagctagagagagctgtgtctaattaagaatcatcgcaagggtggcgtgcatgcatatatatgctgctggttgctgtgggaaacataccatcatgagcagtcattcttggtaggggagaagctgcgtgcgtcgtatacctgtaaggctgattgctcttgatgctatgcgagtaagtatgacgaccctttttgtgggcgcgcaaggcttcattaattattttgtatcttcaagggagggcgcttcaagtagaagatctagatcttctctggtcccctgtcgcaaatttatttcgttggtcatgtatatgtaattaaaatctagcaataagttattagtgaacatgtttattt

SEQ ID NO: 32131 - DNA, 136 bp, Zea mays
  Clone ID: UC-ZMFLB73265D05_FLI
cttaacttcccaaaagatgaattaagaggtacgatcgagtacccgtgttcttgcgttgacaccatgtgctcattttggtgaaattttgttgttcatttgcatggagattagtggaaacaaagatcgctgttggcgt

SEQ ID NO: 32132 - DNA, 1660 bp, Zea mays
  Clone ID: UC-ZMFLB73265D07_FLI
caacactccagtggcggcaaagacctaacatttcaaaatcaatggccaagaaccccaaggcgcccgacacccgcagtggccgttctcccaccagaaggccccgaccacgccgcgccaaggcggtgccagaagcctcctccgcagctgatatcgaagacctggctccctcagtgcctggggccgctgcccctggcgctgccgcacccacggccctgcgcgcacagctgctccggtggtatgacgcgcaccgtagggacctgccgtggcgatgcgtaagcggcagcgaggaagagagggcgtacgcggtgtgggtgtccgaggtgatgctgcagcagacgcgggtgcccgtggtcgtcgcttactacgagcggtggatggcgcggtggccgaccgtacgaagcctcgccgccgctacgcaggaggaggtgaacgagatgtgggcgggtcttggctactaccgtagggctcgatttctgctggagggagcaaagcagatcatcgaaaaggggttgtttccttgcacggcgttagcccttcgtgaggttcgtggcattggggattacacagctggagcaatcgcttcaattgccttcaacgaggttgtcccagttgtggatggaaatgtgatacgagtcatcagcaggctttacaccattgctgacaacccaaaggaatcctcaacagtgaagagattctgggacctcgtaggtcaaatggttgaccctttgagaccaggagacttcaaccaagcgatgatggagttaggagcaacattatgtagcaagacaaagcctggttgctctcaatgcccagtctctagccactgccaagcgcttgcgctttcccgtgaaaaatcatcggttcaagttacagacttcccacgagtggttccaaaggccaaacctcggagtgatttcgctgctgtttgtgtggttcagattgcacaaggcttggaggaagaggcggcagacccaaagggaaatgaccatctctttttgctgatcaagagaccagaagagggcctgcttgcagggctctgggagttcccactggtccttgtggaccaagggaaaaccgatttgctgaacagaaggaaagcaatggacaagtatctgtcaaagttgcttagcatcgacatggttcggaaacctgacgtgatcctccgggaggatgttggtgagcatgtccacattttctcccacattcgcctgacaatgcatgtggagctcatggttattaatctcaaagatggtgtggatcgactatgcaaaaagggtgctgatagcacaaagttgaaacttgtcaacgagtcctgcgtggagtccatgggattaacatcgggtattcggaaggtgtacaacatggtcagggctttcaaggagaaaagcctcgctgtatctgagataggtcatgtacccacgaggaaaaggactagacggttaaagcggtagcctaagcaattaggcagtagaggcaagaactagacggttaaagcaagtaaccgtaagcaaattagggagtagagactgctagctagtgcagtacaacatgcagcttgtgagatgttgatttctgtttcggtgcatgtatctggcgtgctgatgtccaaaactgctaattgttgcaagcttgctggaagaaagaaggctgattggtactc

SEQ ID NO: 32133 - DNA, 1717 bp, Zea mays
  Clone ID: UC-ZMFLB73265E07_FLI
acaccgtcgctctcctcgcgtgcgagcgccgccactgcatcttcccatcgatctccgccgaccccgcatcttcccatacgagctgtgtttctccaagttcgctgctggccatatcgacgtcgtcatcctcgatccagacgagtgcgtgtgccatctccacgggtcttcgacagatttagcaagaatgtttggaagaggatctcctaggatgaacttgatccaagctgcaactatgaaaaaaatatcccccagatctactactaacaagcgcaagaagagaacatcaccaaaagttggtcgtcttagagcaaactggaatagtggactagaaaagggtttagttgaaattcttcaagatcacaacaatgattgttataagggtcaaaatgggtggtcatcggaagcatggaatagaattgtcaagttattccatgagaaattctcttatgtcacatttacaaaatgccaaatccaagataaagagaaagagttaaagagagactacaaggctcttaaagaggcaaggcaacaaagcggggtatcatgggatgagaggttgtgtagaatagaagcagaagaacccatttggaataacctcaccactagtaacgagagacttaagaagtttcggactaaatctttcccactatttgaggctttaggagagctatatgatggaaatattgctgagggaaccatgaattttacttctattgagccttctcgacctcctgtcacacaaccttgtcaaggtgctgctacacagccttctcaagctgctttcacacttacacaaccttctcaaatcgctttcacacaaccttctctagctgctttcgcacgaccttctcgaaccgcttttagacatccttctctagccgctttcccacagccttctcaagccgcttttgcacagccttctcaaaccattttcacacagccttctgaagccactttcacacagccttctgaagccactttcacacagccttctgaagccactttcacacagccttctcaagccgctttcacacaaccttctcaagctaatatctcacaagccatttgtgatgaagatgatgagctcagagtattggatccaccagcccctgcatcagtgagcaaaagggcaaaaaatgttggtactggtaattcaagaacaagaattaacaagcgtacacaagatgggaatgtggttgagatgatgggaaggtttctagaaatgaaagaaaaacaagctgaggcggatgaaagggccacaactaatgcaaatgaggatgatttccctattcaaacatgcattgctattgtggatggaatggaagagttttctgatgatgagaaggttgattcttatgatgtttttaaggatgcccaaaaccgggccattttcatgactgccaaagatgctacgcgcataaaatggttgaggaagaagattgcaagaacatgatatgatatatgaagctaaagtaatgaaggatgattttgtagtatcgtccagcataaagaaagaaagctgcaatttgtgctattgtcagagatggatatttaactttagcaatttgcaacttttaagtaatctgttaaattaaagatgagatcttgcagacttttcttattacctaatggattctcttattagctgattcaaatctaatcatgcatattgtagtaaggactatgtatgttgaatcaatgactctggttcaatttt

SEQ ID NO: 32134 - DNA, 1208 bp, Zea mays
  Clone ID: UC-ZMFLB73265G06_FLI
tgataagtcattgattattgaattgaaggctcaacttagtcatgaatttgataggaaagatttcagaccagcaaagaagattcttatgatggaattttagcgtgatcgtcatgctgatattccttttctatctcaaaaagttatattgagaaagttcttgaaaagtataatctcagtagttgcaaatctgttgctacaccatttgcttaacattttaaattgtcatcgaggcaatatccacttattgaagatgagaaagaacacatgtctcacataccgtattctaatgctgttggaaatcttatgtatgttgtgatctgtacaagacccgatttggctcatgttgttagtgtggttagcagatttatgcacaatcctggtaaagaacattggaatgcagtaaagtggattcttcgctacttgaaaggtacttctcattttggattattatttgacaagaattcagtgaatgaaattggtgttatgggatttgttgagggaattattgattttgactttgctggtgatcttgataaaagacggtccatatctggctatgtattttcattatgcggttctgtaatgagttggagggctttacttcagtctattactgctctttccactactgaagcaaaatatgtctcaactactaaacgggttaaagaagctatttggatgcaaggtcttatttctgaacttggtgttactcaggatgtcattaatgtttattgtgatagtcatagtgctatttgtctgaccaagaatgacatgtatcaattcaataccaagcatattgatatcaagtaccatttcattcgtgatattgttgttgaaggcaagattaaagtggacaaaatacatactgatgcaaattctgcagacatgcttacaaagccattatctaataccaagttcaagcattgtcttgacttagtaggtgttcgtggaggttagcaccctagtggtgtttggggaaaccattttataaatttagcgtcaaagggagatttattggataagatgatatgactctatctctatctcctttgcctataaaaataggtccccttgtaccctgtacaacacaccacataatagatccgttttctcgtgttttttcctccacattgggggacgtttttgtacgtttaactctgtgtctcctttttaccatctacaatcctaacagtactattatgcactgt

SEQ ID NO: 32135 - DNA, 2249 bp, Zea mays
  Clone ID: UC-ZMFLB73266A11_FLI
gccttattgaatatagggcacatcctttctgggtacaaaaatactgtccttcacatgaaatggatggtactccgaggtgctgtagttgtgaaagaatggagccaagggaatcaaaatatgtattactggatgatggtcgtaagctctgcctggagtgccttgattccgcagtgatggatacaaacgactgccagcctttgtatcttgaaattcaggaattttacgaaggactgaatatgaaagtggaacagcaggttcctctgcttctggtcgagcgacaagctttgaatgaagccatggaaggagagaaggctggtcaccaccatcttcctgaaacaagaggactatgcttatcagaagaacagactgttagcacgatactgagaccaagaatggctggaaacaaaattatgggaatgataacagagccatataggctgacacggcgatgtgaagtgactgcaattcttattctgtatggtctcccaaggtgaaatgtcaaccttttgttttgtataatgtcataatcagtacctcctgaccgagacaatctgctgccccagctttaatctctacgtgcacttttgccctctttcttttcactatttgccattgcccctgctttggccaagtcaacacacagttgcccctggttttgccacttttttgcaatgaaagtaggcaaaaccatagggatcagtgtgtttgagttggttaaaaaaaactcagtgggagagaaagagtgggagagaaagactgccctcacggtattatattaagaagagaccgaaatatggtcacgcccgagaaaatccctgaaccctggcttcccatcactagcgggccgtcactgcccactctgcaacgccccagccggagggtggcgcgcaggctgtaacctgggagcgggcggggcacaacgaggaaattttttttaaccaagctagaaattcgctcccaagggggattgaacccaggacctggaggtgctactcggaagccttaaccattacgctggaggcagcaagggcaatggtgcagagttaaagaaaaggggcacgcgtgcagtttagaggtcagagttgaagaaaatgggacaactaggtcagcaaagtggtttctttcagtctcttcagatgttttttccttctttgtgccctccaaaaagttgcatgagaaccgagctagtgcttaggtcgataagcaaggtgggctatgatgggtgtgtgtaggggtggtaatgggctctatgttttagattataaaatttaaggatcggatcattattaggatcggactctatttttattcatttttgaactaaaaattaattaagagattaaacaaatcgtgaagaaacatttgagttgtgatccattaccacccttaggtgtgtgtgagtagcgtgtgtgtgtgttcacatatgaaccaatgctacagctgtacccagatgcgaggcttcaaaaaaaagttgcatggaattggagatgtctggagtatgaactgactgcagacttcacgaggaaaatagtttactgttgtccatcgtcacaaatatcttctcctataccatgttgttttgtttggttctacattgttgaatcattaaggatgctcaaatttgtttgtatagacttttatggtgttttgttcttgcagattgttgacaggttcaattttagctcatgagatgatgcatgcatggttgcggcttaaaggataccggacactgagcccagacgtagaagagggcatttgccaagttcttgctcacatgtggatcgagtcagagatcatggccggatcaggcagtagtgccgcatcgtcatcctcaggatcttcgtcatccacatcatcgaaaaagggcgggcggtcccagtttgagcacaggcttggggactttttcaagcatcagatcgagacggatacttccatggcctacggagatggtttcagaactgggaatcgagccgttcttcattacggcttgaagcgcacccttgagcatatccggctaactgggacctttccattttgaagtagcatggattcatattttgggaaagcttatattatatacatgattttcttccagagttccattacaaccaaagagataaattgtaaaaaaacattctttccagaatccagagatataatatctatgaaggccaaaatgaagtattaaatgattgagatcgatggtcagtctgcccaatcattttgtattctgatcaaactctggaatg

SEQ ID NO: 32136 - DNA, 2159 bp, Zea mays
  Clone ID: UC-ZMFLB73266D01_FLI
cgccccgctccacactcccggccggaatctgaaccgaatgaagtctagtgcagtggtggtggtgatgcaatctcgccgttgccgtccgtagcaaccgcacgcttcctcgctcgccgcgaaccctagagagcaggtgtcggtgtcatggccttctggtggccgctgctggtgctcgccgccgcatacgcgctctgtcgcctgctcctcttcctcatcccgcccaccgtcccatccatcgacgtcgacgcctccgacgtgttggccaaggaggacagcttcatctacataccgagaaggggtaaatcaactcagactgacaaggtccaatgctatgaaccagcgaccatgaaatacttggggtacttcccagtggtgactcctgatgaggtcaaggaacatgttgcacaatccaggaaagctcaaaggatatgggcaaaaagcagcttcaagcaaaggcgccagtttcttcgaatccttctcaagtatatacttgaacatcaggatctcatatgcgaggtatcatctcgggacactggaaagactatggttgatgcttcattaggagagataatgaccacctgtgagaagattacctggcttttggatgagggcgagaagtggctgaaacctgaatacagatctactgggagatcaatgctgcataagagagcaaaagttgagttttaccctcttggagtgattggtgcgattgtatcttggaattatcccttccataatgtttttaatccagtgctagcagcagtattctccggtaatgcagcagttataaaggtctcagaacatgcgacttggtcgggctgcttttattttcgtattatacaagcagctctttcagctgttggtgcacctgagaatctggtgcacataataactggttttgcggaaacaggccaagctcttgtatcatcagtagacaaaataatatttgtgggatcaccaggtgttggaaaaatgatcatgaaaagggcgtcggagactctaatacctgtaactctggagcttggtggcaaagattcatttattgtgtgtgaagatgtagatttacccagtgttgttcaagttgctactagagctgctctgcaatctagtgggcagaattgcgctggtgctgaaagattttatgttcacgatgacatctattctgcctttgtttcacagatagtgaagacagtcaaatctataagtgttggccccccattatcaggcagatatgacatgggtgcaatctgtatgattgagcactctgagaaacttcagaatcttgttaatgatgctctagacaaaggtgccgaaattgccgtcagggggagttttggcaatcttggtgaagatgcagttgatcaatttttcccaccaactgtcctggtgaatgttgatcacacaatgaaaattatgcaagaagagacatttggacctattataccaatcatgaaattcagttctgatgaagaggctatcaaacttgcaaacgactcaaaatatggtcttggctgtgctgttttttctggcaaccagaagcgtgccatcagaatagcgtcccagttacactgtggggtagcagcaatcaatgattttgcttcaagttacatgtgccagtctttgccattcggtggtgttaaagacagcggattcgggagatttgctggcgtagaaggcttgcgagcttgctgccttgtgaagtctgttgtagaagatagattgtggccatatattagaacagtgatcccgaagcctatccagtatcccgtctcagagcatggatttgagttccagcagttgcttgtggagactctgtatggctatagcgtgtgggacaggttgcggtcccttgtgaatcttataaagatggttaccgagcagaattttgccccgacttcaaatgcgaccacgaagaaaaggcgatgagacgaatgcccggggggttcattgaatctgtttatggtaagtctgatctctggacgctgtaaacctccccaagctgctgtgatcggccttgtttgctctctgaaacaatctcgagcctgggagcttgtgtattcaagcgctttagctttcatttcagaaccttcttttctctctctctcccttgcttattaacacccaaatgcgtgggcaatggaaatgaaattccactgtgg

SEQ ID NO: 32137 - DNA, 584 bp, Zea mays
  Clone ID: UC-ZMFLB73266E02_FLI
aattgatcgttatgcaagtgacaatgttaacaagctccttgttgggaacaagagcgacctaactgccaacaaagttgtggcaactgagacagcaaaggcatttgctgatgagatgggcatcccgttcatggagacgagtgccaaaaacgccaccaacgtggagcaggccttcatggctatggctgcatccatcaaggacaggatggccagccaaccagccgcggccaacgcaaggccagcgacggtgcagatccgcgggcaacccgtcaaccagaagacgtcttgctgctcgtcttaagcttgcctgatttctctggttccttgtgactattactaccgtttgtgcgagcatgcaaatgtatttgttgcattattgctgatagcatctgttcgttggccagatgagtagagagctgaaaaaatgttaagaacaccatagagagaagtctatccgtgctctctcaacttaaggagcaaacagcaagacttcattttttttctactttactgtttattagtcgcgttacatttgtgaacagttattgtaatgtctttttttttaactctgtattcgtagtgagatg

SEQ ID NO: 32138 - DNA, 2185 bp, Zea mays
  Clone ID: UC-ZMFLB73266E04_FLI
ggaaaattttagataccctgccgcacgccgcgaccttcggccccgtctccggtctccgccttcccccacctattggggagcgctcctgattcgcgggagccagcgggcgagacaaagagaatcccccgctcctgcgccgccgcggatcagcgccgtcgccgatcggaggctctcgcttcccccggcgggcggcgcgcgccgggagatggacggcggcgcgggcgcgggcgccggccggaggaacgtctcatcgtcctccggatccaggaggagggtcctgcccgccgagaacgggcacggccatgacgccccgccgccctccaggcggtcctccgtctccctctcccgcggccactccacgtcactgaccggcgagaggaccgtgaaaaggctgaggctgtccaaggcgctgacgataccggatcacacaaccgtgcacgaggcttgtcggaggatggcgtcacgcagggttgacgccgtgctgctgactgactccaacgctttgctctgtgggatcctcaccgacaaggacataaccacaagggtgattgctcgtgagttgaagatggaagagacaccggtctccaaggtcatgacccgaaaccctgtatttgttctcgcggacacgcttgcagtcgaggcgttgcaaaagatggtgcaaggtaagttcaggcatctgcctgtcgtggagaatggcgaggtcattgcaattctggacatagccaagtgcctatatgatgctattgcacggatggaaagggcggcggagaaaggaaaagcaattgccgctgccgtcgagggcgttgaaaagcattggggagcagctgtgcctggtcctaacaattttattgagacgcttcgagaacggatgtttaggccatcgctgtctactattatctctgagaatccaaaagttgtcactgttgcaccatcagacatggtgttgacagcatcaaagaagatgctggaattaaaagtgagttcagcagttgtagcaattgaaaacaaacctggaggaattctgacatctagagatatattgatgcgtgttatcgcccaaaatcttcctcctgagtccaccacggtcgagaaggtcatgactcagagtcctgaatgtgccacagtggacaccccaattcttgatgctcttcacacaatgcatgatgggaaatttttacatttgcctgtcctggacagggatggaaatgttgtgactgttgttgatgttcttcacataactcatgctgcaattgctacggttggaaacagcggggcagctggatccgaggcaacatctgccatgatgcagaggttctgggattcagcaatgtccattggacctattgatgatgacgatgactcgagaagtgaagggtcgactagagtggtatctgaggcaacagatataggaagaccagccttctttccagcttctggcttatcaaacacttttgggttcaagattcaggataagcaagggaggatgcacagatttaactgtgaaacaagcggcctggcagagctgataaccagcattcttcagagggtcggcgacgacattgacagaaaacacctgccgcaaattttgtacgaagacgaggaccgtgataaggtcgtgctttcgtcggacagtgaccttatagccgctgtggaccatgcgagaaagatcggttggaagagcataaggttgcatctggattacgccggcgttggccggcggaagggagggggtggaccttcggacttggagtacgctggcaaggacgcagcatgggcttctgcgtacagcgccgtcgcggcaggggcggctctggttgctgggctcggtgtgatggcctacttgaaacggtcggggtaaaagcttggaggcggagagcacgacggcagagggagcacacgcttctcatcggatctgtgtgatacaaatgatactgcgtcggaacgagcagaatggctgtgtaagtaattcttgtgaaaaagagagagagagagggagattttaataatactagtgtcaaggcagtgaatggccgcctgcatacgagggagtacacggaactggtcgagcctttttggtgggttcagagtctccacgactaatttaccacggctgttagcgtcgtcacgattgtatttgtatcataaatcacacgatcattatacaagaagagtcttgttgagcctc

SEQ ID NO: 32139 - DNA, 1857 bp, Zea mays
  Clone ID: UC-ZMFLB73266G03_FLI
cgggctcggaaagctgaggagaaaggacttgattgggaagccgcctcagaaaggacgctcctccccaaccccatccccgcccccgcgggctcggcgggttgcgctgctgcggtgcggtgagacgcgggggcacggacggaggccgccactggatctcgtggagctggcccgcgccgagagcgatcatgagctctagaggccttgtccgcctcccggtttcctgtagtgctgctgttgatggagtcaatggatgcctcacctacagtacatgtcgttcaagaaactactactatcagtattctcataccactaacttgcaaatttcaccagtagaccagatgcctttgcctcggaaattaaagaaatcaattcagcgaaacgcttactttttaacccagaagaggaagctcgtaccacactgttcatcagaccttagtacctcctgcagaggagtgcccaactatttatcaatcaatgttttgcaagaccaatcaaatacaaaacagggagctattcgtaaagcgcttgtcattttgaatcctaattctggattccgcagctctcgggatgttttctaccagaaagtgcaatcaacattgaagctttcaggcttcaagatggaagtcattgaaacagcatatgccgggcatgcaaaggttctttcttctactgttgacctcaaaaaattccctgatggtattatatgtgttggtggcgatgggatcgtcaatgaggttttgaatggattacttagtagagacgattttgacgtggcaattcgatttcccattgggataatacctgctggttctgataattcattggtgtggactgttcttggcatcagggatcctgtttctgcggcaatcgctttagctaagggggatttcacaccaatagatgtgtttgccgtaaagtggatccaagctggagtgactcattttggtttgacagcttcctactatggtttcgtagctgatgttctgcaactgtcagaaaagttccgcgtgcagctcggtcccttccgttacgttgttgctggccttctgaagtttctttcattaccccagtacagatttgaggtggactatctcccttcatcgctgcaggggagaagttctgaatcaagaccactggctgaaaaacgtcacgaacagctttctgatgacggcaaggttaggagaggcacacagaccaacggtaggatcaaagacgactgggttaccaggaacggggagtttcttggcatttttgtttgcaatcacttctgcaagcctgcccaggggttactttctcctgttatcgcaccgaaagcgcggcacgacgacggcagcctggacctgattctcgtccatggaagcggcaggctgagactgttttgcttctttgttgcctatcagctctgctggcatcttctactcccctacgtggaatatgtcaagataaaagaagtgaaggttaggccagttggcagtacccacagtggttgtggcgtcgacggtgagcttcttgatggagagcgcggtgctgaatggcagtgctcgctgcttccagcacaaggcaggctgcttggccaggatcccggtgctttcaactagttagggctcgttcggttagctctcaatccatgtagattgagtgagattagatgagtttgaatcccaaacaagtcaaacttcttaattttttccaatcccatctaatccatgtgtattgggaataaccgaacaaggcttactgttttatctgtccagcagtaccgaggttgttggttaatttcatgataagagagcgagtttcagcaatgttcgtatactgattatacagtattctgtctctatagattgtagctgcagc

SEQ ID NO: 32140 - DNA, 1763 bp, Zea mays
  Clone ID: UC-ZMFLB73266G07_FLI
gtttcttgctccaaccgccttacctgccgttgactcgcttgctgcctcggctcatggggcgctacctgtaggatcatggggcgcgggcgcggccacctcctgctgccggcagcagccgcctgcctgtgggcgctgtcgtgcgcgctgctgctgcacgcgtcccctcacggcgctggcgccggcgccggcggcctgctgagggtcgggctcagcaggcgcggcggcgggctcgaccagcgcgcgctggcggcggccaaggccgcgaggcagcaggaggcaagccgtctcggggcctccggcggcggcgacgtccctctcgtcgactacctcaacacccagtactacggggtcgtcggcatcggcacgccgccgcagaacttcaccgtcatcttcgacaccggcagctccaacctctgggtcccctcctccagatgctacttctcgattgcctgctacctgcaccacagatacaagtcggccaagtctagcacgtacaaggcggacggcgagacctgcaagatcacctacggctccggctcgatcgccgggttcttcagcgacgacgacgtgctggtcggggacctgaccgtcaaaaaccagaagttcatcgagacaacgcgcgaaagcagcataacgttcataatcggcaagttcgacggcatcctcggtctcggataccccgagatctccgtcggcaaggctcctccgatctggcagagcatgcaggagcaggagctgctggcggaggacgtcttctccttctggctgaaccggagcccggacgcggcggcggccggcggcgagctcgtcttcggcggcgtcgaccctgcgcacttcagcgggaaccacacctacgtccccgtctcccgcaagggatactggcagttcgacatgggggaccttctcatcgacggccactccaccggtttctgcgccaaggggtgcgctgccatcgtcgactccgggacttccttgctcgctggcccaacggccataattgcccaggtgaacgaagcgatcggggcagacgggatcatcagcacggagtgcaaggaagttgtgagccagtacggagagatgatcctcgacatgctcatcgcacagacggatccacagagggtgtgcagccaggttggtctgtgcgtgttcgatggcgctcgatctgtcagcgaggggattgaatctgtcgtcgggaaagaaaacctgggctcagatgtcatgtgctcggcctgtcagatggctgtcgtgtggatagagaaccagctccgcgaaaacaagaccaaggagctcatactgcagtacgctaaccagctgtgtgagcgtctgccgagccccaacggagagtcaacagtcagctgccaggagatctccaagatgcccagccttgcgttcaccatcgcaaacaagaccttcaccctaacaccccagcagtacattgtgaagctggagcaaggaggccaaaccgtctgcatcagtgggttcatggcgtatgacgtgccaccgccgcgtggtcctctctggattcttggggacgtcttcatgggagcttaccacacggtgttcgacttcggcaacgacaggattggcttcgcggaatctgcatgagtgtggagagcactctcatctttataaagacgataccctatgtattagggatgtgtagtttactgtctatccactacatgccaacagtacgctgcaaataaatcggtggccaaaattgctgaaaccagaaacgtgaacagtactgctttctttgtttc

SEQ ID NO: 32141 - DNA, 2000 bp, Zea mays
  Clone ID: UC-ZMFLB73267B01_FLI
gccaccgccaccatcaccgctaccgctacggcttcccacctcaaaaccctaaccctaaaccccctccgcgcgggagccctcgcccatggagaaccccaggccccaggccccagcactcacccctcccatggccccgctccccgtccccatccacccgccaatcgccccaatccccgtccctccgccccgcgtgcccgcccccgccccagccgccgccgcttccatggcctccacacccactccctccactggggacggaggcgaggccgagtacgaagtctccgacgaccaccgcgccgcgcgggagcgccacgagcgcgcggtgcaggagctcctccagcggcgccgcgcctacgccatggccgtacccaccaacgactccgctgtgcgggcccgcctccgccgcctcggcgagcccatcacgctattcggcgagcgcgagatggagcgccgcgaccgcctccgagccctcatggtccggctcgaggccgatggccaggtcgaccgtctcctccgcgcgcaggaggacgaccaggccgcgcgcatcggcgaggaggaggaggaggagcagatcgagtaccccttcttcaccgagggctcgcaggagcttctcaaggcgcgccttgacattgcacggtactcgctgccccgtgccaaggccaggatcgagagggccaagcgacgccacgaggaccctgatgaggatccagaggcggaggccgaactcgtcgtcaagcaggccggggagtttgtgctcgagtgcagtgagattggagatgatcgcccgctcactggctgttccttctctcgtgatgcatcgatgctcgccacaagttcctggagtggaatagtcaaagtatggagcatgccacaaataactaaggttgcaaccttgaaaggtcacacagaacgtgcaactgatgttgtcttctctcctgctgatgactgcttagcaacagcttcagctgatagaactgcaaaattatggaaaccagatgggtcacttttgatgtcttttgatggccaccttgatcgtcttgctcgccttgcttttcatccatctggaaagtaccttggtacagctagctttgacaagacttggagattgtgggacatcaatactggcaaggaactgctactccaagaggggcacagcagaagtgtatatggagttagctttcaccctgatggttctttggcagcatcttgtggtcttgatgcatatgctcgagtatgggatctgagatctggaagattgttctttacactcaagggccatgtgaaacctgtcctaggagtcagcttctctcctaatggttatctggttgcaactggaagtgaagacaatttctgtcggatatgggatttgaggaaaaggcaaatgttgtattctattccagctcataagagtattatttcacatgtgaaatttgaaccccaagaagggtattatttagcgacttcttcctatgacaccaaagcagccctgtggtcagctcgtgattacaaaccaatcaaaagtttggtgggccatgagtcgaaggttactagtttggatattagtggagatggacagaagattgtgactgtgtcgcttgatcgtacgataaaaatttggtcatgcagaagtagcacacaagataatgagatggaactggattgagacaattgggttcattgttgccagccccgcttctctattcatcagctagaagtagatattctccctttttgctgatcagacattccaatcagtcattggtgctattgcacggaactatttcatagcatgtataaacccttggcttgagaaatatgttctgcacttactttgctgatattccttgtcatatactagggctagtttggctaccccattttttaagggattttcatttttctaacgacccgtttggatcattagaatttaacaatagtaattttggcatatattaattaagctaattcagttttatacaaaatatattatatattatttt

SEQ ID NO: 32142 - DNA, 1633 bp, Zea mays
  Clone ID: UC-ZMFLB73267E03_FLI
cgggaccagaacctgcagctccaccggcggggccacaacctgccgtggaagctgcggcagcggagcggcaaggaggtccggaagcgggtgtacgtgtgcccggagcccagctgcgtgcaccacgacccgtcgcgcgcgctcggcgacctcaccgggatcaagaagcacttctgccgcaagcacggcgagaagaagtggaagtgcgacaagtgctccaagaagtacgccgtgcagtcggactggaaggcgcacgtcaagacctgcggctcccgcgagtaccgctgcgattgcggcaccctcttctcccggagggacagcttcatcacccaccgcgccttctgtgacgcgcttgccgaagagagcgccaaggcgcgggcggaggcgccttccgcggaggatgggagctcggcagccgccgtggttccgccaccggcacccccgcctgcgccggcgccactgcgacagcaaccgcccccgcctgcgccgcatcatgcggagccacgtaatgagactgacacgaatgcgactgaggccgtccagttcgcgccgccgcctccgccaccgccgccgcctccgccaccgccgccgccgcagttacaggtaccggtgctttcgcaagcttcggtgagcgctgctgccaacgttggcgccagcagcagcagcagcagcgtcgcggggacgtcgcagagcctgctcggcggtatgttcgcgccgtcgtcgatggcgtcagcgccgcagtacgcggacctcggcggccggccggagcgcgcccatcccgccaagcccccgccgctgtgcctcgccacggacgcatcgtcgtcgatcttctcggcggcgccggcggtgaccgccgagcgccagcagttcgcgccgccgcctccgtccccgtccccgtccgcacacatgtcggccaccgcgctgctgcagaaggccgcgcagatgggcgccacctcgtcgagctcctcgttcctgcgcgggctgggcctggacgtctcctcgtcgtcgccgggcgcctcgtcgtcaggccagcagcaccagcaccaggaggccatgcgggtgtcactcccggacgcctcgctgcagcaatggccgccgcggctggagctggagccggcgccaatgctgtcggccgggctcggccttgggctgccgtacgactccaccggggctcaggtgagcctgccggagctcatgatgggccagtcgtctctgttcagcgggaagccggcgacgctggacttcctggggctcgggatgagcccgtcgggcgcgtcggcaggacgaggcctccccgcgttcgtccagcccatcggcggcatggccgggaccggggccggcgcagccgagacgttcggcgccgggcgtggcgcgcaggcaacgccgtgggagaggaatccgagtagctcgccgatcctgtaactaaaaacttggatagcaatgcaagtagtttggattgaaccccaggcgctgtgattttgggcaaaaggaagaggaaacagtagacgccaggttcgattagcagctacgtagtcttatgttgcactgccggttcttgctgttcttttgtttctcttagctcggtacgaagaaactcactcactctcctacaagaatgctgctttgcacttgcttc

SEQ ID NO: 32143 - DNA, 2038 bp, Zea mays
  Clone ID: UC-ZMFLB73267E04_FLI
gcatccaatccacaaagagctgaggttagtcagccatggcggcaccgccgaccgaggactgcggctggctgctgtacctctccctggccgccaaatgcggcgaccctagccgcctgctcggcttggcggcggtcttcgtcggcgcctgcgtcgtaacgtcgctcctgcactgggcgtgcccgggcggccccgcctgggggcggtactggtggaccaggcgaggcgggctgggcatcgtccgcgccgccatcccgggaccccggggcctgccagtggtcggcagcatggggctgatgaccggcctggcgcaccgcaagctcgcggcggcggcggcggcggccgggggtcagggcagcagcaggcgccgccgtctcatggcgctctccctcggcgagacccgggcggtggtgaccggcgacccggacgtcgcgagggagctgctcggcagcgccgccttcgccgaccgccccgtcaaggagtccgcgtacgggctcctcttccaccgcgccatcggcttcgccccgcacggcgcctactggcgcgcgctccgccgcgtggcgtcggcgcacctcttctcgccgcgccaggtcgcggcctcctccgcgcagcgcgcggtcatcgcgcgccagatggtggacgccgtgaccacggccgcccccgcccccgcccccgccgtcgtggtggcgcgccggttcctgaagcgcgcgtcgctgcacaacgtcatgtggtcggtgttcgggcgcaggtacgacctgctgctgctggcggcggacggcgaggagctgaaggcgctggtggacgaaggctacgacctcctcgggcagctgaactggtccgaccacctcccgtggctggcccgcttcgacctgcagaggacccgggccaggtgctccgcgctcgtcccgcgggtgaaccgcttcgttggcaacatcatcgacgagcaccgtgcgcgcctcggcctcggcgacaccggcggcgtcacggacttcaccgacgtcctgctctccctccagggcgtcgacaagctctccgacgccgacatggtcgccgttctctgggagatgatcttccgaggcacggacacggtggccgtcctaatggagtgggtgctggcgcgtctcgtgctgcaccaggacgtgcagagcaaggtccaggaggagctggaccgggtggtggggccaccgggccaggccgcatccgtgacggagtcggacaccgcctcgctcgtctacctccaggcggtcatcaaggaagtgctgcgcctgcacccgccaggcccgctgctctcctgggcgcgcctggccacgtcggacgcgcgcgtaggcgggtaccacgtgcccgcgggcaccaccgccatggtgaacatgtgggccataacgcatgaccccagcgtgtgggccgagccgacggagttcaggcccgagaggttcgtgggcgcctctgctggtgctggtgctggtgctggtgccgaggacgttccgatgataatgggctcggatctccggctcgcgcccttcgggtccggcaggcggagctgccccggcaagtcgctcgcgctggctaccgtcgggttctgggtggccaccctgctccacgagttcaaatggttgccgccgtgccgcggcgtcgacctgtccgaggtgctgaggctgtcgtgtgagatggctgcaccgctggaggcgagggtggttccacgtcacgcggtgtgagatgacgaggatgagacacgtggcctggggataggagaagttgcccgatcgtctgtctagattgtactgtactatatatcttatcttagctttccttaccttgtagcagagaacgtaacgtggcccggcggcgatggatgatgagaatgagatgtgtaaaagaagaaaaagagcatgcccgagtgccatatgctttagagtggactgtgtatatatgatgatgctattgctagcagctagtggaaggcagtagtacatagcagtacctcctgcagcgccggtttgatgcctacgtgtgtaatgtaatgtaactttaccagcttgcatgc

SEQ ID NO: 32144 - DNA, 1344 bp, Zea mays
  Clone ID: UC-ZMFLB73268B01_FLI
cgcagttgttgcatttcaaacaagaaggttttcttcttggtgctggaagtccttctggatctgatgctcacatctcatcaagtggcattgttcagggacatgcgtactcaattttgcaggtaagagaagttgatggccacaaactcatccaaatcagaaatccatgggcaaatgaagttgaatggaatggaccatggtcagactcgtcaccagagtggacggaacggatgaagcataagctcatgcatgttccacagtcgaagaatggggtattctggatgtcttggcaagattttcagattcactttcggtcaatatatgtttgtcgtgtttatccacctgagatgcgttactctgtccatgggcaatggcgtggctacaatgcaggtggttgccaagattatgactcgtggcaccaaaatccacagtatcgacttagagtaacaggacgtgatgcactataccctgttcacgtttttattacccttactcagggtgttggtttctctagaaagacgaatggttttcggaactaccaatctagccatgattcttcaatgttttacattggaatgaggatactcaagacacagggctgccgtgctgcttacaatatctacatgcatgaaagcgctggtggaacagattacgttaactcgagggagatatcatgcgaactggtcttggatccttatcccaaagggtacacaattgtgccaactaccatccaccctggggaggaagcaccttttgttttgtcagttttttcaaaagcatcaatcagactagaggctgtttagttcaagattgagatcccatgtgtttgatggtagctgcgtctgctgggcacccgtgcacgcaggatccagctgtgggttctcgggaactagataatgggtataggaattgcctcctggacaacttcaatcaatcttgctgcatgcaagtacctaagttcggttgcttgttgcagatctgacaaacggcaatgcttcttgtgctgaagggaaaggagagaaggcatgatccatggttctttggtagctgcgcaaagtgcagggtgagaggcttggttcaatgtttgtagatagccgtggtaactgacctggtagcccatcctatgtataggtgtcccgtttaccctgtaaatgctatagagttaggttaggtagcctgtcgttcctgttaacgcatagggctcttatgcagctgtgaaatgtcttgttagcaagctgcagttttgctgatttgagcgtggagtagtcggccatagctgttcccattggtttgccctgtatgtaatcggaatctgatgtcattcaatgaacctattttttgggtgcc

SEQ ID NO: 32145 - DNA, 995 bp, Zea mays
  Clone ID: UC-ZMFLB73268G04_FLI
gcctcgcatctattctagcctccgccctcagctcaccaccacgacccgagggaaagggagaggggacgaatggcgagctctcagtgctgcgataacccgccagccctgaacccggcctgcgggaagggcaaggtcgtcgacagcttcggcgggctcaaggcctacgtcgccggccccgaggactccaaggccgccgtcgtcctcgttgccgacgtcttcggattcgaagcgccgattctgaggaacatagccgacaaagttgcttcgtcagggtactttgttgtggtaccagatttctttcatggggatccttatgtacctgagaatgctgagaagctcatacctgtgtggctgaagtcacatactccggaaaaagggtttgaagaggcaaaaccagttatcgcggctctaaaggagaagggagtgtctgccgttggagctgcagggtattgctggggtgcaaaggtcgttgtggagttggcaaaagcaaatgagctcctccaggctgctgtactattttttttttccaatataacaccagaggtcaaatgctcaatctctatacttggagctgagatggatgtgaggtccccaccagagttagtcaagcaattcgagcaagccctttctgtgaactcaggggttggtcacttcgtcaaggtcttccctggcgtggcgcatgggtggagcgtgagatacagcctcgatgatgcagctgccgtgaagagcgctgaggaagcctttgcggacatgctcgactggttcaacaagaacctaaaatgaactctgcagttgccatcatgccttgtaataataatgcgtattccattgtcctggaatcgggtctgctgtggtagggctgccattcagagttgaacaaatcatttagaaatcattatgttgctcggcaacagattaagaccctatattgtacaactcaacttcactagtaaggccccgtttcaatctcatgagctaaactttagcttcctgct

SEQ ID NO: 32146 - DNA, 1334 bp, Zea mays
  Clone ID: UC-ZMFLB73268G12_FLI
gcagatcttcgtgaagaccctgaccggcaagactatcaccctcgaggtggagtcttcagacaccatcgacaacgtcaaggccaagatccaggacaaggagggcattcccccagaccagcagcggctcatctttgctggaaagcagcttgaggacgggcgcacgcttgccgactacaacatccagaaggagagcaccctccacttggtgctgcgcctcaggggaggcatgcagatcttcgtgaagaccctgaccggcaagactatcaccctcgaggtggagtcttcagacaccatcgacaatgtcaaggccaagatccaggacaaggagggcatcccaccggaccagcagcgtttgatcttcgctggcaagcagctggaggatggccgcacccttgcggattacaacatccagaaggagagcaccctccacctggtgctccgtctcaggggtggtatgcagatctttgtgaagacactcactggcaagacaatcacccttgaggtggagtcttcggataccattgacaatgtcaaggccaagatccaggacaaggagggcatcccacccgaccagcagcgcctcatcttcgccggcaagcagctggaggatggccgcaccctggcggattacaacatccagaaggagagcactctccacctggtgctccgcctcaggggtggcatgcagatttttgtgaagacattgactggcaagaccatcaccttggaggtggagagctctgacaccattgacaatgtgaaggccaagatccaggacaaggagggcattcccccagaccagcagcgtctgatctttgcgggcaagcagctggaggatggccgcactctcgcggactacaacatccagaaggagagcacccttcaccttgttctccgcctcagaggtggtatgcagatctttgtaaagaccctgactggaaaaaccataaccctggaggttgagagctcggacaccatcgacaatgtgaaggcgaagatccaggacaaggagggcatccccccggaccagcagcgtctgatcttcgccggcaaacagctggaggatggccgcaccctagcagactacaacatccaaaaggagagcaccctccaccttgtgctccgtctccgtggtggtcagtaagtcatgggtcgtttaagctgccgatgtgcctgcgtcgtctggtgccctctctccatatggaggttgtcaaagtatctgctgttcgtgtcatgagtcgtgtcagtgttggtttaataatggaccggttgtgttgtgtgtgcgtactacccagaactatgacaaatcatgaataagtttgatgtttgaaatt

SEQ ID NO: 32147 - DNA, 1127 bp, Zea mays
  Clone ID: UC-ZMFLB73269H05_FLI
tgctgaaaaagtatatcgtgagttctccactattcttgagagtgaagttgaccttgattttgcatccgtcatggttcaggctttgaatttgattttgctcacatcaactgaacttggtgagctccgctctcttcttaagaagtcgttagtggattcctgtggcaaggacttgtttcagtcattatatgcttcgtggcgccactctccgatggctacaataagtttgtgtttacttgctcaggcatacagtcatgcgagctgtgttattcagtcgctgggagaagaagacataaatgtgaaatttttggttcagttagataaattgatccgtctcttagagactccagtatttgcttacttgcgtttgcagcttcttgagcctggaaagcacacctggcttctgaaaactctttatggtctcctgatgctgttgcctcagcaaagtgcggccttcaagatcttgaggactcgactgaaaactgtgccattcagtgaaaatattaagcgcacatcttcagcaaatccatactcccagattctgcaagtgacagaagatggcaatagaaaccaagatacacagaactatagtgcaatcaatttcccgtcccttctccagcaatttgagcacatgcagctgcagcaccgtaaccatttgaaggatcaactgcaatcccgcaaatctgcttcagctctaacgttatctcaggagatacaaagatacgaagcagcacattcctcttcgctatcagagattaacaggcccccttcaagaacatccaaaggcattttatgatgcatttgattattgcgatgtatgatatgtttcccagaagcatcatcacaaatatgttggggctttggttagtctccttgatttttccaaaggaggttgcatagggtacatagagtgtaatattttttgtttcgttcctagattttgtcaagagatggcaattatttattggagaaagctcgtttctgccctctagtcattcttttcttagccgtttcactgctcatctggtttctgtaatttttcaattgaaggccaaatgagcaaagtagtaattggagatatgttactactgttctgcttatccatctctaataaattagcgttgcaatgt

SEQ ID NO: 32148 - DNA, 250 bp, Zea mays
  Clone ID: UC-ZMFLB73270A04_FLI
caagcagtcactgaagaaactcgttgaggagctgttgacggattcactgtgaagggcgcggactgcggcaagttcctcaccgaggagaaggcaaagaggtcgtctggagcttgctccacatggacagcggacaccacattgaggctgtaaggcggagtcggcttgctttaagagtttgaagttatacagtagaaacttactattcaggctacggctccattccggccctcagtcgattgtggggtgccac

SEQ ID NO: 32149 - DNA, 1280 bp, Zea mays
  Clone ID: UC-ZMFLB73270C11_FLI
cagcgctggtgtgacgaagcgggcgaggccgtctggctgactattggcggaaccgcggaagaagcgcgcgtgaatctcctggatttacagactcgagggggagctgagaaaagagatgggttggggaatatcaaggttgattggactgaaggctgctgtcctgctttctgtggcgtgttttttccaaggattaggagtgatccttatctcatttcctctcatatatgcatccgtgattgcaatactagtctccatagcttcccacccatcaattgatcttcctttacttcttggcaaggcatccgatggaagttttccgctgtggtcatggatcatcttctcaccatttcttcttttcattcacctgtttgtgctgatacgaagatttgtgaaaaacgagcccttatacactgaggttgcagatggagtgtttgttggaggatggccttcttcggttgaacacctgccaccaggtgaccctgcaatcatagattgcacgtgtgagttgccaaaaagctcaactatatctaacaatgcatatctgtgtgttgctacctgggatacgagggctcctcaaccatcacaaattgagtctgccgtgcgatgggctgtgagacagcggtcacagaacaaacctgtctatgtccactgtgcctatggtaattttgctcttctgcctatgtttggataaggaactgtgttgtctttcatatatgtctttcttgcaaatagatatatttatgttcttaaatgtatttctgtggattagccatatttagataactgttgagatcatgatgatccacaatggaatttcatgtattggcgaaccatatattgtgtagcaactggagtcaggagacaacagtcatggcagaagtgtctgtgtgatgtgtgcgcttcttgtcgcattaggattggctgaagattggaaagctgctgagcaaatgatccatgagaagcgaccttctattagcatgaacactcttcaccgcaaaagcttggaggaatggtcaaaacatttgctcccctctaaaagaagtggggaagcagatgtgagttctgttatccattcggattataaccggaaataaaattagaccagcaagagacaggcgtgttcagatatttaagatgcattgtacatttggttgtattgtttgctcctgtcctagtgaatgcctatggttcaagttaccattttgtggtaattgtgttgtaaaaactatatgtatcgaattatattagtactgtagctttacacagttagttctttacgg

SEQ ID NO: 32150 - DNA, 976 bp, Zea mays
  Clone ID: UC-ZMFLB73270E01_FLI
ctcgccgtgctgtcctcctcgttcccgccgtccgccgcggcgttccgccgcgaggtggtcccctacatggcgcctctgctcgggttcctggcccgcacgggcgcgccgttcctggtgaacgcgtacccttacttcgcgtacaaggcggacccggcgcgggtggacctgggctacgcgctgttcgagcccggcgcaggcggcgtggccgacgccgccacggggctgcgctacgacaacatgctccacgcgcaggtggacgccgtgcgcgccgccatctgcgcggccaactacggcagggcgctggagatccgcgtgtcggagaccgggtggccgtcgcagggcgacgacgacgaggccggcgccacgccggagaacgccgccaggtacaacggcaacctcatgcgcctcgtggcgcagggcaagggcacgcccgctgcgcccgacgagccgctgcaggtctacgtgttcgcgctcttcaacgaggaccagaagcccggcccggcgtcggagcggcactacgggctgttcaagcccgacggcacccccgcgtacaacgtcggcgtcaaggcgcccaccatcacggtgcccaaaggcagcgggagtgggaacggcaccggcactggcggcttggttgtggcgcaaggacccggcggcgccgacggcgtcgggccgggcaccgggtactacaccgtgtctgccgcatcagtgtacaatgtgaagagcagacagcggcggcggcggagcctggtggcggcggctgccgtcctggccatggtgtccgggctctggtagtctgggactgggagagaacagatgacgagagacagtccatgaaagtgagcgcacgcatgcagctgaggcatatcgatcgtatcatatcatatgccagcgaattcgattgattcatcgtatggcttgtagctgtgctgaggaagacggtagacatgcatgcctgtatgtaattcatgattcatac

SEQ ID NO: 32151 - DNA, 1045 bp, Zea mays
  Clone ID: UC-ZMFLB73270E02_FLI
cttccctccgtctcccagctcgcgcaggcaggcgacacagcgacgctaaaaaccctagagcgaggaggcgtgccaggccagcggtttgcgatgacggcaccggcggacaaggggaagaaggccaagaccgatgccgacggcggcgaggagaacgagcaaatcgacggcgcccttgtcttctccatcgagaagctccaggagattcaggacgagctcgagaaggttaatgaggaagcaagtgacaaggttatggaggtggagcagaaatacagtgagattcgcagacctgtctatctcaagaggggtgacattatcaagaccatcccggacttttggctcacagcgtttttgagccatcctctactaagtgagcttctgactgaagaggatcagaagatattcaagtacttggactccattgatgtcgatgattctgatgttaaggcaggatattccatttaccttaacttctctgagaacccgtactttgaagacacaaagcttacaaagacctattcctttgttgatgatggaacaaccacaataaaagcttctcaaattaagtggaaggatggaatgggacctgcaaatggaaatggtattaacaagaagggaaacaagcggccattagtagtggaaagttttttctcctggtttagtgatacagagctcaagagtcttgctgatggtgtgcaagatgaggtggcggagatcatcaaggaagacttgtggcctaatcctttgaagtacttcaacaatgaggttgaagatgaatttgaaggagatgaagaagatgatgacgacgacgacgacgatgataatttggatggtgatgacaatgacgatgatggggaccaggagaactgagccctcgcgtttaggcggggaattatgtgacccgtttgggggattttttttggttgtttgacttagctggaactcaacttagggaactgtttagtgccttatgaagtcaaccaacttgaaaggagactgctatatcataatctcggtatatctatcaacgcagtttgacctgtgattc

SEQ ID NO: 32152 - DNA, 1538 bp, Zea mays
  Clone ID: UC-ZMFLB73270E12_FLI
gtctgcagtcgccgagccgcgtgtccgccgggccggcggttaccaagctcaccaaaaatctttccaggttcgaggccgcccatgttcgcctgcaggtctctcctcgcaagggctagtcggctcactcggcctgcgattccaagcgccgccggttcgccgcttcgttacctccaccagggatcatattgtcgaaataagttggcctcattcgtgatggaaggggcgcaaggatcaagcattgtgacaaaacacaataaaaggcagtctcctgtgcagagatggaggccagtttcaacagaagcagttccccagcatcaccaagatgacattattgagacatcaaattctggaagcaagaaaattatagaggattgcatagcttctagtgagaatttgccaccagatggaacaaccaatgttgttgaagttaccgccaatgatgcttcatcgtcaaaaaataatttaagttttgggtacagttcaactaaagtagttatagaagaccatgcggagttatctggcttcaataaggatctagctgggtccaatgtcttcgggacacattcctcctctgttgaggcggttcaaagtcgacagcttgactactctcatttcatatcacttccattggctttacacccagatcttgtcaacaaactgaactacttccagagttcgatccttggggaagaaaacagtaacaaagatgggagccaaagtgaaggttctattggtgaaatggactatgaccacaagcaagcggaagcaaaaatgggtgccaaaggctcccaatcagattttggcattgacaagtcaatatttatcaaacccgaaacgtttcacctgacggttcttatgttgaagttgtggaacaaggaacgtatagataaggcctcggatgtgctccagtcagtatctacccaagtaaatgaagctttggaaaatcgacctatttccatacagcttaggggtctgacatgcatgaaaggctttccagctaaggctcgggtggtatatgttccagtgctggaagttggtagcgaagggcgcctagctcatgcttgcaaagtcataactgacgcgtttatcaaggcaggcctagtttttgaaagggacgtgagagaactgaagttgcacgcgaccgtaatgaacgtgcggcacaggaagagcagaaataaacggaacacatggacggattcgtttgatgcccggggcatattcgggagatttgggaaggcggagtggggtgcatatcccatccatgagatccacctttctcagaggttcaagtttgacagaagtgggtactactattgctgctcgtcgatccccttgcctgcggagatgcacacggagtgaggtgtgtagctgtgatcatgttgtaggtttttaaggggcgtttatagcatatacatatatatattttaccgcagttcatgaggcgtttaaccttgttattagcgttggcccttaggggccaggtgttaccatgtatctatctatcggtttgaatcaccgatgggcaggtgttaccgtgc

SEQ ID NO: 32153 - DNA, 1332 bp, Zea mays
  Clone ID: UC-ZMFLB73270H08_FLI
caccctgagcagctcatcagtgggaaggaggatgcagccaacaactttgcccgtggtcactacaccattggcaaggagattgttgacctgtgccttgatcgcatcaggaagcttgccgacaactgcactggtctccagggcttcctcgtcttcaacgctgttggtggaggaacgggctctggccttggttccctcctcctagagcgcctgtctgttgactacggcaagaaatccaagcttgggttcactgtgtacccttccccccaagtttctacttcggtagttgagccatacaacagtgtactgtccacccactccctcctcgagcacactgatgtggctatactgctggacaatgaggccatctacgacatctgccgccgatcccttgacattgagcgcccaacctacaccaacctcaacaggcttgtgtcccaggtcatctcatcccttactgcctccctgaggttcgatggtgctctgaacgtggatgttaacgagttccagaccaacctggtaccctacccgaggatccacttcatgctttcttcgtacgctccagtcatctctgctgagaaggcctaccacgagcagctctctgtggctgagatcaccaacagtgccttcgagccatcttccatgatggccaagtgcgacccacgccatggcaagtacatggcctgctgcctcatgtaccgtggtgatgtggtccccaaggatgtgaatgctgctgtggccaccatcaagaccaaacgcaccatccagttcgtggattggtgcccgactggcttcaagtgcggcatcaactaccagcctcctagcgttgtgcctggtggcgacctggccaaggtgcagcgtgccgtgtgcatgatctccaactccaccagtgttgtggaggtgttctcccgcatcgaccacaagttcgacctcatgtacgccaagcgtgccttcgtgcactggtacgtcggtgagggtatggaggaaggtgagttctctgaggcccgtgaggacctggcggcgctcgagaaggactacgaggaggtcggtgctgagttcgatgagggcgaggatggcgacgagggtgacgagtactagagaagtttgctgatgacgcagcatcaggccagtgtgctgcccttatcccgtgatctgccgagagttgctcctgctatcgtgttatgtgtgtctgttctgaagtattgtgtggtttacaacacctgatgttgtaagagttgttaattcccctgcattgctaccgggttattgagaataattatggctgtttacgttgttgcttcatctcggagatgctttacatttaccaccttgctc

SEQ ID NO: 32154 - DNA, 636 bp, Zea mays
  Clone ID: UC-ZMFLB73270H10_FLI
ccgcatatcggggttaggccaaccgtccgccatctcaaggatgaattgctgctcttgaccatagggattggagcagcatttagtttatactttatcctggttttctctctcgagatgttgcatggtgtcagtgtgtcagatgtgccgtaacagatgactccaaaatggattgcatgctcttcaaatagctacagataactatcttcacataaaatggagagtacaatgtttataaaagaaggaatatggataaggatccagattctcctatagcatatgaagaggcaaaggaaatggcaagccaaagctgcacaatttctgatgatcactcgttgttactgttatccattatctcctcagaggcattgcttttaaattcaacagcagacatggcaggtacgtgtccactttcttctcaaggaattgcactagaggttggactttgtgggtcaagagaaatttaatgcctattgttaatacaacctttagctatttttccatgatgatggagttggacaagtaccatattgagtataagtgttagcctattatatctttgtacaaccatggcaaacgaataatttcttataacaccatgaagataatgtttaacgaagtgtgtttgcgtgcgtgtgt

SEQ ID NO: 32155 - DNA, 852 bp, Zea mays
  Clone ID: UC-ZMFLB73271D01_FLI
ctcagggtgaagaagctccagcaggaggccgcccggtgcctgagcttgcacaagacaatggagctgcagccggagctgtcgctcggccctgtgtggccgggcttcgccgccggtgacctggccgccaagagctcctcgtccgagtctgacggaacctcccggaagaagaggaagcactacaccgccagctgggaggagcctcagcagccgcccgcgagcctggagctccagctcaacgacccactgcctctcgactgggagcagtgcctcgacctccaatctgggaggatgtattacctcaaccggaagacgctgaagaagagctgggtcagaccccaggtgcagagcgtgaacctggacctcaacatctccacggctgccgccatcgacaactgtgccgccaacggtgctgctgccgctgcttccgacgacgaggacgagccaaggaaacccgctggcactttgttctctggaggcagcatggtggccgtgccgtgcgccaactgccatctcctagtcatgctgtgcaagtcctccccgtcctgccccaactgcaagttcgtgcagcctctggcacctgctgtgccgcctgcggcggtggcccattggaggatcgatgccgccgtcaagccgctggagaccctgagccttctccattaggcacatgcacttcaccggcagcagattgtagaaaggaaatcgtagttacgtagtagtggtgcatgggttagtattactattacctgggtaatgcatgagcggtcgaatgaaaattggaaatgtgaaactaccgtgcatgcatggtgacatgacaaaatacaaaatggtgaagccagcctcaaattaaactgc

SEQ ID NO: 32156 - DNA, 1145 bp, Zea mays
  Clone ID: UC-ZMFLB73271E07_FLI
gcggccgtcacccctccccctgcccctcccgagttggattgttcgcggaattggcggaggggcagccggatatgtcgtcgtcggttgggggcggcagcgcgggcggcggcggagtggacatggtcagcctgctggagaaggccaaggatttggaccagctaaagaaggaacaggacgaaatcgttgccgatatcaacaagattcacaagaagctcctcgcatccccagagatggttgataaaccagttgacaccattttgctcaagcttcgtggtttatatgcacgtgcaaaggagctctctgagaatgaaatcagtgcctcaaatgctttgattggattattagatggtttgttgcaatctggagcttcaactgcacaaaagaaaaagatagaagttggtgagcagaaaaagaagaggatcaagtctgatacagattctgcacgattttctgctgcatctatgaggaatcaacttgaccaagctgcaagccttaaaggagagcaggttgctgctagggtaaaatcagatgacgaaaaagatgagtggtttgtcgtgaaggtcatacatttcgataaggaaacaaaagagtatgaagtacttgatgaagaaccaggtgatgacgaagagagcactcaaaagaagtacaagttgcctatgtcttacattattccatttccgaagaaaggggatccttcgagtgccccggattttgggcagggtcgacaagttttagctgtttatcctggcacaacagcattatacagagctaccgtagcttctcatcgtaagaggaagtctgatgattatattctggagttcgatgacgatgaggaggacggtgctctgccgcagagagccgtgccgttctacagggtggttgccctgccggagggccacaggcagtagtgacatttgacgcagttctgcattcctagtgtaacatatagcgcaaggtagggtgtcttcagtgtgacaatgtggtggtcatatctacgcgaaacgagagagaaaacaaggacgtgcatgtagcacttacatgtggggtccttgtataaaagacgatgacgtttttttttcaatctgctagagcacgtctatgtaattgcaatccagttttaatctcttatattatactttagagag

SEQ ID NO: 32157 - DNA, 2426 bp, Zea mays
  Clone ID: UC-ZMFLB73272A05_FLI
ccaggttgctgctcatcctggagggcctccatatcgaggcatggcaccaccaggcccagctgttccattcatcaatggacatgtgtattcctctcccatgctgcacccatcacagcagcaaggtgcgcaaccacaaagtcatcagaagacccagctgccaaacttgcccagttcatcacagaagcaccagccacaacattcccaagggctattgggatatgcaccaaatgctaacgcagcagcagctgctagtaattcgcacaattattcaagtggaaatcagcgccctgtccttgcgcaccgacaggagagtgacaaaactggagaagatggtctatcgagtgatgacaagccatcccactctcagaagagcgggtatgaacacaattttgctgttccagtccatctaccgaattttgcaatgatgccagctgctcaacctgctggcagtcagagtgagaagaagttaagtgaccatcaccaccagcagcagcagccacaagtcagtcgtggccagggtgtgaggattgatcttgcgtcttctcagccttttgtgatgccctttggctccattggtcctcctggatctgccccatctggtctcgacttctcggcattggcgcagagccatgcatttttacagagccatcaagaagcagcccggcatggttatcctcaacttaattttgctgcagctcaatctacgcagcacaagccccagcatggagaaacaaaatctgtcgctggggattcatccttgacacacattgccggagacagccagagaaagaaatcaacttctacaaagtattctggtgattcacagcagcattcgctgtccttcaccaggacagaaagcaagaatcatgtgcctcctttccttagtggcagcacaaatgaaagttcgtcccgaaccctaagccttattggaacagaatcttcaaatacatttatgggaagcaaatccacaaattccaccactcctgcctcaacaccacctgcagcttcgtctagcatttctcagcagcaccagcatttccttcagatgcaagtgcagcataagcatcagcatcagcagatgattcagcaccaccatttgaatcggcctagatctgccgcaccaagtacacaaaatagtgcaggtgggtacccagaccgtctcaatatggcgagctttcagaatatgatgtacccaccaaatgctgcccaaggccaagggagagttcaatccccccagttgaaggcatcctcagggagagggacaccttcatctactgctaccactccccctgctgctgcaccccctaatttgattgtgatgaagacaagtagtctccacccgcaacaagcaaagattcctatgcaggctctctccactcctggtcaccaatcccagagttctctaagcatgagttcatcaaaaatggctcctgtaactaacctttctactggaggaggggatctatctcgatcttcaaatgcccctgttgcttctggttcaccatccaattcggtgtccaaaagcactggtggcagcccgcctgccacaggaaatgcaaagggtgttcagcagcctgtccaattgccatcaccacaacagcagttagccaagaactctgtgtcgacgtgtggctccaagtctactcctgcaaaccatttcagtatggctatgccatctatccttggccaacagcctaattcatcgcctggttctaataccgggagcaagcagcagtcacatatgtcatcgtcaatgaaacagcagccgttccctcaaggccatttcttcatatccagcacgtatgctcctcaggctccaggagccggcggtgctgctgcccttggcctataccagaagcgaccaggcgacaagacacagccacaggcaccacaccagcagaacgccttgtcagccgctgctggcagtaacatgaaatcgcttcatccttcgtccggtggatttatgcatctcgcagcggcaacccagtctgcaggtggtggcatgccacacacccacatgcccgcggcgcaactgagtttcggaacaatgccggtgcctttaaaaccctcaagcgaccagaagcccgctgctggaaaataaacagagcccaggtgaccatgcgtcggagtggtaatctgagctggcgagctcaagtgcttatccagcggaagccccaaatggaggaggaaagatacaatgagaagagaaaagcaggccacagctcgaagaacctgcttttggttgctgctgtggtgatcaggaagggggaggaggggcactgcgaggacacgccttgctaacttaaaaggttgttcgggtctgggaatggctgatgtgagtgaatacttttgtgtagttttggctggttatccatcctcccatcccatggtgtaaaggtcggaggagtgcatagaatctgtctcgt

SEQ ID NO: 32158 - DNA, 1500 bp, Zea mays
  Clone ID: UC-ZMFLB73272B11_FLI
gtctcacttttatagctttattatatagtaaacatcatatatttggatgatagagtataaacatgaacggttactcacacatatttcaaaactgaagatatattcctatggacacttgaaacccaagaaagccctatatatctgttatgtactgactacttcgctattaatgtatatatctgtacactgtactaaaagagccgtgccgctgccggtgccgcaaatgatgtgcagccattagctgctaacttgctaagctctgcttccgaacatcaggtatccaagaagtgaggataacaagaagacaagcagcacaaacgcagagaagccccgaggagacgcctttgttttccggaggagatccagctctttctgaatcttcttgttttcctctgcatatcttctttccagttccaacttggatgtagaatcatccttcaagaaggagaaacgacgtcgaaaagtcgtcgccgcccgcctggtacaaaccaagcaaagtttcctctgaagacctagcagagcagtgtagatcgccagcaccaagaagaaagctgaaaggtcagccacgccgatgtcaccccgccaagccatcgcgtgttgtcaccttctgccgtccaccgacgcaccaacccaccagccccaaccctcagagccccaacgccggtcgagcaccagcgagagacctaagaaggccaaggcgagggttcccgcatggggcgagaggtccaaagacggcaccctcgatagggtaggggtggcgcccgcgggcgtcaccgctgtccgcctgcaagcgagcatggctttcgtcgcaggacctcccaccacacgccgcaacgcacggagccagccggccctgcccacaccacaggccgaaacgagaggcggagagataaatctagccggagaggctcaagatccggcccccagccccacgaccatgacccaccacctgcagaaggcaccgctggcagccgcagatccaccaacgcccccgatccaagcaccacgctacaagcacaagcgagccacgccgccgccgcagcgggccggccgcgtgcgtgggcgccaacgtcgccggccagccacggccatggccacgcgagcgcgggcactaccgccacgggctagccgcacgagccaccatggttgcggccacaaggccacctgcccatgccagcagggaggagcggcggacggcgaccagcccctagatccggccagtcagcccgccgatccggccttcccagcggcggatcaggtcgccggccacctccaggaagagggaggagtggagtgggtggaagaagggagggaaatgagtgagagagcagtcccgccgccgccctcctcgctgctcgtcgaacttccggcgagctgctccggcgacggcgggggtgaagaccggcggcggtgggtgcggtcgatggggagccgcccgtgtcgcccagaggaggatgacgtcagagcaggaaagaaattaggctactactgcgaattttt

SEQ ID NO: 32159 - DNA, 2016 bp, Zea mays
  Clone ID: UC-ZMFLB73272C06_FLI
aatttttgttttgcgcccaaaagtcatgggttaaattcatttctaaagttagacgttaaggtaaactgcataataagtgcatatatccccttttaatagaatgaataaatttggcatgcttagatttccttggttcgctattttgtgtctatggaaataatgatgacgggatacacacctcatgattacctagagaactggaaacatgggaggcttaagcttgtcgttggttaataagatgcaaaagtatatgtattatgtatttccaatgtatgtataactgcatttgtataaaaatacaaatacatttataaagaataatgaaatgtttagcgagccattgtgaggaattctgctatttgcttataatacatgggaagatcaatatcttctgctgaggacaccaaatagtagttcacttaaatgatgggctaacgattgtgtagtggctattttggccttcagtttctgaattatttgaggctagaagctacttgcacttagcaactgttgcagtgatgcctcctaccattaaccaaggcctagcaaccaacatctcttcatacttcataccctgcttattcgtatgaaaaggaagtagaatttttagaagataataagattaagggttgatttggtgacaagtggatcacggggagattgagggggaaatgaactaatttacccctcaatcccctccaatcctcccgtgatcactggtcaccaaattagccctaaggtgtaagcttttatagcactggatgtaatattatcacagccagacgttcaagtttcatcgttaaagtaaggttcggttgtgcgcaacatgtttgtatatagcaggggcggatgtagtacaggtgcatggggatacaggtacaagcagaacagaacaggctcttgatcagttcattaaggataacaaagaagcaaaaaaactcatatgcttacggtgacattggcaatggctatacttgtggataaatgttggtgaattgtatccttatatccgcacacctaactatttaatgtcattcagtcgtcatattacattttgagtgaattgcatcgtttaggtctatgccccatgattgaaatcctgtatctagggatgaaaacggtcggaaacggtatttattcggtaatcagttttttctttgattgcgaataaatagaatatagaatctaccatacaaatttgtattcttgtttctaacatccagcttgtaaagattcatagatgataaaccttaaatttatgctatattttcttaaataatagatataaacttcggtatggattcggaaacaaattcgataattttttcaactatttgtgttgtagggaccaaataacacttaaaacaatttatgtaatattttattcatatttgtactaatgtgcttgataacataggaaaagatcaacatcaaattttatacatatctattttaaaatattaaatttgtcctaacagttcggattaccactttcatccctacctgtatctgccactggcatatggccataaccattggtgtttccattttcctatatcagttatcacagtacttattctgtatccttctcaatggatcccactaattggcactccatctgagctgctagtgaatgtctgttggaaaataagaatctgccattctgcttatgtacccagcagttaacatatctttgcaatagggatatggttctgtcaatctttgcttaaaccagtttcacaagatgtgcaacgatttgtcttatcatgtgatgttttcttttcttattattaggagagggagagaggtgtcgattggcgaatggagggtctagatgcaaaggtttgtcgcatggctgtaatatgtacatgaaatgtggtggattttgttaggaattttctagggcatagcatatctggtattcatatccaatctcctttgctttgtatgtcaaatggaaaactccttcgagactcaggtttaatttctttagtggcaaattttttggattggttt

SEQ ID NO: 32160 - DNA, 1698 bp, Zea mays
  Clone ID: UC-ZMFLB73272C11_FLI
cgactactggctctcgcttgctccggcgacccagaaagagctaggctatagccaccgacgacccctgccggccgcctctggtacaacgtacgtagagagagagagaaagagagacgatcgtcgatggccggcgccaccgtgaccgtggacgaggtgaggaagggccagcgcgccagcggccccgccaccgtgctggccatcgggacggccacgcccgccaactgcgtgtaccaggccgactacccggactactacttccggatcaccaagagcgaccacctcaccgacctcaaggagaagttcaagaggatgtgcgacaagtcgatgatccggaagcggtacatgcacctgacggaggagttcctgtcggagaacccgagcatgtgcgcgtacatggcgccgtcgctggacgcgcggcaggacgtggtggtgacggaggtgccgaagctggggaaggcggcggcgcagaaggcgatcaaggagtgggggcagcccaagtcgcggatcacgcacctggtgttctgcaccacgtcgggggtggacatgccgggcgccgactaccagctgaccaaggcgctggggctgcgcccgtccgtgaaccgcctgatgatgtaccagcaggggtgcttcgcgggcggcacggtgctgcgcgtggccaaggacctggcggagaacaaccgcggggcgagggtcctggtggtgtgctcggagatcacggccgtgacgttccggggcccctccgagtcgcacctggactcgctcgtggggcaggcgctgttcggcgacggcgcggcggccgtcgtggtgggcgccgacccggacgggcgggtcgagcgcccgctgttccagctcgtgtcggcggcgcagaccatcctgcccgactcggagggcgccatcgacggccacctccgcgaggtggggctgacgttccacctgctcaaggacgtgcccgggctcatctccaagaacatcgagcgcgcgctggaggacgcgttcaagccgctcggcatctccgactggaactccatcttctgggtggcgcaccccggcgggcccgccatcctggaccaggtggaggccagggtcgggctggacaaggccaggatgcgcgccacccgccacgtcctctccgagtacggcaacatgtccagcgcctgcgtgctcttcatcctcgacgagatgcgcaagcgctccgccgaggacggccaggccaccaccggcgaggggctcgactggggcgtcctcttcggcttcggcccgggcctcaccgtcgagaccgtcgtgctccacagcgtccccatcaccaccggagcgcccaccgccgcctgagtcgtccatctatcctcgcgatcgctccagagacatgaacgacccgacctacgaataatgtatctgcgtaattaatttctatctgtgttgtgtcctagtagctgttaagtaccgttttaaaaacccttaattaattttattatgggtgagctagctcaagagtggagtcataaaaccgcatggatggtgaggtattgtatagtacctgtgtaagacaagcttggctggttttttattttatattttaatctgtttgctcaagacaaaacaaaaaatgaattgttgagctgtcattaatttgcagtgcaccagctcaagttggttgtactcctatcctatgtatgaatgaaatcccttctagtagtatct

SEQ ID NO: 32161 - DNA, 581 bp, Zea mays
  Clone ID: UC-ZMFLB73272C12_FLI
tttattgattatccttacatggctcccgccttcagccatatacctccagagcctattcacaaggccgcatccagctttagagccatgcctctgtcactgccttttcaaaacggacatcggcaggctgctagtcttactcagagagacatgaatctagaaaggcgccctgcaaagttgactaagccgacaggcaaggatcccccagaaaacaagaacaagtcgggcctaaaggatctcccagaagacaagagcaaatcatgggatgcggatgcatccttctcgttgttccaattcaacttgccaatagcttcgcctgtaacaccatcatcaaaagataagagcggagagctggccgcaaggacgccactggctcaggtgcaagctcagctttgctcgagggaacaagcagatgtcaaggagtatagcctgttctcctcgaaagataatggcatattttcgtttatgtagataaaagaaaaactgtgacaaacctgctacccttcgtttctggtgtctcttgctgcacttcgtgaatgctttgtgttctccggagcaaaataaaggatgttgccatttttttc

SEQ ID NO: 32162 - DNA, 1178 bp, Zea mays
  Clone ID: UC-ZMFLB73272D06_FLI
gcggtgacgaccgacagagccgccgccttacgtccagctgccacggtacttcatcgggccctttgccggtgcaggcggcgcagcacccaccgcaccaggattctgattgctcttcattaggctataaatggcaggaaggcaccgggcaccccgacaataccatgatgaacctcgaggataccgtgatggtccaccacctccacttccacgaccaagacctctctcaccgcgtcgcatggcagaggaactgtctaggcgccgtgctgagatccgtagaatccatgaggacaatcagcgtctggcggatgaaattgttagtctcaagcaaaccatgccgcgtttgcaagaagacctccgaatctcaagccaggctgttccaaagctccgggcagagaaagagctcgagtcgagggagctgactcagaggaacctgaagctggaagctgagctgcgtgccttagaacccctcaggcaagacgctctgcatctgcgatctgaagcaagtaaactgcagtctctgaggcaagagttggctgcgaaggttcaaggcctatcaaaagagcttgaacttcagaagtctgaaagccagaaaatgactgctttggtagctgaacgtgatgcgctgtgtcaagaactgctccaggctagggcgaaccttgagtttgagaagaaggcgaagccagagctgactgcgcaggttcaggcaatggagaaggatcttgtggctatggctcaggaggcggagaagctgagggctgatatcgcgaagagaaacacacctactagtttcagcagccgtggaacgtatggagcctcgttgtcgactcctgggatgggtttgcaaggcatgtatgatggcggcggctattctatggctgggagccgctacggcagtggcactggggcttggagctcgcacgatccccatggctacccgcatctttaactgtgcttctgaccggtgttttctcctgaacagctccctgagtaccttggctaagtttcttgtagtagtataacttgtggtgcaccattgctacccttcctctggtcaatacacaacaatataccaactttggttgtcttggttgttttttcccctactgcacacggtgacgctgttgtgagcattagatgtttggccactcggccgttttgccgtggtgagttttggcttt

SEQ ID NO: 32163 - DNA, 1148 bp, Zea mays
  Clone ID: UC-ZMFLB73272E12_FLI
cagtgattgaaacagttatcattccttgcgctaggggcaggacaactatctgtgtttcaagccaagttggttgtgccatgaactgccagttttgtttcactggaaggatgggtttgagaaaacatctctcgacagctgaaattgtcgagcaggctgtgtttgctcgtaggttattctcagatgaattgggatcaattaacaatgttgtatttatgggcatgggtgaaccatttcacaatattgacaatgtaataaaagcctcagcaataatggttgatgagcaaggtcttcattttagccctcgcaaggttactgtctccacaagtggtcttgtccctcagttaaaacgcttcctccaggaatccaattgctccctggctgtcagtcttaatgcgacaacagatgaggttaggaactggataatgcccataaacagaaagtacaatcttaacttgcttcttggcactttaagggaggaacttaacctcagacaaaaacaaatagtgctatttgaatatgtcatgctttctggagtgaacgacagtatggatgatgccaagaggcttatagagctagtccaagggatcccatgcaagataaacctcatctctttcaatccccacggcggttcccaattcaagcccacaccagacgataagataattgagttccgcaacgttttaattcaaggtggcctcactgtttttgttcggctcagcagaggggatgatcagatggctgcctgcgggcagctaggagagcctggaggctatcagctacctctgctccgtgtgcccgagaaatttcaggtcgccttgtgatgctaaacagtgcatacagtaaaaatggtcctgagcagcttgacgaacacacggagtaattggcttggaacgacgattcgatcgtgcaaatcttgcaagttctaccgccttcggaagcttgtgtggacttctgcaataacgtgcaaatctgaacctgggtacttgtgcgacaacacatttagacatggtgttgcttctgctagtacgtggtgtacccaaaccaaattcgataagattattattattataaattggtattttctggcaaatcgttgctgtataagacattaacagtgtaacatgctttcacttggtacttcgaaaaat

SEQ ID NO: 32164 - DNA, 702 bp, Zea mays
  Clone ID: UC-ZMFLB73272F02_FLI
ccagatccagatgctgcaaaacactaacaggcacttggttggtgattccgtgggaaacctgtcactcaaggagctgaagcagctggagagccgccttgagaaaggcatctctaagatcagggccaggaagagtgagctgctggctgcggagatcagttacatggccaaaagggagactgagcttcagaatgaccacatgaccctcaggaccaagattgaggagggagagcaacagctgcagcaggtgaccgtggcacggtcagttgcagcagcagcagcagctgccaccaacttggagctgaacccattcttagagatggataccaaatgcttcttcactggcggccccttcgcaacgctggacatgaagtgctttctccccggcagcttgcagcagatgctggaggcacagcagcgccagatgctcgccaccgagctgaacctcggctaccaactggcgccgcctggttctgacgctgccgacaataaccctcatcatcagttctaaactggatgcatgcacgagaagcttttcaagcgaactgtgaacgatggaagctggctgttgcctctagatgttcttggcttccatgacctagcttattatggtgtgtattgttgttgccttttgtgtgtgattctccttgctactctactgatggagaactaaacctaatcgattggacataatgatcaaatgct

SEQ ID NO: 32165 - DNA, 2476 bp, Zea mays
  Clone ID: UC-ZMFLB73272F05_FLI
caacgctccatagtccacactcgccgtgctccccatgcagcaaccgcttgtgctcctccttctcttcttcatcggctcggccaagtatgccgtcgcctcccgcgccgacgccggtgcggctacctacattgtctacctgaaccccgcgctcaagccgtccccctacgccacgcacctccactggcaccacgcgcacctcgacgccctctccctggaccccgcgcgccacctcctctactcgtacacgaccgccgcgccgtccgcgttcgccgcccgcctcctcccatcccacgtggcggcgctcaccactcaccctgccgtcgcgtcagtgcacgaggacgtgctcctgcctctccacaccacgcgctccccatcgttcctccacctcccgccgtacagcgcgcctgacgcggacgccgggggcccggacgtcatcatcggggtgctcgacaccggcgtctggcccgagagccccagcttcggggacgccggtcagggccctgtgcctgcgcggtggcgcgggagctgcgagaccaatgccaccgacttcccgtcctcgatgtgcaaccgcaagctcatcggcgcccgtgccttcttccgcggctactcgtcgggggccggcgacggctctcgagtcggcgccgacctaatgtcgccgagggaccacgacgggcacggcacgcacaccgcgagtacggcagccggggccgtcgtggcgggcgcaagcctcctcgggtacgcgccgggcacggcgcggggcatggcccccggggcgcgcgtcgcggcgtacaaggtgtgctggaggcaagggtgcttcagctccgacattctggcgggcatggagaaggccatcgacgacggcgtcgacgtgctctcgctgtcgctgggtggcggcgcgttcccgctctcgcgcgaccccatcgcggtcggcgcgctcgcggccacccgccgcggcatcgtcgtctcgtgctccgctgggaacagcgggccgtcgccgtcgtctctggtgaacacggccccgtgggtaatcacggtcggcgccgggacgctcgaccggagctttccggcttacgcccagctcgccaacggcgagacccacgccggcatgtccctctactccggcgatgggctcggtgacggcaagatccctctggtgtacaataagggcatccgtgccggcagcaactcgagcaagctctgcatggagggcacactgaacgccgcggaggtgaagggcaaggtggtcctctgcgacaggggcggcaactcgagggtggagaaggggcagatagtgaagctagccggtggcgtgggaatggtgcttgcgaacaccgcccagagcggcgaggaagtcgtggcggacagccacctgctcccggcggttgccgtcggcgctaagagcggggacgccataaggaggtacgtggagtcggacgccaacccggaggtggcgttaacctttgccggcaccgcgctcgacgtgcggccggcgccggtagtagccgcgttcagctcccgtggacccaacagggttgtgccgcagctactcaagccggacgtgatcggcccgggcgtgaacatccttgccgggtggacggggtccatcgggccgaccgggctagccgccgacgagcggcggtcagagtttaacatcttgtcagggacatccatgtcgtgcccgcacatcagcggcctggcggcgttcgtgaaggcggcgcacccggactggagccccagcgccatcaagtccgcgctcatgacaactgcctacaccacggacaacaccgggtcgcccctcctcgacgccgcgaccaacaccacggccacgccgtgggccttcggcgcgggccacgtggaccccgtcagcgcgctctccccgggactcgtctacgacgcctccgtcgacgactacgtcgccttcctctgcaccgtcggcgtcgcgccgcggcagatccaggccatcacggcggaggggcccaacgtgacctgcacgcggaagctgtccagcccaggggacctcaactacccgtccttttcggtcgtgttcgaccggaggtcgtcgcgcagcaccgtgaagtaccggcgcgatctgaccaacgtcggcagcgccggggacacgtacactgtcaaggtcaccggacccagcgacatcagcgttagagtcaagccggcaaggctcgagttcaggcgggccggagacaagctcaggtacaccgtcacgttcaggtccgcgaacgccagaggacccatggaccccgctgcgttcggttggctgacgtggagcagcggtgagcacgatgtgcggagcccgatatcgtacacttgggggatgtagcactgatctccacagctgatccgagcatttatcttaccgccggagtgaattgggtctcagggatgccggaaatatatatcttcaataatgatacgaattcgcttgttatttactcggcccgtttcaaaatatatatggttt

SEQ ID NO: 32166 - DNA, 970 bp, Zea mays
  Clone ID: UC-ZMFLB73272F10_FLI
ataaagaagatcacccaaactgccatacatgagagtagatagacagagaacatgaagcaaaacagagacacaagctgcagcggcacacatggggcaccgcgccccactaccaccaccagaccagacgacgcacactttatttagcccatgtcactcgcagtccgcaccgggcagtccacgcgacagccactgctatagctacgacacactgtcacacacacagagatggagagaaaccgtcacgttcgcgttgtactgaacagcaagcccgtgccatgtaggcgcgcgcgcgctgagccatcgatctcccgacccgctgtccgccgccgcagtgcgcgcacggcgcacggcctcactcgctggccttctcggccacctcagcggccggctcggccttctcgggctcctcagcggccggctcggccgccgcgggctcctcctccgcagcagcagcctcgggctcagcggctgctggttctgcttctgtctcggcagcgggcgctgccgcttcctccttcacctctccagccgccgccggctccggctccgcctcctttggcgtctcttcctccgcctccacgggggccgcctcgggctcagcggcggcagctggctcggtctccgccggggcagctggctcctccaccttggcctcggcggcgggggcagcctcctcgggcacgacggcgggcggagccggggtctccaccgccggcgcttcctcggtcgccacgacggtcggggtctggacctgcgcacacgtgcacgcacggcgcgagtacaaattaatcttagcatcctccgtggttattaacgcaggaggctcggcagtggccatgggtgacgatcagaaggctgatgactacacgaccgagtggctagctactagctagggctagagctagagcagctaaagaatgatcgagctgcaagagtgagcgatcagctgctgatcgggagtgggatcgct

SEQ ID NO: 32167 - DNA, 1696 bp, Zea mays
  Clone ID: UC-ZMFLB73272H09_FLI
gttggattcctagtcagcttaagaagataaacagtctacagactgatggaaattcttggagcacaggaccagcgccacctccacctccatacacagcgccgcctcctcctccaaaccattggaatgctgatggttcatcaagttcatcaagttctggtggaagatctgggataggtggtggaggtgtagcaggaatcattatatcgttgctggttgttggatcagttgttgcatttcttgtgatcaaaagaagaaaacgcaaagctgctatgaaagaacattttgaacagcaccagccattcacttccttcccttcaaatgaagttaaagacatgaagcctgtctacgaggccaccacagtagacatagagtctttggcttcacctgcttcagttaatctgaaaccacctccgaagatagaacgaaacaaatcatttgatgatgacgatgatttttcaaacaagcttgttgcaaagaaaagtaatataacacctataaatgcaactgtttattcagttgcagatctacagatggcaacagatagctttagcttcgacaaccttgttggagagggtacttttggacgtgtttacagggcacaattcaatgatggaaaggttctggcgatcaagaaattagatagtactgtgatgccatttcaatcatctgatgactttgctgaactggtctcgaacatttcaaaattgcaccatccgaatctgaatgagcttgtgggctattgcatggaacatggccagcacttgcttgtgtatgatttccacaggaatggatcacttcatgatctactccacctttcagatgagtacagcaagccacttagctggaacactcgtatcaagatcgcactcggctctgcccgtgcactggagtaccttcatgaaatatgttctccatccatcatccataagaatttcaagtcgtcaaacattttgctggactcagaattcaatccacacctttcagatgctggacttgcaagctttattcctgatgctgaattccaggcagcagaacaaagtgccggatacactgccccagaagtggacatgaccggtcagtacaccctcaagagtgatgtctacagctttggagttgtcatgcttgaactattgacaggacgtagaccatttgacagctctagacccaggtcagagcagtcacttgtgcggtgggcaacaccccagctgcatgacatcgacgcattggacaggatggtcgatcctgcactcaagggtctatacccagccaaatctctatcccgatttgctgatgtccttgccctgtgtgtccagcctgaaccagaattcaggccaccaatgtcagaggtggtgcaagcattggttcgacttgtgcagagggccaacatgacgaagaggatgcttgatggggatacttctcggcgaccagatgacctggaccaagatttcatatgacaagctgaactcttgtcagattgtatttatttcgttcgactagcggcccagcagagacataatcacacaagaggaagaaacagaactctgtcagcttctccagtacataatcacaagtttttcttggtagcaaagttgtgctatatggttgtactgtgtctacaaaatagtaccttgatcttacgctaatggcatattgttataattctttggtaacttatatgcaaatgccccagataaac

SEQ ID NO: 32168 - DNA, 1743 bp, Zea mays
  Clone ID: UC-ZMFLB73272H12_FLI
tatatttaagcatatatctcatggattttacttcatttatacgtggctcagatttgttaggctctatctgatcctaatggtctaagccaacaaaatcctatgatgtcacaaaatccatgtttcaggtatcagttatcaacgtagaagatgctacaatattatatcaagaacagtttgagtgtcgactgcctggtggaatcgcctctttgcaatttgaaatctatagccataatggatatgacaaggacattttgataatagcgatggaagattcatctatttttgttatcgaggaagaaacggggaaacttttgaaccccaacccagttcagacagacaaaccctctaaagccatccttctgcagatgttggagttatcgcccattgacacaccagcagtttcagataaccaagatacagtatcgaaggaatcattgctgctactttgcactgaaaatgcgatccgtttgttttccttgggccacgcaattcagggcacaaagaagataatcaataagaagaaattgagcagctgttgttgtttcgcctctcttattcatagttcttctaatgacattggacttatactcgtcttctccaatgggaaacttgaaataagatccctgccagacttgtccttgttgaaggatgcctttttacgaggttttgtgtactcaagaaacttgaattcaagtagttccataacatgttcatctgatggagaagccatcttgattaatggagaagagacctattttttctctacgctctgccaggatgagatatacaggcacgtagacagcattagtacagtgtacagaaaagagaactcaaccagggaagactcttcttttgtagtgaaatctcctaaagaaaagaaaaagggtctgtttggaatgattatgaaagataacaaaggaagcaaatcaaaagaaagtgatgcaattggcagcgaacaatgtattgcaacgacttctgaagagctggcttcaatattttcatcaactaactttgctccgccatctgagggaaggaacagttcactacgagatgatgaaaatgccgagctggacatagatgatatcgacattgatgacaacccacagaagccaaaaggtccacatttccctggtctaagcaaagataaaatcagcaagggactccaaacccttaaaggaaagttgaagcccaagactgaagaaaagataagctcgggaaacaaaaaaactgaagatgaaacatcagtgagtcaagtcgatcagataaagatgaagtatggatatgcaaatacaacaaatgatgactcaaccagtgtcacaaaaatgattgggaacaagctgcaggaaaacatgaaaaagttggagggcattaaccttcgagctgccgatatggcgagcggcgcccagtcattctccacaatggcaaaagagctactccggacaacaaagaacgagaaggggacctcataatcacctacaccaatttcccctcctttgtatagttcgtcttttcctttttttttcatccctggatcgtggatctgacgatctggacctccccgttgtcagactctaaatagtgaatggagtgtaagtgactgaagtaccctttacatcttggtatagggtaacagcagggacttcacatagttattttttgccgcggcaatgtcgactctaccgtctacactcgaatgaggattgataccaaatatttgttataaagaaaggtgttttcaaaggt

SEQ ID NO: 32169 - DNA, 1532 bp, Zea mays
  Clone ID: UC-ZMFLB73273B05_FLI
acatcggccgcgacgccctcgtgcccgtcctcggctatctctacaccggccgcctcaagcccccggcgcaggacgccaccgtctgcatggacgacgcgtgcggccacgggacttgccgcccggccatagatttcgtcgtcgagtccatgtacgcggcgtctggcttccagatctcggagcttgcctccctcttccagcgtcgcctctctgacttcgtttgcgaagcgctggacgaggacgtggtgccgattattcatgtcgcttccacctgcgatctccaggacctgctcaatctgtgtattcagagggtcgcagtctccgctctcgatagccgctacctggacaaggagcttccggctgacatatacaacaagatcaaggagatccgccgccaaccagagaacgccattattctggaccctgagcatgacaagagggtcaggaacatcctcaaggccttggattccgacgacgtcgatctcgtcggcttgctgttgaaggaatcgacggtgaccttggacgatgcattcgcgatacactatgctgcagcctactgtgagcccaaggtgtttgcagagctgctcaaactggactctgctaacgtgaacctgaagaacagcggtgggtatacgccgctgcacatagcttgcatgaggagagagccggacatcattctttcgctggtggagaggggagcctgtgtgctggagaggaccctggatgggcgcgatgctcttactatctgcaagagactgacaagagagaaagactgcaataggaagttggacaagtacgaggagaaaagtaaggcttacttgtgtatcgacattttggagcaagaactcaagaggaaatccttcgttttggaccccatctctatctctatagaggagtcgattgccacgcctttgctggtcgataattttcacatgaggctcataaacttggaaaacagagttgcgtttgctcggatattcttcccttctgaagccaagcttgtcatgcgcatcgcacaagccgattcaacccaagagtttgccggcatcaccaacttcagcagactcaaggaagttgatctaaacgaaaccccaacgatgcagaataggaggcttcgcgaacgccttgatgccttaacaaagacagttgagctagggagacgatacttcccacactgttcggacgttctggataagttcctcaacgaagaatccactgatccgatcttccttgagactgggaccccggaggatcagcaagtcaagaggatgcgtttctctgagctcagagaggacgtgcgcaaggcgttcacgaaagataaggcagcagtggctgcaatagcttcctcggcgtcctcgtcttcgtctccgaggtgcagacgacccaataggaaatcacggtgatgtcagtctgttcaggacacctgcactgggttgtgtgtgttttgacatgtaacactgtttcagtagataatgctgattgtcagatttgctgccgctctacagaagattaagcgaccgtctgtttcaagaatt

SEQ ID NO: 32170 - DNA, 1802 bp, Zea mays
  Clone ID: UC-ZMFLB73273E09_FLI
aaaaaaacacccaaaaaaccaccttcttttcctgcgttcccctgctcgatccccgacgagaattcgctcccgaacccatcgatctgctctccgcagtccgccgatccgtggatcgatccgtgcgcgggctcggtccgccccgggttccgatctggtcgccgcctcgcctgaggagatgaacggcgccgggggcagccaccaccagcagcagcagaggctccggcagcagcagcagcaggcgctcctgatgcagcaggcgctgcagcagcagcagcagcagcagtaccagtccggcgtcctcgccgccgcggcggcggcggccatgacccagatggaacctgtttccaatggcaaccttccacctgggtttgatccttccacttgtcgcagtgtgtatgttggaaatgtgaaccctaatgtcacggagagccttttgattgaagttttccagagtgctggccttgtggaaagatgcaagctcatacggaaagagaagtcttcctttgggtttgtggactactatgatcgaagatctgctgctctagcaatcatgacccttcatggccgtcacgtatatggacaagcaatcaaggtgaactgggcatatgcaagtacgcagagggaggatacgtcagggcatttccatatttttgttggtgatttaagttctgaagtgaatgatgcaactctttatgcctgtttctcagcatatccttcttgttctgatgctcgagtcatgtgggacaacaaaactggacgctccaggggttatggttttgtctccttccgtaatcaacaggaagctgaaactgctataactgaaatgactggaaaatggcttggaagcagacaaataaggtgcaactgggcaacaaagaacaattcggaagagaaaccagaaactgacaatcataacgcagtcgtactaacaaatggtagctccaacaattcagcaacggatgcaagccaggacgcaggaagtaaagagcccccacagaacaatcctgattgtactactgtatatgttggcaacctcggccatgaggttaaccgggatgagcttcaccgccacttctataacttgggggtcggggcgatcgaggaggtccgtgttcagcaggacaaagggtttggattcgtgagatatagcacccacggggaagcagcactcgctattcagatgtccaatgggtcggtagtccgcgggaaaccaatcaagtgctcatggggtgtcaaaccaactccaccggggacaggctccaagcccctaccccctccagccgcaacgtaccagcccgctgtggcaatgccaggcgtcccgcaaggtttcacgacagcagaactccttgcctaccagaggcagcttgccctgagccaggccgcggccgggcagcagcatgctggtcttgcgggccaggtttctgcagcaggccttcttgctgctgccggttcccaggccctctacgacggctacccgaatcaatcgtcagcgcagcagcttatgtactacaactagtagagctcaagaggaaggaaggcgtctgtagtgttcagcttgtttttgcgcaaacttgggtcatcctcgccctgtttttttttctttattattttgtggttcatgtactatttgtgtgagagctcttgttctctcttctcagccgcgggattgtgttacttactgtcttcttactgtaccattttccttgtctaattctgttgagtaagaggtgtattctatgtgactttgcgattgattaatgtaatgctcccctggggatcggctttggtcgctgggctggttc

SEQ ID NO: 32171 - DNA, 902 bp, Zea mays
  Clone ID: UC-ZMFLB73273G02_FLI
atcgtcccctcgactcctcctccatccccgacgcggcggcgccagcctgcagattagcttattaccaccatgggtaaaagaaagcggtcgtcatgtcaacgagataaccataatgattctctagccagcaaaataatgagaactagaatcccagatcttcctgaggttgttgatgcaccaatgctgcctaccaaattcctctgtcttaagcacctgaccgttcgcttgtcatcaggaacaaccattacccaggcatttgactatttctctttggtttctttccttgatgcgtctccttccttggagacttttatattaaatgtgagtgggaaaggcatgatccatgaatcgatttctgcacatccacaattgaggcacacacctgagcaccaccatggccacctcaggagtgtgaagatatgtggtttcagctctgagaaaagcttatttgaactaacacgttatattcttgagaatgcggtgtcactgaaatttcttacactggacaccttttatggggatcggtgtggtcagggtaagtgtacaagttgtttacccacgcctgatgtttttatggatgtttccaaagcgatctcaggtatcaagacatacatcgagaacaaagttccatccacagttaaactaactgttctggagccttgcagccggtgccatgttagaagagtaatttagacaccatcctagtcatgctacgtcacttccatttaatttaatttaatttgagaagaaccatgcttgtttcctggattatttatagctgtgtcccgatgcacagcaaatttaatctctgatgatggaccgtgcttgtgtttcctgaattaatacatgccaactgtttagttttgtagtatggcatgtggatttatttaagacaagttgac

SEQ ID NO: 32172 - DNA, 2324 bp, Zea mays
  Clone ID: UC-ZMFLB73273G09_FLI
gggaggcagagcttattggtgacttcaatgactggaatggtgcaaaccataagatggagaaggataaatttggtgtttggtcgatcaaaattgaccatgtcaaagggaaacctgccatccctcacaattccaaggttaaatttcgctttctacatggtggagtatgggttgatcgtattccagcattgattcgttatgcgactgttgatgcctctaaatttggagctccctatgatggtgttcattgggatcctcctgcttctgaaaggtacacatttaagcatcctcggccttcaaagcctgctgctccacgtatctatgaagcccatgtaggtatgagtggtgaaaagccagcagtaagcacatatagggaatttgcagacaatgtgttgccacgcatacgagcaaataactacaacacagttcagttgatggcagttatggagcattcgtactatgcttctttcgggtaccatgtgacaaatttctttgcggttagcagcagatcaggcacaccagaggacctcaaatatcttgttgataaggcacacagtttgggtttgcgagttctgatggatgttgtccatagccatgcaagtaataatgtcacagatggtttaaatggctatgatgttggacaaagcacccaagagtcctattttcatgcgggagatagaggttatcataaactttgggatagtcggctgttcaactatgctaactgggaggtattaaggtttcttctttctaacctgagatattggttggatgaattcatgtttgatggcttccgatttgatggagttacatcaatgctgtatcatcaccatggtatcaatgtggggtttactggaaactaccaggaatatttcagtttggacacagctgtggatgcagttgtttacatgatgcttgcaaaccatttaatgcacaaactcttgccagaagcaactgttgttgctgaagatgtttcaggcatgccggtcctttgccggccagttgatgaaggtggggttgggtttgactatcgcctggcaatggctatccctgatagatggattgactacctgaagaataaagatgactctgagtggtcgatgggtgaaatagcgcatactttgactaacaggagatatactgaaaaatgcatcgcatatgctgagagccatgatcagtctattgttggcgacaaaactattgcatttctcctgatggacaaggaaatgtacactggcatgtcagacttgcagcctgcttcacctacaattgatcgagggattgcactccaaaagatgattcacttcatcacaatggcccttggaggtgatggctacttgaattttatgggaaatgagtttggtcacccagaatggattgactttccaagagaagggaacaactggagctatgataaatgcagacgacagtggagccttgtggacactgatcacttgcggtacaagtacatgaatgcgtttgaccaagcgatgaatgcgctcgatgagagattttccttcctttcgtcgtcaaagcagatcgtcagcgacatgaacgatgaggaaaaggttattgtctttgaacgtggagatttagtttttgttttcaatttccatcccaagaaaacttacgagggctacaaagtgggatgcgatttgcctgggaaatacagagtagccctggactctgatgctctggtcttcggtggacatggaagagttggccacgacgtggatcacttcacgtcgcctgaaggggtgccaggggtgcccgaaacgaacttcaacaaccggccgaactcgttcaaagtcctttctccgccccgcacctgtgtggcttattaccgtgtagacgaagcaggggctggacgacgtcttcacgcgaaagcagagacaggaaagacgtctccagcagagagcatcgacgtcaaagcttccagagctagtagcaaagaagacaaggaggcaacggctggtggcaagaagggatggaagtttgcgcggcagccatccgatcaagataccaaatgaagccaggagtccttggtgaggactggactggctgccggcgccctgttagtagtcctgctctactggactagccgccgctggcgcccttggaacggtcctttcctgtagcttgcaggcgactggtgtctcatcaccgagcaggcaggcactgcttgtatagcttttctagaataataatcagggatggatggatggtgtgtattggctatctggctagacgtgcatgtgcccagtttgtatgtacaggagcagttcccgtccagaataaaaaaaaacttgttggggggtttttcttct

SEQ ID NO: 32173 - DNA, 1194 bp, Zea mays
  Clone ID: UC-ZMFLB73273G10_FLI
cttagaaattactttaatccttaaaaaggtgtgcaatcttccaacacatcatgtggactcaaaattactctctagttgatttgtctaaatatactgcagctgttcttgttggtttgtcagctatcatcattcttccattattaattattatcaattaaggtttcacaaggtattatgaaagattgttctttcttagtttgtactctatccattctaaattataagtcattctaatattgtttgagccacaagtttgattaaagctatagagaaaattatgaagattcatatcaaatgtaaaatctaaattaataagaatctagtgacatttagtatcataaatgttattattttaatgtacaacttaggttagacttaatatttctttgactcctcaagaaagttggactgacttaccatttaggatggagtatgatttattattgtcttataaaagcctggatcggtatactctgaatatctgagtacctacatgatgagtatttgtaagatgtgtgaaggtcgactgctaggtatacattgtcagtatgaaatggctatcgtcttcagctttctttcctggtcagtggacagtgaaatatttatacgatgtgttaatgtggactgctctgtataaatcgttggtacaaaatggctatggtcttcagcttcatttcctggtcactggacagtgaactgctcaagcacacttagtagatactaggcacaatcagagcttatcgaacttgtgcgatatagttcgtttcagtactccatggttatgatgttattgatcactattgagctgaagcactacaatctgtgacaaaaaatttgatacagcagcaaccaccgctgaagcttggcagaagggatgaaattaggaatacgaaacccattaggcctgtttggttgttcggtcgattatgtgtttatgttgattttgaatggattttaccaggtcaattcttatagaagcaagctcagaagctgaaaaaagctgaggcccaatatgccatagatgggagatctgttttctttttgttcccgggcaaatatgctttgctctaggttcagcttcttgtcttctatattccaaatttttttgtataataattctctttgggtttaaccatttactctgaagcttctgtttatatatatgcgagtctattcttgagcagtttttttttc

SEQ ID NO: 32174 - DNA, 963 bp, Zea mays
  Clone ID: UC-ZMFLB73274A01_FLI
atttcgtgcgctcctccccttaccggcgagctcgtcggtctggccccgctctggtgaccgctgcggccatcgaagatgcggtggattgcggctcctcatctgtgagcgggacgggtgtgtggaagagggctcccgccggcgagaaggtcccctcccttctcaatttggcaccgcttaggggtcaagttctgggttgtggcgatgaagcggtggcggcgacgcggcagcagacatggtggttccggccctccatccgccttgacggcgcgtgctccggtgccagcgaggggccagtaaagcttggtttgagcgatttgggagcaaccatcctcaacctcgacgacgacgcatctgacctcggtggcagcgatgtctactggtacagtctcttccccttctctggcgcttgctggtttgtagaggagactcgaccccggtggcggcaactgacggcgacgacggaggtggcggcggttgttgaggattggagattcatcctgaagggtcttgtagttcttagtttatctagggttggtaggtttcgtcctagcgggtctagggttaggtttctggctggcttggtgctggttcggccggatctagggtttgccgggggatgccagtcctcagcggcttgcttttcctggcgtcatcggcgaggctgaggtggcgatggtgcagaggaataacatcttccgacctcttcctcgcccctgtgacgttctgctctggcatcaacggagaggttgcggagatcctcttaggagtcttcggctggcggctcatcgtcttgacaggagtcttctggccatttgctcgacgattgtgcgacatttgcgatgtagtggtagtggtttgtgttggaaggtatgtggatctagcgttcccttttgtcgtttacaggcgatgtgctcagatccaagactaagacagagtggggtgcgtcccccagccgttgtgttc

SEQ ID NO: 32175 - DNA, 2585 bp, Zea mays
  Clone ID: UC-ZMFLB73274A02_FLI
caatttgttaagtggcgggctcaggctcagcccaccctccatgttccatggctcgctgctctctgattgcttcatccatccattaactccccccctcctttattgtgcatgcatgctttcctcctttataacccctgccgcgctagctgtctctccaccgcatcgaccggacggtctctctctcgtctctcccgacgcgcctccacggccggccccgccccggctcgctagcctcctcccactcccagtaccagcccccgcccctccagcaccaccagcagctcgccttcggaccatgagacgggtcggaggagacctgcagggcgacggcacgacgcctcggtccgcggcggcggggcaggccatgatggagcttcaggccaacgggtcggccgccgtcgggggcgccatggtggtggggctcagcccgctcagcgaggccctgtggcgggacagcaaggcgctcccgccgggggccggccccgccgcgctcatcggcgacgtgtccgccaggctcacgtggaaggacctctgcgtcaccgtggctctgggccccggcaagacgcagaccgtgctggacgagctcaccgggtacgcggagcccgggtcgctgaccgcgctcatggggccctcggggtccggcaagtccaccctgctcgacgccctcgccggccgcctcgccgccaacgccttcctctccggcaacgtgctcctcaacggccgcaaggccaagctctccttcggcgccgcggcgtacgtgacgcaggacgacaacctgatcgggacgctgacggtgcgcgagacgatcggctactcggcgctgctgcggctgccggacaagatgccgcgggaggacaagcgcgcgctggtggagggcaccatcgtcgagatggggctgcaggactgcgccgacaccgtcatcggcaactggcacctccgcggggtcagcggcggcgagaagcgccgcgtcagcatcgcgctcgagctactcatgcgcccgcgcctcctcttcctcgacgagcccaccagcggcctcgacagctcgtctgcgttcttcgtgacgcagacgctgcggggcctggcgagggacggcaggacggtgattgcttccatccaccagcccagcagcgaggtgttcgagctcttcgacatgctcttcctgctatccgggggcaagaccgtctacttcggacaagcatcgcaagcatgcgagttctttgctcaagccggtttcccttgcccggctctgcggaatccgtccgaccatttcctgaggtgcgtcaactcggacttcgacaaggtgaaggccacccttaaaggatcgatgaaagcaagggtcgagaggtccgacgatccacttgacaggatgaccacatcggaggccatcaggaagttggttgcatcctacagcaggtcccagtactactacgccgcaagggagaaagtaaatgacatctcgcgaatgaaaggaaccgtgctggattccggtggcagccaggccagcttcctgatgcaggcctgcaccctgaccaagcgctccttcatcaacatgtcgcgggactttgggtactactggctcaggctcctcatctacctcctcgtcaccgtttgcatcggcacgatctacctggacgtcggcaccaaatacacatccatcctggccagggctgcctgttccgcgttcgtctttgggttcgttacgttcatgtccattggaggattcccttcgttcgttgaagaaatgaaggtcttccagcgggaacggctgaacgggcactacggtgtcgcggcgtttgtcatcagcaacaccatctcggcaacgccgttcctgattctgatatgcttcttgtcgggaaccatatgctacttcatggtgcgcctccatcctggcttcgagcactacatcttcttcgtcttgaacctgtacgccagcgttacggtggtcgagagcttgatgatggcgattgccagtgtcattcccaatttcctcatgggtatcatcataggggccgggattcagggaatattcatgctggtctctggctacttcagacttccatacgacatcccgaagcccttttggagataccccatgcagtacatcagcttccactactgggcactgcagggccagtgccagaacgacatgaagggcctcgtgttcgacaaccagtacccggaccaacccaagatccccggggacttcatcctcaagtacatcttccagatcaacgtggaccgttccaagtggatcgacctgtcggtcattttcagcatgatcttcatctaccgcatcctcttcttcctcatgatcaagatcaacgaggacgcgctgccgtggatccgcggccacatcgcgaggaagaggatgcagaagaagggccctacccccaccatgggcaagacgccttcgctgagaggctacgtcgtcgatccggagctcggttccaacgagggctagaggtcgtgcttgttcttttgggtagcggaaaaaaaatagggttttctcccccccggctcttggtgttatattgtatatttaagatcaggggataaaaaaactggtatcacacgttttggaaccg

SEQ ID NO: 32176 - DNA, 657 bp, Zea mays
  Clone ID: UC-ZMFLB73274A09_FLI
acggaggtggactgcgagtacctcaagcgatgctgcgagacgctgacggaggagaaccggcggctgcagaaggagctatccgagctccgcgcgctcaagacggtgcaccccttctacatgcacctcccggccaccaccctttccatgtgcccctcctgcgagcgcgtcgcctccaactccgcgccggcgcccgcgtcatcgccgtcccccgctactggcattgcggccccggcaccggagcagaggccctcgtcgttcgcggctctgttctcgtcccctctgaaccgcccgctggccgcccaggcgcaaccgcaaccgcaggcgccggccaactcgtgaggcgctctctactctatctccggcgacgcgaacggaggtggatctggctgtaaatacgatcacctttttttggcttcctttttcttttgttttcacttgatgcggttcttgagatttttttttttgtggattgccgatgggttggtttaccggtttattagagcgcatcatctggccgtcggattggactgcggacggccgggtgcagaaaggaagtgctgcgatagagtttattaacctcagtagcatcgatcatgttttgttaccttgctatctatcttggcgtcaatataggccttgaaatccgaagttaccctg

SEQ ID NO: 32177 - DNA, 1287 bp, Zea mays
  Clone ID: UC-ZMFLB73274C08_FLI
gaggggagaaaccatagctcctggccgttctgcctgcccatccaccgcggcgccggccgtccgtctcccgtccacatccctcctcctctcctgcaaggttcctgtgcggtatgtagcgcagaggggtcggagtcggagtcggagtcggagaagatgatgggcgggttcctctccagggtcctcctgttggcttttggctatgcctatcctgcctacgaatgctacaagactgttgaactgaacaaaccagagattgcgcagctcatattttggtgtcagtattggtttgtttcctgtgtctaggattttagttgccctgttgacagttttggagagattcggagatttcacaatatcatggctaccgttctactcggaagcaaagctgatgttctttgtatacttgtggtaccctaagacaaagggaactacgtatgtttatggaactttctttaaaccatatatttctcagcatgagaatgaaatcgaccggaatctccttgagctgagagctcgagccaccgacacggttgtactttattttcagaaggctgcttcggcaggacaaagtactttctttgacgttttaaaatatgttgctgcccagtcaccttctcagaaatcaaggcaacgccttcatcaggattcacagcagccgccacaacaacaacaaccacaagtgcaggtgcagcaggcgcaaccacaaaaacaagcagcacctgttatgcgcagagcatcatctattgctgctcggcaagcagcaatggcacagcaatctcaggagactaaacccgtttcatcttcgcccaagatcaagcgtcaaacatcagcgagatctggttcagtggcatccacaaagcctccggtagctgcatccgcgctaaaacctggtggtagcccaaagaaaggcgaggtcaaacctgctgccgacccagttcaaactccaaccacaggtgccgattcaccgaaacccgagcctagcgccccatcactccctggagccgaaggggtggacaagatggccatcgacgaggccagtggtgacgccccagagggcgcagaagagcttgaccctgcgctcgaagaggagacgccgatggaggagacgatccgtgtgacgcgcgccaagctaaggaggcgcacggccaccgaagatcctgctgggaattagctgtaggccattgtttttcctttccctgcacattgtgttgatctttttttgggttttaggctgtcatgttgtttggtggaatggagatgtgttgttgaattggttctttgtgacac

SEQ ID NO: 32178 - DNA, 1957 bp, Zea mays
  Clone ID: UC-ZMFLB73274C10_FLI
atcaccgcccccagacccatctgctggactgccgctcggtggggcaacacatcttggacggcggatctcaagagggcaagggagcaagccttcctgtgagacgtcgacctgctgctgtccctcttctcccgcgccgcacaagactggtggcagcagcacgcgccacgatcctcctcgaccctccggcctctcccctccctgcacctgcagagagcgccgcaagctagctgcagaggagcaaaacagcaggaggaggacgaaaggaagaagagaaggcgagcggctgaatcctccctcgatcaccacacgcgctctgcccttccccgccaccgatctgccacctccgagcttgtccgccaacgccggatctgccggccacgtgatgcggctcaggcgacggacagagcctacgggcagcggcggcgccaaaacctagctctggataccatgtcgttttctggtaggggcgcttcccctcctggtgcatgtataaaaaagttcgaaggaagagcagtttgctgaaaattttactcccaattatactgtgtgtgctgctactcatgcttggagcccttgtctggacatgtaaaagcagaggcaaacggcaaaagaagagagttcaaaagagaaggatgctagaatacttgagttctactgatgacgctggggacaagaacataaacttcccatttattagctttgaaaacattgtcacagcaacagataatttctctgaatctaatttgcttgggaaaggaggttttggcaaagtgtacaagggaatgttggaaggcacaaaggaagtagctgtcaagagacttagcacgggttccggccaaggcaaggaggagttcaaaaatgaagtagtcctaattgcaaagttgcagcacaagaacctagttaagcttctcggttgttgtattcatgaagatgagaagctgttagtttatgagtacttacccaacaaaagcttggattacttcctctttggtattttgaaattccagtttttgatactgttaatgatgtccaacaaataaatgtcctgtgtgcctgctgatatgccctgttttatattattcttattagcttctgcaagaaaatcaatgcttcagtggccaacaaggttcaagataatccagggggttgctagaggaattatgtatctccatcatgactcaagattaactgtaattcatcgagatctaaaagcaagcaacatcttgctagataaggagatgaacccaaagatatcagatttcggcatggctaggatattctctggtgatcagctccaagcaaatactaaccgagttgtagggacatatggctacatgtctcctgaatatgcaatgaaaggtgcattttcagttaagtctgacacctacagctttggtgttcttatattggagattgtaagtggattaaagataagctcaccatatcttatcatggatttttctaaccttataacatttgcatggaacatgtggaaagatgggaaaccagaagattttcttgactcatctgtaacggagagttgctccctcgatgaagtttcacgatgcatccatataggactcctgtgcgctcaagacaatccgagttgcaggccactcatgtcaacagttgtgtccatgctggagaacaaagcaacaccactgccaacaccgaagcaacctaaagattttgcacttcgggactacaatcctggaaacgaaggtgtccacagggaattgtccgtaaatgatacaagtctcactatggtggagggccgttagattattgtttttgatactacgatgggggagcacatagcccaccagaaatattcattgaagacagacgtttagtccctattttgtttatgggtatttctgtttagacaaatttagtatcaatttaatctataaaatttattatgcaagaacaatctattggaaaggtaaagtttatt

SEQ ID NO: 32179 - DNA, 2546 bp, Zea mays
  Clone ID: UC-ZMFLB73274D03_FLI
ggccatggagccaaatgagtgttacatcacaatggccatctctaggcatccatttctgagacgttggatattatcaaggtacaagaaattatgtgattcctgtaaacctgccgtggtttctgaggtgtcatcttgtttgaaagttttgggctctttgtcagaaccttccgatgataaaagtcacacgggcaatgagtcatcagtgctggagaaacttgataacaatgtcagagaaaatatgcgaccagatgaactaatttcttcatctgagcagggagcacttgcaaaaactgagagtgtcgataattatggaaataagttttcacagaataagaatgtggacatggttcgttctgataatcagaaatctgatgagctcacggacgcaaaattggatgacttcaaaggaggaactgttgtctctgatgcacagcatcaaggttcaagatctgatttgcttatgccaaaatctgtgtatgattctgctggaggatctacatcacttacttctccaggacaacattttggaagggcaaagcatttattttctgaaccatttgatatttatggcacttatgttgcgagggatgtgatttcagtttcaaaggaactttgggttggttcactgggaaatagagcaactgaggcactagtcagatctaagtttgaggagtttggcccattagtaaattttttgttctatccatccagaaaattttctttagttgagtatagaaacatattacatgctgtgcatgcatgtggatatatgcagggttcatctatttggggcggttttcttcaagtaaagtatttagacaggcttataggtagtaagggagttattcgtggtatagctattggtgaaagccgtcatgtttatgttgctaaagtcaagaataaaaaagacaaagatgaggtctttgatgatttaaagatggcagggctgaagtggccatctgggattactgatattcctggagaaaatgctttgcttcttgaattcgagacggcagttgatgcagctactgcaaaattctatattaggcaccaagctcgtccaaatgtttgttccagggatatgaatctacctggtcatcaacttttggtgcaaaatatagaccactcagtccctgacatcgacttaatcaacgccttctctcaattcggtgaggtcatcaggtggcaaatcaatagggctgatagtaactgctttatagtttatagatcacaagatgctgctgcccgtgcgaaatcacacttgcatggagcgcggtttgggttgaagtcaattagtattgaatcaaggacatacagtgcaggatctgttcatgataaaacagtgtcacctgttgctccgttgttaggccagagtgttcctgacaacagcgtgcgccatgagatcaggaatccaatagtcccaggatatcatgcaggatatgcagcaccaggggatcgacctatttatggtccgccacctccaaatacaagcagagctccacaaggaaattttccttgccctcctgtttccacacaccatggttctgtgatgccaccgccacctattcaaacctcttttgttcgtcctatgtatcctggtccagggagtccctgggagaacactactccaaatccaccgcccttcagccacgtttctcctcgcatgatgcctggaagtaacttccgtgttaatccagcttctcttccttttgtaccctcttgtgttacccctgtttcacagcttcctggaggatcagcacagcattctgagaaaatgccaccatcactacctctgccaactgtagctcccccaccatttacacctctagatatgccaccaacacaccctccgccactacctatttcccagccaccttcagtgccgccacccccaaattctcctcctccgcaaccttttgctgattcgtctgactcacaaaagccaagttctcatcctcaatggcagggtcctcttttaaaaagtggcttgcattactgcagaatctatgcaagcagaatagagttggatgcctgcagatatgaaaatactgtttctgaaccggcagaatggccttcagcgctagatgtgacaaagcgcacagctttccagcatgtgaagacaactttcaacaatacaccgcctaataagagagaggtctgccggctcgtgccttgttcaaatggtgatcagagagggttccgggatttcataagctatctggtacagaaagaatgcgctggcgtgattaggattcctgctgtgaaggcgatgtggacgagaatactgttcatccttcctcccacatctgatgcatgtggcatggtaggaatcccccctcttccagctgacaccatgattgttgtaactttgcccaaggaaacaacagtcgaagcatcataacaattttgtgtgctacatgtatgtatgttagctttgtcggtgtaagctttttgtggagctttgtgctccatagcagtcatgtaaaaactgtgcataattgttggctactatgcggtgttagcattattatacagtaggtcagctc

SEQ ID NO: 32180 - DNA, 2237 bp, Zea mays
  Clone ID: UC-ZMFLB73274D05_FLI
gacctctccccaccggctaaccctagcagcggcacgcgggcgacggcgaccagtagagggctagtcgcgccaccggcgaagggattcagcggtctacccgtcctccgacacaggcgcggcggcgtcctgcagattattattggtttgttgcaaaatgtctacggaagcgactttgaacaattctggtggttctgaatctgcattgctgttactggaacagcttgctgaagtttttggaaagttaaaaactcacaccgaaacatttctgcatttgcaaaatggcataaaatgggaagatattgaagggcatttcctcagccttgatgagtcgtacagaagcaagtttgatgaactggtagagaaggagaaggcattagaagaaaagaaagctgaagcttgtaggttgattgcagagaaagaggctaaagtttctacaaaagagcatgcctcactgaatcagcttcaggagctaagggatgctgctgtctcttctctagcagaggttcgacaaaaatataaggtggagcttgctgagatacttgaagcaagtggaagcaaagacaaaaaggtaagtacctcaatcaatgacaacaatgcatctcgtgcttcagaggagaatacccctgctagtgggtcgggtgaggcatctgaagctttacctgttgagactaagccgcgccctgtattgaagcaactttgtgaacagatggacaccaaaggccttctgaaatttctttcagaaaactgtagaaaacttgctagctttcgtgatgaactttctgttgcactaaaatgtgcaactgatcctgcacgcttcgtacttaattccctggagggtttcttcccaccagaccaaactaattcacctgggagtaaacataatgcccttgaggtccagcgcaagagctgcattcttttaatggaagctatagcacctgcactagggatgaaggagcctggtggcgacgacccttggagctctgaaattaaggagcaagccaaggaaattgccgaagagtggaagagtaagttagctgagattgacctggatgcttctaatggctattcattggaggcacaggctttcctgcagcttcttacaacttttaatgttgattcggtgcttgacgaagatgaactatgcaagatcgtagttgctgtctctcgtcgcaagcagactgctgtatcctgtcgctctcttggtcttaatgagaaagtaccaggtatcattgaggagttggttaagcggcacaggcaaattgatgcagttcatttcatacaagcttttgggctttcggagacattcccccctgcacctctgctgaagacatatgttgaggaacaaaaggatacaattgaaaataatggcgatgcaactgcgatctcattaacggatgaccccaaatctagggagctaattgctttgagggctgtgattaagtgtatcgaagagcataagcttcagaaggagtgttcacttggacctctccagaagcgtgtttctgagctgaagcccaagggtgagaaaaggccatcaagtgatgctgggcgtacttatgcaaagaagcctcgaggccctggcatttcatttcctaggagacctgccggttctgttggttcagctgctcgcaggcctccatttccgggctatacctggcagcgtgctcctgcgccgatgccctcccgtggtcctgctccagtgccctcccgtgcccctcttcctgcccctcttcctgatagatatggagctgctgaccggtaccattacacaccaccagccccagcatacgactctggtgcattttcgtcttacagtgaacctttcagtgccccaaaaccattccagtacactccagggtcagtggcagcatcatacaattcaagcccctataaagtcgcttatggtggcccaggagcaccagtcagaagcacctatccaggttatgccagcgcatctgggccggctgcttccagcagctatgcaaattatatgggatccgtatatcgccctccccagcaaccatagattcgactcctccctcaaaaaatgttgtgctggtgatgcaagacatggaaaccagtccctcccatccaactcccatggcggagatgtaaacttgagctattttcttgtttcatcgtccacaacagtggggtttggaggtgtatactgatgctctcatgtccagctacatctacaatgtaccttgcactcttgtttgcttttagctgtgctt

SEQ ID NO: 32181 - DNA, 2357 bp, Zea mays
  Clone ID: UC-ZMFLB73274E08_FLI
tgactgttgaaattcaaggtgatgctgaatcattggaacggtgcttggatcagttcactgctgttgagtggcttgatggggataataagtacaaatgcgatggatgcaacgactatgtgaaagcacggaagcacctttcagttcagcaagctccaaatatacttactatcactctcaaaagattccagactggtagatttgggaaactaaataagagagttacattccctatggagttagatctgacaccatacatgagttgcactgatggaagtgacctgtatgatctctatgctgtagtcgttcatctggatatgctgaacgcatcattctttggacattatatatgctatatcaaaggttatcaaggaaggtggtataaaattgatgactgcaaggttatggttgttgatgaggaggaagtacatgctcaaggcgcttatatgcttttatatagcaggagaacagctcgtcctaggtcacttcttacagttgatgagtccgtgaaacagcaacaacagtgcaaatcgctcctttccaatgggcaaagccacatgatactagcagatacaacattgaactgtgaatcatctttgaagattccagaagatatgttacaacaggattgtgaatccaataatgaatccttgcatgaaatgggtattaaggaccaggagtcagacatggatctacgtacaagcattgaagatgacaaattcattagcaatggaaatctacgtttaccaggttcactagtatcacatgttcttgaagatactagagctccagattctgtattagaaggctctgtgcaacttggccctcctttagaaggtggtcctactacgatgagctctgtgcagtttggcaactgcacaagtgaagcatcttcggaacattcctttgcagagcaatgtgaggtgcctgcctcatgtattgattcagttgactatatggatgttgatactgaagctggtgcagaagttgagagatgcgacgaacaaagacctgtcttaaatgattcagttggaaggccgaataataacacagcaaccccaactgcgaatggggtgccaggagaacccaaaccatcattttcctctggtttttttgataagccctcaagaaaaagatcttcctttacagaagaggctagtgccggttctcctcgaaagttaaatggctattgcaatggacatatcagcagtctagagcaagaagttctttgcaactctggaagtgaaaagtgcaatggagatgcacccgttacatccagtaatggcaaattctgtgcagctaatgttgatatgcaatctatcgatgattcgttgcatgaagacaagcgagatgtgccttctgtttctcatggctttgagccaagaccttacaagctacaatcagacagcaacaacaattgcggtaggacatgcaatgggaaacctaaagcttgccaaggggacatgtcatttttacctcggggcttccttggaaggcctagttctagaggaatttcagtcaaagcagatgatagcttgccatttagcactgacgcatcatcatcctttgggaatggaaacagtaagtcaagtaacaactcatcttctatgggtggcttgtctcctggtttccttacaagacaccgcagggaatccacagtcataggcacaagctctgacattccaatggataaaaaatctaatggcgccacagtagtgccagatcatgcagaaaaaaaggtttcagattgtacgacgaatggctcttcattccaaataagagcagcctccgaccaccttgattgaaatggccttgcaattttgaccacaaaaaacaacagctgtggacaagaaaatgacagtaatggagccccaggcatgagttatgatgggtctgaacatgatggactgagccgacgaataacctcaatttttttagctggatggtattgatgcccaataaaagcatgactgcattgttatagaatagaggccatttcgagcacacaagtgagaactgagagcctgtgtgatcatgtcatggctggtatataaactgatgaagggctgtgagctacgaagtaaatgctatgcaattagggcaagcattgtttgcttgatagaaatttttcctctttcgccacgtggctccctcatatcagatgggtagaggggtatctgggtttccacacaatttgcagaaacccagatgctcccctaatgccacgctattttgttggcattagcgttaggtacatagctgagcgtaggcctactaccgtccccttaattcatagcttaaataaactggaactgctgactcctccggtgtcctgaaagctgaatcaattgcagagtgat

SEQ ID NO: 32182 - DNA, 1256 bp, Zea mays
  Clone ID: UC-ZMFLB73274E10_FLI
ctcattgactgatccacctatgacaaagcaaaagcatgttgaggagttggtgcgccttcctgaaagctttctttgttatactccttccccagaagctggtcctgtttgtccaacaccagcaatttcaaatggtttcgtcacttttgggagctttaacaatctagcaaagattacaccgaaagtgttgcaagtttgggccagaatattatgttcagtccctaactccaggcttgtggttaagtgcaagccattctgctgtgagaacataaggcagaaatttttggccacactggaggagttgggtttggagtcattacgggttgatctgttgccactcatccatctgaatcatgatcacatgcaggcgtattctttgatggacatcagcctggatacatttccctatgctggtactacgactacatgtgaatctttatacatgggggttccatgtgttacaatggctggtgctgttcatgctcataacgttggtgtcagcttgctcagcaaagtcgggttggggaggctggttgccaaaactgaggatgagtatgtgagcctagcgttggatttggcatcagatgtgaatgccttgcaagaactgaggatgaccctgagggagctgatgatgaagtcgcccgtctgcgagggagagagattcacccggggcctggaagctgcatacatggacatgtggcgcaggtattgtgacggagacgtaccatctctcaggcgcttagcactgttagaggaacatcctgttgccaatgggccagactcggacaaaacctccgagaagcttgcagatctgaaagcgcagagagcaagcgcgaccgtggaggaagataaccagcccccagcaatggcgaatggtgtgagatcgcccagttcacccgctgctgcaaaatgtgaatcaaatggtcacagcagccaatgaccaagaacggtgtcacgctccattgatgcagaccgatactgatatattgtaggtcgagtgatgttagcaacatctgtgtttagagggaggggttgttaagctccgggtgtctgatttattgacacttgcggtctgtaaggtgattaaatgtgtcttataaagttcgatttgtagggctttgcccctgtaggttcttgatatggtaacttaagttgcttcattagaaggcgcgggttcccggttgtatatgtagtagaaatatgacagtaaaacaacttgaagagtcgattaaccgacatagatgtcattatgctatttt

SEQ ID NO: 32183 - DNA, 861 bp, Zea mays
  Clone ID: UC-ZMFLB73274E11_FLI
ctctctttctctttcggtatcgcagtcgtcgtcgccgctccccggccgggctcgctcgcgtgcgcgacccacccagccagcacaccagccagtcggcgcagcaaagcatggggaactgccaggcggcggaggtggcgacggtgctgctccagcacccgggcgggcgggtggagcggctctactggtccaccagcgccgccgaggtcatgcgcgccaacccgggccactacgtcgcgctcgtcacgctccgcgtcgccgaggaccggcaggacgccccgggcgggcagcggcgcaccgtgcgcctcacgcgcgtcaagctgctcaagcccaaggagacgctgctcctcggtcacgtgtaccgcctcatcaccacccaggaggtgacgaaggcggtgcaggcgaggaagcaggacaagcagaggaaagcgcagcagcagctgctggagccgaggcagggccagggcgtggcgagtggcgccgcggccgaggaggaggacgacgacgacgaggcagccttggacgccagccttgatcagttggcgcggcaggacaacggcagccggagctccagtgcgcggcaccggcaatggcggccgtcgctgcagagcatcgacgaggccacgacctgagatgtcagctccatacagccgtagcgccgtaatcattgactaccggtgggcctgtactttcggcgatcacctggcctcggtcagttcatcgcaagggttgctatttggcctactgctacgattgcacactgtggagtggagtgagttgggagcttgacaccccgggatgagagggcactgcttcggatgcagcatgtagcctcggatccgtgtaaattttcaggtcttggtc

SEQ ID NO: 32184 - DNA, 739 bp, Zea mays
  Clone ID: UC-ZMFLB73274E12_FLI
gattgccaccatctatgtccatatctcaaggggcgacaaggaatctgtcttctcagctgcaatctcgaaagatggcagagcatacaatgatcagattgggggtgatcccaaaatcatacaggagtttgtgcaacttgctggtagggcaaaagctgctgcttctgaagctatggatgctgaggcaatccttggggacataccagatgaattcctcgatccaattcagtatactctaatgaaagatcctgtgacactgccatcgtcaaaggtcacagtagaccggcccgtaattatcaggcatctgctgagtgattctacagatccatttaaccgctcccacctcactcaagacatgctgataccaaacacggagctcaagttgcagatcgaggagtttgtccggtcccagcagtcgagaaagcgaactgctgcggcgttgttggagattggcgaagcggagggtactgatgatatggccgaatgaattgtgccaggagcaggggatggacacattttttttgtggggaaagagtgatggttaattcacatgaaatgtatcggtccatctgtccgtataaagttggtttcccggcttgtgtccctgttgcctcgattctttgtaaatattgtaggtgcacacctgatacaaatgtagttatagaggaagcctgtcagcccgtctcatcaacaatgtgttttacgatatccccactacaactttttttaacacgatattatc

SEQ ID NO: 32185 - DNA, 1312 bp, Zea mays
  Clone ID: UC-ZMFLB73274F06_FLI
tggatgctcgccggcgacgcgcccgtcgacggcctcgaccgggcgtccttccgcctccccgcgcacttcttcggcgtctacgacggacacggcggcctccaggtcgccaactactgccgggagagaatccacgaggtactggcagaggagctcaccaaggcagaggaggccgcgtccgacgctgacctgggtggcctcgaccctaacactcagaagcactgggagaaggcctttgtgggctgcttcagccgtgttgatgcagaggtgggaggagacgcggcgaccgaagccaagcctgtggctccagacaccgtgggctcaacagcggtggttgcgcttgtctgctcatcgcatgtcatcgttgccaactgtggcgactcgcgagcggtgctctgccggggcaagcagcctgtggcgctttccgtggaccataaaccaaacagggaagatgagtatgcaaggattgaggcccagggtggcaaggtcatcaattggaatggctatcgagtcctcggtgttctcgccatgtcccggtcaattggggacagatacctgaagccatatattatcccagtccctgaggtcacaattgtcgcccgtgcaaaagatgatgagtgcctaattattgcaagtgatggcctctgggatgtgatgtcaaacgaggaggtatgtgatgctgctcgcaagcgcatactgctgtggcacaagaagaattcagatgcctcatcgtcagcccaaagaagcggtgattcgccagatgaagcggctcaagcagctgctgagtatttatcgaagctggctctccataaggggagcaaggacaacataaccgtaattgtagtcgacctcaagtcacataggaagatcaagagcagagcataaccgtggattcggtaagacttggacagtagaaatggttgttactacactaggacgctagaaaggtggagaaaaggctcctgttcagtctgctgcacatgtacactggttggcccaacactagtctttttccacaaccatataggctgccacgtttgttcagggactcatacacagatctaatctggttagaaattgggctgacgaagtaaggtaaaggtacaatagaaaccgccagcattaaactgtacctgtgctacttgtgttttggtatattgatgtctaggagtagcagattagcagtgcaaagaatactacgataccccaagttgtttctgcaacaaatgttatgtgcatgtatatcataaaataagaccatctgtaatatgaattcaattcttggcatccgacgttattaattcagttgattgcc

SEQ ID NO: 32186 - DNA, 1502 bp, Zea mays
  Clone ID: UC-ZMFLB73274F11_FLI
gaagaatgagaacatccagtcacagccatcagatgcttctgtgatgttaccacagcataattacaaactcgacgttcatgccctcaatagtcatcaacctggtcagttcgaatgtcgtgaattcagagaatcaatccttggcatcatgcctcatcattgggataggagagaggatactaccctacaacttgcacattttaggaagcataaaaggaaacaagttaagagaacgcctggaaaggctgttattaatagcgtgaacaagcccattgaacacaatccacctgggaaggatgcttccaatagaatagctagagctcttgggaaggctgcagatatggctaactcaaataaagccaggaaggcacagaggatgcagtatgttccgacaatcactaatcatactcaagtttggtgggttcctaatgttgttgttgtacatgaaaaggaagggatagaggttgtccatctagcttctggacgtacaatatgcaagcttcatttaaatgaaggaggccttcatgcagatattaatggagatggagttctggatcatgtccaggttgttggtggaaatggtattaaagagcagactgtcgtgagtggatcaatggaagtgctgaaaccctgttgggcagtcgctacatccggtgtgccagtgcgggagcaactttttaacgtctctatctgccattacaaccattttaatctgttccatcatggtgacttctcgagaagttttgggaggacatttgatacagctggtttagaggtcgcgactcctatcctggtccagacagacgatgggcataaacacaggagaggaagccatggtgatatcatctttttgacaagccggggagaggtgacatcgtactctcctgggctgctcggccatgatgcggtgtggagatggcaagtatcatcaggggcgacatggtccaaccttccatctccatcgggaatgatggagaacatagtggtgcctaccttgaaggccttctccctacgtgcctatgacccgaaagaggtgatcatcgccggtggtgaccaggaagcggtggtgctctctccttctggtggcatactggccatgatcgagctcccagcgccccccactcacgctcacctcctggaggatttctccggggacggtctcaccgacatgattgtggtaacttccggtggaatatatggattcgtgcagacaaggcagcctggggctcttttcttcagcacgctggtggggtgcctgatagttgtgatcggcgtggtattcgtgtctctgcacctcagttcgtccaatgccgccaaacccagggcttcctcgtctgaatacagatgatgttttgatatgcaaggtcaagagacttttggtactcctatgttctagtagtctatatatttaaccaaatgagaattcgtgttattgtatgataagaattgttcctactagtatatctcatgatatactgatagtgcaatctcgttttttgttgtct

SEQ ID NO: 32187 - DNA, 2055 bp, Zea mays
  Clone ID: UC-ZMFLB73274F12_FLI
gaagaacagaagtcatgtgggaaaactgaagatgtcaagaacttcttcaggaagaaaaaggtcaaggtcaaatgctcagaagcctcctatctggcaagaagtggagagatcctctttctctgttggtgatagtatggacatactaaatacatctgcaaatgatctaaagacgcatgagctagacgaggatcctgaggtggaaagtatggctaggatgtttagtagttcaaatacttcatctttattgttgccatcaagtgactctgcatattcttcaaattattgtggtgccaatgtgctacaagactcttatttgaagttaagatgcgaggtggtaggagctagcattgtcaaaagcgggtctggcatgtttgctgtgtattctatttccgtgaccgacgccaatggtaatagttggtccattaagaggaggtttcgtcattttgaagacctgcatcggcgtctaaaagagtatgctcagtacaatcttcatttacctccaaaacatttcctctcatcaggtttagaggtttctgttgttcgagagagatgcaagctgctcgacatatatctgaagaaccttctgcaaattcctattgtttcaagctgcatagaagtctgggattttctgagtgtggattcacagacatatattttcacggacactctctcagtcatccaaacattgtcagtcagtttagatgaaagatcaaatgggaaaaatataaaagcattgaactcttctggagctttgaatggaaattctatctctggaggtcaatctttgcatggacatatagacgacaccgtacataaggattcagacatcgcttgtgatggtttgagatttaggaaagggaatgtgaacaagaacttgggaaacggtgttagccacacaacagatagtgttagcaacacaactgccaatcattatcaggacaattctggaagtgatccagagcagaatgatcattccttttcaatagattcattaaatcctaagaagttgcgttcaactgaaaccaatgacacatctcaaattccagagtctggaggattttcagtatctcctaatgattggatggccccgaatcttagtgttcccttgtttcatcttgttgatgtggtctttcagctccaagatggaggctggataaggcgtcaagcattttgggtagcaaagcaaatactgcaattgggaatgggagacacgtttgatgactggcttgttgacaaaatccaattacttaggaaagggaggataattgcttttgctgttaagcgcattgaacaaattctctggcctgatggaattttcatgacaaaacatccaaagagaaattcgcctccacctcctcctggtgctcagagcaatggcatgggaaactatctaagcgatgaacaacggatagaagctgctcatcgtgcaaattttgtccgtgaactgataatagataaagccccatctccactagtgagtcttgttggtcgaaaggattatgaaagatgtgctcatgatatctatttctttcttcagtccccggtttgtttgaagcagctagcgttcgaactccttgagctgcttgttctttcttcatttccggagttggatggcactgtgaggaagtggcacgaagataaagagcaattctgcgcccagtaatgtttatcaaacgtttgaatttgtcacgggcggtgtttgtttccaacacatatcgtctttccagagtggtgtggcctgtgaattctgcgaaaataaggtggtggcttcagaggagtgcccgtggatatctcagtttgaagtgggtggtggctttgtgcagtgtgaatatggttagatagtgcgaggatatggtccctttttccaccgggccatggcagaacggtttttgtgcccgatagagttcatttttccccctccagatttggtatacgtaatgctgctgcctgaaaggaaagagatggtggcgcattttttttgcacccgttttggtggtacactggtacccgtcttgtgtaaatctgcatagagataaatgaagtttcgaggtggtc

SEQ ID NO: 32188 - DNA, 1064 bp, Zea mays
  Clone ID: UC-ZMFLB73274H06_FLI
aaagcatgctaagaatgtcgttctgggaaggcatttatacgtgcctggtggatgtttctgaagaatctggtgttttttcattcattgaaaaatgcattcagtgcttgttgcctcttttgacgctccatagtgatggtcaacctgaattcatgaaagagtggtctgttgctatcttatgtcttacaaacgcccagaaaaaatggctggatgatattttgcagattcgcagtactgccttagtcaatgaaggacatgttgatgttgcaaaaaagattatcctcagagcaagattgtgtgcaactggttgtggttcaacacatgagctgggaaatataaagacagcaatattgtgtacaaaagctgatggtgtttggtggagtgtccttgttgagatcacttcagccttaaactcagccgaaaacatcatcaaaagacagtggcttctggatgcattagacattggctgtgttacagctcacccctcaacggtgctgtgttttgttggcttgctttgtggtagctgctgcatctatatgccgcttcttcttgttaattcgataaatgtactgagcgacttgccggtcaccctgcctgcctttctctccaccatcgtttctgatgatttcaggaactctgtggcagacaggctatggctgttgactactgacatctatacttgggctgaacaattagctcacggacacgatcaacctggacatgatcgtattcatagaagtgaaactgagattgcgacttttttggccaatattctgctctctacatgcattacagtcgaggactacctgtctgttgataagcggctaaagcttgcaaatcttgaagcactctaatcaaagggagatgtgtttcttttctattttatgtatgtatttatgtacggtatcagtcatgttttaatagttgatgtccctgctgatgatccagcaatgtttttttcatgtacataattaatttaactaactcatcttatgcactgaaaacaatctattgttcaaagatagatagacctatgaaataatattgttgtgtacactcactttgtc

SEQ ID NO: 32189 - DNA, 645 bp, Zea mays
  Clone ID: UC-ZMFLB73274H09_FLI
ggatgttactgaatccctgctccaggccatcttccagtcgaaacgatggggcaccttggtgttcgtcctcctagagatagtcttttggtgcttggccgccggcttcctgcacatgaaaggcgtttacttgaaactgtagaaccaaatcgtggacagttctctgatggaacggaattgacgtcctgcaaacattggtggaaggcccggtatccctgttttttctgtaaatgcaacgcgattctggaaccatgggtgtagcggttgattacaggacgttgtggtcccaaggtcctccaactcatccgcctccatgcacaccaggaaaacatcttgctgaaagtcacaagcgtttcaccacgtgaagacccagtctgatggtctttcagttgtttggtaaaactgtttctgttttcctgcagaaatcatttctagtttctagtgattttggaaaccaggatgtttctgtttatcacttgtaatcttgggtaaatctcaaaaacgtagtgtattttgctaatgattccacgatgaagtgagtgagtggacatgtacacagtagacagtatgaaagtatgtatgaaccgtcgatcaccgtataatccatctactccaactcattgcagtgaaatgctgtgttgtacctcc

SEQ ID NO: 32190 - DNA, 1345 bp, Zea mays
  Clone ID: UC-ZMFLB73274H12_FLI
caggtacagtatatactatatagatattgaaaacccaactttgtgatcctattagtataatagtattcattctacgttggaatttgaaaactggggcaaaaggtcattgcgccgtcgtcgtcgtcgttcgcaagcagcaaccaggcagctccgggctccggccatggcatcaccaccaaggaatgtcggtaccaggactaccagcaacccggagatcccagagttcctggtgggcccggctggccggccggtgccggccgtggggctcggcacggcatcgttcccgttcgtggaggaaaacgtcaggaccgccgtcctcgcggcactggagctcggataccgccacctcgataccgcttcgctctaccgctccgaacgtgccgtcggcgacgccgtggccgaggcagcgcggcgcgggatcgtggcgtccagggaggaggtgttcgtgacgaccaagatgtggtgctcgcagtgccacccggatctcgtgctaccttccctcaaggagagcttgcagaaccttcaaatggattatgttgatttgtacctggttcattggccgatagctgcaaagcccggcaagccacagttcccgtttaaaagggaggacatcatgcccatggacctaataggtgtatggcgggcaatggaggaatgccaccggcttggccttgctaggatgattggtgtcagcaatttcacaacaaagaagctccaagagctactggccattgctaaaatccccccgtcagtaaatcaggttgaaatgaatccaatttggcagcagaaaaggttagctgagttctgcaaagacaaaggtattcatttgactgcctattctccgctagcaggccaaagcacgtctaaggtcaatccagtaatgcagtctgaggttctgcaagaggttgcaaaggctagaggaaagtcagtggctcagatttcgctgaggtggatctacgagcaaggcgctagcgtggttgtcaagagtttcggaagggataggctcaaggagaacgtggaaatcttcgattgggaactgaccaatgaagacaggcgtaagattagtcagatacctcagcacaagagggtcacagtgttggggatcctcagcccagacggcgtctccagcgtggatcttgctgagcttgatattgttgaaatgtagcagaaatctccatctatcaggttgcaaggacaaaaaatggtgattggagtagctttcatacggctacgttgaatcagttgcttagatacggccatattgaatcaagaattagaagtagaggacgatctctctacttgtcgtccggacctcattttcttaaaatgtattttcaggtgtctg

SEQ ID NO: 32191 - DNA, 2109 bp, Zea mays
  Clone ID: UC-ZMFLB73275E02_FLI
cgctctaataaatcttcctcccatctctctcgctcccaaccctcaagtccccaccaacccaaccctggtggcaccggccgcacacacgaaagcaagctagctagtcactattagagctatttggttgggagcggtttagctgagcaagatcgaactggcattgtcacacacatctcagcactcagctccttgggttcccctccatgagcagcagctgagcagccacacattgccgtcttccttgctgcacttgtagttacagctagatccattgatttttttggcaacaacaagagcaggagctactgagcaagaagtgcgtacgtgcttggtgagtgttacttatactagcttgcgatggagctggtgactatggtgacgctgacgctgctggcgtactcggcggcgatgctggcgcggcttctggtggcgcgcgcgcagcggcgtcggtgctacctgctggactacgtgtgctacaaggcgacggacgaccggaagctgccgacggacctgtgcggcgagatcatccagcggaacaagctgctggggctggaggagtacaagttcctgctgaaggtgatcgtgaactcgggcatcggcgaggagacgtacggcccgcgcaacatgatcgagggcggggaggcccggccggaccgcctccgcgagggcatggaggagatggacgagaccttccacgccgtcctcgacgagctcttcgcccggtcggcggcgcccggcggcgtcggcatccgccccgccgacgtcgacgtgctcgtcgtcaacgtgtccatgttctcgccggcgccgtccctgtcggcgcgcgtcgtgcggcgctacggcctccgcgaggacgccaaggtgtacaacctcacgggcatgggctgcagcgccacgctcatcgcgctcgacctcgtcaacggctacttcaggacgcacgccgggcaggtggctctggtgatgacgtcggagtcgatcgcgcccaactggtacgcgggcaacaagcgcaccttcatgctgggcaactgcctgttccgctccggcggctgcgcctacttcctgaccaacgacccgcggctccggccgcacgccaagctccgtctccgccacgtggtgcgcacccacacgggcgcctccgacgaggcctacaactgcgcgctccagatggaggacgaggccggccgcccggggttccacctgggcaaggagctgccgcgcgccgcggtgcacgccttcgtgcacaacctccgcgtgctggcgccccgcgtgctgccgctcccggagctgctccgcctcgcctgcgccaccctctcggcgcgcctggcgcgcaagaagcggcagcgcggcgcgggccatggccacggccacctcaccatccgcatgaaggccggcgtcgaccacttctgcgtgcacacgggcggcgccgccgtcatcgacggcgtcggcaagggactcacgctcacggagcacgacctggagccctcccgcatgacgctgcaccgcttcggcaacacctccgccagcagcgtctggtacgtgctcgcctacatggaggccaagggccgcctgcgccagggcgaccgcgtcctcatgctcaccttcggcgccggattcaagtgcaacagctgcgtctggaccgtcgagaggcccgccaccgacgccggcgtctggaaggaccgcatccaccactacccgctcaaggacgtctccaacccattcatggacaagtacggattcgtcaaggacctcatagacttgtgatcgccccctagctgctcaactcaacgtctcaaccccaccaacgcacatactttttatttacaccattattattgtattcattgtcatgttagtactactctgttctagtattgagcaactactagttaattaaggtgagcacaacaatgctagctgaggattcatagtagcttatgattcttttggtgatggcgggaagatcgacttttacgtagcaacggatatggcttcgctctttgttctttcttcagttctgtcatttcgtgtgtgtcaatttaaatgccccatgtcgtcagtcaatcagtcagtgtcgtcctgttcctatttactatatcaaatgattatggtgcc

SEQ ID NO: 32192 - DNA, 855 bp, Zea mays
  Clone ID: UC-ZMFLB73275F02_FLI
ggtctccccaccgcccccgatccaccattcctcctccggatttcgcagtcagcggtggtgaaggtagcgggcgcggaggaagatggggctcgcgttcgggaagctcttcagccggctcttcgccaagaaggagatgcggattcttatggtcggtctcgacgccgccggtaaaaccaccatcctctacaagctcaagctcggcgagatcgtcacaaccatccccaccatcggtttcaatgttgaaactgttgagtacaagaacattagcttcacggtctgggatgtcgggggtcaggacaagatcagacctctctggaggcattacttccagaacacacagggtcttatctttgttgtggatagcaatgaccgtgaccgtgttgttgaagccagagatgagctgcacaggatgctgaacgaggatgagctacgtgatgctgtgctgcttgttttcgccaacaagcaagatcttcctaatgccatgaatgctgctgagatcactgacaagcttggattacactccctgcggcagcgacactggtacatccagagcacttgtgccacaactggcgagggtctgtacgagggcctggactggctgtccagcaacattgcgagcaaggcttgaatatcaaatgcgaactgactaggagctccggatgtatcatggaaacttaggacagaatcgcctctacaacctgttaggtgtcttctaccggcacaatatattttttgtttggaatatgtaatgatgttacggttcaacgtttattctaccctactatactgttggatgttctttgggcctgtttcattttgcacaaggattggagttccaatatcatgctacatttt

SEQ ID NO: 32193 - DNA, 1316 bp, Zea mays
  Clone ID: UC-ZMFLB73275G10_FLI
cacattccttccccacttctctctctctctcgtgacgacggcgacggcaacgactggggcgacagtcgctgccgccctacttgccggttgctcggatcttcttcggcccgttagccgtcgacgagcaccaccagggcaaccagatacttcagtggcttcgcaaggatgtcctggtgcactattgagtctgatcctggtgtgttcactgagctgattcagcaaatgcaagtgaaaggtgtacaggtggaagagctttactctctcgatgtgggctctcttagtcaactgcggccagtatatgggctaatttttctcttcaagtggatacccggggagaaggatgaacggcctgttgtcagagatcctaacccaaaccttttctttgcgcaccaagtcatcactaatgcatgtgctactcaagctattctctcagttctcatgaatcgccctgaaattgacattggcccagaattatctcaattgaaggaattcacaggagcttttacaccagatctgaagggcttggctattagcaacagcgaatctatccggacagctcataacagctttgcaaggccagagccatttatttctgatgagcagagggccgcaactaaggatgatgatgtttaccatttcataagctatttaccttttgaaggtgtcctgtatgagctggatggactgaaggaagggcctgtgaatcttgggcagtgcgatggtgctgatgatcttgattggctacggatggtgcagccagttattcaagaaaggattgagcgctactcacaaagcgagatcaggttcaatctcatggccatcataaagaacaggaaagaggtgtacagtgctgagcttgaggaactggagaagagaagggagcagattttgcaggagatgaataatgcttcctccacagaatccttgagcagttcgcttacggaggtgatatcggcaatcgaactgtcacggagaaggtcatcatggaagaagagaagttcaagaagtggaagaaggagaacattcggaggaaacataactacatccctttcttgttcaacttgctgaagatgcttgcagagaagcagcagctaaaacctctggtcgagaaggccaaacagcaaaagtcagcaagcccgagcacgagttgatggtgaaatgtcaatagactggtagcttttgccgatgtcttctgagcgtcgtgttatcttatcagatacattgccaagtcggcagctcagataaattatgaccgatgttatttataccatgttgcacgccgtgatgtatcagcagctatgccattttttttttgg

SEQ ID NO: 32194 - DNA, 681 bp, Zea mays
  Clone ID: UC-ZMFLB73275G11_FLI
ctcttttccaattccagacctgaagaaactccgaccggtggcggcaggatctgtgccgcgatggcgacgtcgaacaccgcgcggatggaggacggcggcggcgacctgagaagcaccatcaagaagtggaacatcatctaccctgtctacctcaactccaagaagacggtcgccgagggccgccgcatcgccgctgccaaggcctgcccggaccccacctgcatcgagatcgctgactgctgttcgcacctcaagatcccccacgccatcgagttggataaggcgtaccctcgggatttcttccaggtggggagggtcagggtgcagcttaagaaagatgacggctcccccgtcaatcctgctattaaaacgaagaagcagctgatgatccaagtagcagagctagttcccaagcatcacggaaggacaaagaagcaggagccagcgcccaatcccggtggcagttcaaagaacacaaaaggcgggaaaaagaaaaagtgatgcagtatcattgtgttgttttttattctgttcgtcatcatacactaagcttctgtgaaaaaggaaaagtcttggacgttgttgttatgttgccattatgccattttttcatgtataagaacttactaagaatcttccattgactcggtaaaatgcaacttaaaaaaatttggcgtcgct

SEQ ID NO: 32195 - DNA, 992 bp, Zea mays
  Clone ID: UC-ZMFLB73275H02_FLI
agaatcggagatggcgtccagcgcctctcggttcatcaagtgcgtcacggtcggcgacggtgccgtgggcaagacatgtatgctcatctgctacaccagcaacaagttccccactgattacatacccacggtgttcgacaatttcagtgcaaatgtcgttgtggatggcaccacggtgaatttgggcctgtgggataccgcagggcaggaagattacaaccgactgaggcctctaagctaccgtggtgcagatgttttcgtgcttgcattctcacttgtgagtcgagctagctatgagaatatcatgaagaagtggataccggagcttcagcattatgcacgtggggtgcctgttgtgttggtaggcacaaaatttgatcttcgtgaagacaagcactacttgatggaccatcctgggttggtgcctgttaccacagcacaaggggaggaacttcgtagacaaattggtgctatgtattacatcgaatgcagttcgaagacacagcagaatgtcaaagctgtgttcgatgctgccatcaaggttgtaatccagcctccaactaaactaagagaaaagaagaaaaagaaatcacgcaagggatgttcgatggtgaacatcttatctggaagaaaaatgctatgcttcaagtcctgaatgatcgaagggggtcttacctgaactaataccatgagtgtgaccccaagttcgcgaagcttgaaatcttgatgcgctcgttgcgcatgtatatttgcacctttggttattaatcactagaggtagatgattgaaactaatctgcttaaccaatgtgcactgctgggcgctggcgtggttagctatatcagttaggcagttcgacagaggtcaaagagattgagattttgttctttcttggcaatgtcacagcttttgtgaatctggtctcatcatactgtccgctagtttatccaatgattccatggtggaatcaatccatagcaacattgtgttg

SEQ ID NO: 32196 - DNA, 1428 bp, Zea mays
  Clone ID: UC-ZMFLB73275H07_FLI
atttttttccgccaaagccaggattcctctgctcttcctgtttagggtttccccctctctctgctcctgccggatgcgatggcgattccgccgcggactccttccccgccgccatcgtggtcgcgctctgtaaccgagaccgttcgggggtcccaccagttcaccgtacggggctactccctcgccaagggcatgggccccggccgctacctcgccagcgacgtcttcgccgtcggaggataccactgggccgtctacctctaccccgacggcaagaacgccgaggacaactccaactacgtctccgttttcgtcgccctcgcttccgacggcatcgacgtccgagccctcttcgagctcaccctcctcgaccagtccggccgcggctgccacaaggttcactcgcactttgaccgctcgctcaagttcggcccatacaccctcaagtacaggggatccatgtggggttacaagcgcttctacaaaagaacactcttggaagaatctgatttcttaaagaatgattgcctagtgatgaactgcacagtaggtgttgtcaagaaccgtatagaaacaccaaaggacatccagattcatgttccacgatcagacatgggccgctgcttcaaggagctcctcagccgctgcattggatgtgacataacattcgaagtgcgagatgagaaagtcagggcacacaagtggattcttgctgctcgctccccagtatttaaagcccagttctttggtcctattggaaagcctgacctgcacacggttgttgtggaggatgtggaacctgttgtcttcaaggcaatggtgaacttcatttacgctgatgaactccccagcattcctgagctagctgggtctgcctcaacgtggacatcaacagtagtagtacagcatttgttggcagcagctgatagatatggactggtccgtctgcgtatcctgtgtgaatcaaagctctgtgatgaactgactcctgaaactgtcgcaacaactttagcccttgctgaacagcaccattgtgctgagctgaagtctgtatgtctaaagttcattgctttgcgaggaaatttgggagctgttatggagacggaaggctttgattacctggaggatacatgcccgtccctactatctgacttgttagctactgtggcagtcgtggacgacgatcttgcatcccttaaccgaaaaaggggagtcagcgggaaccaagtcatggctctagtgggaagcgttgaaaggcgcacccggaggaagctttagtagctggcttccctagagggagactgtagttgacaacgatttgatttggacgctggtagctgtgaataatatcgtatccagatgattttttttttttttttgcagaagcagaagttgtaaattttttgaattgaatgcctttttttttcc

SEQ ID NO: 32197 - DNA, 808 bp, Zea mays
  Clone ID: UC-ZMFLB73276A10_FLI
gcaaaatctcatccaccagcaccttattcgcgcccaaactcggatgaaaaaacaggcagataaacaccgctctgaacgctccttctcagttggcgattgggtttacatgaagctccaaccctacgtccagtcttcagtgcttccacgtgcccaccaaaaactcagttacaagttctttggcccttatcgagtggccaacagggtcggttcagtggcctaccgattggaactcccaaattccagcaggattcatcccgtcgttcatgtctcccaactgaagctggcaaaaggtttctcgggctctgctacttcttccttaccggatgaactgccagagttcagcataccactccgtattttgcagactcgtggctttgctaaaggtaaacgctttgtgaaacaggttctggtgcagtggtccaaccttcctactgagttagccacatgggaagaccaagacaacctgaggcaatgttatccttttgctcctgcttgggggcaagcaggattccaagggggggaaaatgtcaacaatgagagtatggattcccctacagtcagccgaggcgtaccaaacggcgaaccggaagcagctccagttgtccgcacacgccgtgtctgtcgcgccaacgtccgtcagcaaggaccagagtgggtgcagtgagtcggcatattggtgttgggtctgagcctgcgtgctcccgtgcgtaagtggctgtcttaagtactagcgtagccgaaagagacggtatgcattttgtaaggaaaacttagtatcctggaatagaactcctctggttctcctaac

SEQ ID NO: 32198 - DNA, 912 bp, Zea mays
  Clone ID: UC-ZMFLB73276A11_FLI
ttttgattttagccgccgccgctgctcatctcacatccctcgagaagacgcctgctcctcgccgatcgatacgatggccgtcttctccgacctccacaccgccgacggcctcaagtccctcgaggctcacctcgccggcaaaacctatgtgtctggtgactccattactaaggatgacattaaggtcttcgccgcggtgccgtcgaagcctggcgctgagtttcctaatgtcgcccgctggtacgagaccgtctctgcggctgtagcctcaagattccctggtaaggctgttggtgtaaatctgcctgcgggatcagctcctgcggcagctgctcctgcggatgaggctgaggacgatgatgaccttgatctttttggtgatgaaactgaggaggacaagaaggcagctgatgagcgtgccgccgctgccaaggcctcttctaaaaagaaagaaagtggtaaatcctccgtccttatggatgtcaaaccatgggacgatgagactgatatgaagaagctggaggaggctgtccgcagtgtccagatggagggtctgacttggggagcatcaaagcttgtgcctgttggatacggcatcaagaagatgactatcatgttgacaattgtcgacgatcttgtgtccatcgacactctaattgaggaccaccttacgcaagagcccatcaatgagtacgtccagagttgcgacattgtggctttcaacaagatctagagttcagtttctgagtttgggcaacggcagcggctcagctcgtcaagtttgtgctgggatgccagtttatcccttctagtctattacagaaatgttgttcggagctgagtctattataaacatcttggtctgagtttattgttgagtggtgccagtttttttcaatatacatttatctt

SEQ ID NO: 32199 - DNA, 1309 bp, Zea mays
  Clone ID: UC-ZMFLB73276B12_FLI
cacggccgcaggcagcaggcagccactcgacgatctagtcgtctctctccccgctctgccgcctcgctgccgcggcttcccgtcggcgggaggatgaaggtcacggtcgtgtcccggagcggccgggaggtcgtcaagggcggcatcgacctcaaggactcggccaaggtcgcggacctgcaggaggccatccatgccaggactaagaagtattatccttctaggcagcggctcaccctcccccttcaacctggaaaaggcgggaagccagttgtcctcagtccgaaggccagcctgctagaatactgcgagaagggttctgggtcactgacagtggtcttcaaagatttagggccacaggtctactacagcacactgttcttcttcgagtacctgggtcctctcatcatctaccccatgttctactatctgcccgtctacaagtacttcgggcacgagggggagcgggccatgcaccctgtccagacctacgcaatgtactactggtgcttccactacttcaagcggatcatggagacgttcttcgtgcaccgcttcagccacgcgacgtcgccgctctcgaacgtcttcaggaactgtgcctactactggaccttcggcgcttacattgcttactactgcaaccacccgctgtacaccccagtgagtgatctgcagatgaagattgggtttggttttggggtcgtctgccaggtcgcgaacttctactgccacatcctgctgcggaacctcaggagcccaagcggcagcggcgggtaccagatcccccgcggtttcttgttcaacatcgtgacctgcgccaattacaccaccgagatctaccagtgggtcggcttcaacatcgccacacagaccgtggcaggttacgtcttccttgtcgtggcggcgggcatcatgaccaactgggcgctcggcaagcacagccgtctgaagaagctgtttgacggcaaggatgggaggcccaagtaccctcgccggtgggtgattctccctccgttcctgtgaagaggcggtggtggtggctcactgttggtggtcggcccattgtgattcgatgtctacagacagttgtactgtactaatcgtgcctgtttagcggttgaacttggattccgttgtccgaagtttctaatccgaaagatggatttcattttcttcttcttcttcttagcattatgtcactgtctcacgtcgtcctgtctcaatacagtctaaggttcatgtgatgttatccccatttgtccacgcagaagtgaagtgaatgcagtcactatttcgattcgacact

SEQ ID NO: 32200 - DNA, 1088 bp, Zea mays
  Clone ID: UC-ZMFLB73276C08_FLI
ttcgtctccctccctccatccaatccacacctgcgtccacgtccataccaagatcgtcgcggcctcgccgggcgacgccgagtcgccgtccgagaacaacagcaacggcaacgccgcctctaagaagcgcccgtcggggaaccgcgccgccgtcaggaagtaccgggagaagaagaaggcccacaccgcatcgctcgaggaggaggtggtgcacctccgggcgctcaaccagcagctcatgaaaaagctccagagccacgccgcgctcgaggcggaggcggccaggctccgctgcctgctcgtcgacatcaggggcaggatcgagggggagattggtgcgttcccgtatcagaggccgccggcggtcaagaacgtcgacctcctgtctagtgttgaccaggaaagcctccttggcagcgctgctgcccaggttgccaactcctgtgattttagatgcaaccatcagatgtactgcaaccctgggatgcagggcgctatcagcggtcaggtgttgggacaaggtgcctgtgatgtcgccagtatgcaatgcattggaagcaccaagtctggatccactaagctacctgtttgtgggggtctggatacactacctgctgtctgcttaccaaatgttgaaaagaagtgatggactcctggcggtgtttatggtctctcctttccagagacatgctgtataaactgctagcttttctatgtaggactgcatctggttcaaactgctatactgctatgttagtatgtcactgagtttgtcgcccatgatgcttctatggtgtctgaggcgattcaagtttgttagctctaaagctgacaggacatcctcgtttactttgcctagtttccagacggtctatgatcaagtgcagaactgaaccggatcgtaaggagttgaacatgaacttgttaaaatctggcatatgtagatgcatggatcgcgaaatccctcgtgtaggtgcagtgtccctcttctgctatgtgcgagatctgagggaacctggattcatttattgtttgaatgtttcactgtttctgtcgcaagtaaataatttattgcatgggaagtttat

SEQ ID NO: 32201 - DNA, 3699 bp, Zea mays
  Clone ID: UC-ZMFLB73276D02_FLI
aacccacggaagcaagacaaaagctcgtgctggacgacatctcccctgtcgatccacgaccatgatgcagcagctccgtcacagccagccgagcccgtgcctctgcggcctgcgggcggcacggcctatgctcgccctcggcgcagcagcatcccgttcgcggcccgccggaaaactgcaaccgagcgtctgcctcggcctcggccatgtagccccagccgcggcgagaggacagccccgtccccgtgccgttgccgactcggcgctgggagcatcgcctacgagcgtgcatgtcggaggcaagctgctgctgcagaacttcgccgccgacagccagcagcggctcaagctctccatccagcttgtcagcgccaccgtggccgatcccgacgggcgcggggtgaaggcggaggcgtcggtgctggacgccgtcgtgggcagcggggacagcgagctcgacgtggacctgatctgggacgaggcgctgggcgcgcccggcgcggtggtggtgaagaaccactccgacttccccgtgtacctgaggctgctgagcgtgccggccggcgtcggcggcgccgacgacgaggccgccgccgtccacttcgcctgcaacggatgggtgtaccccgtcgacaagcacccgtaccgcctcttcttcaccaacgacgtgcgtgcgtgcgcagctagctaaccactgcacgctgaccgacgaccctagcacaccacaaggctcgaaacttgcatcacgtccgtacgctgttcccttcctctgcaggcgtgtgtcaaggaagaaacgccgagcgccctgctcaagtaccgggaggacgagctcggcgcgctccggggagacggcgagacgacggagcgaccgttccagccgtgggaccgcgtgtacgactacgcgctgtacaacgacctggggaacccagacctgcgccaggacctggcgcgccccgtgctgggaggatcccaggagtacccgtaccctcggcgtaccaagaccggccgaccagccgccaaaacaggcccgtgcccgttcacgatctccgtttcccaaaaacgttccgttccagcgagccgccacagcaggggaggatctcgctcgctcgctcgctagctctctcacttgctgcctcgtcgtgcgtcatcagatcctcggtcggagagcagagcgccgctggacgaagagatctacgtcccctgcgacgagcgcgtcggcttcgccagcatccccgcgccgacgcttccgccgctgggcgggcacttcaggtccctcgccgatgtctaccgcctcttcggcctcgacgacctcggccggctcccggaggccaaggcggtcatcaacagcggcgcgccgttccccgtcgtgcctcaggtcatttcaggtgcgacagcaataatgcatggtgtgatgtgctcaagggaaaggaaaggaaaaaaaaaagaactgtatgtctctatctttctgtctgtctggtgcagtgaacccgacacattggcggaaggacgaagagttcgcgcggcagatgatcgccggggcgaacccggtgtgcatcaagcgcgtcaccaagttcccgctggcgagcgagcttgaccgcggggtgttcggcgaccaggacagcaagataaccaaggaccatgtcgagaagaacatgggcggcatgacggtgcagcaggtgtgccgtacgacgggcactttttttaagcttctagtccctaggcgatctttcaggcaaaatgacgcttgttgggaaatatgcagttctttctcttttttctgtctgaactcgactcgaccatggatcgatgcacgcaggccgtagaggaggggaggctgtacgtcgtggaccaccacgactgggtgatgccatacctgaagcgcatcaacgagctccctgcgagcgaggagaaggcggaggtgtcgcagaggaaggtgtacgccgccagaacgctcctgttcctggacggcgaggactcgtcgatgctcagaccgctggcgatcgagctcagctcgccgcacccggagaaggagcagctcggcgcggtcagcacggtgtacactccaccggacagcggggacgacggcatcacggccgggaggttctcaacctgggaactggcaaaggtttacgcctctgccaacgacgcagccgagaacaacttcgtcactcactggtatgtacgtacactcgttcgtacgtagagacaagacgaggtcaatgtgtgtctctgtgtgtgtaggctcaacacgcacgcatccatggagccgatcgtgatcgcggcgaaccggcagctgagcgtgctgcacccaatccacaggctcctcaagccgcacttccggaagacgctccacatcaacgccgtcgcacgccagatcatcgtcggctcgggtgaccagaggaaggacggcagcgtcttccgtggcatagacgaggtcacgtacttccccagcaagtacaacatggagatgtcctccaaggcgtacaaagcctggaacttcacggaccttgctcttcccaacgatctcatcaagaggtaataccagtactagatacgaaacgaaatgacatgtattcgttcacataccatagcaacagcatgctatacatgacgaacagaggtctggcaaaaggagatccaaagaagccagagacggtggagctggcgataaaggactacccgtacgcggtggacgggctcgacatgtgggcggcgatcaagaagtgggtggctgactacttcgccatctactacgccgacgacggcgcggtggcgagggacagcgagctgcaggggtggtggagcgaggtcaggaacgtggggcacggcgacctggcggacgcgccgtggtggccggcgatggactgcgtcgccgacctcgtggagacctgcgccaccgtcgtctggctgagctcggcgtaccacgcgtccatcagcttcgggcagtacgactacctgggcttcgtcccgaacgggccctccatcaccacgcggccggtgccgggcccggacgccggggcggaggtcacggagtcggacttcctggcgagcgtcacgccggtcaccgaggcgctcggcttcatgtccatcgcctcggggccgatggggctcaagggcacggaggtgtacctggggcagcgcccggacacggagcagtggacgcgcgagcggagggcggccgaggcgctggcggagttccgggcgaggttggaggaggtcgcgggcaacatcgacaggcggaacgcggaccctgcgctgaagaaccggacggggcaggtggaggtgccctatacgctgctcaagccgacggcacagcccggactggtgctccgtggcatacccaacagcatcaccgtttgagcagcagagcgccgtcggcagctgtcagctgtgtacagtacagaataataaggtggtcgtgtttggcgctatctccaccacataaacgtgaaaatgtttttttttgaattatatggacatgcagggccgcagcccgtaagcctggccccagtttcggttttctgtttttttttttttttgcctcgatctggtgatcagcaagccacgtcggtccgggtgatctcgctaccggagatagaatgtgtacacgaaacctaataggtttttactccattaggatacgaggttgagtcaattttcatacctatagatttgttaatgagcataaatttatacccg

SEQ ID NO: 32202 - DNA, 1758 bp, Zea mays
  Clone ID: UC-ZMFLB73276D08_FLI
cccagtctcttcatctgcagcgacaaaaataggaaccgagcaaaggtctggcgagctaccaataaactaccatctccacaaacaggccagcacgtagctatatgccagaactgacctagctagtagaggatcgatcgcagatggtgtttcctgccatcctccccaaggtggccgcacgatggctcttcacgttctaccgcgccgccagaaagctcaggcgccacgccttccagctctactaccgcaacactaccgccggcgtccgggtgatggcgttcgtcaccttcgcggggctcaggcccagggacgtggacctcgtggcccgcgccgtcctgcccaagcactacatggagcagctcaacgcgctggtgtacggcagcctctggctcccggccaggaggaaggtggcggtgaccagcgcgccgcgggtcatgtccgagtggttcctcaaggagtacatggccgccgacgcggtggtcggtctcgagctgcagcacgtcaacgtcggccgccgccggtacttcactgggttgctgtcgtcgtccggtcacgcgacgggaccggagctgaggcagaaggcgatcagggaggcgttgttaggcgccgaggacgaccccattgccgtcgtgggcatcatcaacgactccagcccgctcgacgacgagctcttcgtcccctactgcaaggaagtttacgtcgtgagcagagagagcgcaaagaacgacaagctctcgcgggagaaatacccgaagccgctcatcttccatgacgggcgcctcgccttcctccccacacccgccgccatgctcgccttcttcctcttccttccgctcggcgtcgtcctctccgtcatccgcattaacatcggtatcgttctcccttacaagatcaacttcgcgactgccgcgatcttcggcgtccgcttccgcgcctccggcctccgcgccccgccggcagacggcaagcggcggagcggcgtcctctacgtgtgcacgcaccggacgcttgtcgaccccatcatgctcaccacggcgctgcagaagcccgtgccggccttgacgtacagcctcagccgcctgtccgagctgatcgcgcccatcaagacggtgcggctgacgcgcgaccgcgcgcgggacgccgagaccatgtccaggctgctggcgcagggcgacctcgcggtctgccccgagggaaccacctgccgcgagccttacctcctgcgcttcagcccgctgttcgcggagctcgcggacgacatggagcccgtggcgctggacgctcaggtgacgacgctctacggcaccacggcgagcggacacaagtggctcgaccctgtggcgttcttcgccaacccggtgccctcgtaccgggtggagtttctgggtgccgttccgcgggagtggacgcgcgccgggggcaggacaggcgtcgaggtggctaactgggtgcagcggcggctgggccaggctctggacttcgagtgcaccgggctgtctcgccgcgacaagtacatgatgctcgccggtaacgatggcgtggtcgccaagtagagagagcgcccggcgcgcgctgcaacagctgggtgtgtttttattatgcatacatgctgggtaaattattgtcgaaagctagttcgttactgtaatttgcatggcagtaatggatcttttggttccgctgtgtagagaaaatttgattagctgcaaaactaatcaaatactagatgcttggatttaaattcaaatcaaaatagtatat

SEQ ID NO: 32203 - DNA, 1024 bp, Zea mays
  Clone ID: UC-ZMFLB73276D09_FLI
cgacgccgacaagcgcagctgcagaaagcgtctggacgggcacaatcgccgccgcaggaagccacagccagacaccatggcttctgctagctttatcgcaagccagcaaggcacgcgattctcaccatttgcgcatccaagactggaggcgagctggccgccgggggtgatgaaaaccgaggagagtccatatcacatcactcaccaaatccctctgggctccagcagcagcagcaggcagcagcatttcgtggctctgggagccgccacgcctgcctacgccaaggaaggccggcgcttccctttcctgcaggagggcgagataagcttcgccaccggcgtggtgctggagccgccggcggcggctccagcgtgccagccgctcctcaggacgggagcaccatccgagagcagcggcgccggcggcagtaagatgttctccgatcaggggctggctcgcgtgctcgactcggactgtgctctctctcttctgtcagcgccggccaactcctccggcatcgacgtcagcaggatggtccgcccgactgaacacgtccccatggcccagcagcccgtggtcccgggcctgcagttcggcagcgcgtcgtggttcccgcgcccccaggcttccacgggcggctccttcgtcccctcctgccccgccgcggtggagggcgagcagcagctgaacgccgtgctgggccccaacgacagcgaggtgagcatgaactacggcgggatgttccacgtcggcggcggcagcggcggcggcgagggctcctcggacggcggcacctcgtcgtcgatgcccttctcgtggcagtagtcgtcgtcacttgtcagcagccgctgcgttctctcatctttcgcgcttcagacgatctggtagggagatactggctttagtgatcactgatcagcattgatttctgttctttttcctgcattcgctttgttgaatcggctctgctcgccagcattcgtgtggacattttttgaacataattctgtgttcgtttccctc

SEQ ID NO: 32204 - DNA, 863 bp, Zea mays
  Clone ID: UC-ZMFLB73276D12_FLI
gtcataccgaggtccttgatgcccagagaggtaactggcgaacctgttggagaagtgagggcggtctctggcatgcacgagaggaaggcggagatggcccgttttgctgacgccttcatagcgctacctggcggctacggaactctggaagaggtgcttgaggtcatcacctgggcgcaactaggaatccataggaagccggttgggcttgtgaacgtggatgggttctacgacccgttgctgtccttcatcgacatggccgtgaacgaagggttcatcaaggaggacgctcggcgcatcgtcgtctcagctcccacggcgaaggagcttgttctcaagcttgaggagtatgttccggaatacgaggtcggtttggtgtgggaggatcagatgccggcggcggagctggagagcccgggatcgcctcctcctcgtctctggacgtcggctgcccttctctgaccagttgctgaccgacagcggccggatctcaaagtagtaggcatctatgctgatatatatatactaatctaattaaccaacaagaacgggacgtcgtcgtctacctctagctctagactcagcctgttgatttgttcttttgggatgggtgacagtgtttaccttagcatcgttagccgcagtgcagtgcgtctctctgtcatcgctgatcttttgggcttttgctcctataggagcaggaaggaaggcatggtatgtatgtatattccgggtacgtggcgacggacctgatcggctgttcttgttcgctcgcagcctcgcactcgcactgtgtgatggaatgggatgatgatgtactgtgtccggaacaaacaaacaaaaaaagactaattatgcaatgt

SEQ ID NO: 32205 - DNA, 471 bp, Zea mays
  Clone ID: UC-ZMFLB73276E05_FLI
gattttacccatggagaaatattggctgggtgactgccatgaaggcatgaaccttaaaaaaagtttgttttttcaattctaaatatcttgtgacttatttatattgagcatgtgtttacaaataatgttctcatcagctcatgtggtattttaagctcgcctctacatggacgccggcctcgcttccgcagtcaccatgctccggacctgcaccgatgtcgtgcacctcgcgcacgttctcgagcagtttcgccttgcctggtgcggcaagctcgttcgggacacccgcgccgtcgctccgtcaagggcctctgcttcgacctcttcatcattaggggtggaaacagagctttcaatgtatgctggaggtgagcgatgtgatcgatattatccatgcttgataaattatgacaatggtgatggccatgatatatggtcaatattgtattaatcttttttcgagttttaggc

SEQ ID NO: 32206 - DNA, 1124 bp, Zea mays
  Clone ID: UC-ZMFLB73276E10_FLI
gcagtcgcgtgcggaactagagctccttcagagaagtgccgtgccagtgccaccgccggccgcatcatcgttccgcccccctgagtgttcagtaacttcttccgatccatattatggcttcaaagcagcagcagaaacagttcctggatgaagccatgatcaagcagccgacaccggaggaggaccgtgagggcgcatggccctcagtgctgacgatcatcggctttggattcctaaccttcaactcattcatggctgtgtacaggtcaaatggagatgttggatctatctcctttgtggtcttctcttacctggtcctcgttctgctgttctactgcctgcgccgattcgagacaactccaccagagtcgcctagccgggagcacataaaaatggccgtgtgggtactcaccacgatgctcactgctgcgttctcatacaaggtggcagcaattatgccactcccggtgcaggtgctggtgtgggcaatggcaggagcaactgtgttcggtggtttttatgctttcttcatccaccaggaaaaaaccgcccagctggaacccccaaaaccataacgagggtgcccgtcctgctagccggtgtgcttgctgtgcgatcgtttggcatgtgcttgttgaggggttgctaggggattggagaggattgaagggattaaatctcctcctattcaattttgaataggaggggatttaatccccttcaatccccctcaaaccactagtaaccgaacgtggcctgagggggcgggcgagtctttatattgaatgaaactacataaaatagcatgccgtctctgtcactggcaatggacggtggtgcctagcgcaactcagcgcacaactgtgtgtcttgatttttcttctgtttatcacggcattagtgccatgccgttttatgttacagtgttgtgtgctcgcaagcatccgaaaatatgcgtctgagtttagggttgggtcaaacttgtcgaatttggggttctgttataatatgttgagcatgaataaagatggatgctggtgactctgtcgccatcgccgtccatcatgagtgtcctgtaattcaacttatatctatcatgtatgtatgtatgtatgtatgtatgt

SEQ ID NO: 32207 - DNA, 4068 bp, Zea mays
  Clone ID: UC-ZMFLB73276F12_FLI
ccccccgtctgtccctgagaggcccgcggcgtctccgcttcgcctcaccacccaccacctcctcctcgccggtacccctcgccggagccagcgagcttccggcgaagaaatccggcgggcacaccacacgggggcggagcaggggggaaggggtccggcgccggaatgggggcaagcggccgggtgctcaacgccgtcgtcgctggtgtcgcgtcgctctagggttaggtaggtgtccgtagctttctccttcgctccccctccctcccctttgccgcccggcgtcgcattggggtcccgtgccgaccgccaggccgcgtgatccacccgtgctcgagctcggagaggctcccggttgcgtggcatggggccatctcttccgcctgctgccgctgactgggaattcggcaccatttcttcgctctgaggagtagtaggtggcagcagtcgccgatctggatgccatctcaagtcatggatccgaggcgccacctctcccagttcagcaatccaaccgtggctgcgtcctccttctctgaggagcagtttcgccttcccacagagaggcaggtcggattttggaagcaggagtcgctgcatcacattggaagcaagtcagttgcatcttctccaattgaaaagccccaacccattgggacaaaaactgtgggtcgggtagaaccacaaccatacaagctgagagaccagaagactgcatttagccttgagcacaagacttttggtcaagagagacatgttaacctaccaccatctctgtggagagctgatcaagaccctaacctccaatctgatccatctttatttcccgatggaaggaggactagtccaaatgaggcctacaacgagaatgggcttttctcaagctccctatcagaaatttttgacagaaaattgggactgagatccatggatgtgcgtctacgccagccagttcaaaaggttgatctaactcatgtagatgatgagccctttgagttaacagaggaaatcgaggcgcaaataataggaaacatacttcctgatgatgatgacctactatcagatgttcttgatgttgggtacacagcccatgctaacatggatgatgatgtcgatgatgatatattctacactggaggcgggatggaactggaaaccgatgaaaataaaaaaaatacagaacttaatggagctaatgatggtcttgggttgctaaatggcacaatgaatggtgaacatccatatggggaacacccttcaagaactctttttgtccgaaacattaatagcagcgttgaggattctgaattaaaactcctatttgaaaattatggagaaatcagcaacctttacactgcctgcaaacatcgtggttttgtgatgatatcttactatgacataagatcagcatggaatgccatgagggcacttcaaaacaagccactcagacgtagaaaacttgacatacattactccattccgaaggacaatccttcggagaaggatattaaccaggggatgcttgttgtatttaatgttgacccctctataacaaacaatgatatccatcagatatttagcgaatatggtgacataaaagagattcgcgatgcaccgcaaaagggccatcacaaaattatagaattttatgatgtcagagcagccgaaggtgcagctcgtgctttaaacaggagtgatcttgctggcaagaaaataaaactggagactggccgtctgagtggtgctagacgttcaacacagcacatgtccaaggagttggggcaggaagaatttggtgtatgcaaactgggcagtccaagcacaaatagcccttcattgccttcattgggttcatctaatatagcagcaatgacatcttgtggacgtgaaaatgggagtatgcatggtttgcattctggacttctcacatcaatgagcccgttcagagaggcttcatttctgggtctatcatctaccctaccacagagcctgtcctctcccattggaattgcttctgctgcaactcatagtaaccaggctccccttggtgagctcagccactctcttagtcggatgaatgggcatgtgaattatggttttcaaggcttgggtgctattcatccccattctcttcctgatgttcacaatggagcaaataatggcaccccttacaatctgaacaccatcacacctgttggtgtcaataagaactcaagaacagctgtagcagttgacagcagacatcttcataaagtgggttctggcaatctcaatgggcactcatttgatcgtgccggtgaaggagccatgggattttcaagaagtggaagcggtcataactgtggtcaccagttaatgtggaataattcaaataacttccacggtcatcccaattctcctgtgctgtggcaaaatcccggatcatttgtaaataatgtaccgtctcgccccccagcacaaatgcatggagttccaagagcaccatcacacatgattgagaatgttcttccaatgcatcatcatcatgtgggctctgcgccagcaatcaatccgtcactttgggacaggcggcatggctatgcaggggacttgacagaagcatcaagttttcatcctggcagtgttgggagcatgggatttcctggtagccctcagcttcatggtctggagctaaatagcatattttctcacactggtgggagtcgcatggatccaactgtgtcttcagctcagatcagcgcaccatctcaacagagaggtcctatgttccatggaaggaatcctatggtcccccttccttcatttgattcacctggtgagcggatgagaagccggagaaatgattcaggtgttaaccagtctgataataagcggcagtatgagcttgatgttgaccgcataatgcggggggaagactcacgaactacactgatgataaagaatatcccaaataagtatacctccaagatgctcttggctgctattgatgaaagtcataagggcacttatgattttatttacttgccaattgattttaagaataaatgtaatgtcggctatgctttcatcaacatgaccaatcctcagcatatcattccgttttatcagagttttaatggtaaaaagtgggagaagtttaacagtgagaaggtggcatcacttgcttatgccagaatccaagggaaaacagccctgattgctcatttccagaactctagtttgatgaatgaggacaaacgctgccgccccatacttttccactcagatggtcctaatgcaggagatcaggaacctttccccatgggttcaaacatccgagccaggtctgggagatcccggacttcttcgggtgaagaaaatcaccatgacatccagacagtcttgaccaacggtgacacttcttccaatggagctgacaattcaggtcccaccaaggatactgagtagctgaactgcagcttgctgcatcgctaaccacaaaggcccaagttattactttttgcagacctattttcagttctagcccctcccttcccatttcgattttgtttgttaagtcctcccgatctgtatttattaacttgcatgatgcgggtcaccgaagacttaggctgctgcagaagttttgtctctggcgggaagctatatgcaagagggtggtaccggttcgttccccagaatctatgtgcttgttaacctgaaggccgagaaaggcgaaaaggcgcagggagagcctccagattttggtcgctgtaagaattaaccccatgttgtacagctggtcccagtaatttgtgctgaggggagagtgaaggagtcatttgatcagtttttagtggtggtgtgtggagaggaagagtcttgcctgcttttcctttttgaactttcttttgtgccttcacctgtgttacattttgagtcgagggctcctcttaaattgtgtgcagaggggctcgattttgttaccccagaacaaggcgcatgtgcgtcggcgtcgtcttctgccaccgtatctatcgaccttatgtacatcttcatctatatatagtatgagttttgatgtcatct

SEQ ID NO: 32208 - DNA, 2037 bp, Zea mays
  Clone ID: UC-ZMFLB73276G01_FLI
ccagcactcggctttgctagatcttgacaatgacactgcatcctttggtgtttttgatggacatggaggaaaagtagttgccaaattctgtgcaaaatatctacacatagaagttctccataccgaagcctatgctgctggtgacctgggtgctgctgtccacagagcttacttaagaatggatgaaatgatgcggggtcaaagaggatggcaggaactccaagcacttggagataagataaatcagttcactggcataacagaaggcttgatttggtcccctaaagcaagtgattcaaatgatagacatgatgattgggctttcgaggaggtacttgtggaactggcatggttccataattctatactcatcttcctatgtctaggagagcatgccatctgccttttatttattaatttggcagtcattggatttcattctgaaagtgtcacaggattatcattaataaggtttctttcttctcatttattttttcgctaaaatcattcaatgcagaaacttgtaacagtagacttatggttcttgagtacacgtgcaagtgcaacgctgatgttttaagacctaaaagggtatgcctacaaaggaaatttgttcttttaacatttaaaattgatacctatgttgcctagggatgctacctcttgaaaaggatatctatgcataagaaggaagtttattcttgtaacacctaaaattgatggatgtgttgcctaacaatgctaactcttgaagaatgacctccaatttcctgaactggagcctcttcttgttttgctggaaggcaaatcttggcatttctctttgttgccagttcttttgttggaaatgaacattccatccacctaggtagtcttatagaaatttcttttatcagggaccacactctgactttactgggccaaattgtgggagtacagcatgtgtagcattagtgagaaataggcaactcgttgtggcaaatgctggtgactcccgctgcgtcatctcaaggaatggccaggtcagttgttactcctaaaagaaaacaggagggattaccctctagtggcatataaagtttgtgggattgtctcattttgtacttcttccacataaaacaggcatacaatttgtcaagagaccataaaccagagcttgaggcagagagagaaaggatacaaagtgctgggggttacattaaaatggggcatgtaaatggaagtttaaacttgtcaagagctattggtatcatttttttacttgcttctttttgttcatacctctcaccttaactgatgtcttgcatatgcaaaatacctttctaggagacatggagcttaaacaaaacaagttcttgtcccctgataagcaaattttgaccgcaaaccctgacataaacattgtgcgtaaattctgcagttgcctctcgctcttgctatgtagactattaagttagcacttccttcttgttgatagttattgtaacgttattcttttgtacaggtcgagctatgtgacgacgacgaattcattgttttagcatgtgatggcatttgggactgcatgtcaagccagcagttggttgatttcatccgtgaacatataaacacatgcaggaggaaagcctttctgcagtatgtgaaggagtgcttgatagatgcctggctccatcgaccatgggtggcgagggatgcgataacatgacgatgatcttggtgcagttcaagaagccatttgctcaggtaaaggatgccagtgatgcggaacaactaactggagatgcgggatgctctgagacccatggggccgaggagaatgactctgacaagcagatatagcgaagacaggactcttttggagtcttggtacatggcctgacgctgaacctgggtaaaacaggagtacgatgttgcaatgtacataccaaccatgcgctgagttggcgtgaaggatatattcattgttccactgttgtctttaaccaaacgtgctgttttcttccggttgtgatttttggtgacctgatcatctgacaa

SEQ ID NO: 32209 - DNA, 1759 bp, Zea mays
  Clone ID: UC-ZMFLB73318A12_FLI
gggcagcacagcttgaggagaatgatggaggatcacaagttaatgttgctggtgatgacgagacacctatgaggattgtcaagaactacaagaggcctgaggagaggattcctgccgagagagacccaactaagtttgttgtctcaccgataactggagagctcattcccatcagcgagatggaggaacacatgcgcatctcactcattgatcccaagtacaaggagcagaaagagaggatgttggctaagatcaaggaaactacccttgcacctgatgatgaaatttcacggaacattgttggtcttgctcgcactcgccctgatatttttgggactactgaggaggaggtgtctaacgccgtcaaggcagaaattgagaagaaaaaagatgagcagccaaagcaggttatttgggatggtcattctggtagcattggtcgcactgctactcatgcattatctcagattcagggtggtgaggaacagtttgatgcttccaatgttgatgggagacctgttcctggtccagctccacttgtccgacctggcatgccgctgccccgacctcctcagccacttcctcttgttaatgttcctcgttttattgctccaccagcaccatactctgttccacccccaggttctcatatgcctggagttccacagatgatgcctcacatgcatctgcacccacagcagatacctgggcaaccgccgatggttaggatgccaggtcaaatggttcatatgccaaccagcattcctccgcctcctggccaaactcagtttatgcctggtccaccaccacacacatttgctatgcccccatcatcgcacatgccacacatgatcaatcccattggaatccctcagcctccagcacccccactgcctccgcaacctcctgctgaagagcaaccgcctccacccgatgaacccgaacctaagaggcagagaacagacgatggttctcttatcccagctgagcagttccttgctcagcatcagggtcctgctagcatctctgtatctgtacccaacctcgatgaagggaacttgcgaggccaagttttgcagattcctgttcaatcactgtcagacacagttggtagtctgaaggagcagattgctggagagttacagctccctgctaataagcagaagctgagtgtgaggactagtttcctcaaagacaaccttactcttgcttactacaatgtgggtcctggagtggtgatcaatctaacactaagggagcgtggtgggagaaagaaatgagtcttttggttctcagtgtaatggcagttaaatgctgtgaggggttctgcctaatatgttactcgaggttgctactggatgcctactcggtcaagtgctaaattgaatggctgctctagcttcttctactagattcttctgtacaacttcgatggtggtacaatttgttcagtggttattttgaaagaatggcttggcatccatcgcgtcgctgctgctgaaatatctaaagtagaattttttttatttgtttgtataagctgaaatatctgaagtaggactaggaattatttttgtttgttatgtacattctctggtcgtttccctgtgctattgcctattgaactgagctaccctgcaaagattgttgtacgctaaccaggttttttgtactgtatgttctcacaagtcactgtcgtacctgtttttttgggtatagtgtgtgtgttgcatacaactttccagtatacgatattatt

SEQ ID NO: 32210 - DNA, 1430 bp, Zea mays
  Clone ID: UC-ZMFLB73318C11_FLI
gtggcctgaggccaacctcaaatgcatttaacaaagttatagatggctgggtgaaggttgatatgctcaacgaggcccatgggttctttgatatgatgcctgaaaaggacatagatgatgttacagtggtcattttctactttggaggacaacatgtgggctgggaaatgaagacagaatggttgtctaatggttggctatgtttggtatgtggtgcatctgatactcaagagcttcctctacatttcattaaacttgcaaaggatacgtacacatctgactgcatgttcaaaaaaatcggatatggcactgtgagtgaggctttggtttacatgctgtccttactatttgttcgaagagattattgcaacgaggaaccattttttaggaatgtgcttgagcattatcaatgtggcgttgagatgatacggagggatttatttattggccattggaaacattatcttcaaagtgctataccacttcaaccctgctttgatggtctcataaatgttggcaaggtagccgcacgtaccctccaagatactgttgtagggaattcttgcattgtgtctagacagcctccatggccacccccaacgcgtcaccatttcagaactatgcatgctgaaactgtggcaaattggaaccacttattcagttggtgttttgcaaattcagatttgggtgaattactgactctcaactgccctgctgacagagcaatggtgctgctgatgtaccaaattgagttgagactgctcaattgggcctgggaagacgagtgtgttttcaacctgtgtctacttggattacacagtgctgttcatagcagcctagccaatgcttataaatcctggttgataacaatgattcaccgaacacactcaattggccaagatcatttttggcataacgtggataggtgtgtggtgtgtggaattaaggatagatgctgtgcaagattggcaaagctagttttatctgctacactgacacaagattctggcaagctttctcaacttgaattgcaccatccattgttgttgaatactcagtcaagcggcttgaggacaagccgcatttcaagcagtggggaatgtcagcatatcatcttctcctcaagtcaaagatggtaccagaagaatacggacaatgctgctacgacgacgatgactatacatggagtatatgaagatggaggcatcgcgggaaaaggcacaggcgtgccaggagagcgggctcggtgtctaatgaaaactagcgtccgtctagcttgggctggagtgggccttgtaaatgttggcaggtcgattggtcgtgtggaccgagtggtcgtgtggttacaagtaacacccaaaccctggctgtaaggggtcatgaaccattttggctatcagatatcaaatcagatcgtcttcctcgctgtt

SEQ ID NO: 32211 - DNA, 1372 bp, Zea mays
  Clone ID: UC-ZMFLB73318E03_FLI
caggcgtctggttgggtcccacaagggcagctgccatctgtatgatacatctgatgacatgctttgctacaaaacacagatcgacctacaaaacaagagaaggaaatctagccagaagaaaataacaggatttcagtttgtcccaggggattcttcaatggtcataatcacatctgcagattcacggatcagagttcttgatggttttgagctagcgcataggtttaaaggtaaaattttattatcaactatttttcacgtacattcacaatttgcactagttcagaacttcagaacatggtgcaatcattgttgactgtgaatactgaagatcaattgtatctgccttgttcttcctcttaagagcagtgctggaacatgtcagattgctcttgtctgctatcatttgttctactgtttacttaacatgttaaaatagcttgtccttgttgatagatctaatggccacattgtttgtttttcttttgatatcactctctgcctgttattaagaaaaggaactattgctcaatttccgtcttctattctgccggttggtctcagttaacatagttcttatggcttgccatatttcaggattccgaaacacaagcagccaaatctcagcttgtttagctggaaatgggcggtatattatctcggcaagtgaggattcccatgtatatatctggagaaacaatgatggtccgaaaccaagtagaaagaagggcattgtttctgtcacagatagccatgaatacttccactgccagagtgtgacagttgctgttacctggccttttgccagcaccgcaatgacttgtttaatgaaccccgggaagcaagaagagcttgagcgtgggtctgagccgcaagatctgcaaaccaaacttgccaaggcacaggagatgccagatgttgagtaccggagcacaaatatcacgagtaacaactcgaatcataataatggtgaccggacatctccgacttggcctgaaaaacttaacacaccaccaaatcaaagtctcagggctactacctgccatgccaacgagggagatcaagctctgaatcggtcggcctggggcctagtgattgtcacagcaggccgtggaggtcaaatcagaacatttcaaaactttggttttcctgtaagagtatagcatgaatatgaatacgtaagataatagtcactgccattcaggagtgtagtttgtgtatagataggagatagtgggtgagtttcacactattcagggattgggtctgattgttccttggcgtgcatgctagagatcagaatcttcatctgacatacactgtgtactgcgaaacttggtatttatttaccctgaggcctaaattgtacacg

SEQ ID NO: 32212 - DNA, 948 bp, Zea mays
  Clone ID: UC-ZMFLB73318E08_FLI
gtgctgatccaacaggtcatgcccaaaacatccacttcccctttgatattgaagcggacacttcaatcagtgttgcaactgagatggttgtgcagctcgatctcacagatcaagatgtaacggcaattgcagaaatgatagatgctgaaatacgttcgcatattcctgattgggcagcagaggagtcaattgacaaccaaggggatgaagctgctcactctgagacccatagttcagaaggtgatgagggaacttctgaactgcgtgatgagatcggtgcctcacataacggttttgttcaagaacagcttccctctggacggaagtactggtcagactcacccaggagagacggtgaaatatctcaatcggtggtggaacatcaaattggtgatagtagtgccaatggaataccaaagaggaacaaagtagatggcattgtgatctgtgcacgagatgaggaggatcaatccttcggctcttccatccatcccgctgaagccatgtttgaacgaatatcatcatctgtggacttgtcgaacccatctgcggtcgacagcatgtctagggatgcttctgttggtggcagccctcactctttagacggtgaggaggagcacaattctgatcagcatctggcagcaggtgtcactgagaggttaatagacctgttggctcagcagcaagaggagcttcgtgcgctgcaaaggaagcacaaggcggacatagaggagatgctgaaaatcgtacctgcggaggatcgggaagagaccttaactctatgccacttgaaggcggaacagaaaaacagagccgccgaaccttagataaactgtctcatgtgcatgttcctctgtgtgctgttagatttatacatactcacaccaaggagttgttgtttacactttacagccgttgttgtgcaaaagttggacctctgttgtgcag

SEQ ID NO: 32213 - DNA, 2247 bp, Zea mays
  Clone ID: UC-ZMFLB73318F10_FLI
ccgctgcctcagccgctgctcggcggcgcctcgcccgctccggcgcgagcggcctcatccttcctccacccccttctccacacgcgccaccgcgtctccactgcacctgccgctgcctcctccttcgtgcctgcatctcactcctcccacgcgaacgacgccatgctcctccgccgtgccgccgacgtggccgaccgttctgcgggactcacctccccgcacccgaacttcgggtgcgtcatcgcacggccccagcttaataccgacagcgctgattcctgggtggtcggcgaagggttcctctatgcgcaggggacgccctgcgccgagctcctcgcctcacaggaggccggtgagcacgcgcgcggcggcacggcatacctcaatctcgagcctggggactgctttggtgacaacacagccgtcggatccctcgtccaggcaggaattacaagagttgtggtgggtcttagacatcccttgaagcacttgagagggaaggcaattcaagcattacgaaatgaaggcattcaagttgatgttgtgggggaggatctgcagagtaaattgttcaaggaagctctgaagtcatgcctcactgtaaatgctccattgctttacagagctgcctttcatgtccctttttcggtcctgaagtatgctatgacagcagatggaaaaatagcagcaagtagtggacatgcttcttggataagtggcaaagcatcaagagggcgtgtatttgaattgcgtggcagaagtgacgctgttattgttggtggaaatacagtgcgttttgacgatcctcgattaactgcaaggcatgttaaaggacatgttccagtgcgtatagtgatgtcacagtctcttaaccttccagaggaagcaaatttatggaatcttaacgatgcctatacgattgttgcgactcagagaggtgctcggcgagattttcaaaggaagcttgctatgaagggtgttgaagtagtagagtttgacatgctgaatccaagagctgttatgtcatattgttatgatcgtggttatcttgctgtattatgggaatgtggtggaacactagctgcttctgctatatctgcgagtgttatccataaggtctatgcattctgggctccgaaaataattgggggattaaatgcacctacgccagttggtgaactggggatgagtcaaatgactcaggcaataaatttaattgatgtctcgtacgagcagattgacagggacatgctcatgagtggattcatcgaacccattcctgatctttcacctgttataccatccgtggaagaaataccttccattgatccagaagtatctccatatgaaacaaatattatttccttttacaagacttgggatatttttggggctttctcaaacttttctcctcattcaattcaaatgcctgatgaaaatggagattatttcacatggccaacagtggaacactattaccaggctcataagtttgttggtgttgacaatcctcaagcaagagacattgttcaagaaataaagctagcaaagagtcctgaagaggctgctagaataggaaggacccgacaaaaagggttccctgaactggtaagaacagattgggagagtacaaaaatagatgtgatgtatagagctatcaaatgcaagttttcaacttatccccatctgactaatatgttgctgtcaactgctggctctgttctcgttgaggcatcgcctcacgatttattttggggcggtgggagggagggagaaggcctgaattacttgggtaggttgttgatgcagttgagatcagagattctggggacagtcccagcaagcgctgaagtaggggaggcagattgatcctgaagcgagcaaatcttgtttagcaggagtgttgattgcaagaccagacgttaaggtgtggctgggtcccgattgctacagtggatggtgctagtgaaacgaagcgcaaatgagattggttaaattatctgtatgcctgtgaagaacaaacataccatgggtcttgctcttttgtcgaacaatttcatctggccctcggggtataggaattatgaaatacaaaggaggaacaccaacagtcatgcatagaatgtggtagtcctggtagatgaatgtgtttgataaggtgataaggactaatacattggaccagaagtagaagacgtgcttgttcagtaatggttgtttagtaaaaaggagggcgaattatttaat

SEQ ID NO: 32214 - DNA, 3745 bp, Zea mays
  Clone ID: UC-ZMFLB73318G12_FLI
ttagcaaaactatgaattaagctgattggacggaaatctttgggagtcattgcctcatctttcttttgggattaacgtgagataagtaggattcagtaaccaaagcttcgtagtattcttttgttgtaacatgatgatggcttccatgaagtccgatttaattgttggccaacatgccttgtagaaacgcctagtgaatccatctggacccagcgccccatcagcaggcaattcttttattgttgcccaaagctcttctgtcatgtccctagtcagctccaaaagattaactctttacctatgaaagatttccaggttcagagaggacgaccgttcggaaggactcccaagcagattattaaaataagagaacatgatatcttgtttctcatcatgcgttgttatccccctgccttcatgaaccaatttagctacaaagttttccctcttcctaaaaccagctgcctatgaaaggaggtattagcatctccatcttttaaatacctaatgcgtgagcgaagcctaacaatggttctctcaagagatgccagtactaagcagctctttttggcttctcttctcagcccttcacccacagaaatctgtctactgtcttgggctatttccaatttgtggagaatctttcttgcaatcccaagctgtgatttgacatggccaacttgtttctgccccttagattgaagaacacgggctaatctctttagcttgatcgaaattcgctccatgggacaaactgccactaccgattcattccacaaattcgccactgtttcgaggaagttaggcaaatccatccaaagttcaatcactgtttttctagaacattttttcagcaataaagattctctgtgtatgtctaaataaaactatagttgattggttacttatgagtcaggaaatatttggcacatttcagctgtaagttctttaaaaagcacacttctagaattcaatatcttcaatatcacaatggttgtgatatcacaatggctgtgtatgtagacagtttgatagcagaacttgtttaatgttacacttatatttcaaataactgtagtttgtgttgaagtgtataagtccattgtccaattcttcttgaaagcttaagtttttaagttgaactggttggtgtgtgcaacttaacatgatatcaaagtcataggtctcgagttcaaatcctgttagaagcaatttaagtccttgaccccttttatttctacgtttgcgcctctctctggatgcatgtgagtcacatttgtgtctctctggctgcacgtgagtgggtgtgttgaagtgtgtaagtgcattgcccatctcttcatgaaagcttaaactatttgattgaactggttagtgtgtggaacatgacagtttggaggctcagaatttccaaaacatctacgtttgtcttcattggcataatacatttctgttttaattcatggatggtctgctcataggtaccatttgtgtgcaaaatttcaaaaaactacatttgtgttcatacaataatcttctggaggaagtaatagtaatacccatgctgctctcaagattatagaagctgaataatggagatatgataatcttatttcttttttcgtcttagcatagctaagcaagcttcccagagtaaaggagtcggaacatgtatccttgaggttgtgggaaggcccaaggcctgtttgttttcctatggctttgtgaggggcggtttggcagttggtggcacttggcagtctggcgttttgtcagtctggcacttggcagtctggtgttttgtaaactgtcttgagtaggtggcacttggcagtctggcgttttgtagtgtagaccagtaggtagagttccgtaatattctctattaaaattttgaaagtttcaaataatttttgttagctttttaatactctaattaactttacttgtttgttattccattatcctgtttcagaaagaagtggtaagagtgtggttgaattgccacccgaactgtgcatagttgtcatgtcaccaatgtccgcaattactttgcgcagcttcacatttattccttctataatgtatcggatccagtgtatgctcctttctatgaatttgaaaatgcaattgggtccaagcatgcagcagtttgatattccagcactaaagattctggaagcacttacaacaaagaattgccaagaggaattttcgcaggaatcattagagacacttggggactcttttctcaagtatattacaacccaacacttttttgtcaaatacaaacatcagcatgaaggcatgctaaccaagatgaagaaaaacgtgatctcgaatgcagctttatgtcagctggcttgcagtaacaatcttgtgggatacattcgaagcgaagctttcaatcctaaaacatggatcgttccaggggttggctatgacatatgtgataggagtctgaggaagctgaaaagtaagagaattgcggattcagttgaggccttaatcggggcgtatctcagtactgctggtgagcaggcagcatatattttcttaaaatctttaggaatggatatagagtttcacaaaatgccaattgagagggtaatcacaatcaaagcagaagagttcattaatgttaaaagtttggagctattgcttgactatagtttcaatgatccttcattgttgatggaagcactgacacatggttcatatcagattgctggcactactccatgttatcagcggctggagtttcttggggatgctgtattagatcatatttttactgattatttctaccatcagtaccctgaatgcactcctgaactgctgacagatctgagatctgcttctgtgaacaatagctgctatgctcatgcagcagtaaaagcaggattacataagcatgttcttcactcgtcatcagcactgcacaaaaggatggccgactacctggacaagtttgagcagtcattttcaggtccatcacatggttgggaagcaggcatcagtctgcccaaggttctaggtgatgtggttgaatctatcgctggtgcaatttacatcgacgccaagcatgacaaaggggtcgtttggagaagcatgaaacggatactggaacctcttgtgacacccgacacccttcagaatgaccctgtgaaagagctccaggaattctgtgatagcaaaggttacactttggagtacacggtaactcgtgacaacggtgtatcctcggtggtcgcagaagtgcggaccgaagggactacgtacaaggccactcggacaggcttctctaagcttgacgccaaaaagttggcagccagttccgtgctccgtgatttgaaggctgcggacacaaagcagtactctgcaaatggtatcagttgcacttaaacttcatagctctatggtatatacttttgtacaaaatcgtcgaatcagtaaggtgtgcaggtgcctaggcacgctaccctacttttactgcatctacgtctacggccacactaaagcagtacgtgcaacaatgttttgttttggtcatgtctcttgagagtgaaagtgtagcgttatttttattttgattcgcatttttgggataggcctggtggtgcaccagggcaccaagcgagtatgtggtccgtagggtttttagattactcttgtttcgagatgattggattaaattcttgtagagctgattggatggttcaatatcttggtttttagaatggtc

SEQ ID NO: 32215 - DNA, 1973 bp, Zea mays
  Clone ID: UC-ZMFLB73318H05_FLI
ttttgctgctacttttgggattactaatagaacattgcttgagtgcctggtattttgccttctagatgattattcttcagaagccttggaggaggcctgctctcatcttcccaagatctctagcaaggaaacacatccaaagatagcacaagttcttctggaacgacaaaaatatgatatggcacttcttgtgctaaagtgcacagggcatggaagcttctctgctacagaaaactttaaaaaagatgacatttcatctcttagtgaggcagtgactgtggttcgtgtcagaattgaatgtcgcctcctaacagaagcgtttatgtatcataggagctactgctctaaggtgaaagagcaacactcagcagatatgacacatgctgaggatgcattaaaaaactcttgggtttatcatgttgagatgatggtgaccgaattttgtgctatctgcattaaaaggaatttagttgataaaatgattgatctgccctgggattctgaggaggagaaacatcttcacaagtccctctttgactctgctcatgaaatgcccatgaaaccaaatggtagtctgcttgttgtctactaccttcggcgttatcggtatttggaggcatatgaggttgaccgtagtcttcaaaaatttgagcaaaagatattggaaaatacaactgaagagattgcttcaaaaatcagagcaattgctcgatggagagaaagtttagttgttaaatgccttgacatgcttccggaggtccagagagagaatgtgaaagccatcaacagtggagaacaaagtcaatttgctcgaactgctcaattatcttctccagctcatgtgggcaaatcacaaagtcctgtcatggacttgagcacaacttttacgacttctcttcaaaataagtcaagcctcctccgaaaaaacaatgcattgactgattctggtggtctgatccgaagcagccgctcagaatttggtagaaaggtcccatctgttctggataccagggcatcaccccatgggccacctacatccaatatgagatcaagtgcaggggatatgttccccacagtgggccagagagttgagagtccatttttgaggggggcgaaagatatcagttctagaaaaggagaggagggtttcaaaaaagggattaaatatggtgatcacgatccagtgcctatgtatttgaacttaagttctggtgatacacctatgaaagactaccgaacgagtttgctgaagactgcagttaacaaaaccactatttttcaaggaaaagattctgttggaaaaggagagctccactttggttcacgtgccgagaagcctttcatcttaaatggaactggtgtaggtcaaaatggcctcgctaaggtgtctggatatgctggttttcgtgaggattacaaagtaccaactaaggagaacatcttgagctctagcaagagatcttcaatcgatggagcagaagccagcaaaggtgtgtcaaggtggagatccgacgagtctagtgaagacgaagaagagagaacaaacagggagagcggagcttctcttgttactagaaggcgacctagattttcgagaagatgatatatccacgtcctcatggatctttattaattgtttgcagggcgaggatttttttttgaatatctccacagttattaccctaatgtaacaaaaaaaacgtttcatcggaaaagtgtatgtgataatcatgcataattttacactgccaaggccgagatgtgtagttcaggtgtcacacaggatgctataaaacaaaaatgagatggcataggcatgttgtattcagatagttcagttcgcgtagttgtaaaccggtgcaatagtagttgtaaaccggtgcagtagcaaaatactaccttctgtggacatgagtttgagtttgtctttttagatttgcttttaagttaatcactattgactttgatctgtt

SEQ ID NO: 32216 - DNA, 895 bp, Zea mays
  Clone ID: UC-ZMFLB73319A04_FLI
aaagaagccatttgccgccattgttggtggatccaaggtctcaactaagattggtgtcattgagtcgttgctggcgaaggtcgatatcctcatccttggtggtggtatgatctacacattttacaaggcacagggatattctgttggaaaatctctcgtggaagaggataaactcgagctcgcaacttctcttattgagaaggcgaaggcaaagggggtttctcttttgcttcccactgatattgtagtagcggacaagtttgcagccgatgctgagagcaagattgtccctgccactgctatccctgatgactggatgggtcttgatgttggccctgatgccaccaaaacattcgacgaagcattggacaccaccaagactgttatttggaacggccccatgggagtgtttgagttccagaagtttgcagctggcaccgaggcgattgccaagaagctagctgagcttacaaccacgaagggtgtcactaccatcatcggcggtggcgactctgtcgctgctgtcgagaaggctgggctggccgacaagatgagccacatttcgaccggcggcggtgcgagcttggaactcttggaaggcaagactctacctggtgtccttgccctcgatgacgcctagatccgctgctgctgctgctactcaggttctgccagctttgcgtgtcatcttgtttcggaccttggtgtagcactgcaaggctaaggtttactcctccacacatggactttcgaggataggcttgccaccgtgttttgctagatgagtcgtgaaataagcttttacttcctcgctgctgtgggtgaagtgactggaattcggaaatttggaactaacaaaaccccccgtggatttgtatgatacgttttgttcgac

SEQ ID NO: 32217 - DNA, 1663 bp, Zea mays; identical to SEQ ID NO: 31296
  Clone ID: UC-ZMFLB73344C03_FLI

SEQ ID NO: 32218 - DNA, 2031 bp, Zea mays
  Clone ID: UC-ZMFLB73349D12_FLI
atcaaactaaatctctccagtccacacttgaggagaaacagaagcaaatagattcactcagtacatcaaatacagagttacagaactctataaaagatctggatgaaaggcttggtgcatctaaacaatcacgcgcggatgctgatgagataatttcaagccagaaagcaatcatccgtgagcttgaggaacagctaagtgaggagcgcaacttaagaagagaagagcgtgataaggctgcacatgacttgaaatttgcagtgcataaagtgcaagccgaggctcaagaagaaattaagaaacaagcagagtcttaccttagacaacaaagagaacagaaagaagttattaacaagcttcaggaatcagaaaaagaaacacgtttgtttgtggaaactttgaggtccaagttggaagatgctcgagataatcttgtaacatctgagaaaaaagtaagagagctggaagctcagtttcaggacgagcagctagtatcagccaacaatcgaaagaaatcagaaaatctggaaactgaattgagaaaactgaagaaggaacttgagaatgagaaggctgctcgagaagaagcatgggcaaaggtctcagctcttgagcttgaaatagctgcaacgattagagatctatcaattgagaaacagaggtatcaaggggctagagaacggattattctacgggagactcagctgcgtgctttctattcaactacagaagaaatctcttctctgtttgcgaagcagcaggaacagctgaaagctatgcagagaactttggaggatgaggagaactatgagagcaccttaatgagtgtggatctcaataaagagcatctagccattgataatgctggtatgaagccagtaaactgctcaaaaaatacactgggagcttcaattgcttcaccagaaaatactcaggtaagtgaacatagttccagtgacgaagatgccaacatgactgagcagcaagatgatgatgttactgccaatggtggcaacactcaagatctagaatgcaccagtccagaaaggtcagtggagaggaggccgggttttcatggcaatcctgttcctacagctcctgagagggaagtaacagatactgagcaagttcctgagacagaaagcgaagctggtaatgttggttgcgatgaccaaagatgtgacaatatcggaggagagactatgccgctagaggacgaagtgctgcttccagagaacgaggagcctactgcattgctcaaagatgcagggcagccacaatcaaatatggttcctattccaattctcgatgatggcggcggccactgttcagaagaaaaacacgagggtgcttgctctgagagcaaacgggatgacacacatgttggagctatcagaacgggtgatctgttggcctcagaagttgctggcagctgggcagtggaaacagctccatctgtcaatggggagaacgaatctccaaggagcttgggagatgctacagagcgagatgaagatggaggtagcgtggcagctgatgctttgctaactttggtgaactcagagggccaggcggctgggagccagaataatgttgagcaggccagttccaaaataaccgatgatcgccgtgttcttagtgccatgattgggattgttgatcctgaattcaggaagcaaatgtccaggagtggagctggaaacgaggagccgatgtctgacgctgagacggatgaaggcgtcgaggaaggtgattcagattcaggttcagatggcagcgacagcgacagcgaggaggctatggttgaggattctgttgggtagcttaaacggaattgactgctcactgtaaatatctcaattcgttcgtgcaccattcgctgtatgagcttgtattatgcgtagtgtagcagtatttgttttttattctttaaatgtttttagcagctcgtggtgttgtacgaaatggatgccgtttggtcttcaacacaaaataaagacattcaaactataaaaggatttggctttttat

SEQ ID NO: 32219 - DNA, 1079 bp, Zea mays
  Clone ID: UC-ZMFLB73349F05_FLI
gcgaacgcgtgggcgaacgcgtgggcgcgtcgaacgatgtgaaagaactcctttcttctacgcggacggattcctctcgtctcgatcagctcgcttcgtgacttctctctcctctcgatcgattgcttcctccaccgaggcgggggaaagcgccgcccagatcgccgtaggcaagcggcgatcactccagctttgagcataagtttctgcagggaggctcgtgaagtcagtagtcgtatctggcagtggcagcacagcgcaccatggaatggctgagctggagaacggtgtgttgtttatcagtgctgtgcaccgtgctgttcttgcgcccggtcgagggcattcgctttgtgatcgatagagaagagtgcttctcgcataacgtggagtatgagggggatactgtccatgtatccttcgtcgtcatcaaggctgacaccccgtggcattacagcgaagaaggcgttgatcttgtggttaaggatcctaatggcgctcaagtccgtgattctcgagataagactagtgataagtttgagttcatagttcagaagagaggcgtccatcgcttctgcttcacgaataaatccccgtaccacgaaactatagacttcgacgtgcatgttggccatttttcatacttcgagcagcatgccaaagatgagcattttgcaccacttttcgagcaaatagccaagttagatgaggcactttacaatatccagtttgaacagcactggctagaggcccaaactgaccgtcaagcaatattgaacgagaacatgagcaggagggcagtccacaaggcactcttcgagtcggcggcactgatcgtggccagcgtcatccaggtctatctcctgcgccggctcttcgagcgcaagctggggacgtctagggtataaggctccactggtatccaactctcccttgtagtagccaccatgatcgtatcgacataaccgttaatggtcgctagatcagctaatactgcttccttgtgggctttagttacatgtaatcttttgtggtgccacagatgagaactcttcggatttaaaccgtcaaaaaaaaaaatt

SEQ ID NO: 32220 - DNA, 1676 bp, Zea mays
  Clone ID: UC-ZMFLB73349G05_FLI
cggagcagccatggacgcctccctcctcctctccgtcggcctcgcgctggtgctgatcccgctctccctctcgctcctcaaccggctgcgcgtcggccgcctgccgcccggcccgcggccgtggcccgtcctgggcaacctgcgccagatcaagcccgtccggtgccggtgcttccaggagtgggcggagcggtacgggcccatcatctccgtctggttcgggtccggcctcaccgtcgtcgtctccacctcggagctggccaaggaggtgctcaaggagaacgaccagcagctcgcggaccggccgcggaaccgctccacccagcggttcagccgcaacgggcaggacctcatctgggccgactacggcccgcactacatcaaggtgcgcaagctctgcaacctcgagctcttcacgcccaggaggctcgaggcgctgcgccccatcagggaggacgaggtcaccgccatggtcgagtccgtgcaccgcgccgccactgccccgggtaatgaaggaaagccaatggtagtgaggaagcacctttctatggtggccttcaacaacataacaaggctggcatttgggaagcggttcatgaatgcaaacggtgatgttgacgaacaagggcgtgagtttaagactattgtgaacaacgggatcaagattggtgcatctctctctgttgctgagttcatttggtatttgagatggttgtgtccacttaatgaggagctttacaaaactcacaatgagagaagggaccgcctgacaatgaagatcattgatgagcacgctaagtctctcaaggagagtggtgccaagcagcactttgtggatgcacttttcactctcaaacaacagtatgaccttagtgaagacacagttattggacttctatgggatatgatcactgctggaatggacacaacagtcatctcagtcgagtgggcgatggcagaactggtcaggaaccctagggtgcagaagaagctgcaagaggagctcgaccgtgtggttggccgtgaccgcgtcatgctagagaccgacttccagaacctcccctacctacaggccgttgtcaaggaatcactccggctgcacccgccgacgccactcatgctcccgcacaaggccagctcgaacgtcaagatcggaggttacaacatccccaagggcgccaacgtgatggtgaacgtgtgggcggtggcgcgtgatcccaaggtctggagcaacccgctggagtacagaccggagcgcttcctggaggagaacatcgacatcaagggcagcgacttcagggtgctgccgttcggtgctggccggcgtgtgtgcccgggcgcgcagctcggcatcaacctcgtggcctccatgatcggacaccttctgcatcacttcgagtggtccctgccggagggcactagaccagaggacgtcaacatgatggagtcccccggtctcgtcacgttcatgggcacaccgctgcaagctgtcgtcaagccgcgcctggagaaggaggagctgtacaatagggtcccagttgagatgtgaggtgcctgcagccgctttgaattcactgctcgatttgtgtttttctcgctgctgcagctgctgcttctttcagctttaagctgttgaactgagttgttcgtgttgtaaaatatgaggtgctagatgc

SEQ ID NO: 32221 - DNA, 1093 bp, Zea mays
  Clone ID: UC-ZMFLB73365B01_FLI
caagccgcccaaggagcacgggcccaagccggagaagccgcccaaggagcacaagccgacgccgcccacgtacaccccgagccccaaacccacgccgccgacgtacactcccaccccgacgccccccaagccgacgccacccacatacactcccgcccctacgccccacaaacccactcccactcctccgacgtacaccccttcccccaaacctccgacacctaagccgaccccgccgacgtacactccaagccccaagccaccggctagcaagcctcccacgcccaagccgaccccgccgacgtacaccccttctcccaagcctcgacgcgcagtctatggagattatctcgcgctggatcccggggtggggaatcgacgcggtcacgctgccgctcgccgtcgatctgaacatagccacggacagcgcgacgaaggcggcgcggacgctggcgagggacgaagacttcaaattccgcgcggctcactggggcgacctgcaccggcggctgcacgaggagctgccgcccgcggtgaccgtgctgtgggggcaccagttcttgtcgttcgaggcgccggacgacacacgcggggtcgtcgcgacggcccgcgtgctgcggacgggagggacggttgaggccacgggggacctgctcatcgccgcggacggctccacgtcgtctgtccgtcgcagcttcttgccagacctcaagctcaggtactccgggtactgcgcgtggcgaggcgtgtttgatttcagcgggaaagagagctctgacaccatgaccagcatccgaagagcctacccggagctcggcaactgcctctacttcgaccttgcttacaagacccacgccgtgctctacgagctgcccaggagcaggctcaactggctctggtacatcaacggcccagaaccggagctcgcggggaactcggtgaccatggaggcgactgacgccatggtgggacgaatgcggaacgaggcggagcgcgtctggtgccccgagctggcgcgtctggtcagggagaccgcggcgccgttcgtaaacgtgatctacgacgcagacccgctgcggcggttgtcgtggac

SEQ ID NO: 32222 - DNA, 1332 bp, Zea mays
  Clone ID: UC-ZMFLB73365D10_FLI
ctggaagcaagaaaattatagaggattgcatagcttctagtgagaatttgccaccagatggaacaaccaatgttgttgaagttaccgccaatgatgcttcatcgtcaaaaaataatttaagttttgggtacagttcaactaaagtagttatagaagaccatgcggagttatctggcttcaataaggatctagctgggtccaatgtcttcgggacacattcctcctctgttgaggcggttcaaagtcgacagcttgactactctcatttcatatcacttccattggctttacacccagatcttgtcaacaaactgaactacttccagagttcgatccttggggaagaaaacagtaacaaagatgggagccaaagtgaaggttctattggtgaaatggactatgaccacaagcaagcggaagcaaaaatgggtgccaaaggctcccaatcagattttggcattgacaagtcaatatttatcaaacccgaaacgtttcacctgacggttcttatgttgaagttgtggaacaaggaacgtatagataaggcctcggatgtgctccagtcagtatctacccaagtaaatgaagctttggaaaatcgacctatttccatacagcttaggggtctgacatgcatgaaaggctttccagctaaggctcgggtggtatatgttccagtgctggaagttggtagcgaagggcgcctagctcatgcttgcaaagtcataactgacgcgtttatcaaggcaggcctagtttttgaaagggacgtgagagaactgaagttgcacgcgaccgtaatgaacgtgcggcacaggaagagcagaaataaacggaacacatggacggattcgtttgatgcccggggcatattcgggagatttgggaaggcggagtggggtgcatatcccatccatgagatccacctttctcagaggttcaagtttgacagaagtgggtactactattgctgctcgtcgatccccttgcctgcggagatgcacacggagtgaggtgtgtagctgtgatcatgttgtaggtttttaaggggcgtttatagcatatacatatatatattttaccgcagttcatgaggcgttaaccttgttattagcgttggcccttaggggccaggtgttaccatgtatctatctatcggtttgaatcaccgatgggcaggtgttaccgtgcatctagtgttttgaatctgaatcgccgatttgagccgttgttggatgctgttgtatgttacaagcaatggcaggcactggtagtgggttccctgttgtaaagttgtagttggtgttgaactgttggttgttattgcctttc

SEQ ID NO: 32223 - DNA, 1011 bp, Zea mays
  Clone ID: UC-ZMFLB73365H08_FLI
gaagccaagcaccacctccggcgaaatggcccccaagcgaggtggcagggcgccggtgccggccaagaagaagacggataaagtgacgaaccctctattcgagaagaggccgaagcagttcggcatcggcggcgcgttgccgcccaagaaggacctgcaccggttcgtcaagtggcccaaggtcgtgcgtatccagcggcagcgccgcatcctcaagcagcgcctcaaggtaccaccggcgctcaaccagttcacccgcaccctcgacaagaacctcgctacgaacctgtttaagatgcttctcaagtaccggcctgaagacaaggctgccaagaaggagaggcttctgaagagggcccaagctgagaatgaaggaaaaactgttgagtcgaagaaaccaattgttgtgaagtatggccttaaccatgtgacttacctcattgagcagaacaaggctcagcttgttgtcatcgctcacgacgtggatccgatcgaacttgttgtgtggcttccagccctgtgcaggaagatggaggtcccttactgcattgttaaaggaaaggctcgccttggatcgattgttcacaagaagaatgcatcagtcttgtgtcttaccactgtcaagaacgaggataagcttgagttcagcaagattttggaggctattaaggcaaacttcaacgacaagttcgatgaggtcaggaagaagtggggaggtggcatcatgggatccaagtcgcaggccaagaccaaggcccgggaaaagctgctcgccaaggaggctgcgcagcggatgacctagattgtctactgctgtgtctgccctgtagtttaacggggaagaactgatgaactcgtattgtggttttccgaatctagtttcatatgtttctgtccaccagaccatgtttagaagctttgcaagacagagtttacagtgtttatgtgatgcctcagatccatgcagctttgcttctaattgcctaagagcaacctcaaaagtatttcatg

SEQ ID NO: 32224 - DNA, 2013 bp, Zea mays
  Clone ID: UC-ZMFLMO17004E01_FLI
ctcataaccacctatgacattgtcaggaacaactacaagctcataagaggcaactcctacaacaacagcaatgatgatgatgatgaggaaggaactttgtggaattacgtaattcttgatgagggacatctaataaaaaataataagacacaaagggcccaaagtttgtacgaaataccttgtgcccatcgcattgtgatcagtggaacacctattcaaaataacttgaaggaaatgtggactctgttcaatttctgttgcccagatgtcttgggtgataaacagcagttcaaaataaggtatgaaacggctatccttcgaggaaatgacaaaaatgctaccgctcgagagaagcacgtaggctcaaatgtagcaaaggaactaagagagcgaatcaagccatactttttgcggcgcctgaaaagtgaagttgtctttgatactggtgcatcagaagaaaaaacattagccaagaagaatgagctaattgtctggctgaagttaacaccatgccagaggaaactatatgaagcttttctaaatagtgagctggttcatttagcattgcagccaaaggcatcaccgttggctgcaatcacaatattgaagaaaatatgtgatcatccactgctattaactaagaaaggtgctgagggtgtgttggaaggaatgggtgaaatgttgaatgatcaagacattggaatggtggaaaaaatggccatgaaccttgcagatatggctcatgatgataatgcactggaagttggtcaggatgtctcatgcaagctatcattcatcatgtccttgttgcggaaccttgttggagaggggcatcatgttttaatattttcacagactcgtaaaatgctaaaccttattcaggaagctataatattagagggctatgcgtttttgcgcattgatggcaccaccaaggtttctgaccgggaaaggattgtgaaggacttccaagagggttgtggagctccagtttttctgctaaccacacaagttggtgggcttggacttacactcaccaaggcaactcgtgtcattgtagttgatcctgcatggaaccctagtacagacaatcaaagtgttgatcgtgcttaccgaattggacagactaaaaatgtgattgtataccgcttgatgacatctgcgaccattgaagaaaagatatacaaattgcaggttttgaagggcgctctgttcaggacagctacggagcaaaaagagcaaacacgttacttcagcaagagtgagattcaagagctatttagtttgccacaacaaggatttgatgtttccctcacacataagcagttgcaagaagagcatggtcaacaagttgttctggatgagtccttgaggaagcatatacagtttctggagcaacaaggaatagccggtgtgagtcatcacagcctcctattctctaaaactgcaaccctgcccactctgagtgagaatgatgcactggacagcaaacctcggggcatgcccatgatgccccagcaatattacaagggatcctcatctgactatgtcgccaacggggcatcttttgcgctgaagccaaaggatgaaagtttcactgttcgaaactacattccaagtaacagaagcgcagagagtcctgaagagataaaggcaagaatcaaccggctttcacagaccctctccaacgctgtgctgttgtcgaagctaccagatggtggtgagaagataaggaggcagataaatgagctggacgagaagctgacttctgctgagaaggggctgaaggaggggggcactgaagtgatttccttggatgactgatccaagacatggagagtctgtgctcggcaaaagtaaagtgttttgaatagctttagtcactgggttgtgactagcatcaatcaagtctgctctttttgctgcatctctgggctgggtctatcgtttatgcaatacaatgctttttctgatgatgattatatgaataatataatccccagacaaagcagc

SEQ ID NO: 32225 - DNA, 1730 bp, Zea mays
  Clone ID: UC-ZMFLMO170112F04_FLI
caaaacaagaagcagccagccaccaggcactagtaaacagtaagcagcagagagcatggcgagatcagggcgggaagcggatcccggagaggaggaacggaagctggtgctgggcaagtacgagctgggccgcctgctggggcagggcaccttcgccaaggtttactacgcgagggacctgagcgccggcgccggcacgggccacagctgcagcgtagccatcaaggtgatcgacaaggcgcggctgcggcgcacggaggggatggtggagcagctgcgccgggagatctccatcatgcggatggtgcggcaccccaacgtggtgggcatccgggaggtgctcgccagccgctcccgcgtcttcgtcgtcatggagtacgcgcgcggcggggagctcttcgccaaggtggcccggggccgcctccccgaggaccacgcgcgccgctacttccagcagctggtcgccgccgtcggcttctgccaccgccgcggcgtcgcgcaccgggacctcaagcccgagaacctgctgctggacgaggcggggcggctcaaggtcaccgacttcgggctggccgcgctgcccgagcagctgcgccacgacggcctgctccacacgcagtgcggcacccccgcgtacgtcgcgcccgaggtgctcaggaagcgcggctacgacggcgcccgcgccgacctctggtcctgcggcgtcgtgctctacgtcctcctctgcggcttcctcccgttccagcacgacaactacgtcaagttgtaccagaagatcttcaaggccgactaccaggtaccgccctgggtctccggcgacgcgcgccgcctcatcgcgcgcctgctcgtcgtcgaccccgccaagcgcgcctccatcgccgagatcatgtgcacgccgtggttcaggaagggcttcgtgccgcccgtcctttcgcccccggtgacgcccaagaaacagcagctggacgaaggcgctgccctcttcgacaacgacgacgacgacgacaacagcaaccactctggcgccacctcccctcggtcgtgcaacgcgttccagctcatctcgtccatgtcctccgggttcgacctgtcggggctgttcgagagcgagcagaagaccgcgaccgtgttcacggcccgcgcgccggcggccaccgtggtggagaagctggagtccgtggcgcgcgccctaggattcgaggtcaccagggggaaaggctggaaggtgaggatggaggccaaggccgagggcacgaacggacggctcgcggccaccgccgaggtgctcgaggtggccgtggacgtggccgtggtcgagttcgtgcacgacgccggggacgcgctggactttaacaagttctgcgccgtcgacgtccgcccggggctcacggagatcgtctgggcgtggcagggcgacagccccgctgccgccgtcggcaccgcgtgaacaagcgtcctctggcgtccccgtctgtgacgtggaagttgtagcaactttgcgtaggagttaaacacggctgcactggcaccagctttttgtagcatgtaaagtttcaagttctcatcgttgcttcgagactgccatggtggctagttcgttgtgtgccatatgctgtacaggaaggaagagtcgaatcgagccggggagttttcgatcgacttgccaagttttgtacgatcgtaacctgtattttgaggagatgtgtgcatacaaaattttgcccatgatc

SEQ ID NO: 32226 - DNA, 2325 bp, Zea mays
  Clone ID: UC-ZMFLMO17016D02_FLI
aattgtaatactaggggacagtgttaaccccacagatcgagtttttatttgtaggggagaaatatcgtaataacacgtctgtacgtgcgcctgacattattccatctcgactgggaagggacacccaatcaaacatgcaaaacaacaacaagagctagcttattggtggctgcctgcttgtagcaaggcggacggacggaggagcatggaaggatccatcggctgtgccgctgtggatgagtctagtggatcttgcagccgcagttttcggggaggaagtcgcggcatctgtacttggtggcgcccttgtccgtggagacggccacctcttctgtcacttggcatcgtcgtctcggtcaccccggtcgcgatgtgatgtccaagctctccagcagcacctctggttcaggttgtaggggatcttttgagcacctctatcatgcttgtcagttaggtcgccatgttaggctcccattccccacctcttctagagcagcaggcacttttgatctgatacactgtgatgtatggacatctcctgtaatcagcatttctggttctaagtattatttactcattctcgatgacttctcccattacctgtggacttttcctttacgtcagaagtccgacacttttcccaccctgtctcacttcttcgcctgcgtctccactcagtttggtcgcaccatccggagcatccagtgtgacaacgggcgcgagttttataacaatgtgtcccgtgacttcttcctctctcgcggcgtccacctccgcatgtcatgcccctacacgtctcctcagaacggccgcgctgagcgtatgattcgcacgacgaacgatgtcgtgcgctctcttcttttccaggcttctcttcccactcattactgggctgaggccctcgccactgccacctacctcctcaaccatctccccaccaaggcgattgcccaccccactccttacttcgctctcttcggcatccatccctcttacaaccatcttcgtgtcttcgggtgcgcttgctaccccaatctcgcatccactgctcctcataagctcgcccctcgctccactcgctttgtcttcctcggctactcacccgaccataaggggtatcggtgtctccagcaggagtttgcgatgaaggacctgggggcgctccaccacttcctaggagtcactgtcgagcgccgtccccagggcctgtttctccaccagcggcagtacaccgtcgacatacttgaacgcgctggcatggctgactgcaagacttgcgcgaccccggtggatacgcaaggcaaactttccgccgctggccccctggtcgtcgatcccaccggctaccggagtattgccggggcccttcagtacctcatcttcaccaggcccgacatcgcctacgccgtccagcaggtgtgcctccacatgcacgaccctcgggagccgcatctcaccgcgatgaagcgcatcctacggtacttgcggggcactcttgacttcgggctccttctccgccggtcctcagccacaaaacttcgcgtctacaccgatgtcgactgggcgggctgtccagacacgcgtcggtccacctcgggctacgatgtgttcctcggcaacagcctcgtctcctggttgtcgaagcaccagccggttgtctcccgctccagcgccgaggccgagtaccgcgccgtagccaacggcgtggccgaggcggcttggctctgtcagctactacacgagctccacagtccgctggccacgagcaccctcgtcttctgcgacaacgtcagcgccgtctacctctccaccaaccccgtccaacaccagcgcacgaagcatgtggagattgatctccacttcgtccgcaaacgggtcgcctgtggcgctgttcgcgttcttcacgtcccgaccacctcccagttcgctgacgtcttcaccaaggggctcccgtcggtggtgttcacggagtttcgatccagcctcaacatctgcagtggctagagtttcgactgcgggggggggtgtaagagctcctgtgttatgggcctggcccactagggttacatatattcctgtacacctacagctaggactctattggattctattgtattacaaacaacacaattaaaaaaacgcagcaacttaggccatcgctgcgagaattgccatcctccataattggggcttgcacttcattctcattggacccattctcaatatcaactatatcatccacatccatagtactaccaatcacaagttagtacaaaaaatcagacatataacacacattatttctcacaaacgagaacacattat

SEQ ID NO: 32227 - DNA, 1672 bp, Zea mays
  Clone ID: UC-ZMFLB73276H04_FLI
taggtggccggacggtggtggcatcgccaattcaactccgcatctgaatcggcactcggcagcgcgccagctccataggaggagatggcgctcacaagaatcggtcttgctggccttgcggtcatggggcagaaccttgccctcaacattgcagagaaagggttccccatctctgtgtacaacaggacaacctccaaggtggacgagaccgtgcagcgtgccaaggcagaaggaaaccttcccgtctacggcttccatgaccccgcgtcctttgtgaagtccattcagaagccacgggtggtgatcatgctcgtcaaggccggcgcgccagttgaccagaccatcgcgacgctcgcagctcacttggagcagggcgactgcatcatcgatggggggaacgagtggtacgagaacacggagaggagggagaaggccatggaggagcgcggcctcctgtatcttggcatgggtgtctctggaggagaggagggtgcccgcaacggcccgtccttgatgcccggaggctcgttcgaggcttacaagtacgtcgaagacattgtcctcaaggtggctgctcaggtccctgacagtggcccgtgtgtcacgtacattggcaaaggtggatcgggcaactttgtcaagatggttcacaacggaatcgagtatggcgatatgcagctgatttccgaggcatacgacgttctcaagtcggtcggtaagctcaccaacagtgagctgcaccaggtgttctccgagtggaacaagggcgagctcctgagcttcttgatcgagatcacggccgacatctttggcatcaaggacgagcatggcgatggctacctggtggacaaggtccttgacaagaccgggatgaaagggacagggaagtggacggtgcagcaggccgccgagctgtcggtggccgctcctacgatcgaggcgtccttggactcgaggttcctgagcgggctgaaggacgagcgggtggaggcctccaagatcttccagggtgactactactccaccggctcgccggtggacaaggcgcagctggtggaggacgtgaggcaggccctgtacgcgtccaagatctgcagctacgcgcagggcatgaacatcatcaaggccaagagcgcggagaaaggctgggggctcaacctcggcgagctggccaggatctggaagggcgggtgcatcatccgcgccatcttcctggaccgcatcaagaaggcctacgacaggaacccgggcctcgccagcctgctcgtagaccccgagttcgcgcaggagatcatggacaggcaggcggcgtggcgcagggtggtgtgcctcgccatcaacaacggcgtcagcaccccgggaatgtccgctagcctggcctacttcgactcctaccgcagggacaggctgcctgccaacctggtgcaggcccagagggactacttcggggctcacacctacgagagggtcgacatgcctggctctttccacaccgagtggttcaagattgcgcgcaacatctccaacaactgatgagctgctcaacggatggcatgcccggtgttgactactccagtcggtaatgagatttcctgcaggaacttgtctattgatctttgtaagttaattatttatatgaataaaataagagcagacatgcttgtgtttgggc

SEQ ID NO: 32228 - DNA, 1503 bp, Zea mays
  Clone ID: UC-ZMFLB73276H05_FLI
gaaccttgttcctggaagaatgtataattgaggatgaagggagtgaatggctccatgaactcgctgtcaacaattctgttctggtgacactgaacttttacatgacagaactcaaagtggagcctgctgatctggagcttcttgcaaagaactgtaaatcattgatttctttgaagatgggtgactgtgatctttcagatctgattgggtttttccaaacctccaaagcattgcaagaattcgccggtggtgccttttttgaagttggagagtacaccaagtacgaaaaggtcattttcccacctaggctatgcttcttagggggtcttaccttcatgggtaaaaacgagatgccagttatctttccgtattccacaatgcttaagaaactggacttgcagttcactttcctcaccactgaagaccactgtcagcttattgctaaatgccccaacctaagtgttctcgaggtgaggaatgtgattggggatagaggactagaagttgttgctgctacatgcaagaagctacgaaggctcagaattgagcgtggcgacgatgatcctggccaagaagagcagggaggagtctctcagataggtttgacagccgtagccgttggctgccgcgaactagagtacatagctgcctatgtatctgatatcacaaatggggcgctggaatccattggcactttctgcaagaatctctatgatttccggcttgttctacttgacaaacagaagaagataacagacctgccacttgacaacggcgtccgtgccctactgaggaactgcgtcaaacttcggaggtttgccttctacctgagaccgggagggctttcagacgtaggcctcggttacattggactatacagtgggaacatccaatacatgctgctcggcaacgttggtgaatctgacaacggattgatccagtttgcaacgggatgcaccaacctgcggaagctcgagctgaggggctgctgcttcagcgagcgagctctggcagtggccgtgctccagatgccctcgctgaggtacatatgggtgcaggggtacagagcctctcgaacgggccaggacctcatgctcatggccaggccgtactggaacattgaattcgcgcctcccattcccgagagcgcttatcgggtgatggcagatggacagccttgtgttgacacccatgcccaggtccttgcgtattactcccttgctggaaggaggccggactgccctcagtggctggtgactttgcaccctgcgtcactgtaaatacgtcaagctgtcccgagtgtggtttttgtaccagctgcttgtgtaccgtaataaactctagtactgtagtggtggaggcgtagtgcaataaagttgcagttgttgcttgtactagtgaatctaatcctaggaggttgttgccctgtgctttcttttccccggaattgtatctttgctccactgtaaatatcagaaatggcctgtgctagatgagttgaat

SEQ ID NO: 32229 - DNA, 454 bp, Zea mays
  Clone ID: UC-ZMFLB73276H07_FLI
atggccttcaggcaggggatgcgctcattatctacaaaaactccgtgcctggcaaatttattatccgtggggagaagtccattcagcagacaaacccctagacacaatttgatgtgactgtgcaccatcagatatggcgtccgaggatacaccatatgttcacgttccagttgttatcgacttttctaatgtctcaccgtcacactgagataagtcgaaaaaggagatacaccgtgtggatggagaaaaggagaagaaattttgggagacattggaagtgctgccagtgagcctacgtctaagctcagaacaaatggtttatgttttttcccctaattcggtcgtatttggatgcttgagtcctgcattgcatgatgaagaacattctcagtctctctttttttgtaaatattttaattcaggatctataaggtaaaggaagtggtttggaagc

SEQ ID NO: 32230 - DNA, 834 bp, Zea mays
  Clone ID: UC-ZMFLB73276H11_FLI
cttgacagttctatctatccccaccacaaataagagaccacctctctgccttcttctcggaggtcggagaagagctctctgcttcattcggccggtccaactccaccgaccgatccaatccaacccactgaccatggggttcccgccggtgtgctgctgcgcccccatccccaagccggtcgtcgccttctgcaacctgctcggcgccatcaaggacgccgtcctgctgacgctcgccgccgtgggcttcccgcacgacgccgcgcgcggctcggcggacgcccaccagcccgaggaggtgaagacccggctccccgccgtggagtacgcccagctcctggccgagcagcagccgtcgcccgccacccacgcggcctgcatcgtttgcctggacacgctggaggcggcggacgaggtgcggcggctgggcaactgcgcgcacgccttccaccgggcctgcatcgaccgttggatcgacctaggccggacgacgtgcccgctgtgccgctccgacctcctgccaagcccccggggccgggccgggctgctcgggctgggccggctcgccagccgtctcacgcgcgttcgcgtttggtgaggaccgtctcggaggccacttttaccttttcggtggccaggccgcggtcgcagcccatcccggtggtgccggaacggcgcggacacgttagcgacggcgaccgggccgccggatggtcttaaatctgctctgccacttgccaaccgctaatcaaccagcgggcttaattagcagcggattggcttggtgtctgacagtcgatattatgacagctaaataagcagttaaatgtttct

SEQ ID NO: 32231 - DNA, 733 bp, Zea mays
  Clone ID: UC-ZMFLB73277A08_FLI
agggtgattactacagataccttgctgagttcaagactggagctgagagaaaggacgccgctgagaacacgatggtggcatacaaggctgcccaggacattgctctggctgagcttgctccaactcaccctattaggcttggactggcacttaacttctcagtgttctactatgagattctgaactcacctgatcgcgcctgcagtcttgcaaagcaggcttttgacgaggccatctcggaactggacaccctgagcgaggagtcctacaaggacagcactttgatcatgcagctccttcgtgataacttgaccctatggacctctgacatctcggaggaccctgctgaagagattagggaggcgcccaagcgggactcgagtgaggggcagtaaagccggctttatgtgcctagaaactagtagctagtgtttgctgctgtcgaatgacactatgcaatgtgatctggaacctggtttcttgggtgcgacgcttgtagccgtgttatgactgtcgtccgtaaaatttgggggctccccgtaagggatgctgcctggcaaggcctcggtgtcccacctcgtctgtggcgtggggcgctggagcccggtctggttgggttgggaagccctttaaactgttgtcacttgcattttaccttttccatcgctgtttattgtgagtggtcctatatcaatggctggtctcagtggtctatacgtatgctttttggttc

SEQ ID NO: 32232 - DNA, 832 bp, Zea mays
  Clone ID: UC-ZMFLB73277B08_FLI
ccatgcgtccgctttgtcctccccctcccctcgttcccgtctccctcgcgttcctctcgaccgtacgccgccgcctggctcgcaccgtcgacagtacctcagtccagatcgaccctccctctacccagatcgggttccagttggcctaccgcccccgccgccctactacaggtgccgaggccttcaccggcgaagagcgcccgccagacaaatggaactgggtgataaggcggtcggttttctgctgactctgacaagcttaaccttatttacatactacacattctgggtcatcattttgccatttgtcgacagcgaccactttgtgcacaagtacttcctgcctcaagagtatgcgattttgataccggtactggccggcgtggttctcctttcgttcttgagcgtgtttgtgggccttgtgatgctcaaatcgaagaagaagaagacggcttaatcgggtttgccatgtacactgctgtgtcattcacttagtgtgatgaaatgcatgagttcgcagtatctaattgctagaagctcggttctgtaatcagttccgtcatactttaaaggtctttactttgtcatctggatgtgtgttttttttattctggtggtcaattaaaagcagtgttcatcaaaactctagttagaggtcacatatcgttagccattattcggaccgaacagcattttgaagagtgaacgattgacagtggctaaaagacgaccgctcactcatcctcttcacagctgtcgggttggtatccaagcgctgatgatgcagaggcaagattctggcgtgcaaaaaaaaactgagagttgttctgtt

SEQ ID NO: 32233 - DNA, 1884 bp, Zea mays
  Clone ID: UC-ZMFLB73277E12_FLI
caatttctatacttgagaaacttcatgcaaaagggtttgttcatggagacgttaaacccgagaattttctacttggccagcctggatcccctgacgagaaaaaactttttctgattgatcttgggttagcatctagatggaaggaatcagggtcatctggacaacatgttgaatatgatcagaaaccagatattttcagaggtacaataagatacgctagtgtccatgcacatttaggacgtactggtagcagaagggatgatctggaatcattagcatatacattgatatttcttcttagaggaaggttgccgtggcaaggttatcagggcgagaacaagagttttcttgtttgcaagaagaaaatggctacctctccagatctattatgctgtttttgcccaactccattcaaacttttcctggagactgtgacaaacatgaaatttgatgaagaaccaaattactcaaagcttatttcccttttcgatgaattgattgagccccagcatttgaggcctattagaattgatggtgcattgaaggctggacaaaaacgtggaagattacatgtaaatccagaagaagatgagcaaccgaagaagaaagttcgacttggaagcccagcaaatcagtggatttcagtttataatgctagaaggcccatgaagcagagataccattacaatgtagcagatgccaggcttcatcaacacatagagaagggtaatgaagatggattgttcattagttcagtagcatcttcagccaatctttgggctctcattatggatgcagggactggtttcacatcccaagtatatgaactgtcacccatattccttcataaggattggattatggagcagtgggaaaataactactacatcagtgccatagctggtgcaatgaatgggagttccttggtggtcatgtcaaaaggaactccttacactcagcagtcttacaaagttagtgaatcattcccctacaagtggatcaacaagaaatggaaagaaggttttcatgttacatcaatgacaactgcaggaagccgctggggtgtagttatgtcaaggaactctggatactctgaacaggtagtggagttggattttctttatcctagtgaaggtattcaccgacgatgggagaacggatatagaataacttctacagcagctactggcgatcaagctgctttcatattgagtatacctaaaagaaagttaatggatgagacacaagaaactcttagaacatctgcttttccaagcaaccatgtgaaggagaaatgggccaagaacctttacattgcttcaatatgctatggccggacagtgtcatgaggcttgctcggctgcatccctagttgggaagagcatgttctgatgagtatatattgggaaaaaagcagcaatctttgttgctgctctctattaatctctgtatgtgtaggtaacccgttcaagatgaagcaccttacagtggccagagtaggagctcaagaaagaaccgagaggaaggtggaaagcaatcggccaataagcagacgaggagtatgtgatctggctagtagcgggtacaggcgctaatggcgtcaaatgttttgtatcagcatgttttgcttttgcttcgctcctgaccgctgtgcaaagagtagacagcttgtttctttcggaggcaagtcatctgagaaccatcgtgtatagcgtatgatgtcattgtattttctttagtggaggccaagttccatctttccggaactcccaaaatgctaagttattatgcgaggaaacaagtgtactgataaaatcggtgtatcaattccattattcgacaattctcacctgcattaattaatgcaatgctgcattacttatc

SEQ ID NO: 32234 - DNA, 1926 bp, Zea mays
  Clone ID: UC-ZMFLB73278B02_FLI
caggatgacactgacaccgcctcgggctcggactacgtcaacggcaaagccggctccggatttttcggcatcacccaactggatggcacgttgttccttactagaagcgtggacttgagaactctgctcggattgaccccagaccccgattcccagaccagagttgcttttgcaactcaatttcagcgctcattcatgaccctactacgcaatgctcagtttgaagaactctccgcacaagatctgctcttgacatatgccctaaataacgattacctgctcacgctgcccatttatgtcgactggaagaaggctgctcaatctaatgcaataatattcaggcgtggatacgcgactgagaggcagaaaggcctcctgttggttgagaaacttgattacttgcaatcaaaactcttgcagaatgtctttttcagcctctccaaacccttgaaaaagccagggaaatggcttaatgaggctttgaaaagatcaacagataaccagggatttcagatctggatagacaaactgagactatggcttaaagagcaaacttatgcagataattcactgctgttgatagaaagctcttcatgggacaagcttagttctgatcagttacctgatgcagatgttcctatttggatcgctgcacaaagggcagtctctcgttatgaaggaattttgtcacctgttggtcctcgtggaagactgttaagaagattgcttaaatggactggactaataccttctctgccagaagcaacgataaaatccaacaatgaaactaaacatcttgaaggacatgtgaggccaaactttctaccaagaattacccttgctaatatatgggaacctgcaagcagagaatcttgcaataacaatatctgggagatggtgaaagcttcttttcgtattctgtttgggaggtctactcttcaggaaccagcattccaggagttaatactactttacactgatgaagttgttccaagtgaaacgaaggacgagatggttccgctgcaactgaaaatttatgagaggattccgatcccagatttgccagtagttttcccccacaagaaattgtccttccgcatcctagatacagtaaggctagatattgctactgtaataggtctattggcatatgtggtgaactacaaatttgagagtttagcctcatctccttgctggtactgcactcgtcatacttgttttccgtgtagcactgggctacaaacagacccgggataggtaccagcttctggtgaataaaaccctctatgagaagacattggcaagtgggttcggctcggtttacttccttctcgatgcttctgagcaacagcagtacaaagaagcacttttggcatatgccatgttgctctgcagaaagaagtatgaggtctcatctcgtgcaagcataagagatgcatgcgagcagtttatgcacgagaaattcgaggcaaagattgagatgccgatcgacaaggcaatggagacactgctgcggttggggctggtgattgagcttcccactgatggtgggtcgagcgtgattggtctcccatgctcggaggcatacaggatcctgaaaagccgttgggacggcttgctggaacaagatacagaacaaggctgattagaacgagacatgtacgttggtggcttggagtggagtgggatgggatgccgtgctggtacatactcgacgcgtcggcaaagctcactcttgtttgtatgtatacgtaccagttgttgcagcaagtgtatatgtgctagctacgtgcatgtataatcgtgatctagtttgttgtacacaaacgattgcagtgtatgtatatgggagcacatgtttttttcggaagactagccatgtgtctgtaagtttttctatttgtaagttggtttccatttataaat

SEQ ID NO: 32235 - DNA, 2240 bp, Zea mays
  Clone ID: UC-ZMFLB73278B09_FLI
ggttattaaagcggtaaaacgttaaaacgttatgaaccaactttttaacatttaaacgtttaaacgaacgttgaaacgtcttttcagatttgacatagaagttcaaatataaaatatgttcatacataagttgagtacttgagttcacaaaccaaatagcacaaaaagaaacagatcaagttcaacaacacaagttcaaccacacaatgcctcactatttgttgccattgaaatttactgtgagcaaatagagattgattcactataagcaaaatcaacaaatagggcctaaaacaatgggcgctggctggtactatgatcttgggcgctggctgctggtcttgcggagggaggaggagggcgctggctgctggtcttgcggtcgccggtcggccggcggtggcgcaggcgcgcagcggtctgctgtgggcctgtccgcctgtgggaggagggagtagggggagccgaggtcagtggagggcagcggcatacctgtggggcggtcggccggcggtctgctgatgtctgctgactgctgtggcggcggaggagaggagggcagccgactaaggagtgctccgcgctggagaggaagcctccacgggtacgcgctggctggacctaaaccctaaaggcccaggaaaggcccacagatgggtaaaacgtccccagaacgcgtaaaacgtcctaaaacgtgtttaggacgcttaaacgacgtttaaacatccaaaacggacgttctacgccagttttctaaaacgttcggacgttccagctcctaataacgttttctcgcttaaacgacgcttaaacgtcgtttaagcgacgttttaataacaatgttgctgggaatgttttcccttggttgtaacctagtatagctttctttaaattgctactcccttccctgggacaagtcaaatatcttgtttccttttataatgaggttctaccattttttctctattccacatcttaggccctgtttggaactcctagagctaatagttatccagctaacaaattgttagctggattgagccagctaatgaactaatggttggctgtgaggtagataataattagttggtgtattagttgggtgtgtttggaacctctatagctaattttagcagctaactattaaaggtttcaaacagggccttaaaagaaaaatcaggcaatccatgcgggtgctttctaaattgatccaaagcctgatattcatttttcaaacatcaataacaatgacattcaacaaagaattacttacagctgaatgtgtggaaataaaagcactgaaaatgttgcatagttcatttcaaagtgttggagctatcatagtaccggtatgaatttattacccacccatccttagtgccagcagctgactcaaaattcaatgttttagctatctgctttagcaaattaagagactaacaaaccactgtgcttatcttgtaacatattaattactatctctgaagattcaggacaaggaaaaaagatcatcacatagtctactagtgttgcagtttcctttgccactgaagaagcaacttgtggatgattgggagtttgttacgcagatggcttgtgaagctaccacgatcacctactgttgatgatattctaaagaagtacttggaacaccgggcaaagaaggatggcaagataaatgactcctatgctgagattctgaaaggattacgctgctactttgataaagcattgcctgcaatgcttttatataagaaagagcgagatcagtatgctgaagaagttaaaggtgatgtctcaccatcaactgtatatggagctgagcatctattgcgcctttttgtaaaattgccagagctacttgcttctgtcaatatggaggaagatgcgttgaacaagctacagctgaaactgctggacgttctcaagtttcttcagaagaatcagatcaccttctttacctctgcgtacgatggttcttgtaaaggtgcagatgaggataaaaccaaatgattgcatgtgaacgttttatatcatgtaacatctttcgatggacttgtctggcactattgttgatatgaatgtcgcttaggacaacaatcggtttatgtaggatagatgctgcagattcctgaaagacggtacttgaactgcccggagcatgttgtattttcttaagatgctggaactaagacggcttagttgaattttcactatcaagtgagtctcggtcttgcccc

SEQ ID NO: 32236 - DNA, 805 bp, Zea mays
  Clone ID: UC-ZMFLB73278C06_FLI
cacagggcacacgcactacacgcacggcacgcagatacatatagagagaggttagctatagcttgcacatctatttaactaactaactaactggctagctagctcgatccgcagagcaaagcgaaagcagcaagaagcaaagcaatggagaaccctgcgagtgtgctagttctaccagcgcagttcaccaaactcaccttcggaaacctgtacatccgccgggccgggccgggcagcagggagataaccgaggagggcaggtgcgacctggacaagagatacgtgagtgacttccccgtctacgacggccgcggccccgacgccagccttgtggcccgcgtgcaggggatcaccagcgaaatcgggaacgcgcaccaactgttcgtcgttgttttcgacaccgacaggctcaagggctccacgctcgtcaccaatggcgtgataacggccgggtctgacgagtgggcgatctacggcggaaccggggtgtttgccatggcgaggggcgtcataaggagaaggtatctcgccgacagggccggcgggaacactgatgagctcaacatggatgtcttctgccggccgtttggctcacagtcagagctgcaagataaggttgttcatcatactaataaccagcggcggccgttctgccgtttggagctgaatatgttttgttggatatataacatactcctatatgaatctttgcgcatatagatgcaggtgcaggggcagggctctagcgtcaccaagattggactatggggtggaccgggagggtcggcacaggacatcacggcgg

SEQ ID NO: 32237 - DNA, 1496 bp, Zea mays
  Clone ID: UC-ZMFLB73278C07_FLI
gctatcatggagcacgtcctggaaggcagctcgtacatgaagctggccaagaagctcggcgagctcgacccgctgatgaagccgaagcaggacagatacgcgctccgcacctccccgcagtggctgggcccgcagatcgaagtgatccgctttgccaccaagtccatcgagcgcgagatcaactccgtcaacgacaacccgctcatcgatgtgtcccgtggcaaggcgctccacggcggcaacttccagggaactcccatcggcgtgtccatggacaacacccgtctcgcgctcgccgccatcggcaagctcatgttcgcgcagttctcggagctggtgaacgactactacaacaacggcctcccgtccaacctgtccggcgggcgcaaccccagcttggactacggcttcaagggcgccgagatcgccatggcctcctactgctcggagctccagttcctgggcaacccggtgaccaaccacgtccagagcgcggagcagcacaaccaggacgtgaactccctgggcctcatctcgtccaggaagaccgccgaggcagtggacatcctgaagctgatgacgtccacgttcctgatcgcgctgtgccaggccatcgacctgcggcacctcgaggagaacgtgaaggccgcggtgaagaactgcgtgacgcaggtggccaagaagtcgctgagcctgaacgcccggggcgggctccacaacgcgcgcttctgcgagaaggacctgcagacggcgatcgaccgcgaggcggtgttcgcgtacgcggacgacccgtgcagccccaactacccgctgatgcagaagctccgcgcggtgctggtcgagcacgcgctggccaacggcgacgccgagcgcgccgcggagacgtccatcttcgccaaggtggccgagttcgagcagcaggtccgcgcggcgctgcccaaggaggtggaggccgcgcgcgcggccgtggagagcggcagccccctggtccccaacaggatcagggagtgccggtcctacccgctgtaccggttcgtgcgcgaggacgtcggcaccgagtacctgaccggcgagaggaccaggtcccccggcgaggagctcaacaaggtgctcgtggccatcaaccagcgcaagcacatcgacccgctgctcgagtgcctcaaggagtggaacggcgcgcccctgccgctctgctgagctcagctgcacgcacctgctccgcacaaagaaggaaaaaacaaaagtatagcggctcaagacagtgtttcaagatcgtttatttacaaccagactagcagaagatgctctctatatctaccgtcgccttgtattattagtagctgaagtaagttcatgtgaatgttgtcgtgttcccgcagctgcgacgccacagcgtgcgacgtgcgcgttcttgtctgtcgcagctgctgaaacttttgatggttttttaacttgtaagctgggaggatgaagtaaattattttgttctacaaaac

SEQ ID NO: 32238 - DNA, 1631 bp, Zea mays
  Clone ID: UC-ZMFLB73278C08_FLI
ggaagtgagcgtggtgctgatactaccgataatgatagacaaacaaggattgagggagcagagataaataaaagtctgttagctctcaaggaatgcattcgagcacttgataatgatcagatacacattcctttcagaggaagcaagcttactgaggtccttcgtgactcatttgttggtaactctaggacagtgatgatttcttgcatttctccaaacgcaggttcatgtgaacacacactaaatacattgagatacgctgatagggtcaaaagtctttccaagggcggaaatacaagaaaagagcagtccacaggaccaactaccacttctagccgggattctttgtcagctttatcatattcattgcctgctgaagctgaagaaattcctaatcaagttcaagagaagagaccagtcgatacttataggaagggcactgaaaattttatctccaacccttctgtggagtctgaccgaaattcctttagtacgattccaaattattccaatagagggagagaagaaaatggtgcagcatctggtaatgacagggagagctatgatttgaagtccagccaacctgcttacactagtaagccacagttggttcagaattcagcaaacacacaggaggaggagaaagtcacaaaagtctcacctcctcggagaaaggcttatagagaagacaaatctgataggcagagcaactatatgaaaaaggataatggtcctgagacaagtcgggttgggtataagatgcagcaggcaaagcagctgcaacagcaacaaagaccagcatctgcttcagcctcatcaaggcaatctgaaaaggaaagttcttgtgatgatgtagaaattgatgcaattcttgaggaagaggaggccctcattgcagttcacaggaaggagatcgagaatactatggagattgtgcgggaagagatgaaccttttggcagaggttgatcaaccaggcagcctgattgacaactacgtgacacaactgagctttctgctgtcacgcaaggctgcaggtttggtaagcctccaatcacacttggcacggtttcagcaccgcctcaaagagcaagagatccttagccgcaagaaaccttccagatagtatgctcaacaatggctctggattttgcctggaaatcttattgcttggagctcaatcgcagtctattagttggttttctcctgtgcgctccagtaaatgttagacccaagcaaagcagtgatagagaggacacatgggagttgcttgagggtgtggtgatcttgatgttgaggatggtgtggtcctggttgatgtctccactttgtgtttgtcagggttgacaaccagtttggtagtagtcctttttacagtggggctgcttgggtgtttttttttggcagatgtcatgtatggcttgcccactttgcctttttttttcttttccccattttgtacgagaaactggaatgtctggaatgttgtttgcagacaccggtgggtcgatattcaccgagggggtctgtggaaaccgatacattgttgtatactagtcggttgaccgtgcgttacaacggcttacaacaatatccacgtaaactattcataaaaaatttttaagatttttt

SEQ ID NO: 32239 - DNA, 2106 bp, Zea mays
  Clone ID: UC-ZMFLB73278D05_FLI
ggcttggttgggacgtcggccccgccgagatgaatcagtttgcactttgtggacaagaagttgtgaatgccttcagtgctgcagtgttgggcctatcttcaggttgtgtttcttctcaagtcaaccaagagcagcctcatgatggttcccctcctctgagagaagatgacaagaatgggcattatgtttttgctgttggagataatctcacatctcgctataagatcaatgcaaaaatgggagaaggtcagtttggatgaccatgtattctgaaatagttgatttaactcgcattgggcatgccaatacattcagcaaattttgtctataactgaatgtgtctggactctggaatacaccaggtacctttggtcaggtgttggagtgttgggataaggaaacaaaagaaatggtggccataaagatcatcaggggcattaagaagtacagggatgctgcaatgatcgaaattggcatgcttgagaagcttggtaaatatggtgaaagcagatccaggtgagtttgctggttcagttagcacctatatgcgtgcttacgttcataagattgcttgtatataagctggtctattttgcagttgtgttcaaattcggaactggtttgactatcgtaaccatatctgtattgtaagtacattgttagattatgacaattatgcactgacccaaaaatataaccatatggtgcttaaacgttggtgaatttggattaatggtgagcaggtctttgagaggcttggaccaagcttatatgattttctgaggaaaaacaattaccgctcattcccaattgccctagttcgggagtttgccaaacaactgttggaatgtatagcatgtgtgtgcacagttctttctattacccctcctgcactataatgcatatacattagttttgtgcattatctgtgctgcattgcagcctgtcattaatccattactcatgcttgtactccagggagtatctaacatcatgtgatgtttttgtatttaccctctctctgtaatgtgttgcagttatgcatgaattgcgcctcatacacactgatttaaagcctgagaacattctccttgtttctccggagtacattaaagtgcctgattacaaagtatatcttgttcttttatatttaattcacctacccaagatttaccttgtgctatgcttgttcttttattgtgtattggtagcgggggtagaaaaatatggtactgatcctcttttttcatttgccaggtctcatcccaatccccaaaggaggggtcctattacaagcagttgcccaagtctagtgctatcaaggtgattgatttcggtagcactacttatgatcaacatgatcagagttatgtggtatcgacgaggcactatcgggctccagaagttatattgggtatctatcgtgtctattgaaaagcttttcctagttcagctcgatttggtgatattttatgattgtgtggatcttgttcaggacatggatggagttacccatgtgatatctggagtgttggttgtattcttgttgagctttgcacgggtgaggcgttattccagactcacgaaaacttggaacatctggctatgatggagagagttcttggacctttgccgtaccatatgcttaagagggcagatcggcactctgacaaatacatcagaaaaggacgcctgaattggcctgagggttgcacctcgcgggagagcatgaaagctgtgatgaaattgtccaggcttcagaatctggtgatgcaaaatgtggaccaggctgcgggagatttcattggtcttttgcaagggctcctgaagtatgacccagcaagccgtttaacagcacgagaagcactgaggcatcctttcttcaccgaagggtttgggcgaagaagatgatacgtccttgaagcagaccttgtttgtcctctgtctctgaccaaactgtatataaagctgaaatggagctgtttcaatcttgtttgaaacgtcgtgtaactatagttgtatcacaagggaagtcagacggatactttttactaatcctgacttgtttgagttttgcaagccaattcaatgaaagtttgggttgaa

SEQ ID NO: 32240 - DNA, 2983 bp, Zea mays; identical to SEQ ID NO: 31924
  Clone ID: UC-ZMFLB73278D06_FLI

SEQ ID NO: 32241 - DNA, 1754 bp, Zea mays
  Clone ID: UC-ZMFLB73278E02_FLI
tgcttggcactcctcgccccgtgcttggattcttgcacttggtgcttcccttctcctacctcacatcacccgcccagatccaatccacacgagatttgcgacgctccggcctcccggcacgaagcctttctagggatcgccactcgccacacgccggccggggcgaaaaaagctcttcttggagcccttctgcttggcctctccctctcttctctcccggcgtcattgtcgccgctgcctgcgagcaacaacaattatggccgccgcgacgtcgcgcgggccagcgtcggtcgccatctgtgcgctcgccgtgctccacgcaatggctgcgctgtgcgactccgccaccgcggcggcggcgacgtgcgcgggcctggccccggccaagcaccggccggaggtgatatccatcgccgacttcggcggcgtgggcgacgggcggacgctgaacacgtgggcgttccgcaaggccgtgtaccgcatccagcaccagcggcggcgcggcggcacgacactgcacgtgccggccggcacctggctcgccggcagcttcaacctcaccagccacatgacgctcttcctcgccagaggcgccgtgctcaaggccacgcaggacacgaggggatggccgctggtggagccgctgccgtcgtacggccggggcagggagctgccgggaccacggtacgccagcttcatccacggcgacggcctccgcgacgtcgtcattacaggtgacaggggagtcatcgacgggcagggtgaggtgtggtggaacatgtggaggaggcggacccttgagcacaccaggccaaaccttgtggagttcatgcattccaccggcattcacatctccaacatcgtcctcaagaactcacccttctggaacatccatcctgtttactgcgacaacgtggtcgtaaccaacatgatgatcttggcaccacgtgactccccaaacacagacggagtcgatccagactccagctccaacgtgtgcatcgaggactcgtacatatccaccggcgacgacctggtggccatcaagagcgggtgggacgagtacgggatcgcgtacgggcggccgagcgccggcgtcacggtccggcgcgtgaggggctcgtcccccttcagcggcatcgccatcggcagcgaggcctccggcggggtgcgcgacgtcctggtggaggactgcgccatcttcgacagcggctacggcatccacatcaagaccaacgtcggccggggcggctacatccgcaacgtcaccgtcgacggcgtgcgcctgaccggcgtgcgcagcggcgtccgcatcgccggcgacgtcggcgaccaccccgacgcgcacttcagccagctcgccgtgcccacggtcgacgccgtgcgcatcagcaacgtgtggggcgtcaacgtccagcagcccgggtcactggaggggatccgggcctcgcccttcacccgcatatgcctctccaacgtcaagctcttcgggtggcggagcgacgccgcctggaagtgcagggacgtgcgcggcgctgcgctcggggtgcagccgtcgccctgcgccgagctcgccaccagcttcgcgtccgcacggtcctcatgcagctagttagtgtagtgatgcctagctaattaatttctgaattctgatgatgggtgtgcttttaagtttgggctttgttttacttattctatggcaccgatgtctgtctgtctgtctttgcttgctcaatcacttactttaggcttcc

SEQ ID NO: 32242 - DNA, 593 bp, Zea mays
  Clone ID: UC-ZMFLB73278E04_FLI
gagaatgccgttcaagaggttcgtggagatcgggcgcgtggcccttgtgaactacggcaaagactacggccgcctcgtcgtcatcgtcgatgtggtcgaccagaacagggcacttgtggacgcccctgatatggtcaggtgccagattaacttcaaacggctctcacttactgacatcaagattgacatcaaacgcgttcccaagaagtcaaccctgatcaaggctatggaggaagctgatgtgaagacgaagtgggaaaacagctcatggggcaagaagctgattgtccagaagaggagggctgcgctcagtgactttgacaggttcaaggtcatgctggcaaggatcaagaggggtggtgctatcaggcaagagctcgccaagctgaagaaggcgtccacggcttaagtcccttttggtggatggcatgttagtttttggtttcatgtttcatcagcattttgttttgagtgttgtcaaagccagaattagtaatatgtttcatgtgtacccttttcaaacttcatcaagaatgggtgtgctctggatattttgtcgggaatgatatgaaatacttaagttagcttgcgac

SEQ ID NO: 32243 - DNA, 1432 bp, Zea mays
  Clone ID: UC-ZMFLB73278F05_FLI
ggtcgtcgccgacgaccacttcaagatccacctcaacgccctcgtccccgccgccgtcgagcgcctcgacgacggcaagcaacccgtccgcgacgccgcgcgacagctcctcatcacgctcatggaggtttcttcaccaacaatcatagttgaaagagctggtagttatgcatggactcataagatttggagggtgagggacgagtttgtacgtacggtggcatctgcagttgggctatttgcttctacggagatttccttgcaacgagttttgctttcacctgtcctgcaactaatgaatgattcgaaccaaagtgttcgagatgctgctatctcttgtattgaggttagttgattccatattcgatactgtatagacctgtttcagccgacatttttcttttttcccttacacccatgatgactggtatgatctctatttctattgatcttgttcaatttcccattagttccatcccacatttacaagctggagagactgaatcattttgtatgacaacattcattgtagctccaagcccctttgcttctttgaattgttttagtcccttgtgctcagattcatcttttctttcatctaaactattcagtgttcacagttattggctgggacacacacctgctatctaggcagcataaagtttttctagtaagccttcatttgtttttcactacaggagatgtacaagcacatgggatcacaatttcatgaagagttgcagcgccataatctgccttcatatatgctaaaagaaataaattcaaggttggataaaatagaaccaaaggttcgatcatctgatacagcaatgcagtataaggctgtagagtctagaggcaatgctgggatgtagcctgttggtagtgggacaccttcaggttctgttattgatctggaaaatgaggaatcaggttcaaaaggtaaaaggccattaggatgggactccatgaaagcatcaaggaagaaggcaatgtccagtttcctcccagtctactgactaccttttaagaattcatgacattcaaatagcaagactgaagcaaagtgaagaaaaatcaggtaagaaacaacagaatattgagttcttgaaggaagttgaactgaaaaagttggaggtccaaaccaaggaactagaaatgcagcaaaccaaaatgatgattgaagaaaggatccgaaaggacgcagagctgaaggaactcctagctatggaatgttttaccagaggatgtgagacctgtatacatcgcgaggagaaaaggtttaatcgagtttttcatcaacaatcctgtctgaagagtactattgtatttcataatttgttgcgaacctagtgtcggcgtaacgtggtccggtgtgttcggacatatgtcatttcgagatttttgaacatttgcttaattgtttgagaac

SEQ ID NO: 32244 - DNA, 1603 bp, Zea mays
  Clone ID: UC-ZMFLB73278F07_FLI
cagaccctcaccaaccaggcaaccaaaccttctccgatggccgcgcccgtgtcgcagccgccggtgtccgccagggcgtccacacggtttctcccccgcgggataggcgcgctcccggagtccgctcccacgtccctccggttatccgtcggccgccgtcgccgggccgccagcctagaggtgaaggcatcgggaaatgtgttcgggaactacttccaggttgcaacctatggcgaatcccatggagggggtgttggttgcgttatcagtggctgcccacccagaattcctctcactgaggcagacatgcaagtagaactcgatagaagacgtccgggtcaaagtagaattacaaccccaagaaaggagactgatacatgcaaaattctatcagggacacatgatgggatgactactggtacaccaattcacgtctttgtcccaaacacagatcaaaggggtggtgattacagtgaaatgtctaaggcgtacagaccatcccatgcagatgcaacctatgacttcaagtatggagttagagctgtgcagggaggtggaaggtcatcagccagagaaaccattggcagggtggctgcaggagctcttgcaaagaaaattctaaagctcaaatcaggagtggagatcttggcatttgtttctaaagtgcaccaagtcgtacttccagaagatgcagttgattatgagactgtaaccttggaacatatagagagcaacatcgttagatgtcctgatctagaatatgcagagaagatgattgctgccattgatacggtacgagttagaggagattcaattggtggggtcgtcacatgcattgcaagaaatgttcctcgtggtcttggctctcctgtttttgacaaacttgaagctgaactggcaaaagccatgctttctcttcctgcaagcaaggggtttgagattggcagtgggttcgctggtacggactttactggaagtgagcataatgatgagttctatatggatgaggctggaaatgtgaggacacgaactaatcgctcaggcggtgttcagggagggatatcaaatggtgaaattatttacttcaaagtggcttttaagccaacagcaactatcggaaagaagcaaaatactgtgtcaagggagcatgaggatgttgaacttttggcaagggggcgccatgacccctgtgttgtccctcgagctgttcctatggtggaatccatggctgcgctggtcctgatggaccagctcatggcgcatattgcccagtgtgagatgtttccgctgaaccttgccctacaagagcccattggctctgctagcagtgcatctgaactgtcaccaaacctatcataatgtttgtcgtggaacatgtcccagctttccttctatcgaaattctggtctttgctaagcagtttgcaattcggaacccccataaaccctcgactattgtacctagagataaagtgaacggatatcaagatagaaatgcattaatgtttttgtgatgtgtagtataactgatatttaccccttttctttttttgagagaggacgcatgatgtcgtttgagcaataaagtttaatttgggagagat

SEQ ID NO: 32245 - DNA, 3086 bp, Zea mays
  Clone ID: UC-ZMFLB73278G05_FLI
gtcgctgaccaacccgccgccgtcctggaccggcaccgacgtctgcggcggcgtctccttcagcggcgtcacctgcaacggcgccgcccgcgtcaccggcatcaacctcgccaagctgcatttatccggcaccctttcctcgtccctcgccaatctcaccgcgctccaatcgctgcagctccaaggcaacgcgctggagggcgacctgccctccctggcccagatgggctccctcgagaccctcgttctcgacggcaacgccttctccaccctgccgccggacttcctcgagggtctcccctcgctgctcaagctcagtatggacgacctccctctcgagccatggagcatccccgacgctatcgcggggtgcgcgatgcttcagaccttctcggcctccaatgcctctgtctctggccccttcccggcggttcttgccaacctgacgtcgctacagacgctgcggctgtcgtacaataaccttaccggggtcctgccggtggggttagaggcgttgggctcgctggagacgctgcagctcaacagccagaggtcgaacggcatgctgtcagggccaattgacgttgtggcgaagttgccgagcttgaagacactgtggcttcagtccaactcgttcaccggcccgatcccggagtttgatcccaacacgcagctggagactttcaatgtcagagacaacagcctcaccggaccggtgccaccctctcttgtagggatcacaagccttcaggatgtggcgctgtccaataactttcttcaagggccaaaaccaaaattcgcagctaagactgtggatattgattctgggaacgggttctgtcacgaagaccctgggccatgcgatccactggtgaccactctgcttggggtggcttcagggtttggatacccattgcagctcaagaagtgggcaggcaacaacccatgcgatccatggcctggtctttcctgcatcaaaatggatgtaactcaaatcaaattgcctcgccggaacttgtcagggcttatttcaccggcttttgcgaacttgactagacttcagcggctggatctgtctaacaatcgacttactggggtaataccagatgctttgacgacactgaaaagtctcaattatcttgatgtctcaaataatcgccttactggacaagtgcctgagttcaagcagcatataaagctgatgactgcaggcaactcgtttggggaatcaggtggtgatagtggagggggtggctccaatgttcggtcctcatcttcaaatcctacaggttcacataactcaaagtcaaatgcgggaatgatcgttggaattcttctagttgtcattcttcttgtcatttgtgttgggcttttcctacatcatcgaaggaacaagaatgtggacaagttcagtcctatctcaacaaagagcccttctggtgaatctgaggtgatgaagattcaggtagttgggacaaatggccatagcaacataagtggttctgtaggctcaactgagctttacagtcattcaagtgctgacaacacaagcattgctgacctcttcgagtcccatgggatgcaattaccgatgagtgtgctactaaaggccacaaacaactttgatgaggactacatcttaggtacagggggctttggggtggtttttaaggggactctcaatgacaagctggttgctgtgaagaggtgcgacagtggcactatgggaactaaagggctgcaagaattcatggctgagattgacgttcttaggaaggtgagacatcggcacttggttgcattgcttggatactgcacccatggcaatgagaggctcttggtctatgaatatatgtcaggaggaacactgcgccagcacttgtgtgatcttcagcagagtggttatactcctcttacatggacacagaggatgacaatagctttggatgttgcccgggggatagaatatttgcatggtttggcgcaggagactttcattcatagggatctgaagccttccaacatattgcttgatcaagatttaagagccaaggtttcggactttggattggtcaagcttgcgaaagatacagataagtccatgatgacaagagtagcagggacatttggataccttgcgcctgaatatgccactacaggaaaggtcactacaaaagtagatgtgtatgcatacggtgtgatactgatggagatgattacgggaaggaaagtacttgatgactcattacccgatggcgaaacgcatctcgtaacgagcttccgaaaaaacatgctcgacaaagagaagttcaggaagtttttggaccccaccctggagctcagcgctgaatcttggaacagcctgctggaggtggccgatcttgctcgccattgcacggcgcgggaaccgcaccagcggccagacatgggtcactgcgtgaacaggctttccagcctagtggaccagtggaagccaaccaacattgttgatgatgacgatgaggagggtgggacaagcgagatgggtcttcaccagcacctagaaatatggagatgcgatgatttcactatatcggattcggattcattcagcgcacacaacacatcaaggaagtaccattgacaattagcgaggcttttttttgtcatacatacatataaatgaggaaccatggtgtggcacatcaagaggctccccagtccccacacgtctggatcacgaacagctttgaaggtcaatgtgccagccagtcaggttgtagttagcgcattgaaaacaaggttacttgataatcagcatcttcattcattgaatgtctgctaaccaggctcaaacttgagagggaagtcatgataccagaaaacttgtgctgtatctagcttagcctgtttatacaatttggtcactttggacactgagaaacattttgttcttgaatggtgaagagggaaaagagatgaaagaaaccatagcttcgccgaaggcgagttctggtggttagttttttaggatgtagagggttgccttttgtgtacaaccaaccatgatttcattattatttatctagtatctgtatttgctctgt

SEQ ID NO: 32246 - DNA, 1004 bp, Zea mays
  Clone ID: UC-ZMFLB73278H01_FLI
ggcgagaacgcactccgtccctctcctccaggaccgcccgctcttatcccgtttctcccttctctgggctcggagaatcggagatggcgtccagcgcctctcggttcatcaagtgcgtcacggtcggcgacggtgccgtgggcaagacatgtatgctcatctgctacaccagcaacaagttccccactgattacatacccacggtgttcgacaatttcagtgcaaatgtcgttgtggatggcaccacggtgaatttgggcctgtgggataccgcagggcaggaagattacaaccgactgaggcctctaagctaccgtggtgcagatgttttcgtgcttgcattctcacttgtgagtcgagctagctatgagaatatcatgaagaagtggataccggagcttcagcattatgcacgtggggtgcctgttgtgttggtaggcacaaaatttgatcttcgtgaagacaagcactacttgatggaccatcctgggttggtgcctgttaccacagcacaaggggaggaacttcgtagacaaattggtgctatgtattacatcgaatgcagttcgaagacacagcagaatgtcaaagctgtgttcgatgctgccatcaaggttgtaatccagcctccaactaaactaagagaaaagaagaaaaagaaatcacgcaagggatgttcgatggtgaacatcttatctggaagaaaaatgctatgcttcaagtcctgaatgatcgaagggggtcttacctgaactaataccatgagtgtgaccccaagttcgcgaagcttgaaatcttgatgcgctcgttgcgcatgtatatttgcacctttggttattaatcactagaggtagatgattgaaactaatctgcttaaccaatgtgcactgctgggcgctggcgtggttagctatatcagttaggcagttcgacagaggtcaaagagattgagattttgttctttcttggcaatgtcacagcttttgtgaatctggtctcatcat

SEQ ID NO: 32247 - DNA, 1422 bp, Zea mays
  Clone ID: UC-ZMFLB73278H10_FLI
gcaggccaaaaggatgaggcttactttgcagccaatgctgctgctcaggcctcaaggagatcatcacctagagtgacaaacgaggaggtccaaaaggctgcagctgctttgaagggttctgaccaccgccgtgctaccactgttgctgctagattggatgctcagcagaaaaagctcaaccttcctgtccttcccacaaccacaattggttcattccctcagactgtggaactcaggagggtccgtcgtgagtacaaggcaaagaagatctccgaggaggaatacatcagtgccatcaaggaagaaatcagcaaggttgtcaagatccaagaggagcttgacattgatgtgcttgtgcatggagagccagagagaaatgacatggttgagtacttcggtgagcaattatctggttttgcattcactgccaacggatgggtgcaatcttatggatcacgttgtgtgaagccacccattatctatggcgatgtcagccggccgaaccccatgactgttttctggtccaagacggcacagagcatgaccgctcgtcccatgaagggaatgttgactggtccagtcacaatcctcaactggtcatttgtcaggaacgatcagcctaggtttgagacatgctaccaaatagctcttgcaataaaaaaggaggttgaggatcttgaggctgctggtattcaggtgatccagattgatgaggcagctctaagggagggtctgccactgcgcaagtcagagcatgcattctacctggactgggctgtccactctttcagaatcaccaactgcggagtccaggacaccacccagatccacacccatatgtgctactccaacttcaacgacatcatccactccatcatcgacatggacgcagatgtgatcaccatcgagaactcccggtccgacgagaagctactgtccgtgttccgcgagggtgtgaagtacggagctggaatcggtccaggtgtctacgacatccactcgcccaggatcccctccaccgaggagatcgcggaccgcgtcaacaagatgctcgccgtgctcgacaccaacatcctctgggtgaaccctgactgcggtctcaagacacgcaagtacacggaggtgaagcctgccctgaccaacatggtctccgccaccaagctcatccgcacccagctcggcagcgcgaaatgagtcagatttggtagatccatggtttgttgaacacaaaagccagcagggtcatttgtttcgaataatttgggtccttactcctgttccatggcgttaggttagcctcattggtgttggtggggtacggcgttacgtgtccgtgttctaagtttggagtgtgtgtttctcttttttgttggggtttgtgtgctttggttatataaacagaaatggagtacgcagtcttcg

SEQ ID NO: 32248 - DNA, 1331 bp, Zea mays
  Clone ID: UC-ZMFLB73279A06_FLI
cccttgctctgctcctcctgcttccagctgcgcgggcggcgacgttcaccatgaccaacaactgcggctacacggtgtggccggggctgctgtcgggcgccggcacggcgccgctgcccacgacggggttcgcgctggcgcacggcgcgtcggcggcggtggacgcgcccgcgggctggtcgggccgcgtgtgggcgcgcacgctctgcgccgcggacgccgccaccggcaggttctcctgcgccacgggcgactgcggctcgggagccgtccagtgcaacggcggcggcgccgccccgcccgccacgctggcggagttcacgctcggcggatccggcggcctggacttcttcgacgtcagccttgtggacggctacaacgtcccgatgctcatcgtccccgcgcagggcgcgggcggtggtggcagcagcagcagcagcaacgggtccgcgggcggctcgagcaagtgcatggccaccggctgcctcgtggatctcaacggcgcgtgcccagctgatctgagggtaatggctgcgtcggcgtcggcgtccgcgtccggcgccggaggggctgtggcgtgccgcagcgcgtgcgaggcgttcgggtcgccgcagtactgctgcagtggcgcctacggaaaccccaacacgtgccgcccgtcaacctactcgcagttcttcaagaacgcttgcccgcgcgcctacagctacgcctacgacgactctacctccaccttcacgtgcgccaccggcatcagctacgccatcacattctgcccgagcaccaccagcggcaagtactccggcgagaacccgcaggccgcgggcgtgcagcccacgaacggctcgatggtctacctcggcggcgagcaactcgccacctcggtcgccgccgcggcccgtgcgtcacagctcctcctagccgccgccgccctcgccgccgtcgcgctgctctgagcttcgttcccgacgtggccgtgtgaagtcggcggctcgagtctttgtcctctttccggcgtgacggggccagcgataaaagattcgacaaccagcagagaggctcagacgagacgagtgacgacggtgctgctacgactaaccgagagaaaaaaaacaatgaaatataggtagcttatggcgtagggtttaggataactggtagcatgagttttaacctttgcattcttctccacgcttcctcgatttgttgagccagccgaaagatgtattctatatttctatccatcgttgttcgccgtgatgctatagattacagcaatgatgattatttactctttaccagttgaacatagaccctatttgtttcggatt

SEQ ID NO: 32249 - DNA, 1244 bp, Zea mays
  Clone ID: UC-ZMFLB73279A07_FLI
gtaacttgaagcttgctgattttggccttgcaagatcattctcgagtgatcacaatggcaaccttactaaccgtgtgatcactttgtggtatagacctccagagttgctacttggaagcacaaagtatggcccagccgttgacatgtggtcagtgggctgtatttttgcagaacttctcaatgggaagccaatattgcctggaaagaatgagccagagcagctgactaagatcttcgagctttgtggtacccctgatgacacaatctggcctggtgtcacaaaaatgccttggtacaacaacttcaagcctccccggccattaaagagacgagttaaagatttctttaagcattttgatcgacatgcactggatctgttagagaagatgttgactttagatccatcacagaggatatcagcaaaagatgcacttgatgcggaatatttctggactgatcccttaccatgcgatccaaaaagcttgcccaagtatgaggcatcgcatgaattccagactaagaaaaagcgtcagcaacagaggcaagcagaggaagctgcaaagcgtcaaaaacttaaccatcctccaccacattctcgtttgcctccactccagcagcctggccaagcacatcctcaaatgaggcctggccagggtatgcacaatgtgcctcctgtggcagccggcccaggccatcactatgcaaaaccccgaggaccaggaggccctaaccggtatcctcagggtgggaatcaagggggaggctacaatccgaaccgtggagggcagggtggtggctatggcagtggcccttatccccagcaagggcgagggcctccttaccctggagcagctggcccacggggcagcggtggcagtggctatggggctggagggccaaactaccaacagggtggcccatatggtacgtccggtccaggccgaggaccaaactactctcaaggtagtggttcccgcaaccaacagcagtatgggaactggcaataatgtggcagtattatgccattgatatgtatgtatttgcagaatgcatttgcagcacctttgcactttaagcatgttgtgagatgtatgtcatgatagtactctaattcagtccagatgtctcaaaaagatgtttatgactccagatgtagattatgattatcgagaaatgttttgtacttagaacccttgattcacttattagaagtatgccacaaagacctagcagagcttgctatt

SEQ ID NO: 32250 - DNA, 2265 bp, Zea mays
  Clone ID: UC-ZMFLB73279A11_FLI
tctactcgctattgctgaggagacattggcggagttcatgtccaaggcgaccggaactgctgtcaactgggtgcagatggttgggatgaagcctggtccggattccgttggaatcatcgctgtttcgcacaactgcagcggcgtagcagcacgagcttgcggccttgtgagcctcgagcccacaaaggttgccgagatccttaaggatcgcgcatcgtggtatcgcgattgtcggcgtgttgatatcctccatgttatccctacgggtaacggtggaacgattgagctgatctatatgcagacttatgcactgacaactctggcggaaccgcgcgacttttggacactacgatacactagtggtcttgacgatggcagtcttgtgatctgcgaaaggtcattgacccactccactggaggtccttctggacctaaaactccagattttataagagctgaggtgcttcctagtggttatctgattcgaccttgtgatgggggaggttccatgatttacattgtggatcatgttgatctgaatgcttgtagtgtccctgaggttcttcgaccgctctatgaatctcctaagatactggcacaaaagatgactgctgcggcgttgcgtcacattaggcaaattgcacacgaatcaagtggtgaaacgccctatggtgctgggcgacagccagctgttctcagaactttcagtcaaaggctcagcagaggcttcaatgatgctgtgagtggctttccagacgatggctggtcttctttgttgagcagtgatggtgctgaggatatttcaattacaatcaactcatctccaaacaaacttattgggtctgatgtcagcccttccccattcttttctgccatggggggcggcatcatgtgcgcaaaagcgtcaatgctactgcagaatgtgccacctgctctacttgtgcgatttttgagggagcatcgctctgaatgggctgaccctggtgttgatgcttattccgctgcctctctgagggccaacccatataatgttccgggtttaagggctggtgggtttatgggcaaccaggttatactaccccttgcacgcaccgtggagcatgaagagtgcttggaggttattcgacttcaaggacatggctttagccatgacgaggttcttatgtccccggatatgtttcttctgcagttgtgcagcggcatcgatgaggatgcgccgggtgcttgtgcacagcttgtcttcgctcctatcgatgaatcttttgctgacgatgcaccgttgctaccctctggcttccgtgtgataccgcttgatgctaagacggatgtgccatctgccacacgtacccttgaccttgcttctgcgctcgaggtcggatcaggcggaggtctgtgtgctttaagcgatagcgggtcaggcacgcgcagcacgaggtcggtcctgaccatcgccttccagttctcgttcgagaaccacctccgcgagagcgtggcagcgatggccaggcagtatgtcagggcagtgatggcgatcgtgcagagggtggccatggcgatttctccctctcgccttggcccgcatgtcgaactgaagcatccgccaggctctcccgaggcactcgcactagcttcgtggattggcaggagctacagggcgcacactggaacggagatccgctggtcggacactgaagacgcggcgggctctcccctgacgctgttctggaagcacagcgacgccataatctgctgctctctaaagccggctttcacactcaagttcgccaacagcgccggcttcgacatactggagacgacggtcgcgaacgtccaggacctgcagctggaggcggtccttgatgacgggggacagaaggccctggtcgcacagctccccaagatcatgctgcagggcctggcgtacctccccggcggcgtgtgcaggtcgagcatggggcggcaggcgtcgtacgagcaggcggtggcgtggaaggtggtgggcgacgacggcgcgccgcagtgcctggcgctcatgttcgtcaactggaccttcatctgatgctcctccgctcttgacgttcacagcctcgtgcctcgctcggcagcgctagatcggttgccgcctttatcctatcctatccgactacgtattactagttgctttccgttgcacctgtgtgctacaactgctcgagacaatgcccctgctgtctgtttatggcctaagtctactgtggtggatcgggagttggagaacaaaaaaag

SEQ ID NO: 32251 - DNA, 2749 bp, Zea mays
  Clone ID: UC-ZMFLB73279B08_FLI
cttcaccaggagtgagcccatctacttctcctagcagtggcagtttagttgctagatatgcaatggagtccagcaagcaattagcttctggtattattgacatgggatataaaacattttcaaagtaccgccaggaacttctaccagatggttctaactcccctttgtcatcaagcccaggcaggagatctggtaaaattccttccagtgtgcatccactggaagctgacaatgcaggaatggtagtcatcaaggatttcacttccaaagctgtggtctcacagtttagggctcacacaagtcctatatctgctctttgttttgatcctagtggaacacttttggtgacaacctctgttcatggccataacataaatgttttcaggatcatgccaacttgcgttgctaatggcacaggcgcaacgcgctatgattggacagcatctcatgttcatctttataaactgtatcgtggcatgacatcagctgtcatacaagacatctcgtttagtcattttagccaatggatatctattgtttcatctcgtggtacctgccatatttttacattgtccccatttggtggtgatgccagcctgcagccacagaattctcacagtgatgggccacctcttgcgccatgtcagtcaaggccatggtggtcaaagccgtcctttctgatggaccaacagcttcatcaagttccctcaactgtgacaaattcggtagtcagtaggataaagaataacaattctggttggctaaatactgtcagcaatgtggctgcttctgcaagtggaaaactatctgtaccatctggcgctgtaactgctgtttttcataattccatctaccagggttctttgccagttccatctaaggctaatgctttagaacatctactggtgtattcgccatctggtcatgttattcaacatgaacttttaccttcttcaggttctgagtcctctggtagcagcccaagagttggttcaggtcataactcgcaactccaagatgatgagatgcatgttactgctgaaccaattcaatggtgggatgtgtgccgtaggacaaactggcccgaaagagatgaaaacattgcaaacattgtactgtataaccaaagaagcagtatgatggctatggatgtttctgactgtgaagatagcgagcattcggattccactgcatcaaatgatggtatctctgggaaagagattatgagagtccgagaaaggtcaagctggtatctatctaatgcagaagtacagataaactcatggcggattcccatctggcagaaatctaagatttgcttctatgtgatggaccatcctgctgcagagtcggtcgaatcagttagcagtggtggagaaattgagatcgagaagttacctcttcatgaggttgagatcaggagaagggaattgctccctgtattcaagcagttcctatattctgagcgacattctagtgataggaacgttgcaaatggaaggagtaatgcaaatggaggttttcagaatgtcttgtccgtcatcaatgatgtacaatatggctctgtaaaggataatggtgaatatgaaaccaaatcggtggctcctttgtctgggttttacactgatacgagggaaacggttaacacaaatggtctagctacgcaaacattctctggacctggctcagctgttaatcttcagcaagtggggaagcgcaattctattgaatctcctaatgctgcaattttggctggcaaggcagagaatgatagcaatggctatatatccacgccacctgaaacaaatgcatctatcagatccttgagcagctattgtctcttggatggatctgttaacggaatgccgtctcctgcaaatagcgcatcatgcaagcctgaaacaaccaataattctgtgctcagcaatgttgcaagcactgacgtaacaaatgggtgtctcaccactgtcgattctggacagcaggaggcgtctgattctcacagctcagtggagtttacccagtatttccaagagggctattgtaaaatatcagaactcgatgactgccgtgagttaactgaagctgttactgatgctgacagcagcagcagccactgcgagagagagaagcctgaggaagatggggataacgatgacttgcttggaggagtttttgccttcagtgaagaaggttgaacttactatagtgccttgagattgagatacaacagaaaaaaagtgctcaaaacatccagtgtgccatagtatgtagacgatggtgaaattctactaggttttcatggaataaagctgtgcggaatcgatcatctgccatggtacatagtacttttcaaggtaaaccttgcacctagttctcaaaatatgaggccaagattcctccaggcaatttactaatctgcggatccacgttgaaacttggaaggagttggtgttgtcgagaagttgctattgcctgccgcaacaccacttccttatagtgttggtttgtacatataccgtgagacccatttgtttcgtgccatacttccgttccggggcatttgggtggttctgaatcctgtaccttggcagccatatttgttgaccgtctctgccagggcctgtgaatgttccatgtttatttgtacatatacattgtgttttgtcggaaaaaaaggaaaaaaaatctagcgacaattgatgtgatataactttataaacattcagtaaagaaaattgcattcacg

SEQ ID NO: 32252 - DNA, 1061 bp, Zea mays
  Clone ID: UC-ZMFLB73279D05_FLI
ctcgaccttataagagggaagaactttctagtgctgatggattcttgcttggaaggtcatgtatccagctccgatggaactgacttgatgcgattagcatcccgctgcttgcaatatgaagcacgtgaccggccaaatttgaaaacggtggtatccggtctcgaatgtctccagaaagatgtttctactccttcacacactttgctggggatccaacatgataataaaaactcagatcgaatttctttatccgctattgggaaagcttttgccagagcagacctgaatgaggtgcacgaaatattactgcatgatggatatgatgaggatgacactgctaatgctgagctatctctccagtcatggaatgatgatgtatctgagagctttgttgttaagaggcatgcagacaacgcctttaggtctaaggattactcgactgcaattgagtgttactcaaggttcatcgactcaggtgcaggggtggctccaaccatgctggggcggagatgcttcgcatatgtggtggctggcaacccacaggaaggccttgaggatgcaaagagagccgaggttattgcatcggactggccgatgggacactacctgcaggccttggcacttcacaacctgggaagggaggctgaaagccaagaagcactgaagaatggcactgccttggaagctgcaatgaatagtagagctagaactgtatagccctgaatttgtgataccctgtcctgcttgtacctagatcgcctccctccaatgcttcgtcaccagtaggggctgtttttggtattccctaacttgtatcggtatttcccctagtttcacaagtcgaaaaaactcctaggggctagtttggatactttgggattagagtgttttgaagggattggagagggtgtaaatccctaatagatcaaatactctctcaatacatctcaatccactccaatcccactcgttactagagtatccaaactaggcctaggctggctgttgttacacctccaatatatttatgaatacaggaatgggcaactagcattctgttg

SEQ ID NO: 32253 - DNA, 644 bp, Zea mays; identical to SEQ ID NO: 23832
  Clone ID: UC-ZMFLB73279E03_FLI

SEQ ID NO: 32254 - DNA, 1640 bp, Zea mays
  Clone ID: UC-ZMFLB73279E05_FLI
gccgcccggtccccggggctggccggtgctgggcaacctgccgcaggtcggcgccaagccgcaccacaccatgtgtgctatggcgcgggagtacggcccgctgttccggctccggttcggcagcgccgaggtggtggtggccgcgtcggcgcgggtggcggcccagttcctgcgcgcccacgacgccaacttcagcaaccgcccgcccaactccggggccgagcacgtggcgtacaactaccaggacctggtgttcgccccgtacggctcccggtggcgcgcgctacggaagctgtgcgcgctccacctcttctccgccaaggccctggacgacctgcgcggcgtcagagagggcgaggtagcgctcatggtgagggagctcgcccggcagggagagcgaggacgggccgccgtggcgctgggccaggtggccaacgtctgcgcgaccaacacgctggcccgggcgaccgtgggccggcgcgtgttcgccgtcgacggaggggagggcgccagggagttcaaggagatggtggtggagctgatgcagctcgccggggtcttcaacgtcggggacttcgtgccggcgctcgcgtggctcgacccgcagggcgtggtcggcaggatgaagcggctgcaccgcaggtacgacgacatgatgaacgggatcatcagggagaggaaggccgccgaggaaggcaaggacctgctcagcgtgctgctggccaggatgcgggagcagcagccgctagcggagggcgacgacactaggttcaacgagactgacatcaaggcacttctcctgaacctcttcacggctgggacggacacgacatccagcacggtggagtgggcgctggccgagctgatccggcatccggacgtgctcaggaaggcccagcaggagctcgacgccgtcgtcggccgcgaccgcctcgtctccgagtcggacctcccgcgcctcacgtacctcacggcggtgatcaaggagacgttccgtctgcacccgtccacgccgctgtcgctgccccgcgtcgccgccgaggagtgcgaggtggacgggttccgcatccccgccggcaccacgctgctggtgaacgtgtgggcgatcgcccgagacccggaggcgtggcccgagcctctcgagttccggcccgcccgcttcctcccgggcggctcgcacgcgggagtcgatgtcaaagggagcgacttcgagctcatcccgttcggcgccggccggagaatctgcgcgggcctcagctggggtctgcggatggtcacgctcatgacggccacgctggtgcacgccctggactgggacctcgccgacggcatgaccgcggacaagctggacatggaggaggcctacgggctcaccctgcagcgcgccgtgccgttaatggtccgcccagcacccagactgctgccgtctgcttacgcagagtagaaatcgatgctcgccggccatccatgccgtccgtatgcatggatgcatggtcaaataaataagcgttgtacgtgggtatcagtgtcacaaactcacaatgtgtatcatgtattgcttcgtcagtggcgtgtgtaagcgtccgatttttttttgtattttattctttttccagaaaaaaatcgccgttgaaatcccc

SEQ ID NO: 32255 - DNA, 1818 bp, Zea mays
  Clone ID: UC-ZMFLB73279G08_FLI
ccaagaacgggcggctgcagctgctcttcctgaacggcaaccgccttaccggagagctaccgaacgtcagcatgccgtcgctcaccgcgctaaacgtctccttcaacaacctcagcggcgagatacccaagagcttcggcggcatgccgtccacgtctttcctcggcatgccgttgtgcggcaagcccctcccgccgtgccgagcgccgggttcggaagcatcgccgtctcagcctcccactcccacgcttcggcccgaggcaccggccccgactgacaaccgcggacggggcaggcatcacctcgccggcggcgccatcgctggcattgtggttggctgcgcgtttggcttcctcctgatcgcggccgtcctcgtcctcgtgtgtggcgcgctgcggcgggagccgagaccgacataccgcagccgtgacgccgttgcggcggagctggccctgcacagcaaagaggcaatgagccccaacggctacaccccacgtgtctcagacgcgcgaccgccgcccccgccttcagtcccgccaccgccagccgtctccgccgcagccgtggggcggaagaagctcttcttcttcggtaggattccccggccctacgacctcgaggacctgctccgcgcgtccgccgaggttcttggcaagggcacgcacgggaccacgtacaaggccgcgatcgagtctgggccggtcatggcggtgaagcgcctcaaggagacctcgttgcccgaacgcgagttccgggacaaggtcgcggccatcggcgggatcgaccacccaaatgtcgtgcccctgcaggcctattacttcagcaaggacgagaagcttatggtgtacgagttcgtggccatgggcagcctttcctccatgcttcacggcaatcgcggctccggccggtcgccactgagctgggagtcgaggaggcgcatcgctttggcctcggcgcgcggtctcgagtacatccacgccacgggctccatggtcacgcacggcaacatcaagtcgtccaacatcctcttgagccgcaccgtggacgcgcgcgtggccgaccacgggctcgcgcacctcgtcaacccggcgggcgcggcgacgacgacccgcgtcgcggggtaccgcgcgcccgaggtggtggcggacccgcggcgggcgtcgcagaaggcggacgcgtacagcttcggcgtgctgctcctggagctgctgacggggaaggccccggcgcacgcggtgctgcacgacgagggcgtggacctcccgcgctgggcgcggtccgtggtgaaggaggagtggacgtccgaggtgttcgacacggagctgctcaggcacccgggcgccgaggacgagatggtggagatgctgcggctggccatggactgcaccgagcccgctccggaccagcggccggccatgcccgagatcgtggcgcgcatcgaggggctcggcggcacggcgtcgacgtcgacggcgacggcgcggtccggccggagtgcgtccgtggacgaggcggacgaccggccgctgaggaccaccggatcgatccgtcagagctgaggtccgtccgcgtccgatcacttgtgttattgtcactgacggaaggttctgaacaagggggaaaaaaagaagagatctttctgttctgtcttcttgcgcttgtcgtaggggcgttgtcgtgtgctgtttattctttcatgcgtctcttgacgcttgttcgccctcagatgaattctttcgttttagcagcggtgatgagtgtgcgctgatggtgtgtgaattggtggtgatagtaatgcaatgtgtaattgcttctagt

SEQ ID NO: 32256 - DNA, 2312 bp, Zea mays
  Clone ID: UC-ZMFLB73279G11_FLI
cgtgctagggttgagcggctacacgagcgtgctagggttgagcggggctccgcgggcgtgctaaggtttcgcgagcatggcggtggccggcgagcaggtgagggctcccgcctctaattccctcccgagctcctcgagcggccaagcgtctgtgtgtggccgtgtgggcgaaccacatgcgccagccaccgtgcgccctgggtgagcacgtgaggccagaggagaagcgcatgtacaagcagctgcgccagtttagcgcgagactgcagggtagtaggcaagccgcgagcgtgtgactgcagctgctagccaagtgagcgtgccactacaggacagcaaacaacgacgacagcaagcaaatgatccgttcagcatgtgctccctattcgaagtcccctggtacactttttttcctaaaattcccagagtccttatctgtcgggaattttggatggagggagtagtatcttgggctgatgaggatactctgattgttcatgttccataagttttgttatattgcggtgagagtttttgagaatgttcttctatttttgttctctcaaactggatgttaatttctgattcaaattctcctgtgttatgcatgtgctccttgtgcagagttggtacatttcctacattatatacctacttattcatttcaagttatctttactgaatatttgtttgtttgtttgtttatgaaactgttgtatcattgtggccataagttattttgggggataactttggttgcggatgattcgttcagcatgtcctcgtgctcttcacagggatcatgtccagactcacactgggctcgttgctcggccttgttgagctagagatcctccaacacagcggcaccgacaccaaggctcaggctagtacgatctgaatccctatccattccctgttgttacctcgttgtgctcgatctggttactgtcctatgtgcgggtttgttatattggtagtagggatcacattggtgtggctggttacatgaaggaatggagatgagaacgtcatatactctatcgtattctcaagtacctctgtaattttgaacattagagcgtctttggtgtatggtggtgaatttttttctcgctcgtatcggaagtctgctagattttgtaagtggcaataatgatagtgaggataaaatgtgatggtaacactaacattgacatattttttacatgcagaagtgtttgaaaaggaaagagaacaaacaaaaatgggtatagtcaggaataaggaaaagcattgtggatgggattcattcttttctatggttcacctcgttctggtgatatatgaaatggtacatcagataagtgggaagaggaagtataatgcaatggataatcataaaaagtgatcactctggagtatcctgtatctaccatttttatttactagggtagaatgcactttcagttttgtcttacctagtaatctttacagcgtgaaaggatctctagctagttgattagctggtctaagtagcactccttaggtttttagtttgactccccgtataaaaaaatttaggctgggttaaaaaatctcctgatttgtcccatgacaaaccattgttctaagcctcgaccccggtaatgtcttggtcattctcaaatgggctacgatgtcgctgctacgccaaagcataggtctaagactcgaccctggtgcggtattttagcatcccctttttagtttcaatagtgtattgttgttgtccctcaagtgttgtttattatttactttgtttgttgcagctgtcggccttccagttgttcaaaagcaacaccagcttcatgtcaccctattgttgtgtaatgttgctgccatggaggcacttcctatatttttgatagaatgtttcatcatgttctttttgtattattgtcagcgacatttgttcttgcctttggagagggatcatgtctaggctcacaacggggctcatgttgctcggcctcgtcgagctggagatcctcaaatgtagcagcaaaagcatctcaggagaccattaatagtatgaagagatcgatcgaagaaaataacctccttcatcaactattaagcttcaatcgaggccaagtgcctccatcttaagtctaactaaccactatagggcctacaaccttatagctgttatagtagcttgttacagtagctctagatttgaagttatatgattatttcaattatgcttaatgtataatactttgagttgaagttataggatttgatttggattttaagttaaagaatttgcagatatatgttttgaagtt

SEQ ID NO: 32257 - DNA, 841 bp, Zea mays
  Clone ID: UC-ZMFLB73279H10_FLI
ggaatgttgatgaccgtaaaaaatctggggttcaggcattgcaaataagatcttgctcccagtgtgccattttggagtctggtgtgttaaggcagcctatgcggtcaaggggactgcttgctcggccttatattcattcaatgcttgctatagcagcagtctgcgtatgcgtctgtgtattcatgcgagctttgctgcggatcaattctggaaaatccttcaagtgggagaggctggattacggtacaatataattgtggggacacacctgagccttgtggtattattaagttaacaagcagttgttatggagctattttggagccttgaagggtatggagattgtttcatgcttcctcgaaactcgcccatccgtatggctgagtggaataatgtaatatttttgctggacaattcctttacttcctgtgaaatagaagtgttaataggtgagcagccggagatgttaggggggtggcaaaacttggtaccaaatgtggagcttgagcagagttggaacatgtcatggcaagggccgtagcaactgcgctcccacaacatgatatgcatgcaatgcacaaaatgtcgatatggatgcaatccgcaagatggatgtaatcacagttcggggagaatgagcaagtaagtaaccttggtttcctttttgctgctgtaagctcgactcttttggttcatgtatcccaagaatgatgtttaatttatcttgctcactgtttcatatttttgtgtgtgtgtgtgtattaaatacagtacgctagcatgaatgtaccctatatcgactttagatagtagcaggggtaaatgaaaagaggctttgcat

SEQ ID NO: 32258 - DNA, 1032 bp, Zea mays
  Clone ID: UC-ZMFLB73280A08_FLI
accgaaccgcaagaggcgagcagcagccatggatcccgcggcaggaggcgccggccagcagcgccagaacaaagcttcggcgggcaagaaggtaaagaagggcggtggcagcggcgggagatggccggcggtcaagcccaagaaggatctccagatcaatcgcctcaagggcacccacctcctcaccattccagacttcttcacttctgcggaggcgaaggctttcattgatatcgctgagtcgatgggcttcacgcaccagggcagtttggggccactaaagggggaggcttacagagacaacgaacggatatctgtgacggatccattgcttgctcaagccatttgggaatcaggaataaacaggatttttacagacatcagcgtctctggcaaagtagcaacaggattgaatccaaatatcaggttctacaggtacactgaaggtcagcgttttggtcggcatatcgatgagagtgtctccctcggggatggttctaaaacgtattatacgcttttaatatacctttctggcaaaggaagtgcaaaggattcatctgggcaagctcttgtcggaggggagactgtcttttatgatcaaagaggtggagttgtcgctgaggttgctccagtgcaaggtatggcactcctccacctacatggcgccaaatgtatgctgcatgaagctcgggctgtgaaaaagaatgccaagtatgtactccgttcagatgttgtattttcttagctgaagaaatgcctcaacttgtttcagatcaacccgtctagggcataatggatctggggctgggaagtacttctagttactttccccttttgtaagttgtcatacaaagagtcctgtaaccttttcaatgttggaagtgattcttttggcatcagaaccgtgatctgttatctgttgatgcatttgctgttgtccaagtacaaaagaaatcattatatttagccgcaaacattggctgaaagttcagtgacgtcttgaagccgaataaattgcttctagtttttggt

SEQ ID NO: 32259 - DNA, 2183 bp, Zea mays
  Clone ID: UC-ZMFLB73280A10_FLI
ctctccccgccgcatcgccgccgccggaagcgcctccctcgatccagatccaggagatatgcctcgcaatgatgatcgctatgggaatacacgcttgtatgttggaagattgtctccccgcacccgttctcgtgacctagaataccttttcagcaaatatgggaggtaagcatcacattatatgcacatagaactattctgaaactcagagtgtgctggcgtgctgctttttgttatgtggtcggacaccagttatgctctactacctccgtttttatatatttgacgccatacaattccacttttacatgccgacgtcaaataaaaatgaacggagggagtagtatatatcatgagcacgtgatgttaactctgcatggttaaattttgtggtacacaactacacatcaatccagatataaaatacaatagcaagctaggggctttcctatcgtgttcaaaaaaaactcgacctgtgggggtaagaccgtctgtacaatattatattaagaagaccttctcacacaggtcaagaagaccttccacgcaggtcgagaaaacctctaaactcctgccccaccacccccacccatacacaatggcaccgtagcccaagtgagaacgaccgggccaggcctgtgctttggcttgggacaggcgaggggatgttttaacttttaaccacagcctgaaaattcgctcccacggggagtcaaacctagaacctgacaagtgctactcagaccacctaaccaactcgcctgttcataataggtagtttatgaaggtgttgggttttgtgatgcttgacatcattttgaggtttttgtggatggggtcatacaagtcttctgattttattggtgtatgttctgttacatcactaagcacaaaataaatgtttgacctgggcctatttgacttgaatgatcttgttgaaggtttttcggttttttacacaaccatggaggtgtggtggaagggtgcccttgatggaattggtggccatagttccaatgtttgtggaggactttggtgaagggcgcccttggtgtaatcttattgactgttgtagatgatgaagttgcaagttaatgtatttgagtacttcgactcacgtcagcttattgtttgtggcaaccatttccgcagaattcgagaagtggagttgaagcgtgactatgcattcattgaattcagtgacccccgtgatgctgatgatgcacagtacaacctagatggcagggacgtcgatggaagccgcattattgttgaatttgctaaaggggttcctcgtggttctggtggttcacgtgattacaacggaagaggacctccaccaggaacaggccgttgttttaactgtggagttgatggtcactgggcaagagactgtcaggctggtgactggaagaacaaatgctaccgttgtggcgaaaggggccatatagaaagaaattgccagaacagtccaaggaacctcaggcgtgagagaagctattcacggtctccatccccacgccgaggacggggccgcagccggagctacagcagaagccggagctatagccgatccagatccccgtctggatctcctaggggtggacgccgagaccgtgatgagaggagatcaaggagtcttagctacagcaggagcgcaagccctaggcgttctgtgtcacctgtaaaggaaaaggagcgcagccgcacacctgatggcagtaggagccccagcccaagggacaaggtgagcccaccaccaaaggataatggtgcccacaatggctcggaccgtgaagacagccctgggggcagggagatgagcaagaggagtcggagcccgtctgatggctaccgtagccctgtgggcaatgggcgcagcccgagccgtagcccaagccccaaggtcaacaatggtgatgacccaagccccaagggcaacaatggtgacgacccaagccccaagggcaacaatggtgatgacgagcaccgcggttcaccaagaggaagtcagtccccctgaactgaaaaactccccgtgcaatttggggagcagtgtgcctgatttgagaaaacaaactgtattttgccatttctcagacttgtgatctttttgagcaagaaaactcggtgtaagaatttgttgccctcgggtgtaagacagatttgtggtatttgagctg

SEQ ID NO: 32260 - DNA, 1523 bp, Zea mays
  Clone ID: UC-ZMFLB73280B03_FLI
ctcgttcccctccgctgtctcgcctctcccttggttcctcgcggcgacgactgggcgagcgcctcctcccctccctcactccctccgtgagctcctcgccggcggcgcgcgccgccgcccgtcgccacgtcttctccgctgacgtgggctcaccagatccaatgaaggctgccaacttgacgcaaggggaataaagatccaaataagtttttgacattgatctgtagccagtactgcaatggctacgaagcttgtggttctcggtatcccctgggatgttgacactgaagggttacgagagtacatggccaagtttggacccctagacgattgtgtcgtcatgaaggagcggtcttctgggcgatctcgcgggtttggctatgtaacattcgcctcagctgacgatgcaaagaatgttcttgattgcgagcatgttcttgggagccgtacattagaagtgaaggtagctactccaaaggaagaaatgaaatcacaaggatcaaagaaagctacaaggatattcgttgctcgaattccgcaatcggtggatgagtcgatgtttcgtagacattttgaagcttttggggaaattcttgatctttacatgccaaaggaacatggttcaaaagggcatcgtggaattgggtttatcacgtttcagagtgcagagtctgtggacaacatcatgcaagagtcacatgagcttgatggtacaacagtagttgttgatcgtgcgactcctaaggatgaagatgtcagataccccccgagtaggccatctcagggtggctatggtgcatataacgcatacatttcagctgctaccaggtatgcaactctgggtgcaccaacgctgtatgaccatcctggatcagcttatggaagagggtattatggaccctctcaagcagtgggcaagaagatatttgttggtagacttccacaagaagcaaacacagatgatctaaggcagtactttggcagatttggtcgaatcgtagatgcatatattccaaaggaccccaaaagaagcggccaccgaggttttgggtttgtcaccttcgctgatgatggtgtggcagaacgagtagctcgtagaagccatgaaattctaggccatgaggttgcaatagacacagcggcaccacttgagaatgattcagctgctggtgggtacattgatccaatggatctttacggagcttatggttcaatgagatctttcggcaggttctgtggcggtctagattacaattatggctatggccccagcagcggaagcagccgatcaagatcggattggcgataccgaccttactgaacgtgtccattgtcagtgatgttctagtttacctccagggaaggaaactgaaatggcgaaaagaaacattttaagaatgttaagtgttacgttaagtggcatgttaatcgtaagagggccgtgcggaatctgtcgatttgttcatgttgtaattttggacatggaaatgcttttatgcaatttctttgccgtgattcacatt

SEQ ID NO: 32261 - DNA, 1879 bp, Zea mays
  Clone ID: UC-ZMFLB73280B05_FLI
ccatactgcttaaagcaaaatctctggacacccttggtagagcagcagatgctgcagaagaatgcagaaccatcatagacattatagagtctgcatggccatatggtgttccggatggtacttctgaagagtgtaagctaatagacatattccattcggctctagaatatcttcctaaactgtggatgaggagtggttgttttgatgaagccatcatcgcataccgcagagctcttgcaaagccatggaatctaggttctcaaaggtccgccaaattgcaaaaagagttggcagtgagtctgttgtactgtggcgttgaagtgaagttccctcaagaattttctcaggaaaggaatctggtaacccctgggaacaacttagaggaagcaattttgttattactcatgctaacaagaaagctatttctccgagaaatacaatgggatcctgaccttgtgaatcatttggtgtatgcactctcattatctgggcactatgaagttttggccagccatcttgaaatgctgttgcctggaacctataccagatcagagagatggtatatccttgcactttgctacagtgcagctggcatggatgacagtgcgttaaacatcataaggaatggtttttctgtactggagagaaagggaaagcctcatgttccatctcttcttttaggagcaaaactatgttgtaagaacccaaagcatgcttccgaagggataaagtttgcaaataaagccatgaagtctttcagaagtcgtgatctgcatttcatcagcactacaaaacactttcttggtgtttgttatggacctttttctaggtcctccacctcatacttggacaaatcgagactgcaagataatgcactgaggctgttgcaggatgctgccacaacagcgaagtataatcctgaaataatgtatagcctagcttgggaaaatgcgatgcagcgcaaactcaatgcagctgttgaaagtgcaacagaatgtcttgagatggtgatgggtggttctgttagtgcctggaagttactaattcttgtattatctgcacagcagaatttgcaagaagctgaagcagtagcagattttgcaatggacgaggctgagaaaaatgatcagttggatattttgagactgaaagcacaaattcaagcttcccgtggacagttcaagtctgcagttgaaacttttcgggttttgcttgctgctatccaagtaaagaaggaagtctggaaattgaccacttgtaatgaggttaaatgcctacaaaagttggagatggacgcatggttagatttggcatcaatctattcaaagcttgaggcatggcatgactcaaacatctgccttgacaaagctatatccattgatttctattatcccaagtgttggcatgtcagaggtcttctattggaggctcaattcttgcacaaggaagccctgatggcattctctttcgcgctatcaattgacccagattacgtcccgggcatggtttgtatggcaggaattctccgaaatattggaggggattcattatcaattgcaagaacttacttgcgcaatgccctccgtttagagcctacaaaccaccgtgcctggttgagtcttgggcttgtcctgaaagctgaaggatcgctgcaggaggccgcggattgcttccaggcagcatatgagcttagagaattatcaccaattcaggatttctctgagcaactcccgatcatgctgcattaggaatctatagcaaaggagttcacattttttgtggattttccccatagttgtcttagttattaacttatcccttgcaaaggtaggaaacatatgtttttgtgaatgtaaattagtccacttttgttcgtgag

SEQ ID NO: 32262 - DNA, 1729 bp, Zea mays
  Clone ID: UC-ZMFLB73280B06_FLI
taccttccgtgattttgaggaatgcaacattctttgtccatacatgagtgacactataaaagaaatagctaaggcctgtcagactcttgaagggaaggattcgtctccaactgctgtaaaaatgttgcgcacacttcattttgaaatgacaaagctttacattctacggctttgttcatggatgcgggcaacaacaaaggagatatcaaaagatgagacttgggttactttatccacccttgagagaaacaagtcccagtatgcgatttcatgcttgcccctggagttccgtgacataacagtttcagctatggaccgaattgatactatgattcttaatctgatgagcgagactgcgaagtcatatgacatttctcaaccacttcaggaaatcaatgagtctgttagacttgcatttttgaattcctttctggactttgctggttatctggagaggtttggaggtgaactaaccgagaacagaccaaacaaagaaaacaattatgtctcaaatggatacataaatggtactagagaaacatttgttaacacagatggagatttgcacaaaaagctgctggttgttttgagtaacattgggtattgtaaagctgaactttcagaagaactttacagcaaatatagacacatttggtctccagtcaggaataatgaggagcgaagttctgacatgcgagacctgaggacttctttctctgcacttgaagagaaagtcctggaccaatatacttttgcaaagtcaaacttgatcagaagtgctgcacaaagttatcttttggattctgggatttattggggagcagcgccaatggtaaagggcattcgagatgcaactcttgacttactgcacatccttgtagcagtacatgcagaggtatactctggcgctcggcctctgttggagaagacaatgaaaattttggttgagggtttggtcgacatctttcttagtgtttttcatgagaataagaccaaagatattagattgttggatgcgaatggtttttgtcaactgatgcttgagcttgagtattttgagactgtactgcacacgtacttctcacctgaggcgcaacaggctatgaaatctttacaagagaatttgttggaaaaggcctgtgaaagtgttgcagaagccatggaaaatcctggacaccaacgtcgaccaacccgtggcagtgaagatacagcatcggatgacagacagccatcagtatcacctgatgatttgcttgtgcttgctcagcagtgcagtagtgatctgctgcaaggggagttggagaggactcgattgaacatagcctgtttcatggagtcgacccttcaaccaacagctgcgccagcaggcccaaagcctgccgcacattcttcttaccaagcacagcatgctcccgtccaaacgtcctcgcctagttttagaaggcagcagactggtacaagttcccctgtagtctccaggcggcgccggtgagcttagtgcatctttccatcattggcgtagcctcttcccggagtttccttccttttcccccctcacatgtgtgctttttttaatcacttgtaattgtcatcctgttgtcatgtgttacgaatttcgatccattcttttggtgttgtataagatgaaaaggaggagtacagtactggtgctgctgcacgggatcatggaattgtataatatcgacgagtcaaatattattgctgcttg

SEQ ID NO: 32263 - DNA, 1190 bp, Zea mays
  Clone ID: UC-ZMFLB73280C04_FLI
ccattcctccccaaaacacatcctgcgatcctcgaagcctccgccgagcatcgatcatgtcggcctactgcggcaagtacgcggatgagctcatcaagaatgctgcctacatcggcacccctggcaagggtatccttgctgctgatgagtcaactggcaccattggcaagcgcctttccagcatcaatgtcgagaacgtggaggagaaccggcgggctctccgtgagctcctgttctgctgccctggtgccctccagtacatcagcggtgtgatcctcttcgaggagaccctctaccagaagaccattgaggttgttggcaccgacaaggagaccaccacccagggccacgatgacctcggcaagcgctgcgctttgccaagtggcgtgctgttctcaagattggccccaacgagccgtcacagcttgccattgacctgaatgctcagggtctggctcgctacgccatcatctgccaggagaacggtctggtgccaattgttgagcctgagatccttgttgatggccctcatgacattgatcgctgcgcttacgtcactgagacagtccttgctgcctgctacaaggctctcaacgagcaccatgtcctcctggagggtaccctcctgaagcccaacatggtgactcctggctccgactctaagaaggtgacacctgaggtgatcgcccagtacaccgtccgtaccctccagaggaccgtccctgctgctgtgcctgctgttgtcttcctctccggtggacagagcgaggaggaggccaccctgaatctcaatgccatgaacaagctcagcaccaagaagccatgggccctgtccttctccttcggccgtgccctccaggcgagcaccctcaaggcctgggctggcaaggtggagaacgtggagaaggctagagcggccttcctcgccaggtgcaaggccaactccgaggctaccctcggcacctacaagggtgatgctgccgccgacaccgagagccttcacgtcaaggactacaagtactgagttgcttctctttgcgatcccgttgttttggaactcctgcctgcgagtaggttgctgagtgttgtttgcttgttagagcttttatattcggacatgaaaaaaacatgcttcctatgtggatgatggttatctttatattcgtatattaactactagtcgtctgtgt

SEQ ID NO: 32264 - DNA, 1378 bp, Zea mays
  Clone ID: UC-ZMFLB73280C08_FLI
cgcgcagctagctgtcaccggagcaagaaggaagaaaaaccagcggcaccgatcgatcgacgacacgcgcgcgatcgaggtgaggagcgaaagaaaaggtggccttttcgaagccgccggacggagtgtagcgctagctagctccccaggccggagaggaggatggtgggacgaggagcggcgacggccctcgtgtgggcggcggtggtggcggtcgcgacggtggtgtcgcgggcgcagcagctgcaggtggggttctacgacacgctgtgcccggcggcggagatcatcgtgcaggaggaggtgagcaaggcggcgtccggcaaccccggcgtcgccgcgggcctcctgcgcctccacttccacgactgcttcgtcagggggtgcgacgcgtcggtgctgctggactcgtcggcgggcaaccaggcggagaaggacgcggcgcccaacgccagcctgcgcgggttcgaggtcatcgacagcgccaagacgcggctggagcaggcctgcttcggcgtcgtctcctgcgccgacgtcctcgccttcgccgcccgcgacgccctcgcgctggtcgggggcgacgcgtaccaggtgccggcggggcggagggacggcaacgtctcctcggcgcaggaggcgggcgcgaacctgccgccgccgacggcgagcgcgagccagctgacgcaggcgttcggcgccaaggggctgagccaggccgagatggtggcgctgtcgggggcgcacacggtgggcgcggcgcgctgcagctccttcgcgccccgcctctactcgtacgggcccagcggcgcggggcaggacccgtccatggaccccgcgtacctggcggcgctggcgcagcaagtgcccgccgcaggggaccggcgccgccgacccgcccctccccatggaccccgtcacgcccaccgccttcgacaccaactactacgccaacctggtcgccaggcgcggcctgctcgcctccgaccaggcgctgctcgccgacccggccaccgccgcgcaggtgctcgcctacaccaacagccccgccaccttccagaccgacttcgtcgccgccatgatcaagatgggtgccatacaggtgctcaccggcacagccggcaccgtccggaccaactgcagggtggctagctagctagctcatccatgagaatgtacctgtagactcatgtgcttaaaatcatacgacgaaactgtacgtacggcgtagagtggtgtggcggggtccaatgattcagattgtacgtacgtgtccatcgatccaactgtagttgtgtacgcagtacagtacgtgctagctacggatcagttgcttatatatagcttgtgcgtttttttacactttcttttgtccttttgg

SEQ ID NO: 32265 - DNA, 903 bp, Zea mays
  Clone ID: UC-ZMFLB73280D01_FLI
cagtgcataactgaacttctgtatggaggctgcatgtactgacagagggggtctattggtatatatactgcaagactgacgctggaatgctaatttgtttcatgtatcatttgttcccttacagccgatggaaatatatgttgatgatgaggcaaagttgaccctccatggtcttgtacagcactatataaaacttagcgaggcagagaagaaccggaaactgaatgatctcttggacgctcttgatttcaaccaagttgtgatattcgtgaagagtgttagcagagctgccgaactgaataagttactttgtgaatgcaacttcccatcaatctgcattcattctggaatgactcaggaagaaaggctaacaagatataagaacttcaaggaaggccacaagagaattcttgtggctacagatttagttggcaggggcattgacattgagcgtgtcaacattgtgataaactatgacatgccagactcagctgatacttatttgcacagggttggaagggctggacgttttggcacgaagggacttgcaattacctttgtttcctctgcttcggattctgatgttcttaaccaggtgcaagaaaggtttgaggtagacataaaggaactgcctgagcaaattgacacctcgacctacatgccatcataaatgggaaggacaactgagaagagaggaggataggggagtgagcagccgtctggagatggttacctttgaactatccgatctggaggatttgatttgcctcctttgtgtactttaaaaagggcagccaggatgatgatctgtattttaagacaatgctgtctgtttgggtttaggattttgctttgtcgaaaactagcacacttattgtactactgagcagcatatttgttttc

SEQ ID NO: 32266 - DNA, 2277 bp, Zea mays
  Clone ID: UC-ZMFLB73280E02_FLI
aaggggacgtcccaaacgtttgcaggatagttcagatattgtcactccaattgactcaaaagatagtgagtcctctccccagccacctattgccgcacctgccgaaagtggtaagaggaagaggggacgtccaaagcgcattgatggttccgtgactccttcaagtcattctgttttttcaatagatgatgatgctgttgacacgatgaaacgtggacgacctaggaaaattgataccaaactgttacagtttccatctttattttcagatgatcctagacaaactgcagataatgtactcatgatgtttgacgccctgcgacgcagacttatgcagatggatgatgtgaaacaagctgcaaagcagcagcctaacttgaaagctgggagcatcatgaacaatgctgaacttcgtgtcaataaggacaagaggataggagaggttccaggtgttgaggttggtgatatgttctacttcagaattgagatgtgcttagtggggttgaatagtcagagcatggcagggatagattacatgtctgccaagttcggtaatgaggaggaccctgtagctattagtgttgtgtcagctggtgtatatgataacactggagatgatccagatgttctagtttatactggacatggcatgtcgggtaaggatgaccaaaaacttgagaggggtaatcttgcactagagaggagtttgcatagaggtaatccaatcagagtcattcgtagcgtaaaagacttgacttgtccaactggcaagatttacatatatgatggtctttacaagatcaaagaagcctgggtagagaaagggaaatctggtttcaatgtgtttaaacacaagttgcttagggaacctggccaacctgatggcattgcagtgtggaagaagactgaaaaatggagggaaaatccatcatctagagaccatgttatattacttgacatatcatatggtgtggaaaataaccctgtctgccttgtaaatgaggttgacgatgaaaagggccctagccgcttcacttatacaactaatttgacatatgggaattctctcagctcgatgagaaagatgcaaggttgcaaatgcataagtgtatgcctccctggtgataacaactgctcctgtacgcatcgaaatgctggtgaccttccttacagtgcttcaggcatacttgttagccgaatgcccgttttatacgagtgtggtgattcctgcacatgttcacaaaattgccggaaccgagttgtacagaaaggtacgcagatccgttttgaagtttttaagacaggagatcgtggttggggcctccgtagttgggatccaattcgagcaggcacatttatctgtgaatatgcaggtgaaatcattgacataaatagagtgaatggtgaagatgactacatatttgagacttctcctttagagcagaatttaagatggaactatgcaccggaattgctgggtgagcctagtctttctgactcaaatgaaacaccaaagcagctgcctatagtcatcagtgcaaaacgaaccggcaacatagctcgctttatgaaccacagctgctcacctaatgtgttttggcaaccagttctgtatgatcatggtgatgagggatatccacatattgcattctttgcaattaagcatattcctccaatgacagagcttacctatgattatggtcagaaccagcgtaatagtattcaaatgggaacccattctggttttcggaagtctaaaagttgcttatgttggtccccgaagtgtagaggttcctttggctaataaccagccctataaggaatatattggatcataatactccatttcaaagttacacctaagatatctgctggtcgacttttatattcagctcccaaaaatctgtcacaagtttgtgagagcaactgaattgtctttaccagcagaagcagcccgtcatggtggcctgtatgaagcagcaggggtctcctatgtcctaggtgttccatgcaccatcgaataaatccacccctcttcatgttagaatgggaaacggggatgtgttttgcacaaattatctgtcatgcagtcgtcgtattaagttttcttgaactagtttgtagtcatcctcagagaatgcatgatgtgcactttgtagtaatatatgcaggttgttatcccacctactatataaccatcaaaatttcagtgtttgtacaggacgccctatgtagtggcgctgcttgcaaatgttagttagtacactgatattccat

SEQ ID NO: 32267 - DNA, 620 bp, Zea mays
  Clone ID: UC-ZMFLB73280E05_FLI
ggaagcagcaccccttgccaagaagaggccaccatttcaggagatgaagatacaagaatctgctgacactgtaacagaaccagattctagatcaaggaattatcaggcacggggatatggaaatcatcgacccttcctaaggccagatgatcgaggctttagaagggggtttcctgaccacaggagtgatggccagaggaatgggcatgatataaggggaagattttctgttaggggaggaatggacagagacaggtttaacaattcatatggtgggagaagcaacgcagagcaggcttctggtgatcaagaagaaaaatggaagcatgacctctatgatcagacaaacaggagcccgcctccaaagactgaggaagagcagattgccaaagttgaagcgctgttggcactgtagctgtcttatttatgtctggagttgttttttgtgatagattatcatgtacttggtttcagatgtgttgaatactgtcttttttattctatatattctgcatatctatgtggaattgtggattaaaccaccttatgaagctattccatttggactgataatattgtactagataatcatgagtttcataatgtagaaccatcaagcg

SEQ ID NO: 32268 - DNA, 979 bp, Zea mays
  Clone ID: UC-ZMFLB73280E12_FLI
ggccaggatacgcctgcttgcgaagcaccgctccgacatccgcgagctgatcggcgtgtcgggcgccatcccggcgctcgtgccgctgctgcggagcaccgaccccgtggcgcaggagagcgcggtcaccgcgctgctcaacctctcgctcgaggagcggaaccggtccgccatcacggccgccggcgccatcaagccgctcgtctacgcgctgcgcaccggcacggcgccggccaagcagaacgccgcgtgcgcgctgctcagcctctcgggcatcgaggagaaccgcgccaccatcggggcctgcggcgccatcccgccgctcgtcgcgctgctctccgcgggctccacgcgcggcaagaaggacgcgctcaccacgctctaccgcctctgctccgcgcgcaggaacaaggagcgcgccgtcagcgccggcgccatcgtgccgctcgtgcacctcatcggcgagcgcggcagcgggacgtgcgagaaggccatggtggttctggggagcctcgcgggcatcgccgagggccgtgaagccgtggtggaggctggcgggatccccgccctggttgaggccatcgaggacggccctgccaaggagaaggagttcgccgtggtggcgctgctgcagatgtgctccgattccccgcataaccgtgcgcttcttgtacgcgagggcgccatcccaccgcttgtcgcgctatcgcagtctggctctgcccgtgccaagcacaaggctgagactttgcttggctacctgcgggagcagcgacaaggggttgcctgcagagctggagcagtggcagctactagcttggctaggtaaaaaggcaagagctatggtcgaaatctgctccatttattctctgtgagaggtgttgagagcagatcagcgacgccaggggggcgcatctgtaaataacagctggctctggttggtttggctatgtgtctatgtgaatacacatgtggtttg

SEQ ID NO: 32269 - DNA, 565 bp, Zea mays
  Clone ID: UC-ZMFLB73280F03_FLI
tagctactgaaatagagagttactttggttgttcagcctcaaatcttgtgttggttggtgaccgttacttcactgatgtggtctatggaaacaagaatggctttcttacagtcctgacagagcctttaaacatcactgatgaatcatacattgtcaaaagggttaggaaactggaggcgtacatcatcagttattggtacaagaaagggcacaaaccaatagagcatcctttgctcccagatgcaagaagaatagtgaagtttgacccatatgacgactcagtttcaaccagaatataatgtaatgatgtatcttgcacctgctcatcagagagtgagatctactgtttgtagcttagggtgtgtttgtttccttctaaattatataaactggattatggtggaagggtaagaccgtaagagagtaaaatattacattgtgacaacaaataagctgaaataaactaatattggatagcttattttagcttatttgtaatcccaaagtggtaccataatccaatttatataaacatacagggcctcagcagaagattacaagggat

SEQ ID NO: 32270 - DNA, 2324 bp, Zea mays
  Clone ID: UC-ZMFLB73280F08_FLI
tggaggaagaagaggcggtggtttcggcgccggaaaagccaatgcggcgggggcggcggaggtggggagcggaggtggacgacggctactcgccgagctccacgggcggcggcgggagcagctgctgcgattccttcggctgcgactcgcctttggccgggttcgtgcgcccagatggtgacccagacacagatctggagacagatgggttggccacttccacctccagtgcctttaccgagcggcaggacgacgaagcggaagaggcgctgtacggggtgaaggaagaggagtgggctcagatacaagaaccagccaagaatccggcattccgtgccaccccagaatgccacaaacagcggtaccggacggatgctgctgttcttttgcatggtaggaaggggtcgaaacagcggccggcctcacttgacctcggtagccctgggttccatggagccacgttttctccaagtttcgtgattggtggtgtggggttgatgaacaaaggacttggagcatcagtcatcaggtcagacgtgtttcatagtcctgggacgccgaactatccgcgccaccgtgcatcagtgttagggtgccataaagggtggagctctgagagagttccacatccttctaaaggaaataggcggtacccaggcagcagcatggcatttccttacagcaatgggaggacattgccctcgaaatgggaggatgcagagaggtggatcttcagtcccaattccagcgacgcgcttggaagaactacggttgctcatgctcggcgaccgaagtctaaaagtggccccctggggcctccaggaagacttggtggacagtattcatctgtttcttcagtgtcattgcttgataatgggagagctggacctattacagcaaattcaccttttgcggctggagtactaatgccggaacatgtttgtgaaggaaaaagtacaaatggaacctattcaagtagaccaattggtaacgaaatcaacattggaagaggagtcaaaatttgtccactgaatggtgggtctcatcctgttcgaacttccagagttcgccagcgattagattatgcagtcgaatcatctgtttcattgcctagcacgcaagaatctgtccaagacgagcaggttgaaatcacagaagattcagcttctactattgcttctataatttctagaaaagatgctgcaacccagaccagtccagagctaagtaggtcctcttcacccaacactagaccaacatttaatggttccttgtcaacagaacaagtgaaagagaaggggagctgtttgtcagatcttgatatcagggatgttcagatggatgatcgagtgactttgactaggtggtcaaagaaaaatgtaacacggtcgtctaacaagaattcaacaaacataatagagtggagcgaaaagacagtggaatcaaaatcttcgtcctggggctttgccaaagcgaagtgcatttctaagattgatagagaggacacagaaattactgcatgggagaatattgaaaaagcaaaagctgatgcagcaattcagaagttagtgattaagttagagaagaaaaggtcatcttcgcttgataagattttgaacaccctcaaatctgctcaaaggaaatcccaggtgatgcatgagcatgagcgtgatgcagtaacagcaaaccaagatggaaaaggctctaggaaggcaaaaaagagagcacaactcagcaagaatggccaaatcagttcactgagtggctgcttcacttgccatgctttctgatacatgtaattccaaaattgacatctataccacactctttatattacatcaggcaatacagcgccatgttgacagcaacgaaattgtgaaccaaccttttgcggttttgcctataacatggcgaccactttagtagactcatatttgcatagtgttcaaaaattttgtagctgatgtatcatcatggttattttcacatcttcggattgtgctaaaagtgctccattgataaagggcagactcagtgctgaaggctcccccactcatgtggccatgtggggtatgggaaaaggataaaccgaggcaaacttccctcgcgaatacggagagactgctttgaatctgtgacccggtgacttagtgagacgttctcactattgcacccagtgtgcccttaaaaaatgctctattgatgtatacgtaatttttgtaattgttcccacataaaacacccaatttttcacatttgtggaactttctgtacaacacattacattgatcagctccttcagatgtatatattcttttaaggat

SEQ ID NO: 32271 - DNA, 1283 bp, Zea mays
  Clone ID: UC-ZMFLB73280G11_FLI
gccctttggtagcaatggaggatctcagaggaatgtgagaggtcgccatgatcacaatcctatccatttgggacacaatccaggtgtagcttgcgcaacaagcagcactcatgggccaccacaccatgctaatgtaattggtcctcaaagtacagcagtgccacaaaatagagcatatttttctatacctccaagagtgactgccccaggcagcgatggaaactgtagcatggttttcagggaagggacatactactctgctccgcagaggaccaacataaatgccccccctgtcctagcacctcctggttcttctgatagtctacattttgtgcatggtgggtatgccccaagagcagcccctcctaacagcatcagcacatatcctgccccggcttttgcgactcctaacaactcagtgacagttacccatgagcctgatatcccttgctatcgacctgccgtccctggctatccgcctgctacctcagcagcagcagcagcagcaagtgttcatgctgaaggtgctgctgcatcttcgagacatctaggtcatgtggctctaggttccagtggtagtgcaaggagtagaaggctgagggattcataccatgcttttcgtccactggttattgaagaaaataacttgagaggaccagcaaccgagcgttttatgatgctaaatcagttatttatccatgaatcgagagaagattctgaccctcactgggacatgaggctggacattgatgatatgagttatgaggagctgctggctttgggagaacgaataggcaatgtcaacacgggcctagctgatgaaaaactttcaagctgtgtgacggagataccctgctgcagctctgcccgtactcatgatgataatgagagcgcaagatgtgtaatttgcctggaggattacaaattcgaggactctgtcgggaagctaaaatgcaatcacaagtatcacgcagactgcatcaagaaatggctgcaggtgaagaacgcttgcccagtctgcaaagcttctgcggcagatgacggcggaggcaccgaatgaagcgccctgccgcccccattcaccctatctcaggggaagctgtactggctgatctggtttgctgtgtgtaaataatggtcctgaaacggattatttgtgagctgaattaaactcgacatgtaaatttaatcctcaagctagttgcaaattgatggcagcggttagccctacgtgtcagccgtctgacgtaactgcagagagaaaacgtttgcatgcatatgtt

SEQ ID NO: 32272 - DNA, 1316 bp, Zea mays
  Clone ID: UC-ZMFLB73282F11_FLI
ctagttaatattacaacaacaatgtgttggaagcttattgctaagcatgttcaaacagctatttgggttaaacctgaagatgagtcctgcagacagaaaaatgttgatatgaatctactgagtatttgtgaatccaatgacaacatttcaccatcatggaaaattccgttaatgaattgtgtgaagctcaacaaggacaaatccaatattcagaaattgccttccagatctgatcgcctatcattttattccaagagtttggagataataggagttgcaccagagaggtttgagaagaataaccagttctggaagaaccaggttcacaagtattggtcatttcttcatgttgaaaagactagcattcgaaacgtcatggacatgaatgctaattatggtggatttgctgcagcactaagcagtgaccctgtctggattatgaatatagtaccctataccatgatgaacacattgcctgttatctatgaccgtgggttactcggttcttaccatgactggtgtgagccattctcaacatatcctagatcctatgacttgttgcatgctttccacctcttttctcattataaacgccgcaaggaagattgtttgttggaggatatcatgttagaaatggatcgcatcattcgaccacagggttttatcattattagagacgagaatgacactctctcaagaatcatcaatctagcaccgaagttcctttgggatgttaccacgcacatgttggaaaatgaggaaagcgggacagatcaagttctgttttgcaggaagaaattctgggctattgtttgagttatacttgggtggaaattgggaagctgccatattttatcctacttttggttgccctttgtatcagtgacagagcagagcgtaaggagagctgtttggcatgatagatgttccaatgaaacataatatttcattgcacgttctctgcagttgacagtagtgcattgttgagaaggcatatggtacggtggtgcggttgacagggttatccagaaactagctcggataatttttgcttttgagctgtactatttgtctacgaaggacatgggtgagccggtaaggtgtagtcttactgacagtgtttgtagtttctctcataatgaatagccgttaattcttttgttatcttattcactaatggctgattaggtttaggttctcaagttctcaacaacatgttggtagtgctgtttctgttgttccatctggggagcatctgtagtactataaaccttatgtaaggtactgtttccagccaatgccgaggtgcatttgtt

SEQ ID NO: 32273 - DNA, 1398 bp, Zea mays
  Clone ID: UC-ZMFLB73282H09_FLI
ggccatgtccttcccgcggctcctcctggccgtcctcgccgccacggtggcggcggcgtacgcgcccgcgcgcgcggcgggcgccggcgccggtgcctgcgcggcggagaaattgtccagcaaccgcgtgttccagacgtgcgccgacctgccccgcctcggcgcgtcgctgcactggtcctacgacgccgcggcgtcgtccctgtcggtggcgttcctggcggccccgccgtccgccggcgggtgggtcgcctggggcctgaaccccaagggccagagcatggacggcacgcaggcgctggtggccgtccccagcggcggcggcggcggcggcggcgcgtacgaggtgcagacctacagcatctccggcacctcgctcggctccccgggggcccccctcgcctacccgacgtccgacctcgccgccgagctcggcggcgacggccgcgtccggatcttcggcacgctcaagctcccgaacggcacgggcggcgccgaggtcaaccaggtgtggcaggtggggccctactccggcgggatccagatacacgaaatgaaaggcgacaacatgaacgccaagggcacgctgaacctcctcaccggcgccaccgccgccgccagcggtgggggcagtatcctcaggaagaaaaatacgcacgggatcctgaacgccgtgagctggggcctcctgctgcccatgggcgccaccttcgctcggtacctcaagacgttcaggtccgccgacccggcctggttctacctccacgtggcgtgccagctggccgggtacggcgtcggggtgtccggctgggccaccggcatccacctcgggaacctgtccaaggggatcacctactcgctccaccggaacatcgggatcacggtcttcgccctcggcactctgcaggtctttgcgctgttcttgaggccgaagaaggagcacaagtaccgggtgtactggaacgcgtaccaccactcggtggggtacacggtgatcgtgctgggcgtcgtcaacgtcttcaagggcatggccatcctggacgtggagcggaggtggaggacgggctacgtcgccgccgtctccgtgctggccgccgtcgccgtggcgctggaggccgtcacgtggggcgtcgtgctgcggcgccggaagcaggaggaaaagacctccaacgccggccgcttgccgctgtctatgtaatatatatatatatacctcatcgtcgtcgtcgtcgggggcgtctcactatatatctatctgatctgatctgatcttcagagtagtaggccttacgatgggttgggttagctagctagtgtgtgtatcttcattgtatggtaggtgtctctgtgtgtgtgtgtatactgcacgttcgtatactggagatgagtgagtgtgat

SEQ ID NO: 32274 - DNA, 1362 bp, Zea mays
  Clone ID: UC-ZMFLB73283C02_FLI
ggaaccaagtggtttctgaataatagtgatggtaatgatacacgcggcctttatttaccaaatcacaatgccattatacacattactagcagaacgctgagctagctggccgcaaacaagaatatatataaaaacgcatgatctggctggctatcgatctcgaactctcgatggatcctattttcacatgatcgtaactaaaaactccgagttgcatgcatgtcagggcacaggccgtgggctggccaccagtccggtcgtaccgcaggaacgccatgaccgtcgtccaggccgtgaggagcaagaaggaagaggaacctgagaagcagcaacagcccgctgccgccaacgccttcgtgaaggtcagcatggacggcgcgccctacctgcgcaaggtggacctgaagacgtacggcagctacaaggacctctccgctgcactcaagaagatgttcggcaccttcgtcaccgcaactggtaaatctcaccccggcccgttggcataggaatctgcagcatacaagcttgtgaaccgaactgataccgatcgccacgcctttacaaattcggcgaatgcattgagttgagctgaacccacagaagctgtgcgtccatgatccgtcttaccagggaacagcatgaacgaggggagattggttgatccggccggcgatgctgatgatgtggtcactacttacgaagacaaggatggtgactggatgctggtcggcgacgtcccgtgggagtatgttctccgttctagcgtgccatcgtctgctttcgtatttactgacccatgattaggactccagtgtcttgtatgtcgccttgctgattttctggtccctgcaggatgtttgtcgactcatgcaagcgtctgaggatcatgaagagttctgaagccataggtcttggttagtgtctccagataaaattaccttccagagttccattgtaagatttttaatgcgtcaactctaaccgcctaagtttttcttcattgcaaaaaaaaaaaaatacagcaccaagaacgaaggataagtgcaagaacaagagctgaagaagatgcagtgttaaagatgttgcccattgtatcagaagaatggtccccttgcagtgcgctgccgttttttttttcctactagaaatataacgcgttttaattactagttggagggagacctgtcttgttcaactcgttcatggaccagaagcaataatatatccgtgtgtagctggattggtgttatgtcatgtcccctaccgtgtctcccagaatctacttggtgattttattccagtgttgttaatcaagtttatgtgattgttaagtaaagggcatcaatgggactattattattt

SEQ ID NO: 32275 - DNA, 1129 bp, Zea mays
  Clone ID: UC-ZMFLB73283C12_FLI
caaaaacagtcatatttgtcttctggagagtctatttctaacaatgaggtcagtatgagcatcaactcaaagatttcaaatgttaagggaatagacgtggagttgtggacgcaggatgggcttccttcagcacaactcctgaagctgatgagagatgtggttgctggccttgtgcatttgcataacttgggaattattcatcgtgatttgaagcctcagaatgtcttaataagcgcagaaggacctattagagcaaagctttctgatatgggtatcagtaagcacctgcaagatgacatgacttctgttagccatcatggtacaggaattggaagctctggctggcaagcacccgaacagcttcgtcatggtcgtcaaactcgtgcaatggatctttttagtttgggctgccttattttctattgtatcactaaaggcaagcatccgtttggtgaatactatgaacgggatacaaacattgtaaacaatcgctttgatctctttgtggtggactacataccagaagcagtacatcttatatctcaactgttacaaccaaacccagagacaagaccaacggcagtatacgtcatgcatcatcctctcttctggagccctgaattgcgcctttcgtttctaagggataccagtgacagaattgagaaaaccagtgaaacggacctcataaacgcactggaaagcataggaccagtggcgtttggtgggaaatggggagagaaactggatgctgctttagttacagacatgggtcgttatagaaaatataactttgagtctactcgtgatcttctgaggtatatcagaaataaatcgggtcattacagagaactttcaaatgatctcaagggcatacttgggtcattgccagagggatttgatcactattttgctagccgatttccaaagttgctaattgaggtgtacaaggtcttgtgggtgcactgcaaggacgaagaagctttcagtaaacatttcaatggaagctccttatagctggagaggattgccttttcctactgtaaatactaaccctgatgtagaagttgtatgtacatttgatatgtataccatattacccgttttatagaataaagagagctcagtctgt

SEQ ID NO: 32276 - DNA, 1830 bp, Zea mays
  Clone ID: UC-ZMFLB73283F12_FLI
gtttctttctccgcttcctaagattcctctttcttccccaaccccaccctacgccttttgccacgccgcacggccgctccctcccttcatgcgccgccgtatctcaggtcagcatcgccaaccgcagctccacctcccgatcccagccccaatctaggaggaggaggaggaggagaaggccactttcaggattctgacgaagccctccctccctcggccgcatcgcatgctaccacgactgaccaccaccagcagcagcagcagcagcagcaggaggaggagggcaggatgttcaagcttcaccgccaccgctcctccgaccgcgtcggcgagcgcttcgacttcagattctccaacttccgcgccgtccaggtccctgcagtgtcagacaggctcttcctttccatagtttcagtcgacagcggaaggacaattgcaaagtccagcaaagtagcttctcggagtgggatatgccagtggcctgacacaatcttggaacccatatggttctccaaggacgaagtctccaaagaattcgaagattgccagtacaagattattgtttccttgggatcgacaaaatctggcattcttggggagatttttctaaatctgtctaattttctgaatatagtcgatccaaccgcaatctctttgccactgaagagatgcaacgccggaacagttttacagcttaaggtccaatgtcttggcacaaagtctaagctgagtggtgtcagatcactgagggacatggctccccgtctcgatgaccgtagtccaacgccaaccaatgatgagatggacaataagtcagattgctctgatggtatgttcaacaggagtgttcgttcttcatccgaaaatcatctggttggaacttatcaagatgaatctggaaacagggaaacaagtttctctgcaccagggtcccatcggagttctaattctggagatagtactgcggatagaacaaacttctctcctagagacaactctagtggaggactttatgtgggaaggcaggattctgctagttcctatgctagttatgttagtgctggtcgtggcgatgatgggcttagatccaataattcatcttttagttctcgggcttcaggcccaaatttgctgcaagggaatactccaaaaatattttcaaatggcctttctcaattatctatgggggcatctgactcatctaaagatcttcttgaagctgctgaagaaacaattgaggagctccgtgatgaggcaaaaatgtgggaacgccactctcgtaagttgaaggctgatctagagatgctaaaaaaggagtgttctgaaaaatcaaagcaacatgctgagctagcaggcgagctatctgctgcacaagctgaacgggattcctataggcatgaaatagaagaattgaagtcatccttacaagatgtaaacacacggcaaacaattacaggaacacctaaacgttcagactggatagacctgcagaaggaacttgaaggtgaggtgaagtttcttagagaatcgaatgcggacttaaccatacaactaaacaggactcaagagtcaaatatagagcttctttctattcttcaggaactggaggaaaccattgaagaacagagagttgaaatatctaagatttcgaaggtcaagcagactgctgatcctgagaatgggcttttagtaaaagaagacaaagaatgggctaagaaactgtcaatgaaagacgatgaaatcacagttctgagggagaaattggatcgggctctcaacattggaaatgcaggtggtgctggttccaatgccatttatcttgaattggag

SEQ ID NO: 32277 - DNA, 1384 bp, Zea mays
  Clone ID: UC-ZMFLB73283G04_FLI
cgtcatcgtgtctcctcctttccgtcttacttgccttggctgctgctgctgcgcggcaggcgcagagtcatggaaaagcctccgccgtcttcatcgatgcctcgtcgcaccgctaccttcgggaccagcaagccgaccaccaggacgcttcaatgtcgttaaatgaagtttctgcggttgtttctgtcttgcttggtttcgcaccgtcaacatccctaccagctatttcttcttcgaagttgaacaaagttcttcttcctaatccatttgatagaccgcgtgctgttttcctcgtgcaaattgatgggttcaatgttcctagcttcgtatctgaaggcagcaacattttcaagaccaggattgaaggtgcaaacatcgctgatacagggcttacagataaggatgacttaattgtcattcattcagatgaatctctagatctctctcgatcagattatcttgataatgaactttccagcttggcaaactggttggagggatcttatcagaagtctaccggcaaactagtcattcccttggagaatggaaacagtcttactttgcaacttgataaggaagcagacaaggaattcatgtccagcttggcttcccttcttaagactattgaaagggcgatccaggttcatgaagatttctcaggtgtcgtgaaccctgcagagttattagaatgtcacttcacagggttgaaggctctggagaatgaatatggttctggtgaaattgttaagcagggaacagaaatagttcagagagctgtcaccaaatcattccagtccctacatgaagcatacaaagggaaaattgttgggctggtaatatccacaaatgaggctccatcatccttaggatccataattgacgcaccatcttcactgcacatttcaagacggctagaagaagcaagcaagactacagacatagcctctgtcgtacttgttcgaaagagcttggcatggattacagggatcatcctgcttgtttcaactctcataggggtttgcttgcttatgaacatgccacttaccagggacaccctcctgtactcgaatgtcaagatcgattagtttgaaggggtgttcgcggcagctactcttggggttcaactttggccttgtgtatttatgggatggatttcagatggtagagacgtatgcttgtgctgttcacaaaaccagtgtacaatgtgatactaggtgctacgtgcctttctttttttaatctgtgcttccatcttgcctgtatgggctgttttgttgttgggttcccggtaaataatccagagcagtggcacaaacgattagttgttgcagaatgctactgccttttctgaataaatctgtcattgtaatcgaatttcaacttg

SEQ ID NO: 32278 - DNA, 1915 bp, Zea mays
  Clone ID: UC-ZMFLB73283H08_FLI
taagaagattaatttaaacttaaagagaaagcatgacaatttgatgaaggagaagggagagattgctaaagaaaatcaaagccttgtaaagcagatggaggatcttaaatcaactcagaagacaacatctgaaacaacacttgagcaggctattaaagaaaaggatttcaggatacagacattagaaagaactctggaaaaggaaagagatgataacaagaaagagaaggcaaagagtaggaggaatgagaacacaatctttggtgcacttcagaaggtgcaacaggacaagaaacaagtagaggagtctatagataagcataagcaggctgtgagagagttgattgagaattatcctggattatcatctgaagtgccacctatctctgcactagaagagcaacttctttcatacttccgtgcagctaaagatatggaggaatcttctagtcccttccgtgatggtgcagcaactcaaactccagttgttgaaactgcccctgtggatgcacctacttcagctggagttgcaggacgtccagtagatacttcgtcaaggccagctaaagctaaaatgacggaagaaagagcagttcccaaaccaagcagtgaagtacgtaggcctggaggaagaagaccccttgttcgtcctactcttgaacgaactgaagaacctcatgctgatacagatatatcagctgttgatgcctccacagttcaggacaaaggggggccaccagcagagcaagaaacttctggaattttacctgtgttacagcctttgagtcgtaaacggcttatcacatcttcacagacggtagacagtgcctcgcagggtgaggctaatgatgtcaatcctccatctaagaagcccaaggaggaagaatcttcacaagggactagtgaactcaaaagtggtcaaccacctcttggggatgtagcggcacaggttaatgtgcttccagccactgatgacctagatggacaacagcctacagaagagatcgatactgatcaggcacctgagccaatggtagaggttgaggcaacaagggaagaggatgggggtgataaagatgactctggagatgcatcaacggacatcaaaggccaggatgctgatgctaatattgacgcaaatgcaattcctttagaagaagagcatgtagtggcaaagtcagaggcaataattgaatcatttgatgatgaccggaaaacagaagattcgaaggaagatgctcagcgtactactgcaactgatgttgatgatgacatggaggagggagagttggcagaggaacctgaagacaagagtgacgttgatatgtcagagatcgagggtgaggctacagccgaacgtgctgctgtggaaccggaccaaagtcctataacacaacctggtgcagctgatgcctcaccaagcagaactgcagatgcatctcctgctcgtgaaccttcccctagtccggtccaagctggtgcatcttctcgaccccagaatactagcactgcaacagaggcacgtgaaccttcctctaacccagcccaagctggtgcgtcttctgaacagcggaacaccagtactgtagtggaggctgctgaaactcgttccagaacaatcaacttaagtgagagggccagacaaaacaggcaaaccaggtttcaacgcgcacaacaacctggcactgctcggggtcgtggccagcaatctgttacactcaggaaagatgctacgggtcgaggatcaaggggccgcggggggcgtggtcagtcctagtaaagtagattgtcttttctcgtgcagggataattttgtccattgggatagagacccttgtatttttagattgatcgacgaacttcatggggatacagagacccttgtgtttttagattgatcgacgaattttgtctc

SEQ ID NO: 32279 - DNA, 2005 bp, Zea mays
  Clone ID: UC-ZMFLB73284A01_FLI
tgactgtgcagccaaacgagctgcctcatggatcccaactaattatgggtcttaatcctccttttggagtcaaagcaagtcttgcgaacaaatttattgacaaagcattgacattcaagcctaagctcattgtactaattgtccctaaagaaactaaaaggttagatcagaggagaacaccttatgatttgatttgggaggacagtgagtgtctttctggcaagtccttctatttgcctggttctgtggatcttaatgataaaatagttgaagggtggaatgcatctgcgccacccctctatttgtggagtcatcctggttggacaaagaagcacatgcaagtggctgaagagcatggtcatacttgtatggggaagatagcttgccatgttgaagagagtaatctatcagatgacctgtccgtgaggaaacaatctgatgctacaaacaaactgaactcgagatcagggaaagagactccattcaatgacagaatgtccaatctacttgatgatggttctgctaggaagcaagcaagatctgaagaagagaagagaactctagggaagatagaacaccatgtgaaaaaggctaatataccagataacctcccagtgaagaaagaacctgaagcttccagcaaagtcatgtcgcattctggaaaagatagaaagattggcagatacaacaggaggagacatgacaacaggagcagcaaggggacacctgatcacacagagagcctcccccctgaaaagcaagtggaagttgcatatgaggaaacaagagttattcctagcaaaaagattgctcataatgaaaaaaagagcgcgcagtacaactacgagcaaactgcagcagggatgccaaacatgaggtctagaggaggggattctgacatgagtatctcacccccagtcagttgcaatgctcgaagcaaacccatgagctattccctgacgagaccaattgaacacttggatacgaatgctcaccttttggcagaagaacctagtgactctgtgctcaatagggttccaaatcatgacagttatttggcaatcaaagaggaatactgtgatggatttaagaggaaaaatgatcctatcttcagtcacattgatgatagctcaaggatgaggggctccagcatcgaagaagtgaccaagccgtatattactgctccaaacagtgatccgtggtctaaaggagatggcagcttttacaggcatccgagctcagaagatttaaacgctaatgctgatgtgcttatgccaggatacagtgcaagatatggacaaattggtggtgacagtaacccacaagctagtatggtcccactagcaacagattcaagactgcatggtggaacggttgctgataattacctctcggcaagatactcccttggatcttcaggtgctcgcgttagccaaccagctccaactgttcccccttttgggctctcaggtgcaagttcacaacgaggctcagtaatggacaggtattcgtatgggctttcgggtccgactggaacacagcgctcagttattgacaggtatgcgccgtccctcgatggaacgaacacaacaagatcgaggagctccttgcctgagcagtacccgttcggacaacctggctcttccggtggcgggtggcctcatcactgatcgctggaacttggtcctcagatttgaccagcaaaagtgcaaccgatttcttgagtccggtggagcctacaacctatctacggcctaactttttggatcctactagtcgtttcttcctggcgccttcgacgaagacatcacctgtgtctaccaatacagaagtgtagacttcaattcctacaaatacagaagtgtaggcttcaatcctattgtttgctctggatttctgtttatgagcgtatttacaagagtatgtttggtctatgttagtatattaggaatacaattccaaaaccgttgtaccgtgccaaagtttaatactatacgtttgggtc

SEQ ID NO: 32280 - DNA, 1324 bp, Zea mays
  Clone ID: UC-ZMFLB73284B02_FLI
aaattttcgtgattcaaatggatggactgctcttcattgggctgcttattttggaagggaaaagatggttgctgcacttcttgctgctggtgcatcggcaacagcagttactgatcccactgcacaagacccagtgggtaaaacagcagctttcctggcttctgaacgagggcatacgggacttgcaggttatctttctgaagtgtcgctaactagctatcttgcatcactcactatagaagaaagtgatgtctcaaaaggatcagctgaagttgaagcagagagagctgtggaaggcatatctcagaggaatgcccaacggcatggtggcacagaagatgagctatcaatgaaggattctttggcggcagtgaggaatgcagctcaagcagcagctcgcatccagaatgctttccgtgccttctctttcaggaagagacagcagaagactgctcgacttagggatgtgtatggaatgacccaagaggatatagatgaacttgcagctgcatcaaggttgtaccaccaagctcatgcttcaagtggtcagttttatgatagagcagctgtttcgattcagaagaaatacaaaggatggaaaggtcgcaaacattttctcaacatgagaagaaatgcagttaaaatacaggctcatgtaagaggccatcaagtgagaaagaaatacagaacaattgtaagcactgtcagtgtgctagagaaagtaatacttcggtggcgccggaaaggtcatggcctacgtggcttccgagctgagcagcaaccaatggtcgaagcaatagaggaagatgatgaggaagacgacgatttcgatgatgatgaagcagtcaaggtcttccgtcggcagaaggtcgatcaagctgtaaaagaggctgtgtcaagggtgctgtccatggtagactctaccgaagcgaggatgcaatatcgacgaatgcttgaggagtttcgccaggcaactgcagaattggaaggatcaaatgaagtgacatcaatatttgacagtgacttagagttattagggatcaacaatttcatgtaaagagcatttcggtttcaagatctgagcaatgacataaattaagtatctacggaatgggtttcacctgctactaactaggacctgataatggtcgtcagtttatacagtgtttacgaaatggaaagtagattattgctgctatgatgtattgccactctatatttaggtgtattttcccagtggcagttcaatgaacactacattgtggtgtttgtaacttttaataccccgtttggatgtagatattagagtacaaaattgaaaatt

SEQ ID NO: 32281 - DNA, 1075 bp, Zea mays
  Clone ID: UC-ZMFLB73284B06_FLI
caaggacgtggcggtgcagcggcgcgagttcgacgcgcacatggaggcggtcggcagggtggagcaccggaacgtgctccccgtccgcgcctactacttctccaaggacgagaagctgctcgtctacgactacctccccaacggcagcctctccgccatgctccacgggagccggggctcgggccggacgccgctggactgggaggcgcgcatgcgggcggcgctgtccgccgcgcgcgggctggcgcacctgcacacggcgcacaacctggtgcacggcaacgtgaaggcgtcgaacgtgctgctccgcccggacgcggacgcggcggcgctctccgacttcgggctgcaccagctgttcgcggcgtcgacggcggcgcggggcggcgggtaccgcgccccggaggcggtggacgcgcggcggctgacgtacaagtcggacgtgtactccctgggcgtgctgctgctggagctcctgacgggcaagtccccctcgcacgcgtcgctggagggcgacggcacgctggacctgccccgctgggtgcagtccgtggtgcgggaggagtggaccgccgaggtgttcgacgtcgagctggtgcgcctgggcgccagcgccgaggaggagatggtggccctgctgcaggtggccatggcgtgcgtggccacggtccccgacgcgcgccccgacgcccccgacgtggtaaggatggtcgaggagatcggcgccggccacggcggccggaccacgacggaggagagcgagggcgtgcgcgccacgtcggaggaggagcggtcggggggcacgcctcccgccgccccgacgccgtgacgacgcagctagcggggtaaatgtccttggccggattcaattgcataggttcctggtgcctgcatgtcgatggacactggtattctgtttcttctttgtttattttttttttattttcgctcttttttttggtcttttcagggcattgttttgttggatcaaattttcgtttttccccccgtcatctccctctctctttcaggcttcattcatccaagcaaagaagtgtaatttttcttcagcttc

SEQ ID NO: 32282 - DNA, 1539 bp, Zea mays
  Clone ID: UC-ZMFLB73284B10_FLI
aagcctcttgacaatccagagcttgaaaattggcataactaccttgactacatcgagaaggaagaagacattaataaggttataaaattgtatgaaaggtgtgtgattgcatgtgctagttattcagaattctggatccgctatgtgcaatgtatggaggataaaaggagtctagacctagcaaacaatgccctggctcgtgctactcatgtgtttgtcaagaagcagccggagatccatctgtttagtgcgcgctttaaggagcttaatggcgatatttttggagcacgtgcagaatatcagcatctgtattcagatttatgccctggctttctagaggccattgtgaagcattctaatatggaacaccgactgggagataaagaattgtcctgttcagtttatgaaaaggtcatcgctgctgagaagggaaaggaacagagccagctcttaccaacattgcttattcagtactcccgtttcttatttttggccatcagagacttggagaaggcaagggagatattaactgtgctgcatgagcagttaaatttaacaaaaccagtgcttgaggctgtcatccatctagagtcgatttttccatgcgaaaagcgtattgaatttttagactcacttgtggagaagtttgttacacctgaatcatctcagggagagttggcaagtctagttgacaaagaagaaatatcttccatatttttagagtttttggatctctttggtgatgcaaagtcaatcaggaaggcttcaactcggcatacaactcttttttcatgtaagagaagcattctgccatcaaagaaacggaaggctgatgatgctgttgtgtcagacagggacaagtttgctaaaactgggtctgttcagtcagccacaggaactgatccaaatgcttccaatcctcctgtttggcctgcgacttctgaaacatctggacatcaatggggagcttcttatgctcagcaggctgcatatcctgcatatggaacttatgactacagccatcaaatgccacagcctgctcctcaaacagctgcctatggcgcttatcctccaacatactctgttcaggcctatacacaacaaagctacacacaacctgcagcaattccggcagcaccagtgccagcagtggtaccagcacctacaccggcgtcagcttaccctcagcaacctgcggcagctcctcaaccttattatggaacaacctactactgacaagtagagtaatcttcgatggcgatctgacgagcctgttaatcagcaggtttgtcgatacgaggtcaaaggcatcacaaaaccctctgtactgccattgtttagccccccttcagacagatgccgtcgacgagatgatcacttgagaacaaatttgagattggtatagtctgcatttttgtcgttagcatgtgtcgctagggattgctattgtttttcttgtaatagcataatctttactgtagaagaggcagcgggtgctaaccaatcctatgaacatataattaacattattcactgttt

SEQ ID NO: 32283 - DNA, 999 bp, Zea mays
  Clone ID: UC-ZMFLB73284C10_FLI
catgttcgttcagctttagcctcagtcattatgggaatggctcctgtactgggaaaggatgctaccatggaacagcttcttccaatttttctctctttgctgaaggatgaatttccagatgttcggcttaacataatcagcaagcttgatcaggttaatcaggttattggcattgactttttatcccaaacactgctaccagccattgtagaacttgcagaggataggcactggagagtccggcttgcaataattgagtacatcccattgctggcgagtcagttaggtgttgggttttttgatgacaagctgggggcactctgcatgcaatggttggaagataaggtcttctcaatcagagatgctgccgccaacaacttgaagcgccttgcggaagagttcggtccagagtgggcaatgcagcatataattcctcaggtgctggagaagatcaacaatccgcactatttgtaccgcatgacgattctgcaggctatctccttgctagctcccgtcatgggtgcagagatcacttgtcaaaagctgcttccagtcgtcattaattcttcaaaggacagggttcctaacatcaagttcaacgttgcaaaagtactaaagtcacttgtaccgatcctcgatcaatctgtcgtggagaagaccgtgaaaccatgccttgttgagctcagcgaggaccctgacgtcgatgtgaggtactacgcgaaccaggcgctgcaggcgtgcgatcaaatgatggtgtcgagctaactagccgtgtgcccgagtacttagagttcgatgcctcatagtccaattttggattacctgtaatttgttgggccttttagattgaagagttttccgtctagcctcggtggacagatcgacgctgcccatgctgataaatggacggtcctgatccattgttcgttgtgttattaatgttgtataattgagcaggacacaacacgtacgttactctctgtgtctgtgtgtgtttgc

SEQ ID NO: 32284 - DNA, 1756 bp, Zea mays
  Clone ID: UC-ZMFLB73284D03_FLI
gctgctccccccaccttctcctcctgctcctgccctcggtttctgatcagcgaacatgggaacccgcggcgtcgccctgctgctcctcgcggcggtgctgctcctccaggcgctcctcctcgcgtcgtcggagggcctggtgcgggtcgcgctgaagaagctgcccgtcgaccagaacggccgcgtcgccgcgcgcctctccgccgaggagaggcagcgcctcctcctccgcggcgccaacgccctgggctcaggcggcgacgacgactccgacgtcatcgcgctcaagaactacatgaacgcgcagtactttggggagatcggcgtcggctcgccgcagcagaagttcaccgtcatcttcgacaccggcagttccaacctctgggtgccgtcctccaagtgctacttctcgatcgcttgctacttccactcgcgctacaagtcagggcagtcaagcacttacaagaagaacggaaaacctgctgccatacgctatggaactggttccattgctggttttttcagtgaggatagcgttacattaggtgatctggttgtgaaggatcaggaatttattgaagctacaaaggagccagggcttaccttcatggttgcaaaatttgatggcattcttgggctaggctttcaagaaatctctgttgggaatgcaacaccagtgtggtataacatggtgaaacaaggtctcatcagcgaccctgttttctctttctggtttaaccgacatgctgatgaaggagaaggtggtgaaattgtgtttggtggaatggattctagccactacaagggtgatcacacgtttgtcccagtcactcggaagggatactggcagttcaacatgggtgatgtcctggttgatggaaagtccactgggttttgtgccggtggctgtgcagccatcgcagattctggaacttccttgcttgctggccccacagccataattactgaaatcaatgaaaagattggtgctgctggtgtagtcagccaagagtgcaagactgttgtttctcaatatggacagcagatcctagatcttttgctagctgagacacaaccagcgaagatctgttctcaggttggtctgtgcacttttgatggcacccatggtgtcagcgctggaattcggagcgtagtggatgatgaagctgggaaatcaaatggtggtctcaagagtgatccaatgtgcaatgcttgtgagatggctgtggtatggatgcagaaccaacttgcccagaacaagacacaggagctcatcctgaactacattaatcagctttgcgagcgtcttccgagtccgatgggagaatcagccgtggactgtggcagtcttgcgtccatgcctgacattgcgttcaccattggaggcaagaagttcaagctgaaaccagagcagtacattctgaaggttggtgaaggacaggctgcccagtgcatcagcggattcacagctatggatatcccaccaccccgtggccctctctggatcttgggtgatgttttcatgggagtctaccacaccgtcttcgactatggcaagctgagggttggcttcgcagagtcggcctagggatatggtttggcagcaacccgtccagaggcaaacgcgtaatttgtgtgtttatgcgaccggcgatgtgtgtatatatgctactacatgtttagtgatgctttccgagacctgagacaacgcccgtctgttttaacgtggcgcaagaataattctggttctggatgt

SEQ ID NO: 32285 - DNA, 1538 bp, Zea mays
  Clone ID: UC-ZMFLB73284D06_FLI
gctcctcctcccccacctggacctcccagaggttctaaagcaagacttgctcagctgtcacctgttgagtcaagtcgttctgaaggatcatctgccagcgagcagaccagcgaatcatctgaagcagaagttaatgctccaagaaccaagcttcgacctttctattgggacaaagttcttgctaatcctgatcagtcaatggcatggcatgatatcaaattcggttcttttcatgtgaatgaagatatgatagaggaattgtttggttatagtggtggaagcagaaataaccttaaggataaggaactcccctctgcggatcctgcatctcagcacatttctcttctcaatgttaagaaatcatgcaacctggcagttgttttaaaggcaatgaatatcagggtacaagacattcatgacgctcttattgaagggaacgaacttccaagggtgcttcttgagacaatcttgagaatgaaaccaactgacgaggaggaacagaatctcaggctttataacggggatttctcgcagctaggccttgcagaacaagtgatgaaggcattaattgacacgccttttgctttcaagagggttgacatgttgcttttcatgtcctccttgcaagaagatgcttcaagtctcagggattcgttccaccaattggaggccgcttgtggggaactgaagcaccgcctttttctcaagttactagaagccgtgctcaaaactggaaaccgtttgaatgatggaaccttccgtggtggtgctaatgcattcaagcttgacactctcctgaagctatcagatgtcaagggtgctgatggaaagaccacattgctgcactttgttgtgcaggagattgttcggtccgaaggtgtccgcgaagcaaggctagccatggaaaacggaagaagtccagctcatagtgcttcagatgacacttccaatggatctcttgaagaggacggtgatcactactccaaccgcggacttagcattgtgtcaggacttagcagtgagatggacaacgtcaagagggtagccgcactggatgctgagcctctgtttgccactgtggtgaccctcagacaagagttgctgaaatcaagggagttcctgaatgaaattgcgacagtagaagagacgagtggattcagacgttcgttggaaagctttgtggaacacgcggataatgagacggggtttttgttgaaagaagagaagaggttgagatcgttggtgaagaaaacaatccggtatttccatggaaacgactctaaagacgacggtttccggttgtttgtggttgtgagagatttcttggtgatgctagataaggcgtgcaaggaggtcggggcatcacagaagggtacgaataaatcacgaagcagtggcagtggcagtggcaatggcaatggcaaccctacgttcccgtcaatcctacaggagcaacagttccctgctgttattgatggccattcagatagttcacatactagcaattgacgatgagatactaacctttttttgtaaag

SEQ ID NO: 32286 - DNA, 756 bp, Zea mays
  Clone ID: UC-ZMFLB73284F05_FLI
ggacctaactggactctgggaggtagatcttaatgggaatgtaaatggagcggtggaaacatgtggagagagttttcaccgatttgacaagtacctcaacttctcaaacccaaatattgctcagaattttgatcctaatgcatgtggttgggcttatggaatgaacatgtttgatctggaagaatggaagaagaaagacattactggaatctaccacaaatggcagaacatgaacgagaacaggctgctctggaaattggggacattgccgccagggcttctaactttttacaagctgacacaccctctggacaaatcatggcatgtgcttggtttagggtacaatccaaccgttgagcgctcagaaatagacaatgccgcagtcatccactacaatggtaacatgaagccatggctggaaatcgcaatgacaaagtatcggccttactggacaaagtacatcaattatgagcatccttacattcatggatgcaagttcagccaataggaactacctaaacattcttctgtgatgaacactgaagttagagggcactcaaaatatagtcctctcttagtagtataactatcacatgttctttcttcgttttatattaagcttatcatgtgtatgtagtagtttcatcgcctttagtccgttgtcggttcttgtctttttttttgtcatgaaaaggacgatgagttcaaagattctcatcagctgataaatgcaatatatgaatttctgttggtagc

SEQ ID NO: 32287 - DNA, 1265 bp, Zea mays
  Clone ID: UC-ZMFLB73285D10_FLI
gaactcacctaggcgcaacaatcgcgatacccgcctctacactgcgcgatgaacgatacgattaacgcacatggagttgacaggtcattctcactgcaatggtccaggggtaaagctgacgaaaaaagctcagataatgaggctaacctcatcagtatgcccttgctcactgtatgacgtagatgattcaacactgaccacattgaaggggggaattggagaggtgtacgacactcgtccacttgtcagcaatagcccaaaggtggacgaggatatgataatggcgttcgcccttcatctggccaataactgaggtccaaaccaccacagtatttcttacccgtcactacatacctgagcatgcagtgagaatgacaatcaactaaatgtttgcttactcgtcattcctttgaaatgtatcttgttaaccttattcattttactagggaagggatgacatggatttttctcgttcgagcatcaggttttgtgcgttgattatggtgtgctcgttggtgagactgcgacgtcctcgttcaagtcagctgataatcgtgtcctccaagagcaactactacagaagaatgtggaaatcaacgatttataagaaaaagtttttcacgttgagcaataactctcagcaaaagtggatatatcctctgagaaggaagctgattgtgcacatcaggagactattgatttgaaatctaaacttcagtccaaggttcttttactgataatgttctttcactttgtgtatttgagccccttgtgtagtgcatattcttcaacatacaatattcatggtttggttactgacctttcaccaaattttctgttatgtccttcctgtaattctacttgatagaaatagtatgcatgttcattagatggctatatgcaaactgcttgtattttatgctttccttgttgatatttaagccaaccaactttgatgatgtactttggtaggaagctaaaattgaaaagatgaaatatgagcatctggcgagggaggctgctttggtagaggatcttcttgaagaggagtacaagaaaaagtttgatgaggcaaacaaggaactatctcttgagaatgatctagcaagcatgtgggttcttgttgctaagttgaaaagaggggctttagacacatctgatttgaatgttgatgatcgaactaaagtgtaagggcgtagagatcgccacactgttgtctcataattggtgttaataaaaaataacatggtgctgcacggaatctc

SEQ ID NO: 32288 - DNA, 581 bp, Zea mays
  Clone ID: UC-ZMFLB73285E05_FLI
atatcaaggaaaaagaagttgctgaagaagcaggctgaaggaaagaaaaggatgaaggcaataggaagggttgatgtccctcaagaagcattcatggccgtgttgagactggaaaaggaggtgctatgaaagtgctcatgaacctttgtgtctccgtaaattaaagacctcttcctgtgcgccactcacaagtatagtcagacgagagctttgagacaacaggcattcactatggttcaacctgtccgctctggaccataggaaccagtcaagcacagatcactcccagaacaaaagcaggtaaatctggcattcgttcgctattttttgcttttttatgtgtcaggctatgatggtaaaacaatcatgtcgccacagagttttgccaggcacatataggaaattcatatgtcaaagtgcatcatgtagtccaattccttgtaacgcatgctacagagacttgtttctacagttgaatataccttgtaaggctgggaccaacagatcgtgcatatgcaaaacaagaggtttgtaatattttatacggtagacagaattgtttataaagtacaatttaaagt

SEQ ID NO: 32289 - DNA, 2159 bp, Zea mays
  Clone ID: UC-ZMFLB73285G01_FLI
gccgacgaggacttcgacttcggggccccggaagggcacggcatcttcgaagcgctcggggagctcctcatcgactctgggtgcgtctctgaccaggagcactgccttcaggtctgcagtaagctttgtgaaaagtttggaaagcatggtctggtgaaaccgaaacaagctatgcgcagccttgtcacaccattacgaatgaatgcggggatggacgatgatgtcgctcccaaaaagccgcagcctgaagtattcgatggaccactgctgtcttcgcgcgataaagccaagattgaacggagaaaaagaaaagaggagaggcaaagagaggttcaatatcaaatgcatgttgcggagatggagacacttagggctggaatgcctcctgtttatgtaaaccacagtaatgatggtgggccagctgttagggatatacatatggagaacttcagtgtcactgttggtggtcgtgatctaattcaagaagccactataacacttgcttttgggaggcactatggacttgttggaagaaacgggactgggaagacatcttttctcagagcgatggcattgcatgcaattgatggtattcctaagaactgccagatattgcatgttgagcaagaggtcgtgggtgacgatacgacagctttgcagtgtgttctgaacgccgatgtcgaacgagttcaacttttgcaggaagaagctcgtcttgttcaacaacagaaagatttagagattgaggctgagtttgggcagagctctgacaagggcaaggatggttttgacaaagattctatcagcaagaggcttgaggagatatataaacggcttgagctcattgatgcggatgcagcagaggctcgcgcagcatcaattttggcgggtcttagttttactccagaaatgcaacgcaagcgtacaaaacaattttctggtggatggcgcatgagaatagctctagcacgtgctctgttcattgagcctgatttgctactacttgatgagccgacaaaccatcttgatcttcatgctgtgttatggctagaaacttatctcctgaagtggccaaagacattcattgttgtatcacacgcaagggagtttttgaatacggttgtcaccgatatccttcatctgcatggtagaaaactacatgcttacaaaggtgactatgacacatttgagaggacaagggaagagcaccttaagaatcagcagaaagcctttgaaacaaatgagaaggccagacagcacatgcagacattcattgacaagtttcggtacaatgcaaagagagcatcacttgttcaatcaagaatcaaggcattggagcgaatggaacatgttgatgcagttgtcagcgatccagactataaatttgaatttccaaccccagatgaccgccctgggccaccaatcatcagcttcagtgatgcctcatttggttaccctggagggcctaccttgtttaaaaatttgaattttggtatcgacctggacagccgcatagcaatggttggtcctaatggcattggcaagtccactatactgaaactaatttctggggatctgcagccaacttctggaacagtatttcgctctcccaaggttcgcatggctgtattcaatcagcatcatgttgatggccttgatttgacggtgaatccccttttgtacatgatgaagtgctatccgggtgtgccggagcagaagttgagggcacatctgggttcgtttggtgtttcgggaagccttgccctccaatctatgtacactttatcaggtggtcagaagagtagggttgcattcgcgaaaataaccttcaagaagccgcacatcattctccttgacgagccttctaaccatcttgatctggacgctgttgaggcgctcatccagggtttactcatttttcagggaggggtgctgatggtgagtcacgatgagcatcttatcactggaagcgtggacgagctttgggtggtgtcggaaggcagggtgaccccgttctcgggcactttcaaggactacaagaagatgctcaagtaacaaaaacatgtattatcgaccatagcctatatatctatatgcttgctattatgttgtattaccgtataaattttgggagtaaagcatcgaaattattataacac

SEQ ID NO: 32290 - DNA, 863 bp, Zea mays
  Clone ID: UC-ZMFLB73285G08_FLI
tttgagaaagtctaaacttatgccacgagctacaggtccttataaagttcttgcaaaaattaatgataatgcatatacacttgagttgccgccagatattggggttagtcccacctttaacatttcagatttgaagccatatatgggtgatgaagatgagaccgagtcgaggacgactccaattcaagaggaggaggaggatgaggacatcacttctatacatacaatgaatggaccgataacacgatcacgtgcatgacagctcaatctctaggtacgttctaccctagtcaattgtgtttcagagcttacgcttggggccatggatgtttcgatgattaggaaccttggagagaaccagcaaggacttgggaaaggcctatgtattgaggaggagcagcaagggcacccacaacaggaaggagatcaagtccgactcggctgcggctccatctcaggtttcaggaccagtctgcactaaaatggacgcccaagatgcatccggactccaattgcgacggacttgatatggttagaaagataaggagattatctaaccaacccaactggttccaccctaaaattcgtccggagtcaacgggaatcgtcgaaacaagtcatcattcagattctgttttggtgctgcgacaccgtctgttgggccgttgggccgtgtatcgcgtcggagcccattaggggcgagtctaggggtcacgcacgccctaatactctatttattcagcagccgccgccatgttaggtttgggttttgcttagatcaattctgtcatcgaacagtgtcgccgtcatcggcttgtgagaccccatcccgtaatcaatacaattttggttgcgtttctttc

SEQ ID NO: 32291 - DNA, 332 bp, Zea mays
  Clone ID: UC-ZMFLB73285G10_FLI
gagtgaatgcatcatcatggacctgtgtggtccccgccggccgtgtgaggccagggcccaggccgactggccgtggtggttattgaggacgtgcaaattgaggcctgattgcacgccatgatgtgtcacacccgggttccgtgggtagtaacgcgaaaataaatcatcaagtatgttgcgatcaagtctcacacatatattgactcattatatagaaacgaatgtcatatcatttatatataacagagtgttgtataaaatagttaactaattacatcatatgaagacaacgatccagcaaccacagttgactgggagacgatagcctagac

SEQ ID NO: 32292 - DNA, 1739 bp, Zea mays
  Clone ID: UC-ZMFLB73285G12_FLI
cgcagagataggcgtcttcgtactcgcctacctccgcggctcaaacctttcccccttctcccaattccttccgccggccgccgctccacccgtacgacgacaccatgagggagtgcatttcgatccacatcggccaggccggtatccaggtcggaaacgcgtgctgggagctgtactgccttgagcatggcattcaggctgacggtcagatgcccggtgacaagaccattgggggaggtgatgatgctttcaacaccttcttcagtgagactggtgctgggaagcacgtgccccgtgctgtttttgttgaccttgaacccactgtcatcgatgaggtgagaactggcacctaccgccagctcttccaccctgagcagctcatcagtgggaaggaggatgcagccaacaactttgcccgtggtcactacaccattggcaaggagattgttgacctgtgccttgatcgcatcaggaagcttgccgacaactgcactggtctccagggcttcctcgtcttcaacgctgttggtggaggaacgggctctggccttggttccctcctcctagagcgcctgtctgttgactacggcaagaaatccaagcttgggttcactgtgtacccttccccccaagtttctacttcggtagttgagccatacaacagtgtactgtccacccactccctcctcgagcacactgatgtggctatactgctggacaatgaggccatctacgacatctgccgccgatcccttgacattgagcgcccaacctacaccaacctcaacaggcttgtgtcccaggtcatctcatcccttactgcctccctgaggttcgatggtgctctgaacgtggatgttaacgagttccagaccaacctggtaccctacccgaggatccacttcatgctttcttcgtacgctccagtcatctctgctgagaaggcctaccacgagcagctctctgtggctgagatcaccaacagtgccttcgagccatcttccatgatggccaagtgcgacccacgccatggcaagtacatggcctgctgcctcatgtaccgtggtgatgtggtccccaaggatgtgaatgctgctgtggccaccatcaagaccaaacgcaccatccagttcgtggattggtgcccgactggcttcaagtgcggcatcaactaccagcctcctagcgttgtgcctggtggcgacctggccaaggtgcagcgtgccgtgtgcatgatctccaactccaccagtgttgtggaggtgttctcccgcatcgaccacaagttcgacctcatgtacgccaagcgtgccttcgtgcactggtacgtcggtgagggtatggaggaaggtgagttctctgaggcccgtgaggacctggcggcgctcgagaaggactacgaggaggtcggtgctgagttcgatgagggcgaggatggcgacgagggtgacgagtactagagaagtttgctgatgacgcagcatcaggccagtgtgctgcccttatcccgtgatctgccgagagttgctcctgctatcgtgttatgtgtgtctgttctgaagtattgtgtggtttacaacacctgatgttgtaagagttgttaattcccctgcattgctaccgggttattgagaataattatggctgtttacgttgttgcttcatctcggagatgctttacatttaccaccttgttcatcttttgtcatcagtaaaatcgagtcggcggatgattttct

SEQ ID NO: 32293 - DNA, 2169 bp, Zea mays
  Clone ID: UC-ZMFLB73285H08_FLI
gggccgccaccgccaatcccctcccgtcctccgccacctctgctgagagcgagaagagatggccggcaagggtgatgggccggcaatcggcatcgatctcggcacgacctactcttgcgtcggtgtgtggcagcacgaccgtgtcgagatcatcgccaacgaccagggtaaccgcaccacaccctcgtacgtcgccttcaccgactccgagcgcctcatcggagatgcggccaagaaccaggtcgccatgaaccccatcaacaccgtctttgatgccaagcgtctcattggcaggaggtttagtgatgcctctgtccagagtgatattaagctgtggcccttcaaggtcattcctgggcccggtgagaagccaatgatagttgttcagcacaagggggaggagaaacagtttgcagccgaagagatctcctccatggttctcatcaagatgcgtgagatcgctgaagcttaccttggcagcacgatcaagaatgctgttgtcacggtccctgcctacttcaacgactcacagaggcaggccacgaaggatgctggggtgattgctggcctcaatgtgctgcgtatcatcaatgagccaaccgctgctgctattgcctatggtcttgacaagaaggcaaccagcgtcggtgagaagaatgtcctcatctttgaccttggaggtggtaccttcgatgtctccctccttactattgaggaaggtatctttgaggtcaaggccacagctggcgacacccatcttgggggtgaggactttgacaacaggatggtcaaccactttgtccaggagttcaagaggaagaacaagaaggatatcactggcaacccgagggctctccggaggctgaggacctcttgtgagagggccaagagaactctgtcttccactgcccagaccaccattgagattgactcgctgtacgagggcattgacttctactccaccatcacccgtgccaggtttgaggagctcaacatggacctgttcaggaagtgcatggagcctgttgagaaatgcctgagggatgccaagatggacaagagcagcgtccatgatgttgtccttgttggtggctccactaggatccccagggtgcagcagctgctccaggacttcttcaacggcaaggagctgtgcaagaacatcaatcctgatgaggccgttgcctatggtgctgctgtccaggctgctatcctcagtggtgagggcaacgagaaggtgcaggacctgcttctgcttgacgtcactcctctctctctgggtctggagactgccggaggagtgatgaccgtccttatcccgaggaacaccaccatccccaccaagaaggagcaggtgttctccacctactcggacaaccagcctggtgtgttgatccaggtgtacgagggcgagaggacccggacccgcgacaacaacctgcttgggaagttcgagctctccggcatcccaccggctccccgtggtgtcccccagatcacggtctgcttcgacatcgacgccaacggcatcctgaacgtgtctgccgaggacaagacgacggggcagaagaacaagattaccatcaccaacgacaagggccgtctgtccaaggaggagatcgagaagatggtgcaggacgcggagaagtacaagtccgaggacgaggagcacaagaagaaggtggagtccaagaactcgctggagaactacgcctacaacatgcgcaacacgatcaaggacgagaagatcgcgtccaagctggctgccgacgacaagaagaagatcgaggacgccatcgacgcggccatcagctggctggacgccaaccagctcgccgaggcggacgagttcgatgacaagatgaaggagctggagagcctttgcaaccccatcatcgccaagatgtaccagggcgcgggtgccgacatgggaggctccggcggcatggacgaggacgctccggctggaagcggtggccctggccccaagatcgaggaggtggactaagcggtttgtgtcagtctcgtgtgtctgctgcagtggctggctggcccagtcgctgctcgatttatcgtcgtcgtcgcggtgtatccgcgttagaaccttttgttggtgaacaatattatcgtggcacgcgttttaagtaatacggtattctggttcggttt

SEQ ID NO: 32294 - DNA, 2385 bp, Zea mays
  Clone ID: UC-ZMFLB73286E04_FLI
acagatggatggctctaaatttacacaatcaaaatgattgagctcacgctggagattaatctcataagaagaaaaaatctttgtaagttatccagcacaatgtacaagtacaatagattgcggagtaccttcttcacacatatacaaatactcactgatgaacctctattatttgaggaagggattcatatcaagggccatataatttgaaatctctatattctcttctacgctcaaaccaatatttatttttcctttgcttaatgtgcctgcttacaagttagaagaagggtggaacatgcctagctccttgccgtgtcccttgatcgtgcttcagcttgctgacacatgcagtcaggcataggaagggtgtatatggattcctgtggtttccttaatgcgaaacctttcatctcactgtgccgacgcatgtcctgcatgtggtgcttgaatcgatcccatctacgtacaagattagctttgatactccacaactagatgatgattacgaaaaaaaaatcataaaccctttcgtgttctgcccattgcaggtgttcagaactaaaagaaagtaaccagttacagaagattcaatgtatgtcagtgtcagcatgcacataaaggattcggtatactgtaattagattagaataaacacagaggcaatcatgtttggcgaaacctttatgaaataagggtcatcagatgaccgttatcttggacacaaaaatggctacatgtggacgaatttcaagccacattcattgacagtttatgaaacttcacgaggatgaacgaaattcaatttgctgagcaagaaggccggaagttcactggagtttatggaccacagggagacgatgagaaagtgtccttcctgcaggaactcagggatatcagggcgatctacagtggcccttggctagtagcaggtgactttaatctcatctatcaggctgctgacaaaaacaatgcaaacctggatacagcgatgatggcaagtttcagacgcttcttgaatgatatggaggtcaaggagatccccctgcttggaaggaaatacacttggtctaatgagcggcagtcccgtagacccgtactttggttaggctggacagagccttttgctgtgttgattgggatggtttatttccggagtcaattctgcaaagcatgacagcaggagtgtctgaccactaccccctcatacttggcctcaaagtgaagactgctggtaagcgtcggttccattttgaaagtttttggaccaaaataccgggcttcttggatgcggtgaagcagaattaggaagctcctgtgtcttcaaattgtgcagttgagcgcctatttctgaaattgcaaaggctcagtaaagggctgcagaaatggggtcagaggaaggtgggcaacatcaaagttcagatggaaatggccaaagaaatcttacatcgactggaaattgagcgtgattcaagggatctctctgaacaggagtggctgcggaggaagcttaaactacactgccttggcctggcctcccttgaaagaaccattgcccgcttgcggtcctgtatcctctatctccaagacggcgatgctaatacagccttcttccatcagcaagcaaggttcaggaagaagaatttcatacccaagcttaatgttggtgatcagatagcagtttcccaagaggacaagcaagcagttgtgctagacttttatgaaaacctgctggggaaagctgaagaaccaatttataccgttgaccttgcagaattgggtatacagcagattgagctctctcaactagatgctcctttcatggaagcggagctatgggcaactataaaagacatgccaatggacaaggcgccagggccagatggctttactgaccacttctataaatcttgctagagtatcatcaagggagatattttgatggctttagacgctatttatctgaggtcatgtcttcaaattttgtctcctgaattcggccttcattaccttgttacctaagaaacaggatgcttctcaggttacagattttcgccatatcagcttggtgcatagctttgctaaattagtaacaaaaataatggccaataggttggcccctgttctaccgattttgatcagccccaaccagactgcttttgtgaaaggtcaaagaattcatgataattttatgtttgtccaacaaacggtcaaggctctgcacaagaataagaagaaagaagctcacatcctccttaaacttgacatatctaaagcttttgattcggtctcctggtcctttttattggaaattcttaggcatattgggtttggacagcgatggattaatctcttatgtttgctgttatctacttcctctacacc

SEQ ID NO: 32295 - DNA, 1194 bp, Zea mays
  Clone ID: UC-ZMFLB73286E07_FLI
tgatttagcaccagccaaattgacctttaactctggtgacataagctgttgctagggtagcaaatcaagagctaagaatggcagattcaatggtagcaagcttctgggggcctgtgacatcaacgactgagttgtgcgaggagaattatgcacactcgtcatatatcgcagaattctacaataccatctctaatgtcccatgcgttcttttggcacttattggattagtgaatgctttctgccaaggttttgagaaacgatttagtgtcctgcacatatccaatatgatacttgctattgggagtatgattttccatgccaccttgcaacttctcctacaacagagtgatgagactcctatggtttgggagatccttctctacatgtatgtcctctattcaccggactggcactacaggagcacaatgccaactttcctgttcctgtatggtgctgcctttgccgtagtacatttctttgcccggttccaagtcgtattcaagctgcattacgttggcctctgcttgctctgcatcccccggatgtacaagtactacatacagacgaaagacgtgggtgcgaagcggctcgcaaaactgtgggtccttacactgacccttgggaccctctgctggctggttgatcgcgtcttctgcaagaagctttcgcattggtacgtcaacccgcaggggcacgcgtggtggcacgtgcttatgggcctcaactcgtactatgcaaacacgttcctgatgttctgccgggctcagcagcgcgggtgggagccgcggatcacgcacctccttggattcttgccgtatgtcaaggtccagaaaccagagaagagggaatgatttctgtctctgcttgaaaactgatgatattcagtcggccaccagtaagctaatgcccccaatgtgtgctcagacaagtccgtggcactcttgtatatgggcgcccaaatgattacggacttcaaatgttctgatgtcgcattagattttgtatcatacttaaatcatcgaacagagattgtcctagttttggccacctttcttttggtttcttcgcaattaccgtttggtggtaaattaggactgagttatttatttatttgtttgtcgttgaatggagtccagttgtactagttaccactgcacaagaagatacattcatccacatgatgacatgttaatt

SEQ ID NO: 32296 - DNA, 760 bp, Zea mays
  Clone ID: UC-ZMFLB73286E12_FLI
cttcactcagcgtcacagctttatctgttggatccaactgaagaaaagccgacctggagaatattgaatattcctggtcgtcctccccgtttcgcctggggccacagcacctgtgttgttggaggaacaaaggcgatagtgcttggtggacaaactggagaagagtggatgcttacagaaatacatgagctttctttggtcagccgctcagtttgagttctggaatggtttgtagtcatgttccttgcaaattagatgcggcttcttatgcaacctgaagtttgattgccgtcttcagaagaactagaagaatgaatgctgggcatactgaatcttctggcagctacctggcggacttggaagatgaaatggcatcgactggtttgctcgctttgtgtagaaaaggggtagtgatatgttcatttttattgccgtttgtttggccttttttaccagataattacaattcataagctactactgttgtggaatgagtagcaaattttatatgtattctcagaagttcaagacttgcaatatgttaggaaaacaaaagactgcactgtatatagtttaatcttttgatgtacggtacgtggacaacttgatgctgctgtcttgtggcacaggcacacagctagatggcattatgtatggtgatcactgatcaaccatgtttttttttgtagaacttgtataatatgtagaagtttcaatctggtgagcttagctcagaatcggtttacttgtcttctgtttc

SEQ ID NO: 32297 - DNA, 1558 bp, Zea mays
  Clone ID: UC-ZMFLB73286F02_FLI
tcatcttcgacaccggcagctccaacctctgggtcccctcctccagatgctacttctcgattgcctgctacctgcaccacagatacaagtcggccaagtctagcacgtacaaggcggacggtacggcgagacctgcaagatcacctacggctccggctcgatcgccgggttcttcagcgacgacgacgtgctggtcggggacctgaccgtcaaaaaccagaagttcatcgagacaacgcgcgaaagcagcataacgttcataatcggcaagttcgacggcatcctcggtctcggataccccgagatctccgtcggcaaggctcctccgatctggtaggtatctatctcattgctcttgcacccgccggcgggcggcggccggcccatcacatgtaggttgccaggcagagcatgcaggagcaggagctgctggcggaggacgtcttctccttctggctgaaccggagcccggacgcggcggcggccggcggcgagctcgtcttcggcggcgtcgaccctgcgcacttcagcgggaaccacacctacgtccccgtctcccgcaagggatactggcagttcgacatgggggaccttctcatcgacggccactccaccggtttctgcgccaaggggtgcgctgccatcgtcgactccgggacttccttgctcgctggcccaacggccataattgcccaggtgaacgaagcgatcggggcagacgggatcatcagcacggagtgcaaggaagttgtgagccagtacggagagatgatcctcgacatgctcatcgcacagacggatccacagagggtgtgcagccaggttggtctgtgcgtgttcgatggcgctcgatctgtcagcgaggggattgaatctgtcgtcgggaaagaaaacctgggctcagatgtcatgtgctcggcctgtcagatggctgtcgtgtggatagagaaccagctccgcgaaaacaagaccaaggagctcatactgcagtacgctaaccagctgtgtgagcgtctgccgagccccaacggagagtcaacagtcagctgccaggagatctccaagatgcccagccttgcgttcaccatcgcaaacaagaccttcaccctaacaccccagcagtacattgtgaagctggagcaaggaggccaaaccgtctgcatcagtgggttcatggcgtatgacgtgccaccgccgcgtggtcctctctggattcttggggacgtcttcatgggagcttaccacacggtgttcgacttcggcaacgacaggattggcttcgcggaatctgcatgagtgtggagagcactctcatctttataaagacgataccctatgtattagggatgtgtagtttactgtctatccactacatgccaacagtacgctgcaaataaatcggtggccaaaattgctgaaaccagaaacgtgaacagtactgctttctttgtttctggagaagagcaaatggatgcttcaagacatgcatgtccgatgtgtattgagaaatagagcgacgagtgctgctcgatcgtcttgaaatttgtttgttcatggt

SEQ ID NO: 32298 - DNA, 1538 bp, Zea mays
  Clone ID: UC-ZMFLB73286F04_FLI
ctgcttcccccctatatatatctatataaaaaaagaaagaaaaaaaatcggacaaacgtgtggcgtcggcagccgggcaggtaggaaaaggtatcagcgtcgccaatctccatggagctcacaggcgccgcgctccggcgatacgcgctgccgtcggcgtccccggtggccgcgagggtggggaggaggaggcgaccagccagggtggcctgcgtcgggggcggggggttcgcggaggaggggcacctcagatactacgaggcggccccgcggaggaaggcggtggaggccgtggcgagggacctgggaaagctccgggccatggggctcgtcgcgggggacgcagccaaggagaaggtcctctcggacgccacggatcttctgctgcaggagctgagccagatgaaggatgcggaatacaagataaacaaggtggagaaagaacagaatgctgctatgaaagcactgaagaagcaggagaagcgcaccaagaagactgccatcatgatgatgaagtgtgaagaagatgagtcatctgagtcgagcgagagcgattgtgaggacgaggcaaccatgaatgtcgagcagggcttggtgatctcaacagcggttcccgaggttgttgcatcaagcatctcagctgtccccgcgatggagtgtgataaggctgcagtgaaggccatgaagaaaatggagaaggaacaaatgaaggccatgaagaagatggagaaggaacagaagaaggctgctaagaaggccatgaagatggagaaggaagcaaagaagatggcaatggctacactgaatggctgcagggatgaagacgattcctcatgctcatcagagtcgagtgaaagtgaatgcgagggccaagttatgaggatgagccgctgcgttacaatcaccgcaccggaaatgccacctccaagcacgggtcttccaatcatagttcctcaaattccagaacctttggcaccacagccgtctcaatctcaaccttcagagccagcaaccgcagtgcaagccaccagagtcagcagcgttgcagtaactgagacatccacaaccagcagaattgaggtctgcatggggggcaaatgcaagaagtcaggcgcggttgctcttctgcaggagttcgagaagactgtgggcaccggaggtgcggtcgtcggctgcaagtgcctggggaagtgcggcctaggtcccaacgtgcggctgaggagcggtgcctctgcggaaggttctgcaaaggggaacccactctgcatcggtgtaggctttgaagatgttggcaccatcgtggctggtctctttggaggcgctgatctgggcatgacacccacctagacctggtggtactacctcgacctagtcgtacttcaagaaatcaagagcacaacttgtaatcacagatgttgcattgaacaaatgtatagtgcagctacggccttgctagtgctactgctaagtttatgtactctctgtctatatagaacacgtatggtaatcttgtttctggtatgtgatccatattggtc

SEQ ID NO: 32299 - DNA, 855 bp, Zea mays
  Clone ID: UC-ZMFLB73287D03_FLI
caccaccgccacctcacacacacagccgccgggcgtgcgcacgcgctgctcctgtccccgccgctcgcactcgccgccgtctcgcgggcgccccacctcccggcatcgcagctcctgctcttcctccgccgcctgcgatgcctccccgaggcccggatgcgggacgagatgccgcgcctagcgctgcgcttgccactcccgccgggcgacgacgcgcgcgaggcgaacgaggtcgccgccgcggaggcccacgcggaggaggaggccgcgcggagggacgctgacctagccgcgcggaccacgcccaagagggaccgagcctcgcaccgggggcgggccggacccagctggacgtggaggcggcagctctggatggtcatccttgcggatctcctcctcctcacaatcctcttcgccgcctggctcgcagtctgccggggattcagctgcattggtcggtaaatagctacacaacctccaaggctgctgctcaatttttaagcaagaaatctggagtgcagtttgtttctcagacgaaaaagtgggtcataccaaccataactcggttgtaaggtgccaatattcgcaaggaaaggtgctttgccccccgcgcgcgcatactgttacgtctttattgtatgaatcgtgtttaaaagtgaatggcaacagtcctggtagactacataagtttgaatttgatggttttggtatggtgatctgtaaacccggtagtgcaatttttttgttcattttcctatagaaagcaaatgtcaaaattttgaccatggcagactcgggtatatgtgaatcttattgtcatgtaatatttgaatatttgccaggcatcttgttctt

SEQ ID NO: 32300 - DNA, 1134 bp, Zea mays
  Clone ID: UC-ZMFLB73287H06_FLI
gctggcgtgctgctgcggacttgacgatgtacatagcgcgggagacttccaaggtgtggaggaaggtggccacggaggtatcggtggagctgcagctcctgcgcgagaagtgggggctccttctcgccggtctgatctttcagtatattcatggattagctgctcgaggagtgcattatttgcatcgacctggaccactgctccaggacttgggatttatggcccttccagagctcgggcaagacaaaggttatcttagtgagactatattttcttccatcttcatctcctttgtgttgtggacattccatccttttatttatcacagcaaacgtttctatactgtcctaatctggcgcagggtgcttgcttttttagttgcttcacaatttttaaggattattacattctattcgacccagctcccaggtccaaattatcattgtcgtgagggctcaaaactggcaactcttccaccacccaatagtgtacttgaagtgctcctgattaactagtctccttataattgcttctcgcaagcactactcggtcgatgttgttgttgcgtggtacactgtaaacttagtagtattctttgtcgacaacaagctgccagaaatgccggatcggacgagtggactacatttgcttccattaagctccaaagaaaaagagggcaggcagaaggaggagaaagacagtaaactgaaggacgagttccacaagttactgaatgggaaccatgcggatcctactgatcggcgacagcgggcacagatgaacgggaggcacgacgaagacatcaatcacgcgctctccgaggccactgccaacggcacgtaagggcccgtcggcatctgcttttcaccgggggctttgtccttggcgctcggaggagaatcctcgcgggggtcgagaaaacctgcctggtgtggtgccccggccgcctttttctgaattatgaagctgtccgagattccagcgatccagccattcacatcatgcatcttcctgaaccgctgttgcgttgcgttgcgcaagaatcagaatctcgtggcgttcctcggtacagtttgcaccatacttcattgcaatgacatttatcagaaaggcacggtggggaaatgatcttgt

SEQ ID NO: 32301 - DNA, 384 bp, Zea mays
  Clone ID: UC-ZMFLB73288B03_FLI
tgaagatggagttcttctgatcgggcctcgacacccagccgccgacggccgagggagcgacctgtacatagcgaagactcgaggtacaagtacaaaagcaccagcggcggtggcggcggcggggacggaagctctgaagctatagctaacagcaagtccgtacatgtaggcccttccttgcccttggagaggcgagttcttcgctcgccgtagcgtgaaccagggggtgggcgatcgtgtgatttctttgaacgttttcgatccggcgattaatttgattgattaacacagccaccccgacgatagcgtacgtagcaatcacccgaacagtgaagctgtcacttttgtgtataagataatgcatatggtgcagatattagtatc

SEQ ID NO: 32302 - DNA, 1517 bp, Zea mays
  Clone ID: UC-ZMFLB73289A12_FLI
cctccctcccccccctcgcaccactccgctcacctctcttcacgccgccgtagccggcgagtagcagcgggtacgtgcctttgcggtgtaccttattggctgagccttccctttgccgaggaagagcacagaagcagggaggtcggcatggcggaggtgcatctaggtctgccaggtccctgggcggcggattacagggagatggccgaccactacaccactaagatcggtggagtccctgattggccaactggtgatatgggcttcaagcccgagactcttcagtgcagcttatgtgggaccaagctttgtcttgttgctcagatccgtgatggcacaaaacgcttgtatgttgatgaatcaatgtcgttccttgtaaaaaaaaactaatgtggttcggacttaaggtacatgcgcctgtggcaaagctaaacattgaggagaggataatctatgtgcttgtttgcccgacaccagaatgtggacctaaacctcaaagttggaaggttctaagagttcaaaaatgccataatgttatgcaaacagaaggtggtggtgatgaattaggtcaaccgaatggaccttcttctacaagtcttccagaagaacagaatgataaaaataaaattcctgagacaaatgatgacgattttgatctagatgccttagccgaagcacttgaacaagctgcaactttggcatcaaactcaaagaagaagaacaaatcgaagcatgctaatgctcctgtaaaacgtcctgtattgaaggagcaagcatgtgatctgagcatacctgtccttccttgtttttacatacattataataaggaactatatgggggcaaaggcgctgtgggttcaagtagcagtgagttggttttggacaaagaaatcatggatgccgcaaatgacgaagaagaaaaatgggaaggagaaaagtatgagtacgatagagctattggtgctgacagaacttttttaaaattcaagaaacggctggatgcatatccccagcaatgctttaggtattcttatggtggcaagccactgttggctacaacaaaattacaagatcctggcacctgtaggctgtgtggttcaccacgccagtatgaactgcaattgatgtctcctttatcatactttctccatgaagctggagacggttcctcaaattatgcacccagcagctggacttggctgactgttataatatacacctgccccaagagctgctgcccgtcctcatgcggtggaaagccccagagctgttgttggggagcagcggaggaggagatcctgattcaggaggatgaagtcctttaggatctaaccagtgctggttgagaaactattcccgatttgaacatgtaatatgcagtttttttttgttctccaatggttagagttgtaaagctatctgaaattttgaagtgtgttttgttattgtgccctggtatactgcagaactgtcatacttcacacagtatcatatcagactagtaagatttttttttc

SEQ ID NO: 32303 - DNA, 1197 bp, Zea mays
  Clone ID: UC-ZMFLB73289C01_FLI
cggaggtgagctgcttcactgctgtttgaattgcttgtcgacttggcaattggctcccagtcgctggtacgtgggcacgtggccatgcctgtaaaggggagatgcgcactaactggacgggatttgcaatggtgtgtgctgttgttgcagttgctaagtactctgcgaacgtggagatgtgtaggctcacggagcaagttgtgttctcggacccataccgtgtttccaaatttaatcggtggacctcgccttatctcgacaaagatgctgaggcagttcgcgaggatgatgagctcaagttggaagtagctgggctgaaatcgatgtttatcgagagagctcaagctctgattcatggagatctccacactggttctatcatggtgaccgaaggttcaactcaagtcattgatccagaatttgggttctatgggccaatgggttttgatattggagccttccttggaaacctgattttggcatactatgcacagaatgggcatgctgatcaagcgaatgatcgtaaggcttacaagaaatggatcttgaagacaattgaagagtcgtggaatttgttccagaaaaagtttgttgaactatggaataaacacaaagaaagcaatggggaggcatacctgcctgatatatacaacaagccaaagcttttgagcgttgttcagaagaagtacatgacaaacctatttcatgatagccttgggtttggttcagccaaaatgatcaggagaatagtcggaatcgctcacgtagaggatctcgagtcaatcaaggatgccagcaagagagcagagtgcgagcgtgctgccctcaactgtgcgaagacgatcctcaagggaagacaccagtttgagacgatcgagcaagtcgtcgagcatattcagtcattcgatcaggactgagaagacgacagtctatttgtgcgctgaagcctgaaggagccatactctcgtcaattaacccacgcatgcccgagtatcgatgaatcgtctgttttgtagtgatgaagcgcccggttgtttgtgatctctgtattggttgctaggtgagaaaagtatgtggtctcctggcttgaactgtgtgtacactattattccgggccggcatagcgagcagctgaataatgaaatgtacgggtcctcagtgaccatctcagtgcatataaacacgtgtgttaccaat

SEQ ID NO: 32304 - DNA, 1936 bp, Zea mays
  Clone ID: UC-ZMFLB73290C07_FLI
gctgaggcaaagtttggatcatgatattgggccagctattgctcatttcttgaactgtttcatggggaaagttttaggtgcttctacagagggtagtctaagtgacatgcagtcaaagactctgaagggccatgaaaatagccaaactcaaaagtctactaaaggccataaactgagcaatgctgctgcttcaagaaaaagcttgtcagcttattctcatctaacctctgatggaatttggtttagcattaaggaatttgcaaaatcaaaatatcagtttgaagtgccagatgatgcaaggctttcagccaaaagggtagctgttctccgaaatctttgccaaaaggtaggaataacaattgctgcacgtaaatatgatcttgatgcttcaactccatttgaagcctcagatattttaaatctccaaccagtcgtcaagcattctgttccaacctgtacggaagcaaaaaatcttatggaagcagggaaagtcaggatggctgagggaacattgaatgaggcatatgcattgttttctgaagccttttcactgcttcaacagataactggtcccatgcacaaggatgctgcaaattgttgccggtaccttgctatggttttgtaccatgctggtgatacagctggggcagttgtgcagcaacatagggaactcatcataaacgagagatgtcttggtcttgatcatccagacacagcccacagttatggtaacatggccttattctatcatgggctcaatcaaactgagctggcactgcggcacatgtctcgcacactgctgctgctaagtttggcgtcaggacctgatcacccggatgttgcagcaactcttataaatgttgcaatgatgtaccaggatgccagtaatatgaataccgctctcaggtatcttcaagaagcccttatgaagaatgagcgacttcttgggcctgtccatgttcaaacagctgtgtgctatcatgctctagccattgcatttagttgtatgagcttatataagctttcaattcagcatgaaaagaagacatatgatatactggtaaaacaattaggggaaaatgactcacggactgaagactcaaaaaattggttgaatacatttaagcttcgagaagagcaggtcaacgcccagaagcagaagggccaggaagctaatgcatccgataacgctgttaaattcttgaaggcaaaccctgcagttttacaagcaatgaaggctgctgcgatccaatcaggtggtgtgtcagcaaatgtcaacaggtcgctcaatgctgcagtcgttggagaaggtgtaccacgactgagaggagtggatgagcgagctgctcgagcgactgcagaagcacggaagaaagctgctgcaagaggccttaatgtccgtaatggccctgtggcaaaccatgcgtctgatgaactagctcagattctcaaactcatcaacgctgtttcggggtcttccactcctggctctgcaaagactgaggtatctgcctctgaagggcaggcaacgaatggatgtattcaaaatggaactgacactgaaccgaaggctgcggataccaacgggctatctgcatcggttaagtccactgtcaacgcaccatttggactggggacaacattggagtcgaagaagcagaaatcgaagcaaaagtcgtagaaaacctgtgcttggaatttcctttagcaacagttttggactgtagagtgatttgggtttttgacctttataggattgccacgttcacgtggtggaagagttcatttgtttttgttggaggttttttaggaggtctcaataatcattacaagaaagaagacaattgtttcgaatcatcattgatagaccactgatgagatattggctaatccttaagttaataaatcttcagtcgatacaatacctgtttaaagc

SEQ ID NO: 32305 - DNA, 1214 bp, Zea mays
  Clone ID: UC-ZMFLB73290H10_FLI
gctgccgcatggccctggcctccctcgcggcctcgctcccagtcgccgccaccgccgccgcggtgagattcccattccgtttccgcatcggtcgcgccatggcctccgccgccgcaggggcctcgccggcgagggtggccgtggtacagatgacctccgtgggggacgtcgacgccaactacgccacctgctcccgcctcaccaaggaagcagctgcttctggagtgaaatttctttgcttccctgaggtcttctcattcattggatccaaggatggcgaggctatgaagctagctgaaccattagatgggccaataatgcagagatactgctcacttgcaaaagaatcaagcatgtggctatctcttgggggttttcaagaaaagggacctgatgattctcaccagtacaatactcatgtattaattgatgacactggaaaagttaggagctcatatcgaaaaatacatttgtttgatgttgatgtacctggcaatatggtgtacaaggaaagtcgtttcacagccgcaggtgatactattgttgctgtggatagcccttttggacggttggggcttactgtttgctatgatttgagattcccagagctttatcaaattttgcgttttaagcatcaagcacaggtattactagtgccatctgcattcacaaagataacgggagaggcacactgggaaattctcctccgagctcgtgcaattgagacacaatgttatgttattgctgctgctcaagctggaaagcacaatgaaaaaagagaaagttacggtgattctataattattgacccatgggggacagtgatagctcgacttccagatcggctctccactggatttgcagttgcagatcttgatttgtcaaaagttgaggctgtgagaactcgaatgccaatttcagagcaccggaagttcgacagcgattggaaacccacgcctctttagtagctgagggtttattttgtgtttcctatgtttaatgtgcgtatacacatatagttgatatattcatctatgcataattattaccacaggtttggtcagtttgtgactgggaactcgcaagagaggttgctgaactaaataaggttcctaaattgccaaacgatgggactaaaacatggactaaattgtttgtctctagtctttcaaggggagactaaaagggactaaaccatataaattttacttttc

SEQ ID NO: 32306 - DNA, 1528 bp, Zea mays
  Clone ID: UC-ZMFLB73291A01_FLI
aacagatgccaaatagctgttcatcaagagtgctatggagcatgtgctgtacaagatcttacaacatggctttgtcgagcatgtgaatccccccaacagaaaagagaatgttgtctatgccctgtcaaagggggcgctctcaagccaacagacattgatggactgtgggttcatgttacatgtgcctggtttcagcctaaagtatcatttccggttgatgagacgatggagccagctatgggaataatgagcatccctgtagaatactttaagaagacttgcgtcatatgcaagcaaatgcatggtgcctgcacacaatgctacaaatgctctacctattaccacgcaatatgtgcgtcaagagctggatattgcatggagttgcaatgctctgaaagaagtggcaggcacattacaaaaatggtttcatactgtgattttcatagtactcctgacccagacaatgtgttgatagtgaagacaccggaaggtgttttctctaccaaattttttctccaaaatggtgagaaacagacagctgcaagactcgtcaggaaggaaaatcaccaggagaaagtgcttcctcctataatttctgactgtctagtcgcaaagtgcctgacctatgaaatgtcgaaatacaagaaacaaccaggagaggctattgcccaccggattatgggacctcgtcaccactctcaggattttattgatggtcttaatgcatgcatggatcgtaaggatgaccaatctttttcaacatttaaagagcgacttcggtatttacagaaaactgaaaatttgagggtctcgtgtggtcgatctggaattcatggatgggggctcttcgccgcaaggaatattcaggagggtcaaatggttattgagtaccgtggcgaacaagttagacggtgtgttgctgacttgagggaagcacagtaccatagagaaaaaaaggattgctatttgttcaagataagcgaagatgttgtcatcgatgctaccgacaaaggaaacatagcgcgcctaattaatcactcgtgtatgccgaactgctatgctaggatcatgaccgtcagcgatgacaggagcgagatcattctgattgccaagagagacgtctctgccggagaagagctgacgtacgactacttgtttgaccctgatgagtccgaagactgcagggttccatgcctgtgcaaggctcctaactgccgtgggtacatgaactagaagactaaccaacctcagaaacagggactaaagactaacgtgaccccccttacagttacagaggccaaaggctggccatttttcccggaattcttccgttggcttctcggtttatatttactggaaagtttattagttctcgtggctgcccaagttttgaaccattttgtttagatattgcgattgagggcagccaccccattgtatattctttcattgttgtaataagataccagtataatcaagaatgctgactttgaaatggaaagaagaaaaaactcaacttgatgccgtc

SEQ ID NO: 32307 - DNA, 2443 bp, Zea mays
  Clone ID: UC-ZMFLB73291G02_FLI
cgccttcccctcgcagccgccagccctcaacgttcctaccagctgccaccgcctgttacccgtgatgtctcccgcccttgccgctggcgtggagcccatggccgtcgacgattccgcctccaagaaggccaagcgcaagcagctcaaggccgccgccgccgccgcggaggcagaggcggaggccgcttcggtcaagaagaaagagaagaaagagaagaagcgaaaggtgaaggagccgtcccctccgctcccatcggccgcgtcctctgatgaggaagagaaaagcagcaccagctccgaggagacagcacccgcggcgaaaaaagcgaaggagaagacgaagaagaatgttgatgtctcgtcttcagcctcagatgacgatggcgagatcacagccagcagcgatgaggaccccgcggacccgaacgcgctgacgaacttcaggatatcggagtcgctgaggcagagcctcaggtccaaggggatcaagtcactgttccccattcaggccaccactttcgatctcgtactcgatggcagcgacttggttggccgagcgcgcaccggtcagggaaaaactttggcttttgtcttgcccatattggagtctttggttaatggggcaaacaaggcatctagacggactgaacatggcaggaccccaagtgttctcgttctactaccaacaagagagctggccaatcaggtgcacgctgactttgagttttatggtgcaacatttgggctctctgcatgttgtgtgtatgggggatcaccttatcgtcctcaagaaatggcattgagaagaggtgtggatattgttgttggaactcctggtcgtgtcaaggatttcattgttaaaggaactctcaatttgaaatgcttgaaattccgtgtccttgatgaagctgatgagatgctaaacatgggttttgttgatgatgtcgagctcattcttggcaaggtagaagatgctaccaaagtacagacgcttctgttcagtgccactctgccagagtgggtgaataagctctctatgaggtttctgaaagttgacaggaaaacagttgatcttgtcggtaatgagaaactgaaggccagtgcatctgttaagcaccttgctcttccttgtaacaaggcagcaagggcacaagttattccagacattatccgatgttatagccatggaggtcgaaccatcatcttcactgagacgaaggattctgcatcagagctttctggtttgattcatggatcccgtgccttgcatggagatgtagcgcaagcgcagcgtgaagtaattcttgctggattccgtagcgggaagttccaagttttggttgcgacaaatgtggcggcgcgtggtctggatattaatgatgtgcagcttatcattcagtgtgaacctccccgggatgttgaagcttacatacaccggtcaggtcggacagggagagcaggtaatactggtgttgctgtcatgctttatgagcccagatataagcacagtgtcagcagactagaaagggagtctggggttaaatttgagcatatctctgcgccacaacccactgatgtagcacaatctgctggcagtgaagctgcagatgcaattgcgagtgtgtcagacagtgttattcctatcttcaggcagcaagcagagcagttgctaagctcttccagtctgtctgcagctgacttgcttgccaaagcacttgcaaaggcagttggttacacggacataaagaaaagatcattgttatcttccttggaggattacagtacactacatcttcaaactggcagaccgatgtggtcacctgggtttgcttttactatattgaaaaggttcatgccagaagataaacttgcagatgtaaagggtgccaccctcaccgctgatggaacaggagttgtatttgatgttcctgcagcagatgttgaagattacattcaagcttcggagagtgccgcacaggtgacaattgatgaagtcaagcaactgccacccttgcaagagaaggaccagtcgagaggcaactctgggggaggaagatttggccatggaggtggccggagattttctggtggtggtggcggcggcagagggttttctggccggggaggtggcggcagagggttttctggcagaggaggcggcggcagtagatttaacaggaggaattagaagctgcttcaatctttatggacatttcagaattcagagaactatgtttgtgttcgacgtagttttgatgaagagggagggaatcgtctcagttttggctgcaactgtatcgtgcttttgtttatttgttagccttcgtcaacgaaggcttattttgttagtgatataattgaggcatggggaagagggggaggtaacagtctcagttttggctgcaaattgtatcgtgctattgtttatttgttagtgttcgtc

SEQ ID NO: 32308 - DNA, 809 bp, Zea mays
  Clone ID: UC-ZMFLB73292A03_FLI
caagatcctagaccgccgccgccgcgcccagcgccacgcggcggggcccgtccccacgccatactgtacgcgctagttgcaggctctactccgggagggatggcctaccacgaccctgacaagttgaagaagtacgatctggaggacctgaggaagaccccgaaccctttctacctcgagtcggacaagaaggctggcaacgggtacagttttgtgaggacaccgtcgccggcacccggcgtggacgagtcgccgttcatgacgtggggtgagatcgacggaacgccgctgaggctggaccccgacgagacgccgggcggcagcgagagagcgcatttcaagatgccaccacctcctgctcgcgacgtcaaggcgcacttgctttcgagggatgccgcccggaaaataaaggagcggtctaagcccttccataggccgcccctaccctcccctgcgaggggtgtcagcgcgagccctagaaccctttcgccagccgcgcaaaaattcgtgaggaacgccatctccaagtcgtcaaagtcctccagcgccattgacgaatctctccgtgcaagctacagaggctcgaccccgtctgcgagcactcccaagtcaaggttttcaagagaccctggcctcgcatcgcgttctccatccacaaggcagggttccacccctccctggtgagtgttggtgagtgttagtaaacctcttaatgttatttcataaaatgggtaggtggcccatcctgtactgtaacaaattgtataatgatggaagatagtaaatgatgaagtgatgcttatttttct

SEQ ID NO: 32309 - DNA, 638 bp, Zea mays
  Clone ID: UC-ZMFLB73292A09_FLI
tgatcccctcctgaacgggagcctgagtgacaacagtggcccaaagaaagcgcgaaggcagcacaggaaatcaggctatgcaggcgcggagagcggcggagagagcagcgaccatggcctaggtgggtttgagatccgagggaacagatggattactagctagggagtgacaactaagagcaacctgtggagatgctatacaaatgtcacaggagttagcctagccagtgggttcaagtgtaggatgaggtatctggcatgatgttgtagcatgggcaaatcgagatgagtgagcaatcaggttgttgtctgttgattcttttagctgagcgcctgagctgctgaggccttgatcctgtatttaagatgtcaggccttgattctttcagcaagcgttggaaggaaggaagcaatgtgcctgttctgagctcccgtcagcatcacttgtaaagttcttataagtacagactagaactagtcatgcatacaagagaatagacagtcgatgtttctatctgtttttgtttcattctaaggcccttgtcacacgagcaccagatttttttttctttccttttggtaccatgatggtgatggacgtgagagttccttgagatgatcaaagcatctatctttcc

SEQ ID NO: 32310 - DNA, 1412 bp, Zea mays
  Clone ID: UC-ZMFLB73292A10_FLI
ggagagaagggtgaagtcctccaaccaaacctgaaaacggcggcacgcgggtcgactggaaacaatacgagcgaccgcagggcaggaccctctcccaggaaggaaggtggcgccgcgacgcgtgacggcagtgagctgggtgaagcactatttcgccgacgtgccgcaggaggccgtgcaggctcatttcaacaggagaatggttttttctgagtgctatgaccacaaggtttcagctgacagcattcgaactcagaagcatcatctgaaaaagataaaacataatgatgctatggagcctggaatgaggattcaccttcctgtttcagtggctgagagtgacataaagaagcgttatgagaccattccgactgccacactgcatcctaataaagatgagatcgagtacctgaggaggctagtcatctacagggactctgctatattggtgcttaacaagccccccaaagtgcccatgaaaggacatttgccagtacataacagcatggacgtgcttgctgctgcagcactgtcatatggaagcgaggagggtccaaaattggtccatcgactggacagagaaagcagcggtctgattttgatgggcagaacaaaagaaagctttactcggctgcactggcttctcactagtgtaaacttagctagaacatcttctcagacatggaataaagcctgtgaagcatacgcacagaagtattgggcactagtcattggtactcctaaagaaagggaaggagttatatctgctcctatctcaaaggtactccttgatgacgggaaagccgaacgggtcattctggcacatccttctggcatagatggcgcgcaagaggcaataaccgagtaccgggtgatgggaccaaccattaatgggtgctcatggatcgagctacagccattgactgggcggaagcaccagctccgagtccactgtgctgaagccctaggcactcccattgtcggggattacaaatacggttggtttgtgcaccaaacgtggaagcaaaatccccagcctgacttcgaaccgttcactggagagccatacaagctgaggcggccagaaggcttggagattcagaagggcagtgtcctctcaaaagtccctttactacacctgcattgccgggagatggtcatccccaacattgcaaagttcctgagcagcactggaggatggcacgaaaacggcaccccatgggccaaggagaagcccaacctcctaagattcgtcgcgccaatgcctccgcacatgaaaatcagttggaacatcatgtcttcatacctggtgtaatttctgtattttttttcttccatacttctctagcttctcatgttaaccccaagttccatagagtgatttgtttgttcaagattctgagattgtagcc

SEQ ID NO: 32311 - DNA, 1617 bp, Zea mays
  Clone ID: UC-ZMFLB73292D07_FLI
aagggacgctcgtctcgtctcgtcacgtgccgccgccatggctgctctgggccgtggcctgcccctcctcctcctgctcctcctcctcgccgtatcgggggccgccaacgccgcggcggcgcccggcggcatgtccatcatcacctacaacgaggagcacggcgcgcgggggctggagcggacggagccggaggtgcgggccatgtacgacctctggctcgcggagcacggccgcgcctacaacgcgctgggcgagggcgagggcgagcgcgaccgccgcttcctcgtcttctgggacaacctccgcttcgtcgacgcgcacaacgagcgcgccggcgcccgcggcttccgcctcgggatgaaccagttcgccgacctcaccaacgacgagttccgcgccgcgtacctcggcgccatggtccccgccgcccgccggggagccgtcgtgggggagaggtaccgccacgacggcgccgccgaggagctgccggagagcgtcgactggagggagaagggcgccgtcgcgcccgtcaagaaccaggggcaatgcggaagttgctgggctttctctgcagtaagctcagtggaaagcgttaaccagatcgtcaccggtgagatggtgacactgtctgaacaggagctcgtagagtgctcgactgacggagggaacagcggctgcaacggcgggctcatggacgccgctttcgatttcatcataaagaacgggggcatcgataccgaagatgactacccttacagagccgtggacgggaagtgcgacatgaacaggaaaaatgccagggttgtgagcatcgatggctttgaagacgtgcctgagaacgacgagaagtcgctgcagaaggcggttgctcaccagccagttagcgttgccattgaggccggaggccgggagttccagctctacaaatcgggtgtcttcagcggaagctgcaccacgaaccttgaccatggtgtcgtcgcggtcggctacggcgccgagaacgggaaggactactggatcgtccgcaactcgtggggcccgaagtggggcgaggctggttacatccgtatggagaggaacgtcaacgccagcactgggaagtgcgggatcgcgatgatggcgtcctacccgacgaagaagggcgcgaaccctcccaggccgtctccaaccccgccaacaccgccggctgcccctgacaatgtctgcgacgagaacttctcgtgctccgcgggcagcacctgctgctgcgcgtttggcttcaggaacgtctgcttggtctggggctgctgcccggtcgagggcgccacctgctgcaaggatcacgccagctgctgcccgccgggctaccctgtctgcaacgtcagagctggaacttgctcggtgagcaagaacagcccactgagcgtcaaggccttgaagcgcactctcgccaagctgagcaccgcatgaggacctcgatctgggactgcccattgctttttctgactcatgggcgttcagatcaccaagagcaagatttcatagattatctatatgtttgtataagtactattaccgtcccatgaatccgctgtaaataactagtacctctgattaaaaggataatattatttgtc

SEQ ID NO: 32312 - DNA, 1246 bp, Zea mays
  Clone ID: UC-ZMFLB73292F08_FLI
aacatggacgggcaccaatcatttacaaaacgaggttagctgccaccaacaacccccttacatagtgcaggtttctgaaccgtgcaagtggtaagcccaagaagtacacaaatcagcaacaattggtaggagatactgggtttcatacatcagctaactttctgccaccaaaaagtttcaagacaccccagcgattcccagatgcaagcttgtccaacgcagccacctccataactgagctccaatcaccagattacaagctactagtttcatcagtcctcgctttcgtagtaggaacttgctctagttatgtagaccttgaactttgtttgctcaatcagctggaagaccaggcaatctccatccaccagcttctgctggacggcaaaccctctccatccagcactgagcccccgcttcattgcgaggtacagcgtgtcggactcgtcatcatcctcatccaccagggtgatcatctcgtcacgcttgggcagatacttccggcagaaatgaatcggaaggcccagccagaagcccccggtgacatgggactgggtcatgggcttgatgaagatggggaagctggagtccagctcttgctccagatcctccgccttagagatggcgtagctcctcgcatcgtcggtcgcgtacacccggttggtcagatctcttctcaccgatccgtacgtcctcctaatcttcatcccaaaatcgggaaccttctcgcggtacacgggcttatccgggaggttggcgagccggccggaccgccgtactggctccatcacggcgtcggcgacgtcgagaggcacccgcgccttccgcttcttgacctgcagtatgtgagatcatccgttgactgcctccgtttgctcatgtttgatccgatcaaacctgcacttggtgctattgtctcgtctctgaaggagaccaacctgtcaaaaagggcccaaagtttgagaatggttccaccggctgacctgatggagactgttcgttagaagctgaagataaagaagaaacagttcctccggtgctgggaaattctgatcttcctaagcctcgactctcaggatcataagagcatggacaacttcagggcctgcatatatgacctcatgaagggggagatccttggcagtgcctctggaactaacaggaagcgtctgttgcagatgccaaccagtttcaataaggaggcatcttttgctgtgtattggacacatgagattggggatgagga

SEQ ID NO: 32313 - DNA, 3682 bp, Zea mays
  Clone ID: UC-ZMFLB73292F12_FLI
acgccaaacaataaaaacagcttatccagcggtctatactctgtactttccaaattccaattcgtaccatttgaagtgttttcgtatttctgcaaccgacacaaatggacgagtttgtacaaataaacaaagaacgactactgagcaaaacactcccagagcaaacaacaacatacccacgccagggttcacacgtgctcatcatcctgctggcggctggcacgatccagcgggagcacaaccaagccacggaacagaagaagcaggccggcgaggtcgacacaggcgatatattccttctcatcttcgcctccaaaaaagcgcaggattcccatccagctttgtcaacatcgcttttccttattcccttcccgcgggatcgcgtgcgcgctcgccgtcatttttaagccccaactttctgcgccttatgtagaacagatagtagccaaactcagaggactccatacagatgcacagcccatcggattcgtctacccactttccgtttccctcttttcagttgctgccaggattggtccaggcttgagtgtttgttctaacgattcgaaattctctcctcacttgtcttccttataaaaccagactctgcataacatcttggcatgagtagccatagtttgttagagcattcccccaaggaatataacaccattgtgtgacgagcaacccttcaccaaaaactaaggactgataaactgcaagagaccgttcctatcaggattgtggagtctgcaaccagatatcaatgcataacagaattgaagaggtatgagatgtaatgtgtgcatgttatttggtttgctcaaacaaaggagaaaaaaagagagatctcctcatgcgtcctaacatttgagactgcaatgtcttcatgccagatgtatcatcatcaacaacagcttcagagccacagtcatttcctgtcttctaggcagacattccctccagaaaggcacatgcttctgcaaggagggagcattccagcagagccagggcttgtgctttccactgatgctaaacctagcagttatcggcctccaattaagcttaatactgaatgccctttctgctcttcagtgattggttgcaccatggcaatggacaaaccacttgaaggaaatggatcaccagctagccacttaaaccttggaacccagacaaacaagtaagagatgaataaatgttttcttcaacatgtttgcataagataacatggatttgtatttttatcagatctgtgcacataggtgaagcccttcagatgcaaattgaagtacagcgccgactgcatgagcaactagaggtacagaagcataaaaaataaatcatattactaactaaattaccatttaaacattccttacaaagacataactgattcatccctagcagagttattgtgtaaaagactggagtagattgtctggacaaatatatagcaaaatttatcccaaaccaggctttaagtagatctaggacactcatcaaatgaaggtttattttgccatgaaagtacctgatgtacagacatccaaataaagaaaaattacgtagcttcaccatcagttggtaaacttcagggacatggtcagatcatatataatgttacatgtcaaaaaaatggcatcccaatcaccattcctttaagaaaaaaacatcacttataattgctccaatagtccaatcaactcaattgttttagccaagcactagttcctatattaccgatagagtaaaaagtccaagagaaagtatgtaatatatgtaggggtggtaatggatcacgatccaaatatttcttcacaatttgtttgagcctttaatcaattttagttcaaagatgaataaaaatagagccgatccaatctgatttttaaattttatagtgtaaaatttagagcctattgccacccctaaatgtatgcatatctttagctttagagcatccacatattttgtccttcacacaatgaacatctatagctcatttatcaacaaaagtatatgctggacaccagcatatgacttctaagaggctcacaatgcaagagggcctagtcatggtggtctaggaacataatcttgtcatacgtttaactgaacacagttttaaaaagaacaagtaaaaactaatgatgctaaaataagtttaaacaaactgaccaattgtaaatccagattttattcttttcatgtcacaagctctttactgttaatggtcaagtactgataatgtgataccttacacataaacgacgcctttcaacaggtacaaagacatttgcaactccgcattgaagcacaagggaagtacctacaatctgtgctagaaaaggcacaggagacactttcaaagcagaatgcagggtcagtcggtgtagaaaccgcgaagatgcaactgtcagaattagtctcaaaagtatcgacagaatgcctccagcatgcatttacaggctttgaggagattgatggttcccaaattctacaaggccataccatccaacttggcgatgggtcagttgacagctgcttaactgcctgtgacggctcacagaaagatcaagatatcctgtcaatcagtctttccgctcacagaggaaaggagataggaggcatgacctttgatatacaagagaaagaaagaggaagagaggatttgtttcttgacaagctaagcatgacgcctccaggccaactagacaggcgtgagagaggaagttttagtatgacacggaaggcagcaaaactggatctgaacatcaatgataccactgatgggccacagaactgcaagaaaattgacttgaatgggttcaactggacctaggaagagttagcaaaagaccttgcaaattaaatctgacttgattcatcaagagtgacaagcttataagcttgagattggctccttctgccaagatagcagcaaagagaggaagtgaaaccgaatgagttattccaaagaccagcagcatcgacatatcctccatggcaggacctgggtgatcctcggaacagctgcgctgtcggcccatcacgattcagcgaaataagtgatgaaattacaataagtagggcatgtagattggtagagtgtatttgagagagtctagtgttctcctccggctataccttattgtgattctgtacacaagcatataaatacaacgatttttgtcacaagtgattgttgctgggattggcaaatgcccaggaatgttttgccatcagctaagcgtgcctacaccctgctgccaaatcatgaatctacaagacagcaactggtgcacaaaacataagggacggacggatgcatatgcatcgtacaaaacacctgcaccgtgtccttgttggattatacataatggtttcaatgtttcgtttcatgcggctatgaagcgggaatgggacagatttactcccaacacgcaaatccaataaggtatcacgaccgctcttcgatgacaaggcagataaatcgtaaatcagctgctaagctgcgaaggtaaataaatcgatcgtacctcccaactgatctaggtggcggcggccgttcgatgagtgcagaaggggatcttctcctgctaaacaatcaccgccgccgccgccgcctctttcctcacaaaagctaaacaacatttgctccaaccaatttgtcggtttg

SEQ ID NO: 32314 - DNA, 1121 bp, Zea mays
  Clone ID: UC-ZMFLB73292H02_FLI
gtctagaagcacccctctccctctctctctcttcgccgtccgaagctccgcaccccaatctaatcgacacctcaccgagatgggccgcaagttcttcgtcggtggcaactggaaatgcaatggaaccacagatcaggtcgagaagattgtcaaaaccctgaatgaaggacaggttcccccttcagatgttgtggaggtcgttgtcagccctccttatgtcttccttcctgtggtcaagagccagctgcgccaagagttccatgttgctgctcagaactgctgggtgaagaagggaggtgctttcactggtgaagtcagtgctgagatgctcgtcaaccttggtgttccctgggtcattcttggacactctgaaaggagagctctgctgggagaatcaaatgaatttgttggagacaaggttgcgtatgccctgtctcagggactaaaggtcattgcatgtgttggtgagacccttgagcagagggaggctgggtctaccatggatgttgttgctgcacaaacaaaagcaattgctgagaagatcaaggactggagcaacgtagttgttgcctatgaaccagtttgggctattggaactggtaaagttgccaccccagctcaggctcaggaagtgcacgcctccctgagggattggctaaagaccaatgccagccctgaggttgctgaatctactaggatcatctacggaggctctgtaactgctgcgaactgcaaagagctagcagcacagcctgatgtcgatggttttcttgtcggtggagcttctttgaagcctgagttcatcgacatcatcaacgcggccaccgtgaagtccgcttaagatgctacgctgaagacgaacatactttttttttgctcaactgtgctatgtaagctagtagcttttgcgcaggagcagagactgttttgcctgcccccaacttctagcttgagcttgctaataatgtttacctctggacgtatcaataatggtgcttatgtatccccttttttttgtgccgaattacggtggatccgtcatctgaaccatgggtttggtgtatgtaattgcgtcacccgatgcctagggtgtgagactgaagtttttggacatttgggac

SEQ ID NO: 32315 - DNA, 908 bp, Zea mays
  Clone ID: UC-ZMFLB73294E03_FLI
atttccggctatggcctagcctaccagccatggtggagtgcactggcacatacacatatgaaggcagtggtttcaaggccaccgctgctcagcagtatgacagctctcccttcctcagtggattgaagtcgatttcttctaagcccttccatcaagtctgctcacatttcatccggacagtagctggattccagttatgttatgcagcaaagacatggtttggtggatttgtgggcatgatgatatttggggcaagtgaagtcagccggaatgttgatttgggtgatgagaccaccacaatgatctgcaaattcgtcatgcgcgcatccgatgaatccatcacgagagagatcaaatccgacctccagggctggctggatgatatcaccgacggcgctgtggaatacatgcctgaggatgaggtgaagagtgtggccgccgagcagctgaagatctccatggagaggattgccctgctcaaggcagccaggccaaaggtcccacccgcaaagaccgatcaagaggaggaagaggagcgaaagcagagcgaggaactagatgggtttggaaaccccaagggcccctcgacgctctccaagctcaccgcggaggaggctgagcaccgcgctctccaggctgccgtgcttcaggagtggcaccagctatgcaaagagagagccatgaaagcgcagtgaggtcgatttggaccgtgtggatcttacgcgcatgtataattttgtatttttccttcgtctcccattctttgcgtgtctatactgctggtttcactcactgtataccgtcgccgatttgttcattgtattctcaaatacttgtgcacgaaaaaacctgttttgtaacatactactgttagggcgtttttaagcttcggtgtgaagatcgattgt

SEQ ID NO: 32316 - DNA, 1123 bp, Zea mays
  Clone ID: UC-ZMFLB73294E08_FLI
cgagaggggaaagactacatatcaattttgatgttacgttcccggcccttccttgttctctagttgctgttgatacgatggatgttagtggagagcaacattatgatataaggcatgacataataaagaaaagaattgatcatcttggtaatgtaattgaatcaagaaaagacggagttggtgcccctaagattgaaagaccattacagaagcatggcggtaggcttgaccacaacgaggtttactgcggatcttgttatggtgctgaggagtcggatgatcagtgttgcaactcctgtgaagaagttcgtgatgcgtatcgaaagaaagggtgggctgtcaacaacgtagaattaattgatcagtgcaagagggagggctatgtacaaaggttaaaagatgaacaaggggaaggttgtaccatccatggatttgtaaatgtgaataaagtagctggcaactttcactttgcccccgggaaaagcttggaccagtcattcaacttcctgcaagacctgttgaacctccaaccagaaacttacaatataagccacaagataaataagctgtcctttggggaagagttcccaggtgtagtcaatcctcttgatggagttgagtggatacaggataactccaatggattaacggggatgtaccagtattttgtaaaggttgttccaacaatctacacagatatcagggggcgcaagattcactcaaatcagttttctgtgacagagcacttcagagaggcaattggctatcctaggcctccacctggtgtatatttcttctacgaattttcaccaatcaaggttgattttactgaggaaaatacgtcgctccttcacttcctgacgaacatatgtgctattgttggaggtatcttcacggttgctggcatcatagattctttcgtgtaccatggtcaccgcgccatcaagaaaaaaatggagctcgggaagcttgggtaaccgcagttttcggcatatagcagttaggaccatagcggaaacgagttgaacttgtgttgcactggcccccaaaagcggagggattttgattcgctgtgatgcatctgtagtcattcagaattgcctgccaaggcaacgtttgtgtt

SEQ ID NO: 32317 - DNA, 1369 bp, Zea mays
  Clone ID: UC-ZMFLB73295A06_FLI
gtttggggtctctcgatcttctctggatgcaggcaagattaagatcggaatcaacggtgagtttgtcccctctccccatgctacgctatttctcctcctcgagctggttcggtccgatctgagttgcgccttctctctgcgactgcgtccgcgtccgcgtccgcgtccgctcaggcttcggaaggatcggcaggctcgtggccagggtcgccctccagagcgaggatgtcgagctcgtcgccgtcaacgaccccttcatcaccacggactacatgacctacatgttcaagtacgacaccgtccacggccactggaagcacagcgacatcacactcaaggactccaagacccttctcttcggtgacaagccggtcaccgtctttggcatcaggaaccctgaggaaatcccgtggggtgaggctggcgctgagtatgtcgtggagtccaccggcgtcttcactgacaaggacaaggctgctgcacatctcaagggtggtgccaagaaggttgttatctctgccccaagcaaagacgcacccatgtttgttgttggtgtcaatgaggacaagtacacctcggatgttaacattgtttccaatgctagctgcaccacaaactgccttgctccccttgctaaggtcattcatgacaacttcggcattgttgagggtttgatgacaactgttcatgccatcactgccacccagaaaactgttgacggaccctcagccaaggactggagaggtggcagggctgccagctttaacatcattcctagcagcaccggtgctgccaaggctgttggtaaagttcttcctgatctgaatggcaagctcactggtatgtccttccgtgttcctactgtggatgtctcggttgttgacctcaccgtcagaatcgagaagggggcctcctatgaggatatcaagaaagctattaaggctgcttccgagggtccactcaagggtatcatgggttatgcggaggaggatctggtttctaccgacttccttggtgacagcaggtcgagcatcttcgacgccaaggccgggatcgctctgaacgaccacttcgtcaagctcgtctcgtggtacgacaacgagtggggctacagcaaccgcgtcgtcgacctgatccgccacatgttcaagacccagtagaggggttttttccccctgcttctcatggatggttgctgcttgtgtatgccgagaataaatgtggatggcgcgtgcctctgggtcgccaggttcatgctgagtctggacatgttttgcacttttgcttcccttcctgctaccatctgtgacagaaccgctcgctaatatgggacctgagattagctttttgctgcttgtggtgaggttgc

SEQ ID NO: 32318 - DNA, 1186 bp, Zea mays
  Clone ID: UC-ZMFLB73295A07_FLI
ctcgacaatgacactgcgttttttggtgtttttgatggacatggaggaaaagtagtcgccaaattctgtgcaaaatatctacacagagaagttctcaggagtgaagcctatgcagctggtgacctgggtgctgctgtccacagagcttacttcagaatggatgaaatgatgcgaggtcaaagaggatggcgggaacttcaagcacttggagataagataaatcagtttagtggcataatagaaggcttaatttggtctcctaaagcaagtgattcaaatgatagacatgatgattgggcttttgaggagggaccacactctgattttactgggccaaattgtgggagtacagcctgtgtagctttgatcagaaataagcaactcgttgtggcaaatgctggtgactcccgctgtgtcatctcaaggaatggtcaggcatacaatttgtctagagaccataaaccagagctcgaggcagagagagagaggatacggagtgcaggcggtttcgttctaatggggcgtgtaaatggaaatctaaacttgtcaagagctatcggagacatgaagttcaaacaaaacaagttcttgccccccgataagcaaatcctgactgcgaaccccgacataaacattgtcgagctatgtgatgacgacgaattcattgttttggcatgcgatggcatctgggactgcatgtcaagccagcagttggtcgatttcatccgcgagcatatagacacagaggaagcctctcggcagtatgcgagagagtgctcgatagatgcctggctccgtcgaccatgggcggcgagggatgcgataacatgacgatgatcctggtgcagttcaagaagccgattgctcaggtcgaggacgccagcggtgcagaaccagctggagacgctgggtgctgtgagacccatggggcccacgagaacggctctggtaagcaggtgtagcgaagacgtggcatgcatggctctcggagtcttggactcttggtacatataggcctgacgctggacatgggtaaaacgggagtacgatagatgacaccctctgttcctcaatacaacccgctgttgtgattttttggttacctgaccacctatctgtacatttttgtggaaatgatgttacagtaattattgtccggtcaagcggaccccttttgagttttgtc

SEQ ID NO: 32319 - DNA, 1144 bp, Zea mays
  Clone ID: UC-ZMFLB73295A10_FLI
ctgcacacctctcaccagtccccacacggccacaccacacccagctgtccccatcgcgcgcacactctctcggtctctccctcccagtcccagcgtttgcggtccagtccagagagctcgagcagccatggcggctcccctgttcctcctcctcctgctgctggctatgttcacaggctcagacgcggcgttctgcgtgtgcaagacgggcgtgcccgaccaggcgatgcaggcggcgatcgactacgcctgcgccaagggggccgactgcgcctccgcctccaagggcgcgccctgctacggcaacggcaacaaggtggccgtctgctcctacatctgcaacagctactaccagagccgcagcgccacgggcgccacctgcgacttcaacggcgtcgccacgctcaccggcaccgaccccagctccggcacctgcaagttcgcctccggccccagcagcgcaggcaccggcggtggcatgggcgctggcgcgggtaccggcggtggcatgggcgctggcaccggcgccgggacaggcgttggcaccggagcaggcacgggcatgggcaccgggacggggaccagcaccggcaccggcgccggcgcaggggtcgcgacccccgggagcgccctgagcccaccgttcggcggcactggcgcgtacggcccgtcaggggcaggcagcacggactacaacgacgccgtcgccccgcgcgccgccgggctgcacgtggtggctgccctcgctctcgccgtcgccgtcgccgcacctctccaccgctaggggcggtgccatggcaactgggagctggcgggcacgacactcgcagacgggatcccgcctcggcggcccgccagcgcgggctctggtcgatgtccggcgttagtgcgtgcgcgtacctgatgaagtgatgatgggttttgatcgaccagccgtcagcgtagtgcggtcacggggtttacagtgttattcgaactgacctctctgcttcctcgtgctagtagtggtggctgccatgtgtgtgtgctgctggtagagaactagggattctttttttttcttctgtcgcttccttgcttatatgtcccgtcgtgttaggctgtgtttactatgcagtgtttggtggtggccgctttccatgag

SEQ ID NO: 32320 - DNA, 2233 bp, Zea mays
  Clone ID: UC-ZMFLB73295D02_FLI
gctgactgaccacactagcgcagcgcgcacaggagcaaaggggggcatcctctatcgcgcgcgcgccatggccaccaggccgggccctttgactgaatggccatggcaaaggcttggaaacttcaagtacttggtgatggctcccgtggcggtccacggcgcgcggcgggtggtcgcgcggggctggggcgacatcgacctggccttcgcgctcatcctgccgtcgctgctgctgcggatggtgcacaaccagatctggatcagcgccgcgcgctaccagacggcgcgcagcaagcaccgcatcgtcgaccgcggcatcgagttcgaccaggtcgaccgggagcgcggctgggacgaccagatcatcctcaacggcctgctcttctacgttggctacctggcgatccccagcgcgaggcgcatgccggcgtggaggtcggacggcgccgtggcgatggcgctgctccacgccgggcccgtggagttcctctactactggttccaccgggcgctgcaccaccacttcctctactcgcgctaccactcgcaccaccactcctccatcgtcaccgagcccatcacatccgtgatccatcccttcgctgagcacatggtctactacgtcctgttcgccatccccatgctttcgactctctacatggggaacgcctccgtcctgggcatcgtgctctacatcgcctacatcgacttcatgaacaacatggggcactgcaacttcgagctggtgcccaggtggatgttccagctcttccctcccctcaagtacctcatgtacacgccgtcgttccattctctgcaccacacgcagttccgcacgaactactcgctgttcatgccgctctacgactacgtatacagcaccatggacaagtcgtctgaccagctgtacgagacctcgctcaggggagcggaggagacgcctggcctcgtccacctcacgcacatgaccgacctgcagtcggtctaccacctgcggatcggcttcgcctccgtggcgtccagaccgtctgccaccggcgccatgtggtggtacatgtgggtgctgtggcccgtggcgtggctgtccatggcgctcgcgtgggcctacgggtcctccgcgttcgtcgtcgagaggatcaaactcgggaagctgaggatgcaaacgtgggcagtgccaagatacaacttccagtacggcctgagctgggagagagaatcgatcaacggcctaatcgaaagggcgatactagatgctgatgcgagaggtgtcaaggtgctcagcctaggactgttgaaccaggcgaaacagctgaacggcggcggcgagctgttcaggcacaggtatcccaagctcagagttcgcctcgtcgacggaagtggcctagcgactgctgtggtgctcaggagcattcctcgtgacgcgaagcaggttctcctccacgcaggcccttctaaggtagcgtgcgccacggctgctgcgttgtgcgagaggggcgtccaggtcgtcatgaacccaaacaaggaatatgatatgctcaagtcacagattgcagatagcaaagcaagctatttggaacgacgctccgacaaccaccacacgcctcaggtttggctagtagacagcatcgacgacgaggaacagaagatggcaccgaaaggagccgtattcgtcccaatctcacagttccccatcaagaaaatccgcaaggattgcacctacctgagcactccagcaatgaagatccctgaaaccatgcaaaatatccatgcctgcgagaactggctgccaagacgggtgatgagcgcctggcgcatcggcgggatacttcacgccctggaagggtggaccgtgcacgagtgtggggacgccatggtgcatgctgacaaagcatggtcagctgctattaggcacggattcgttcctttgacgaaagcctgaaagcctgcgaagcccggggttctgtggctggggcctgcgatagatatatgtacgcagatctggacgccattcgacgatggctggaaaactacgtttcagcaatcggtagcacaaattctcccccgctagagaaggcgacttatatggtcggcgtgatgaatgacgaccttgattccaacagcatatagtaactacagttatgttgtggcattgtatgatgcaagtgcgagaaactgctttgtggctgtctgggtgacatatacaattataataaaatgtcgatttggcttgtcc

SEQ ID NO: 32321 - DNA, 793 bp, Zea mays
  Clone ID: UC-ZMFLB73295D03_FLI
ggaaaaccaaccaccactcccaccaccctccgcctccgcctgcgccacagctgccgattcgaaagccctcgtcctgacccctcgcaaaaccctagctccaaccaccatgaagggcaaggccaacgcctccaagaaggatgaggccaggctccgggccggcggcggcggcgccggaaagcgcaagaaggccgccgcgagcggcaagcccaagcgccctccctccgccttcttcgtcttcatgtctgaattcaggcaggagtaccaggcgcagcaccctggcaacaagagcgttgcggccgtgagcaaggcagcaggggaaaagtggcgctctatgtcagagcaagagaagcaaccctatgtggaccaagctgggcagaagaagcaggactatgagaagactaaggcaaatattgagaaggagagcacaagctcaaagaaggctaagactgatgacgacgatggctcgaagtccgaggtcgatgatgaggatggcggtagtgacgaggataacgacgacgacgagtaaatagtatttccgctgttgtgaggtagcaaatcgattgttaggtccccaattagctcactggtttgctatctttaatgttaagttgtttggaacaggtgtttatgaaggggatctattagtttcgtgaggttgttagtttagtgcattagcaaagaaaaagccgaatgctgctagctattatgttgcttttcttttgctaatcacttgtgtcacaactttctgtacctgtttcattgactaatctagtgactagtcagttatgggttt

SEQ ID NO: 32322 - DNA, 1009 bp, Zea mays
  Clone ID: UC-ZMFLB73295D11_FLI
cttgctgttggtcgtccactggatggacagactgtttctgaattttgggggttgcagatttgatggaggcgttcgccgggctgcccagggacctcaacttcatccagcacacgagccacctgggctggaagataaagaagcgggcgcggccggtgatcctggacacggcgctgtacgaggacgggagggcggagctgatccgcccggtgaacatctccaccaacctcaggaggctgcccacggcattcaagctcttcacagggtcggcgtggacgatgctgtcgcgggcgttcgcggagtacgtgacgatggggtgggacgacaacctgccgcggacgctgctgctgtaccacgccaacatcgtctcctcgcccgagttctacttccagacggtggcctgcaactcgcgccggttccgcaacgccacggtcaaccacgacctgcacttcatccgctgggacaccccgcccaagcagcacccgctctacctcaccgccagggactaccgccggatgctgctcagcggggccgccttcgcgcgcaagttcagggacggcgaccccgtgctggaccgcatcgacagggacatcctccgccgccgggaccccgccgcccacttcgcctacggcggctggtgctccgaggccggcgaccaaaacggcggcgccgcgctctgctccaacccgcaggagcccgggaggcgcggggccgtcaagcccggcgccgggtccaggcggctcaaggccatgctcaggaagacgctgtcgccgaggaatttcaggaggcagcagtgtaggtaggggaactgttctgttatgttctgatcaaacaaacaggtcgttgactcaattttgtatgtatagaaaaggcagatctgaaacgcatcaaagcggcccaaagccaattttgttcagttgattcgcacaagtctgaattgaattgtagtagggagatactcctggtggttgatcatctcatacacggaataataatggaaggggcattatgc

SEQ ID NO: 32323 - DNA, 1650 bp, Zea mays
  Clone ID: UC-ZMFLB73296C07_FLI
cgcagagacaggcgtcttcgtactcgcctatctccgcgactcaaagctttccccaattcccccccttctcccatttctcaccaccgccgccgctccccccgttcaacaacaccatgagggagtgcatctcgatccacatcggccaggctggtatccaggtcggaaacgcgtgctgggagctgtactgcctcgagcatggcattcaggctgatggccagatgcccggtgacaagaccattgggggaggtgatgatgctttcaacaccttcttcagtgagactggcgctgggaagcacgtcccccgtgctgtttttgttgaccttgagcccactgtcatcgatgaggtgaggactggcacctaccgccagctcttccatcctgagcagctcatcagtggcaaggaggatgcagccaacaacttcgctcgtggtcactacaccattggcaaggagattgttgacctgtgccttgaccgcatcaggaagcttgcagataattgcactggtctccagggcttcctcgtcttcaacgctgttggtggaggaacgggctctgggcttggttctctcctcctggagcgcctgtctgttgactatggcaagaagtccaagctcggtttcaccgtgtacccatccccccaggtgtccacatccgtggttgagccatacaacagtgtcctgtccacccactctctcctcgagcacactgatgttgctgtcctgctcgacaatgaggccatctatgacatctgccgccgctcccttgacattgagcgcccaacctacaccaacctcaacaggcttgtctcccaggtcatctcatccctgacggcttccctgaggttcgatggtgctctgaacgttgatgtgaacgagttccagaccaacctggtgccctacccgaggatccacttcatgctttcgtcctacgctccagtcatttctgctgagaaggcctaccacgagcagctgtccgtggctgaaatcaccaacagcgccttcgagccatcctccatgatggccaagtgcgacccccgccatggcaagtacatggcatgctgcctcatgtaccgtggtgatgtggttcccaaggacgtgaacgctgctgtggccacaatcaagaccaagcgcaccatccagttcgtggactggtgcccgactggcttcaagtgcggaatcaactaccagcctcccagcgtcgtcccaggcggtgatctggccaaggtgcagcgtgccgtgtgtatgatctccaactccaccagtgttgtggaggtcttctcccgcattgaccacaagttcgacctcatgtacgccaagcgcgccttcgtgcactggtacgtcggtgagggtatggaggagggcgagttctccgaggctcgtgaggatctggcggcgcttgagaaggactacgaggaggtcggtgctgagtttgacgagggtgaggacggcgacgagggtgacgagtactagacgctctactggcgcggcgtcgtcgggcttgtgtgccactgctatcctgtgatctgccctgagtggctcctatcgtgttatgtttctgtcggttcttatctatctgtcgttgtgtggtttacaacttacgttgtaagactttattcccccgctttgctactgggttattaagtttggcgtt

SEQ ID NO: 32324 - DNA, 874 bp, Zea mays
  Clone ID: UC-ZMFLB73296D12_FLI
atttggaggcatcctttctagggactgcacgtgtgattgggtggttcagtctgatgcttggcacctacacctacaaccgctattttaaacagaagaagctcaggaatattcttgtgtttgctcatgttggtcttgccgtaattaccctactggacattgttttggtgtcacggttacatgttcagtatggaattgccgataagtacatggtgctgtggggttccgcgttggctgatgcaatcaaccagttcaagatgatgccgttcctgatcctgtcaggacagctttgcccacctggaatcgagggcacactgtttgctctcttcatgtcaatcaacaaccttggttcaacactaggctcgttcctgggggctgctctggcatcagctttgaacctctccacagcacagtttgacaatcttgctctgggtttgggtgtacagatgatttgtactctcttgccgattgggttcctatctctgattccaaaggaagtcacagggctaacatcataggttgaggtacgggcctgatcatacttgttttattcctgccggaaggtaatggtctgtgctcgaacctcaaatttctgactcacgtacagcacgcatacttacagctgtgtaccagagagaggaatatacacatcataggaaggaaattcaagatagttggaaaatagacagttgtgttgacagtatatgtacaagctctgtaccaggacgagagaaaaatagagtgcaatagatttgtaggcaaagattaaaatcacttgatgttgacagatgttgatgttacttgacatgtgtagaaatgagaacaaacatgaaagtgacgttgctaatgaatgaatctgtgcatgtcttttgttttc

SEQ ID NO: 32325 - DNA, 1897 bp, Zea mays
  Clone ID: UC-ZMFLB73296E09_FLI
ctcgagctcgagagcaatttacggcaccatcgcatcgcgcactcgtgccaccccaccccccgattccttcgatcccctcgtggcggtggcgcgtcgtgcgggctctactggagctagatctcggaggagtggaagggagacagccagggtgggctgtgacgcttccgctgcgcgccatgggcagcgccgtcgccttcgcgaagctcgacggggagcgctaccccaaggcggctgccgccgtcggggtcaagggcttccccaccgtgctcctcttcgtcaatggcaccgagcacgcctaccatggcctccacaccaaggacgccatagttacttgggtaagaaagaagactggcgtgccaatcattaggcttcagtctaaggattcagctgaggagttcctcaaaaaggacatgacctttgttattggtctattcaagaattttgagggagcagaccatgaagaatttgtgaaggcagcaaccacagacaacgaggtacagtttgtagaaaccagtgatacaagtgttgccaaagttctatttccaggtattacgtccgaggagaaatttgtgggcctcgttaaaagcgagccagagaagtttgaaaagttcgatgggaaatttgaagaaaaggaaattttgcggtttgtggagctcaacaagtttcctctaattactgtattcactgagctcaattctggtaaagtatattcaagccctattgagctacaggtcttcacctttgcagaggcttatgattttgaagatctggaatctatggttgaagaaatagccagagcattcaagacaaagataatgtttatatatgttgacactgctgaagaaaaccttgcaaaaccattcctcactctttatggccttgaatcagaaaaaaagcctactgttacagcatttgatacaagcaatggagccaagtatctgatggaggcagatatcaatgcaaacaacctgagggagttctgcttaagtcttctggatggcacgctcccgccataccacaaatcagaaccattgcctcaagagaagggacttattgaaaaggttgttggtcgtacatttgattcttctgtgctggaaagtcatcaaaacgtcttccttgaggttcatacaccttggtgtgttgactgtgaagcgataagtaaaaatgttgagaagctggcgaagcattttagtggttcggacaatcttaaatttgcgcgcatagatgcttctgtgaatgaacatcccaaattgaaggtgaataattacccgacgctattcctttatcttgctgaagacaaaagcaacccgatcaagctttcaaagaaatcgagtgtcaaggacatggccaaactgatcaaggagaagctgcaaataccagacgtggagacagtagcggcccctgacaacgtcaaggatgagctataacctgtagtagacaaactaaggtccagtgaaggaaaaattgcagcatgtttgcgtgttttgcgccaacctgatcacagagctcagctttattcgcgtgccgtgttaagttgactaaagacaatggtatataatataggtacctaaatcaaagaggcttcggaccctagcattagggatggcaatgggtacccgaaacccgaaacccgatgggtaaaaaccctattagggcacgggtatggcggattttgatacccatgggtattttattgggtcatttgttatgcccatcgggtatggtgggcgtgggtatgttctctgttgccccatacccgctacccgatgggtaacccgctaatatatgacacgtgggtccggatttatgtatctcatataaaatgaatgctatgttttgtccatagttttgtagaatcaatgctatgttttgtgtgatttgaaagcatgatattgcc

SEQ ID NO: 32326 - DNA, 1522 bp, Zea mays
  Clone ID: UC-ZMFLB73296F04_FLI
atcccgtccgcttctctccccgtcccttacctcgcccaggaggggagcctcccgcttacaaaccctagcctctactcctctgagcttccaccgctccgctccccatggaggacgaggacaccggccccggcgatgggggcgaggcctctcctccgcaccacgtcgcggcgtcgagcgaccgggcgcgcgacatggtggcgtccccgaccagctcgcgctctgtgacgcagacggtgaacgggtcccaccacttcgtgatccagggctactcgctcgctaagggcatgggcgtggggaagcacatcgccagcgagacattcaccgtgggcggttaccagtgggcgatctacttctaccccgacgggaagaaccccgaggacaactccacctacgtctccgtcttcatcgcgctcgcgtccgacggcaccgacgtgcgcgcgctcttcgagctcacgctcctcgaccagagcggaaagggcaagcataaggtgcactcgcacttcgaccgctccctagagtccgggccgtacaccctcaagtaccgcggatccatgtggggctacaaaaggttctttcggcgtactgctcttgagcaatcagattttcttaaagatgattgcttgaagataaactgtactgtgggtgttgtagtatcaactatggattattctaggccacattcaatagaggttccagagtctgacataggctttcattttggaacgcttttggacactcaggaaggtgtagatgttatttttagtgtagcaggagagaagtttcatgcccataagttggtattggctgcccgatctcccttttttagatctgaatttttcgatcatgaattgggtgaagagaagaacggaactgatacgggggatgaaatcaaagagatcgttattgatgacatggatcctgtagtgttcaaggctgtgcttcattttatctacagggacaatcttgttaatgatgacgagttgtctgcatcaagctctgactgctctatctttgatcgtttgtccgggaagttaatggctgcagcagacaaatatgagttgccaaggttaagattgttgtgtgaatcttacttgtgcaagcatatttctgtaaattccgtggcaactactctagcattggctgatcggcaccatgctatggagcttaaatccgtttgcctcaaatttgctgccgaaaacctgtcagctgtgatccggactgagggtttcgactatctcaaagacaactgcccatctctgcagtcagagatactgcggacagttgccgggtgtgaggagccatgtagcagcggcttgaaaagccagagcgtgtgggcgcagctctctgacggcggcgacaccagcgggcgcagggtgaggccaagggtctgagacgcaaaccccggaagcactgacctttgtaatcaaaagctgttgtggtgtaaatgggacggcttttcttaattttcacttgagacaacgatttaaataacatgattgacgtgtttgtggtgctcgcagtc

SEQ ID NO: 32327 - DNA, 1605 bp, Zea mays
  Clone ID: UC-ZMFLB73296F08_FLI
ggatcaatcacactcactcgcggccattgtcctgcccgtgcgtgctctgccttttcaggcgatcgaccaaccaacttctcgtcactgccatggctctgctctccgacctcatcaacctcgacctctcgggccgcaccgggaagatcatcgccgagtacatctgggttggcggttccgggatggacgtcaggagcaaagccaggacgctgtccggacctgttgatgaccccagcaagcttccgaagtggaacttcgacggctccagcaccggccaagctccgggcgacgacagcgaagtcatcctttgccctcgggccatcttcagggacccgttcaggaaggggcagaacatactggtaaccagagacccacccttcttcagattctctgcactgcgtgcatgaaagttgatcatgggtatggagaggagagagaccattcgtccatttttatttttattttttgagctgtgtgtaggtcatgtgcgactgctacgagccgaacggggagccgatcccgagcaacaagcggcacggggccgcgaagatctttagccaccctgacgtcaaggctgaggaaccatggttcgggattgagcaggagtacacccttctccagaaggacaccaagtggcctctcggttggccgctgggcggctaccctggccctcagggaccttactactgcgccgtcggagcggacaagtcctacgggcgggacatcgtggacgcgcactacaaggcctgcctctacgccggcatcgacatcagtggcatcaacggggaggtcatgccggggcagtgggagttccaggtcggtcctgccgtccggcgtctcggccggcgaccagctctgggtggctcgctacattcttgagaggatcaccgagatcgccggcgtggttgtctccttcgaccccaagccaattccgggggactggaatggcgctggtgcacacaccaactacagcaccaagtcgatgaggagcgacggcgggtacgaggtgatcaagaaggcgatcggcaagctgggcctccggcaccgggagcacatcgccgcgtacggggacggcaacgagcgccgcctcaccggccgccacgagaccgccgacatcaacaccttcgtctggggcgtcgcgaaccgcggggcgtcggtgcgggtgggccgcgacaccgagaaggaaggcaaaggctacttcgaggaccggaggccggcgtccaacatggacccgtacgtggtgacctcgctgatcgcggagacaaccatgctgtgggagcccagccactccaacggcgacggcaagggcgccgcggctccttgatttgattctgcggagactgagctctgtgtgtgagccggcctgcgtagatggcaaatgggactgaccctgtcagaaacttgagatgaccataataatagctgcagtgtgctcgttctggggttggataagacccaagaacttttttttagctttcttcgaacaagtaatcatggtgctgaaccaacacagatgtgctactaaacacatctaacgagtcaaacgccgaagcatatcccaacgcacaaccccggttaatcttgttacccatggattgaatgagattg

SEQ ID NO: 32328 - DNA, 2436 bp, Zea mays
  Clone ID: UC-ZMFLB73296G04_FLI
caaaagcttagttcacaaaatattgtggtggccgccttagaagtcaggtcaaatgcacacgttgcttacattgctccaataaatttgatcctttcttggatctcagtcttgagattgccaaggccacgactttggtgcgggcacttgaaaattttaccgaggatgagctactagacgagggtcaaaaggaatacgagtgtgaacgctgcaggcagaaagttgtagcaaagaaacgacttacaattgataaagcccccaatgtcttgacaattcatctgaagcgcttcagccctttcaatcctcgtgagaagattgacaaaaaagtggacttccaatcaattcttgatttgaaaccatttgttagtgactctaaaggaacagattttaaatacagcctttatggtgtcctagtccatacaggttggagcactcaatcaggccattactattgctacgttcgtacatccagcgggatgtggcacaatcttgatgataaagaggtgcgccaagttcgtgaagcagacgtattgaagcagaaggcttatatgttattttatgtacgtaacagtattgggaagtcggtggtgtgcaaagataataatgctgctaatttgctcaagaagaaaacctctgaaaaaatctcaagtttgaatggtattgcacaaaccaatgtaagagcacaaaatttgaatggtgtgtctccatttggtgataagacgcacggcacaatcattggctactctacaatttccagcaagactaaaacaatccactgttcaaagaatgaggtcaaagctgaagatgctccagcctctcaaaacaatgctctaccttccacacaagcccccatagctcgaaatgatgttggtatcttgccaactaaaccaatgcagtttgctgtaaaaaatgaggagaaaacctcatcccaccaacctgcgccatttacaaatacttgtggtgaacaaacagttgttgggaggcccttgcaggaaatggaacctaaggctggtgcaggggaaaatacttctgttgtctctgctgttgctaatgatgccgctacattgtccaaggcagacaaactaacttctcagcctcaaacagctccatcttccaagccaactgccaatgtaaaggacacagctactgagtttgctacactgtctttatcaaagaaggattctgttgtttcaaatggtgctgtgcttagcattggatgtctcacatccggtgagaaagcaatgaacttatcagaatctgtggatcaagctaatgaaatcacaaaggcacttcctacgagtcagaacaatactgcaccagtaattgctcaagcagattgtggagtagagatcagctctggtgtcatcatgcacgttgctgtgtctgcttcatgcaatggaactacagagaaaaaggtgaattcgaagtcaaagaagtttgtgaggtatcctgttgtgaacatgtggttagggtccagacatctaaagccagggaagaaagcgaaccgcaagagaagtaaaatgataagacgtgttgtagcctgcaaggacgcggcaaatttatcttgtttgagtgagcagctgacgtcaacatcgtccactgcatgctctgaaaccgtagaatgtacctccagccatcagaaacggtcacatgctagtgcaaggtccaaagatgacgcccagtcctcgcaaaacaagcagaaggtcgacggagctcgtgtcggtgctggcacaagtgcaccttcttgcagtgccggcgttccaaagtctgatccgaacccttccacagatgctaaggttgtagcgacccagcctgccagtattcgcgcaacggacctgatggaagctaccgttccgcgctgggatgacgtagacatgccaaacataaaggtcgctgagccgcagtccaaacgcaagagcggtggctacatcttagatgagtgggacgaggagtacgaccgagggaagacgaagaaggtgcggaggtcaaagcaagactttggcgggccaaacccgttccaggaggaggcggactacgtatcgcagcggaggacgaagcagaaatcctaccgaggcaagtcttggaacaagcgggcctaacacggtagagaggggggagttgagagaatacgagagagagagagagagagagagaatccccggacgcacatgctgtttgttgttacgttttagcacccattggtgagggagatttacgtttaaaaaccatatccgtcgtcggtacggtagtccccattagttgtcgacgatgtgacgttttgggcagttttcgtagaacatttgaaacatttgttcggttgtaacggagtgctgtttagttgagttggggggaacaaaattggcgagactattttgctgcattctgctctgctgtttttagttactgatgaagaataaaacgatggtggtgatcagtttt

SEQ ID NO: 32329 - DNA, 2264 bp, Zea mays
  Clone ID: UC-ZMFLB73296G05_FLI
aagttactcataagaatcagaagaaaaggacccgagcctagggttcggtctgcctcccacagccgccgctacgctttggctgcatcactcgctcctcttcggagcctccctttcgccggcggcgtaggaagagatggcagagcgtttgacccgtatcgccatcgtcagcgaggacaagtgcaagcccaagaagtgccgccaggagtgcaagaagagctgccccgtcgtcaagactgggaagctttgcattgaagtaacttcggcatcaaaactagctttcatttctgaggagctgtgcatcggttgtggtatctgtgtaaagaaatgtccatttgatgccattgaaatcatcaaccttccaaaagacttggaaaaggataccactcaccgatatgggcctaataccttcaagttgcacaggttgcctgtcccaaggcctggtcaggttttgggccttgttggaacaaacgggattggaaagtcgacagctcttaaagtgttggctggcaagctgaaacctaacttggggcgcttcaaaaacccacctgattggcaggaaattcttacatactttcgtgggtctgaacttcagaactacttcacacgcatattggaagataacctgaaggcaatcatcaaacctcagtatgttgaccacattccaaaagctgttcaagggaatgtaggacaagtacttgaacagaaggacgagagggatatgaaatctgaactgtgtgttgatcttgaattaaaccaagttattgaccgaaatgtaggagatctttctggtggtgagcttcagagatttgcaatagcagttgttgctgtgcaaaatgcagaaatctatatgttcgatgagccatcaagctaccttgatgtgaagcagaggctaaaagctgcacaagtcgttaggtccttgcttaggcctaacagctatgtcatcgttgtggaacatgatttgagtgtcttggattacttgtccgacttcatttgctgtttatatggcaagccaggtgcttatggtgtggttaccttgccattctctgtccgagagggtatcaatattttcttggctggatttgttccaacagaaaatcttcggttccgagatgaatctcttacatttaagattgcagagactcaagaaaatgctgaggagattgagacgtatcagcggtataagtaccctactatgagcaaaacacagggaaatttcaagcttactgttgttgagggtgaatttactgattcccagattgttgttatgcttggtgaaaacgggacagggaaaactacattcatcagaatgctggctgggttgttgaagccagacacggtggaaggaactgatattgaaattcctgaattcaatgtgtcgtacaagccccaaaagattagcccgaaattccagaataccgtgaggcatttgctgcatcagaaaattcgggattcctatatgcatccgcagtttgtgtctgatgtgatgaaaccactgcaaattgaacaactcatggaccaagaggttgttaatttatcaggtggagagctccaaagagttgctatatgcctctgccttggaaagcctgcagatatctatctgattgatgaaccaagtgcttatcttgattcggagcagcgtattgttgcctcaaaagttatcaagagattcattcttcacgcgaagaaaactgcatttattgttgagcatgatttcatcatggcaacatacttggctgacaaggtcattgtttatgaggggcgaccttctattgactgtactgccaacgcaccacagtctttagtatctgggatgaataaattcttatcgcatctcgacatcacttttagaagagacccaaccaactataggccacgtataaacaagttggaatcgacaaaggacagggaacagaagtcagccgggtcctactactacctcgatgactaatgaggaagtgcagattcttcttggagagccatatgtcgcataatctttccagagcgtggaaaggagaagctactttgaagctaccactgcatcatggcatgtgacttgttgaataattggttgcaggagtagagtgcgccggttataacttataaagcagagcatgccgtgttgatactgagttttttgttggcttgacctatatgaagagaaggatcggtgttaaaatgagatttgcgagggggaactaatttctgtttttaagcaatactgtactgtcgttttgctatcaagtatatttgaccctcgattatat

SEQ ID NO: 32330 - DNA, 1552 bp, Zea mays
  Clone ID: UC-ZMFLB73296G06_FLI
tctccagagtctagagacctccaccgtccactccaaagacgagcagcgggcaaacccaagcacccgcccaatccggttcgccttccttctcaccccgcccggactctgcggagagatctggcagcggtggctatgccattgggcgacgacgcggcggcggacttcgcgctgccggacgagctcctggcggcgctgccgcgggacccctacgagcagctggatctggcgcgccgcatcaccgcgctggcggtggcggggcgggtgtccgggctggagcgggaggcggggcgcctgcgcgcggaggccgcggggaaggaccgcgagagcgccgagctccgggagcgggtggcgctgctcgacgccgcgcttcaggagaccaacgccaggctccgcgccgcgctcgaggacaatattaagctcagcaaggagcgggactcgctggcgcagacgtccaagaagctggcacgcgacctgcacaagctggagtcattcaagaggcatctgatgcagtcattgcgtgatgatagttcatcaacacaggaaacagttgacattacaacgtgtgatcagccagtagcatcgaaagcatcatccagtgcagatggtggatctgtcagcaaccctgcaacgaatatatttactgagtcattggatgtgggaagcacaaaccgagatggtactgcagcaaggcctccgatccagaaatactctctcacaacacacatcactccccgccttaccccagaggccactcctaaaataatgtccacttctgcttctccaaggcgaatgtctaccacaggaacacccaagttgatgtctggttctacgtcaccgtcaaaaactcgaatcgaagctcacatgtcaatgacaccatggtatccatcaagcaagcaatcctcggcggcaaactcgcctccacgaggacgttcaaacccaggtcgcactcctcgaatcgatggaaaggagttctttcgtcaggccaggagtcgtctatcctacgagcaatttggagcattcttagccaacatcaaagagctcaatgcccataagcagtcacgtgaggaaactctcaagaaagccgaagagatctttggtccagacaataaagatctgtacctgtctttccaaggcctgctgaaccgtagcatggtggcataaggcttcacatgtcgcttcgcaagtccaatggagttccctcttcccgcaacgctaataggatacgcaagttgttgctggcttttgcagataatgaggttgctgcattggcaactttatctagctgtggatctgaaggcccagctgcaagttttggccccgtaataatccacatcgctggaacgagcggatctctctgaacgactgagtgggcaaaccagcagtgttgcttctgtaaaagtggtgtgtgtacttgccgaaagcggacgacaaattcattgcctaaatcagggtgcagtctgtcatggagcgcgtccttgtaaaaccgtgaaaaaggtaaacatgagagtaaaaatcttcatttcgtcgccaacaaagaaggtaacctcaggtt

SEQ ID NO: 32331 - DNA, 307 bp, Zea mays
  Clone ID: UC-ZMFLB73296H02_FLI
cggaggtctttggttgagtcgccctcgccatattcccaaggaggaagtgaaggcactctctaaagttgtcgagaagaaggttagggcatctggtgttggggtgccatccagcaaattgtgatgacatctttgactacgtagctcttcgatgtgttctgtacaacatatgtctatattgttgtcccactaatgttgtcagtttggctatgccaccagtccatgcagatgacttgttagggcttgttcgcttatttttaatccatatggattggaggggattgatatggattgggggagattttcactt

SEQ ID NO: 32332 - DNA, 878 bp, Zea mays
  Clone ID: UC-ZMFLB73296H09_FLI
tcgattcggcgcctcctctccttcacgcgcccacgctgccgtcgcctcctcctcactgtcgtccatgccgtgtagccgcctacggccatggccgctggagccagcgactatttgacggtggagtaccactccagagactcccctctttcccctccgacgacgagggagccaccggcggcagcggcgtcctcgtacaccacggtgggcacggtgggcgatcttctcatgaagtggtggtagtgcctcgtggacgtcgacggagacgcggcgtgcctgcccctcgtcctcctgctccttgtcttctccgccgccccgtctcctgctcacggctgcgaccgctgcgtgcgccggtccagggccacctattaccaggcctcctcgctcgccctcaacggtacccctgccttgtgcgtttcaaacgattcgtctgtttctgtggaatttgattcatctttcggtttctgctgaactgcgcagcactcagcaagccggttcgaattcatcgtcgccttccattccatgacgtcgtgcgcgtgcgtgtggttggattttggcaggtggggtcgtccaactggcggttcatgtcgcgggaccacgggccggcgtggagcacggcgcaggcgccgctgtagttccggctggtggtgaccggtggctacgacggcaagtgggtgtgggcggagtcggaggtgctgccgcgccggtgggaggccggccgcgtctatgacgccggggtgcaggtctccgacgtcgcgcaggaagggtgctacctctgcgacacgcgcaagtggcagtgatgctcgcacgagctggattgtacagttttttgttttggtcgggaatgggacgaaagatatgaaatgatgattagcggagcc

SEQ ID NO: 32333 - DNA, 730 bp, Zea mays
  Clone ID: UC-ZMFLB73296H12_FLI
ggaccttcggcgcccgttcaggatccacatcttcccgagcgagttcttggttgacctcttcctcttcggaccacctccaaggctcttggtgtagcttgccactctcaccaatcaagttttcatgtctgatctcgacattcagatcccaactgccttcgatcccttcgctgaggccaatgctggggactctggtgcggcagcagggtcaaaggactacgtacacgtgcgcatccagcagcgtaatggtcgcaagagcctgaccaccgtccagggattgaagaaggagttcagctacagcaagatcctcaaagatctcaagaaagagttctgctgcaatggtacagtggtccaggacccagaacttggacaggtcattcagctccagggtgatcagaggaagaacgtctcgaatttcctcgtccaggccggcattgtgaagaaggagcacatcaagattcatggtttctgagcaaccgccgggtccatagcaaaccaaccctgcatgcagggccagcttattatatataatatctgaggtggagcatatctatctggctgtgtactgcaagcaggcctagtacgccgcctgcgcgttcctcctattacacatataggcccctccctgcgtgtatgcttgttaccgtcgtgtcgaaccttgtactacgaggctccatcgaacatcgatggcttgcttctttatcagaacatgtttgaataaacgctatttggt

SEQ ID NO: 32334 - DNA, 2864 bp, Zea mays
  Clone ID: UC-ZMFLB73297E11_FLI
tgtgggaggccttggattctccaacatttcgcagcaggctgttgtgggaactggtcaagttcgctcaaaacctaaagctcaagatggaattggggggccttattatgcctctggtgttgggtcttctgaagaacaatttgacagacgcagcaacttttatgcaagcaaggatgctcgaccatcaggatctgtacgtttggaaagtgcacttcttccaactccatcaatcaatgccgatagagttggtaagccttcatccaacaaaagctggaaacactctgaggaagaagaatatgtctgggatgatgtacattctaaagcagcagaatatggtggtagccataatgtaataaaaggagaatggatgtctgatgatggcaatgctaagtttgcaaacctccaaagggctaaatgggcagatgcaggacctgtggaacgtatagatcccaacacacataaacttgataacgtgtcaagatttggacttggagcaggtcaagaaagaagaatttcagaatacatggatcaggaagagtaccttcttggcaagcgtgaggtggaagcaagaattgataaggaaattaggtctgatggacaacagttcccagcagctcgaggttctcctctctgggtgtcccaggaaaaaacactcctagacattgggttggagcctaggatatcaaggttttcaactcagccagcagagaggtccaccatttatactggcaccatgtcagcaggtatcacttcatctgtacctgttgggttatcaggaaactatgctggaaggtcaagcctagatactgcaaatggtatgccaataagatcaactgaggcttttgggcagcagaagcatagatattggtcatcttcccctccacaagctgacacatcttcatctactgcaccctttgcacgtcagggttctccaaatcctgccgagtctgatttttatccttccagatcactttctcgccaaaatcctcaagaatatagcaaaagagcattgccggtacttgctaaagattctcatgttgtggttcacaatgatggatttactcagggccaacctagtctacaggcaacccggcagacacaaaagtaccctatcttacagtcgaagtcgcatattaagccatctgatcaattgcaggcaagtttttcgcgtgaaaattctccatcattgttcagaccttccatcgaacttggagaagtctctttacccagtgactccacccccataagctcagatctgacaagtgctagtaatttgttggctagtctcgtaaagagtgggttcaaaccaaataaccacagtgatgcacaggctcttggtccaagtggaccacttccagtggcttctttatcacttcaaaatgctgctggtgaaaataccactttgcaggcacatacaccaaacacttctcgtccaccattgccaccacctccatcaacacagagtgcggagaaagctgcgccgctctcaagtcttctcagttccctggttgcaaagggattaatctcttctccagcctatgattcatcgagtgctgtcatttcacagccaaataaagcatcaagcatgaatgttaaagatgccacagcttcagctgtgcctttgctagctctgagaccttcagttggtaaggcgtcatctaattctgattcatctgctccaacaaacgcttcattaaccaaagctatcgaaattaagatgagtgacctcattggcctggagttcaagccagagaaacttcgcaagtaccatgagcacgtgattagcagcctctttgacgacgaccaaagccatcagtgtaaaacatgtggcaataggttcaggcttgaagaactgagcttgcacacatcaagctgtgggcaaaggaagtctgagactatatatactggtatcgcacctaaaagatggtaccctagcaagaacatttacattgatggatcacatgaaattgaggacagcactgaggcttctgatggagatttaggttctgcagaagaagtgtgtgagtttatggtcccttcagacgagaggcaaattatctgtgcactatgtggggaaccatttgatgacatatattcttttgagaagggggactggatgtacaaggatgcagtgtttttggattaccccaagggagaaagcagctgcagaaacagtgttgagggtgaagagcatgtgcccattgtccatgtaagatgtatgccaagaggctcaaacgatggcatggaggttgactagaatgagtattgttcacagcagttatgctcttgaggggccttgaggtggatgagcctaaagctggggtttgcacgaggaactgtgcatcatcaggttgtctgttgcaattggactgatgacatacatgtaggatgattggtggaaggtggcaggcgttatcagaaacaaaactttggcgaagatctggaactgcccgtggatttctcagtgcccattacaaagtgcttacacaaagaataaagctttagaggaacaatttggccatgcaaatcagaattatcaaaatcttcatattttgggtctccatctgagaaggatctttatgttgatggaaagaaagctgtgcaggtgcatgtcaaaagaatgtatgatttctttacgagggaaaaggggtatggtaccccacatgtaactcggatactgctgttttttgacgatacatttctcgtcttttggagtaggaatttttgtgtagttaagaaactgataatagaacattatagaggtaggactaaacaagttagggtgtgtttggcgtttggctttaacttttgcccactaaaagccaaaagaaaaaacaaaggtatgaatttagaaagtagctttttct

SEQ ID NO: 32335 - DNA, 1033 bp, Zea mays
  Clone ID: UC-ZMFLB73297H03_FLI
ccccccaccctctcgccgcctatataactcgcgcccgaatcggcggctccctcctttgccctctccgcgcaccttccaccacgctctggaagctgtttcccctttctcgagagtttagaaagctggtgcagagatggccggggagagctgcgtccccaagcccctgttcggcggcgccatcttcaccaccttccccgaccgcttccaggacgtgagcaacatccgggaggtccccgaccatcaggaggttctcgttgatccatcccgcgacgagagcctcattttcgagctacttgacctcaagggcgaggtggacgacgccggcagcgcgctctggttcctgcaagacatcgccaacgagcaagacgccggggacaacttggtggtagagcattctgggacacttgaactggctgctttgcatctcggagaagctcctgcagtggctgcaactgcagttggccagctggccgtctcaaaagggaggcagggcagagaagcacaaaacattgttcgaatttacctggcaaacatacgccttaagaatgcggcaaccgatgtacttatcaccgcatatgagccattgttgataaaccccctgagtgaaagtgctgcggcagttgcagctggtccggcaatacctgctgaacaagtagggtgcttgccaatgtctgaggtcttcaaacttgcagtgacgaatttcaatgtgcgtgattggaaccttttcgatggtggcccttgaaccagagtggataatctctccaaaatcagatgtagagcatctggttgacatacggaagactactacctgttttctagatttacaattcattgtcagaaattatgctatctgacttaatcttccaaatactcctattgaacttacctctggaacattagctgagtttgtcatgatagattctactagtggattgtacgcagatggtctgtgtcgcttcatcggtaaagcaaactctgctcgttcctgttgaacacaggccatttaaatttagaaattagaattgatgctacg

SEQ ID NO: 32336 - DNA, 648 bp, Zea mays
  Clone ID: UC-ZMFLB73298B07_FLI
tggacacatggcagtatttcatgcacagatacatgcacatcaacaagttcttgtacaagcacgtccactctaagcaccacactcttgtcgtcccctacgcttttggagctctgtacaaccaccccctggagggactcatcctggacaccatcggtggcgcgctctcgttcctcatctctggcatgaccccaaggactggcatattcttcttctcgttcgcgaccatcaagaccgtcgacgaccactgtggtctgtggcttcctgggaacatcctccatgtattcttcagcaacaacagcgcttaccatgacatccaccatcagctctacggcaacaagtacaacttctctcagcccttctttgtcatgtgggacaagatccttggaacatacatgccttacactctggagacccgcaagggaggtggtctcgaggcgcgcccggttaagctcaaccaagcacagcagaccaaggctgattgagcagtgtggtttctcctgtttatctactacttcccctgattttttccccttctgactgcatttgtactgtagaagtatttcctgtccatatagtaaaatcatttaggcaaatgccatgttgtacccaacagatatagcaaataaaacatcttgttaatggagatcc

SEQ ID NO: 32337 - DNA, 1269 bp, Zea mays
  Clone ID: UC-ZMFLB73298B10_FLI
gcgacgagcccaaccagtgagggggagagatggcccgtcgcgccgtcgccttgctcgtcgccgtcgcgctcgcgaccgtgctcctgcatacggcggaggttgcggcggggcagaagaagccggcgacggccgcgaggcgggaggacatcccctacatccggtgccaggtgtgcgagcggatcgcgcgcgagatctccgcgcaggtcgccaagaagcaccaggctctcccgccctccaagaaggtaccggagatcgagatcatcgaggtcgcggagaatgtctgcaacctaaagaagcaggaggcggattggatgcttcggatcgatatcgtcgagaaaggcgacaagctcgagcttgttgagcaagatgaggaagggcattgcaatgcagaatgcaagaccattgagcgtgcatgtcaggaggtgataggatatgctgataccgatgttgctgagtttgtatacaaaaataacccctcggtcgatcagcttatgaaatttctctgcaaagatctttcgaaagcatgtgccaaggacccaccgccagttccaaaagatcgtgtccctggggaaccatttgcaaggaagccatcaaaggatgctgagatggaaaagatattgagatcaatggagggtatgccgggagccccaagcatgaaaatgtactccagggacgatctgatgaaaaataactttggtactgaagacgacgacgaggaggatgatgaagatgaggatgacaacttcccaaagaacttggggaaagctctgaaaaacaagggctctcaaaagaaagatttgaaacagcaagtcgtgcagcagttcaaggataccagcaagaagttgaaagggcatgtaaacaaggtgtccggtatggtaaagaaatggtggaaaggggcaaagaagcctgccaaatccagcaaaagcaaaactgagctctgaagcattgttgaatcacgtcagtaaatctcatccgtcttccacttctcctggagcaaagttttagatggttatcggaagataaaagttacagcaacgcaaccagggcttttgttagagagtttagctacataaaacgtgtacaattgtttgtttttaacttctgttatttgcagtgtacactagtaaaagaactgaactccgatgatagtttttttccagattagtcgtgtcccaattggtcgttatagtgtttgatactctataaaactaaacagctggtgacgccagggaattagtttattggctatgcataatcgaacttttcact

SEQ ID NO: 32338 - DNA, 1379 bp, Zea mays
  Clone ID: UC-ZMFLB73298B11_FLI
gcggcggattgaacaggtctacaggcgcgctcccgcacgccccgcgaaggcttttctcgacaagcttcagcagcggcgcagtcgaccagccgaccaccaggcaccagcccaccgccaaacgtaggatggcggcggagactaaaccggctgcggccagcggggttgccggcgagatggaggtggaggcgtaccgccgccttttcccggtggccttccttgagcgccacctcggcgagtccgtccgcatcgatgcccgccgcctcagagaggcccgccccaccaccgtcgccctcggcgccgtctcctccgcgcatggttccgctctcgcccgccttggcgacaccgccatgctcgcgtcggtcaagctcgaggtgatgtcgcccccggcggagcacccagacgaaggatccgtcgctgttgagttccacatgccgcctatctgctccccgctggttaggccaggccgacccactgacgttgcacccgtcatctccaaggcccttgaagacgttttgacgagttctggaatgctaaatttgaaggacctctgtttgatcactgggaaggcttcttggctagcgtacctggatatctattgcttgaatgctgatgggtctctgtttgatgctgcacttatttcagcagtggctgccttcacacatttggagattcctttagtttctgttggtgatgatggtagattatttactgttggaggcaatgatggaaaaaacaaatttgaattagtaaacagagaaaagaggaaactgacacttggtgccattccattgtcccttacatgtgcacttcataaagatgaaatattagcggacccaacttctgaagaagaatcgataatagagacctatgtgactgttgttgtagattcttcagaccgcctagtgtcattacaaaaacttggaggtgcagtgacatgcatggcgactattaaggagtgcattagcttggcgaaagaaaggagacggagcctaagagaaattctgttagactctatcaaagccatggaagtcgaccaaactgaataattctacaaatagattcagttaatctaaccggactacatcttgatggtttctctctgcctcggctgtactggttgtaacagcagttttgttgatttaggcaaagtatgtagctatttgtactctacagtctacacataattcttcacttaagtagcctggcgattttgtttgacgagcatgtctgcaatgcatctttttcgcgacttggcatctttgtaacaccctaattcacattttgcaatattttattttattttttataatcaattagaactactgcatactccctttgtcagagtgtttggatctaggtggctaaagtttagtcctgtc

SEQ ID NO: 32339 - DNA, 1239 bp, Zea mays
  Clone ID: UC-ZMFLB73298D01_FLI
gttaagcagctcatttctaagaagccgacccaggccagccgatatcgagcaccaacgacacaccccattgacgtacagctatgatgcggccgacgtcgacccttgctatggtcgtgccgtcgctcgctgtagccatcctctgcatcctagtccggtccgcctccgcggagttctggctcgacgagttcaccacggacggcgacgtccgcagagactacgaccgttctggccggcaggtggcgtcgcttgtcctcgaccagcgttctggcgctggcttcaactccacgcgcaagtacctcttcggcgagttcagcgtggagatgaagctcgtcggcggcaactccgctgggactgtcacctccttctacctgacgtccggcgagggcgacgagatcgacatggagttcatgggcaactccagcggctccccgacggtgctcaacacgaacgtgtgggccaacggcgacggcaagaaggagcaccagttctacctgtggttcgacccggccgccgacttccacaaatacaagatcgtctggaacgacaagaacatcatcttccaggtggacgacgtgacggtgcgcgtcttcaagcgctacgatgacctgccgtacccggacgccaagcccatggcggtgcacgccacgctgtgggacggcagctactgggccacgcgcaagggcgaggtcaagatcgactggtccagcgcgcccttcgtcgtctcctaccgagactacaccgccaacgcctgcgccgtccacggccggaacggcggcggcagctcgtcgtgccccgccggtgccaacgagtggatggacaggcagtccgacgacaccgaccgtctcaccgtggcttgggcgcgccggaactgcttgcagtacaactactgcgatgacgggtggcgcttcccgcaggggttccccggagagtgcgcccgcaactgatccaccatctgccctgcagtcgcgagtctccaagtctcgccggcctcatcgcatcctcttaccgcagatataggcatactagatcgagttcattcttggattttatgttcttgtaattgtcttattgtacgtacgtacatcgtctcttccgactcacaaagagcccagcagcgtgcgtcctggatctggatgcatatcgaaggtactagttctgtgacttctaaaagatcttatttttgatgattttggtgtaaaatatcatcgcagaaactgaggaataaacatcagaattcat

SEQ ID NO: 32340 - DNA, 1100 bp, Zea mays
  Clone ID: UC-ZMFLB73298D02_FLI
gctatattcatactgtgtggaattcatcattttggagggtgataacctcacatcaatttttcctaaagctggttttgattggcttgggattcatgttgatggaaaacattttttcggagtgttaactgctattttagtcttgccaacagtatggctgcgagatcttcgagtactctcgtacctttcagcgggtggtgtgattgcaactcttctcgtattcctgtccgttggtttagtcggtgttaccgatggtataggcttccattcaactgggaaggcagtaaactggagtggcatgccttttgccattggtatttatggattttgctactccgggcattcggtatttccaaatatctaccagtcaatgtccgatagatctaagttccctaaggcactgttcatatgtttcgcaatttgcacagcaatatatggctcttttgctgtcattggctttctcatgtttggaaagaacactttatcacaaatcactttaaaccttccaaagcattcgtttgcctcagaagttgcactatggaccacggtgatcaaccctttcaccaaatttgccttgttgttaaacccattagctcggagtttagaagagttgcgtcctgaaggttttatgaacgaaacatcatgcgctattatactgaggactgcccttcttgcatcaactgtatgcattgcctttcttctgccgttctttggtcttgtgatgtctctcattggatctcttcttagtatacttgtggcagtcataatgccacccttgtgtttcctgaagatcgcgcagaacaaagcaacttgtgcacaggtaatcgcaagcatttgtatcgtaatgttgggcgtcatcagtgctgccctggggacatactcctccgtgaaaaagattgtagaaaactactaagctcttcgacaataattgcctgcctgcaccagactccacgtatggaactcgaaatggtcaggttttactgtacgaccaaatttttactagaactaccggatttcctgtacattattgctgctgttattattcggaccacactagcctactaaaaaggaacacttccaataatgtaatcttgcgcaccttt

SEQ ID NO: 32341 - DNA, 2044 bp, Zea mays
  Clone ID: UC-ZMFLB73298E04_FLI
ccgccgcgacggcgctgctagctagtctttggtgttgcaggtgttcgattcctgattccaaattccagactccaaactcggttcttcaatcgacagattccgatttacatcccaaagctcttcggattgaaatccagccgcgacccaagagataagagtatttgggattagtagatagggagggtagataggatagtagaatagaagaggagcactttcgctgatgattacggcggaggagaagagccccgaaagggaggaggaggaggaggaggcgaacccgcgcgcggaggcttttctggagatcatctgccgcgtcccggcgggggaggtggaggcggcgctgtccgcttgcggcatcggccccacggccgaggtcgaggaactggtgctcaagtcccgcgaatgctacaagcgccctaagtccgccgtccgcttcttccgctgggcggggcagtccgtgtcgcacaccgcctacgcatggaacctccttgtcgacatcctcggcaaggccgccatgttcgagcccatgtgggacgccatccgctccatgaagcaggagggcggcggcgggctcgtctccgtcgccaccttcgcctccgtcttcgcctcctactgcgccgctggcaacatcaaagatgcaatcgcggccttagacgtcatggaccgctacggcctcaagcacgacgccgtcgcgctcaactcgctgctctcggcgatttgccgcgtcgagggtcgcgcgcaggatgcgcaggacgtcttcgagcgtaccaaggcaaccatcccacccgacggcgacacgttcgcgatactgctcgaggcatgggagaaggaggggaacgcggtgcgcgccaagagcgtctttggcgagatggtcgtccgcatcggctgggacgcagccaacgtatccgcgtacgactccttcctctccactctcgttcggggcggcctgttggacgaggccttcaaatttctgcaggtgatgcggagcaagggctgcttgccggggatcaattttttttctacagctgtggatctggtcgtccgcaagggtgactacctcaacgccgtagccatctggcacatgatggtctctgaagccggcctcgttcccaatttctcaatgtacagcgccatgattggcctccactgcaatgctggtagcatagacgatgctcttgggttgcttgatgaaatgcccctcaacggcgtctttgcaaattctgtcacatacaacaccatactggaaggattcatcaagcatcgcaaggctcgtgaggctgaaagtttcctaacggagatgagcaagaatgagcaactgcctactgcatccaattgcgctgctgctatcagcttgttctttaaggagtttaacccatctgcagcaatcgacgtgtggcgctgtattgtggagcacaacattaccccagctgaggactctgccaaagagctaatagcagggctgcttgaatttggcaggtttactgaggtgacgaagcgtgctgatgagatgattgacatgagagttgagttgtcacggtccacaatggagaatatgaagcgtggttttgctaaggctggcaggcaccaatcatatgacaacattgcaagaaggctaaagcgatattagctgcacatgaatgctttaatcagctgaaactttgcggctcacggggtagaagtttaacgcctggactgctgaattgcatgacaaccaagaatttggactagcctggatcctggaatgtaagtctggaagtctggaactgtactctgatcccacaagcagtggtcgggatgttagtgtagctcttgtagattccggaccccatttgttagctggttactcatcgagtgtaataagtggctagtttagtgagactgcacattatcgctgtttatttttcagatatattttatgaatatgaaattgggttatgtaagtatcagatattcctggctgtcagcagcgtcaggcgcctctgctgatcctttgaccatattgtttttcgtggaagaagctttttaacttcttttttttttt

SEQ ID NO: 32342 - DNA, 1681 bp, Zea mays
  Clone ID: UC-ZMFLB73298F04_FLI
aaaacagatcaattgtagtcactgcctattcttggccatacggctttccccacaccccaacacaaacaagagaaaaaaacaaaaactagacgaaagagggaagaaaccaagaaattggcgaatccctgacgctccccactttcaactcccatccgcttgccgttgccgcgtttgtttatcgagccaatttgatcagggcgccacaccgaaccctagttcttgatttaatcacgggttgtgtggtcatgccggccgggtcaccccgttcttcttctcttccacgagttcaggaggtagagtgagagagaacatggaacgacaggggatggagggcaacaatcttctgcattttcttgataccccgagcgcccattacagaaggacatgcgacggatttgaggcccaacacggcggcgatgaacactctgagacatcagatactgatccggcgaatgcaagggaaatgctggaatatttgttgaaccaaccagcaaacaaaatctgtgcagactgtggctctccagatccaaaatgggtggccctgccttttggcacattcatctgcattaagtgctctggaactcatagaagtcttggtgtgcacatatcaaaggtgatttcagtgaatctggatgagtggacagatgatgaagtcaactgtttagctgaatcaggcggaaattctgttgtgaactcaagatatgaagcctttttacccgaaaacaaaaagctaaaacaagattgctcaacggaggagcgtaatgattttatcaggaaaaaataccagtttcaacagtttgtgtgtgatccacaattttcatgccctttaccacttaacagaaagcatgcaccaccagataaaaatcaccagcagcataatagcagcaagtatggttttggccatacttttaggaatagctggagaaaaaaggattcagatagcaaaagcctaaagaaaatgtcggatgtgggaatgatagaatttgttggattagtaaaggtcaatatcgtaaaaggcacagatttagctgttcgtgatgtgatgtcgagcgatccgtatgtcttgattcatctagggcaccagtccatgaaaacaaaggtgataaagaacacactgaatcctatctggaatgaaagactaatgctttcgatccctgacccaattccgcctcttaagctgcaagtatttgacaaggacacattcagctccgatgaccggatgggggaggccgaggtggacatccggccgctgattgcagcaacgaaggagcacgagaactcgaccatcaccgaatcgacagaactctacagatggtcagccagcgaagacagcaacggtgtgctcgccaaggacagcgtcatctctgttgcgagtggaaaggtcaagcaggagatcacactcaggctccagaatgtcgagcgcggtgaggtcgagatcgagatcgagtgtgtgccgctcagccagtagcagtcccattgttgtgacaaggacactgctttgcaatgcagaaagacctcagcttcacttgtttgattgctccatgcctgtaattcgcgtgcatgtgtgagatgtgtaatgtgttgtacggtagataggcaaagggaaattatctacttatattactttgatgataggcatacggttgaactgtttccagtagatttcctgacctcagttgct

SEQ ID NO: 32343 - DNA, 1813 bp, Zea mays
  Clone ID: UC-ZMFLB73298G08_FLI
gttcggagcgcacacacacacaaccagatctcccccaaatccacccgtcggcacctccgcttcaagatgcagatctttgtgaaaaccctgactggcaagactatcaccctcgaggtggagtcgtctgacaccattgacaacgttaaggccaagatccaggacaaggagggcatccccccagaccagcagcggctcatctttgctggcaaacagcttgaggacgggcgcacgcttgctgactacaacatccagaaggagagcaccctccaccttgtgctccgtctcaggggaggcatgcagatctttgtgaaaaccctgaccggcaagactatcaccctcgaggtggagtcctctgacaccattgacaacgtcaaggccaagatccaggacaaggagggcatccctccagaccagcagcggctcatctttgctgggaagcagcttgaggacgggcgcacgcttgccgactacaacatccagaaggagagcaccctccacttggtgctgcgcctcaggggaggcatgcagatcttcgtgaagaccctgaccggcaagactatcaccctcgaggtggagtcttcagacaccatcgacaacgtcaaggccaagatccaggacaaggagggcattcccccagaccagcagcggctcatctttgctggaaagcagcttgaggacgggcgcacgcttgccgactacaacatccagaaggagagcaccctccacttggtgctgcgcctcaggggaggcatgcagatcttcgtgaagaccctgaccggcaagactatcaccctcgaggtggagtcttcagacaccatcgacaatgtcaaggccaagatccaggacaaggagggcatcccaccggaccagcagcgtttgatcttcgctggcaagcagctggaggatggccgcacccttgcggattacaacatccagaaggagagcaccctccacctggtgctccgtctcaggggtggtatgcagatctttgtgaagacactcactggcaagacaatcacccttgaggtggagtcttcggataccattgacaatgtcaaggccaagatccaggacaaggagggcatcccacccgaccagcagcgcctcatcttcgccggcaagcagctggaggatggccgcaccctggcggattacaacatccagaaggagagcactctccacctggtgctccgcctcaggggtggcatgcagatttttgtgaagacattgactggcaagaccatcaccttggaggtggagagctctgacaccattgacaatgtgaaggccaagatccaggacaaggagggcattcccccagaccagcagcgtctgatctttgcgggcaagcagctggaggatggccgcactctcgcggactacaacatccagaaggagagcacccttcaccttgttctccgcctcagaggtggtatgcagatctttgtaaagaccctgactggaaaaaccataaccctggaggttgagagctcggacaccatcgacaatgtgaaggcgaagatccaggacaaggagggcatccccccggaccagcagcgtctgatcttcgccggcaaacagctggaggatggccgcaccctagcagactacaacatccaaaaggagagcaccctccaccttgtgctccgtctccgtggtggtcagtaagtcatgggtcgtttaagctgccgatgtgcctgcgtcgtctggtgccctctctccatatggaggttgtcaaagtatctgctgttcgtgtcatgagtcgtgtcagtgttggtttaataatggaccggttgtgttgtgtgtgcgtact

SEQ ID NO: 32344 - DNA, 1884 bp, Zea mays
  Clone ID: UC-ZMFLB73298G11_FLI
tctgagaggaaggctttggagttgcagttggagtccaaatctgtagaagttgaggagttacttatggctgtaacttcattggaggaaaacaccgagcagaaagagttggagtcacagttagaactgatgtcagcacaagctacagagcttcgcctgactgtggcatcactggaagagagagttcaggctgaaagaaatatttctatgcagcagaaagaaaatgcagaagctatgttgagtactaaagaagaactggaagcacagctgtgttcagcaaccactgaaatggggaaactgcgtgacatggtcaaagcactagagaatgaggtcaaaacggagaaggcactgcatgaagaactaacagcacatatacagataaaggttgaagcagctgttgatgcagttaaagaaccattggaagcacaactgtgttcaacaaatactgaagcagagaagctaagagatgttgtcaaagcacttgaggatcaagtagaaaaagagaaggcattgtgcgaagagcttgcagcaaaggtagagttgaaaactaaagcagcaagaactgctgaggctgttcaagaatccttggaggcacaactgtcttcagcaaatgctgaaatacagaaactggaagagatcacgaaacaactacagagtgagttagaaaaggagaagacacttcatgaggagttctcagcacagttagagatgaagattgaagcggagagagctcgttctatggagtctgctaaagaatcattagaggaacaattccagttagtgaactcagaaacagcaaaactacgtgacacggtgcatgcgcttgagcacgatgtggaaaaggagaaggtattttctgcagagctccagatgcagctagaagctctagaggctgtaaagaaggtgttggagtcagaagcggagtcagcgcatcaggatgccaaaattctcagccagaaggtggagtcattggaagcaaaactcacggagcatatgttggtaaccgacgaattcactgccaatgtagagtctttgcagtcagataggattgcaatggagcataaacttaaaacagcagatagggaactcataaaattgacaaacaaggtgagcttgctccatagggagatcgagcaggagagattgatgtcagaagagtacgaacagaaatgccaaaagctggaggatcaactgtcgagagatagccgtgacgcaaagctctggcgactcgcaaactcgaatggagatctgaaggttaagaaggagaaagagctcgctaacgcagctgggaagctcgcagagtgccagaagacaattgcttctctggagcgccaaatcaaatcactgacagacctcgacggcgtcgtgctggagcctgaaaggcttgaatccagcagggacatgccattgccactggacttcagaaacagtgatgctgaatttgctatgtttacggatgatttatacgactttgaccttccaaacgacagcaaaagcttcttctctccactcccgtcgatccagacctcgtctccgccctcggagatgtcagtattcgcaggggggctctcgactcttagcagttacaggagcaaaagagcaagtagaaggtgatgaaaaactaggctgcgcccagatgtcgtactaacaaatagttcatggatgctgccatatgtaggtaggtaggtcgatgtacattacaggaactgattgttagatttgtgtgatgaacatcccttccagcaagcgcagttttttttagcgtgcttgatgaggtcttaggtcttactgtgtcagtgacggttagtgtggtacaaaatgtgaactcggttatctgcgtgtgtttccagttacaggaaagtgcagaggaagtgcatattcaatgct

SEQ ID NO: 32345 - DNA, 2497 bp, Zea mays
  Clone ID: UC-ZMFLB73298H04_FLI
gcgcgcctgccaagcatggcgtcgtcgcggccgttgcccccgcgatccccttccatcgacctgccaagcatggcatcgccccggccgttgccacgcccgccgcacacgccgcgatgagatcctggaccccccgcgacatcctcctccaccgcgccatggccgcccccgacgtcctcgcgcgccgctccccgaggtgggcatggtgcgcacgaccatcgcgggggtcacgacggcggcgcggttccaggagctggtggactggatggaggagtggaaggcggcgttcagggacaacagcaagtggacggagacggtgaacctggggctcgggagcctcgcgctcatcatgtccgggctgcttccgttcgccatcgacggggacctcgggttcgggaagcccagcctcgtgctaccctgggtgcgccatggccggctgggatccgcgtccgtgatggtggtgccctgccccagcggcgacatgtcgtggttcttcggcggcaccaggatgtggctgcggctcatggaggtggtcgaatccgaccctttgatgaagcagacaacgaacctgggaatggcgacagaggcgggatcccgtctgtgactgtgagctcgcgctggcggtacctgccattacggtgtacgggtatcatcgccatcatcatccagatccaggacatttccggatagatgacataatctgttcatctcaaatgccacaacattcgtgggcacatgttgccttgttggcttcatttagctcgcccgacatcatattttagcaactatctgtcatatataatctactaaaatggtttattttttcatttactcttatactctcatttttccaaccaggacttctgagcacatggaagatgaaggagacgttgcaactcctttacactttccaaatttttattaaatataccaatatcacgaggtgaaccttcgagtttagtgatttttcatatccatggtttgcaggcaagtaaacttattacatataatccattgaacttcatgtcttggtttgtccaattcgacatcgaagggctcgccatgtggggtgacgtcgacggggcttcacctgtcctattctatcattattgtgattactgactatgccattgtttgtgctactgctgcttatgcttgcagtgccacaaaggcaagcgaacctttgatttggtccatgttctggtctaaccttgttgggtccacactccatgggtcactttcacattactactaccatatctgtgaggtaaccattgttacatgacctactcatatatcttttgcttgtacattcaagtaaagattgtctatttcaaccacaccaaaagtaaagaaaattattaagttggtgaattgacaaaagaaatgaagcaagtttttaggtgttgaagtataagtgattcgcccaacttttcccatcagcttgacttttagtttgggggtaaactaacctacacatagcaggcatcagatatagcatattacaataagctaggtatgtgtttgtattcttagttcttttagtatattacataagctacatccctcgtgatgccttaatctaggttatatctcaatgatgatttctttataacatgctgatcataaagcatttgtagacagtgcattcaagtaacggtacaatacaaagggtggcaaatgataatagcctgaagaatgatggcacaaaatgatctagagtattctttatcttacttagattttgtcaacattccatcatcatataatctcgaatattttcataaactggttgtgtaaaatggggggatctttctccatgaatctcaatggatctgttgtgcactgcatagctgcggagaagaaaaaggtatcaaatatcaagcagctttacggcagcgaaggatcattcactatgagtggatattaaactgttgcaaggaaaacatcttcattttcatcctagtctcatcagtgacatgtatcgcttgtcatttgatgaaaatggaagttgaacgatcattctctttttgggcactgctgaaggtgatgttgttcacccaactgagtgtatgccccagctgcttgagcaagttcggcatcacaaagcgaatatcgattgcaatgattatattgtcatggtgactacattggttcttgaggttgaggatttgtctacacaacaagtgaatgataagctcctagaagctgtacaaccttaagcactcgagcaatggagcaatgtggtatgatgagagcataggaggtttgtcgagatgaggtcgaaacatggccccaatgtaactagaccagagcaattgacaatctaggcaatatccgctatctggtccattgtttctctcgtgggtccattgtttctgtcgtgggtcagacgtcttcgacgtgaagagaggttgttttgtcatttccacattctgaagcgtaatgtagtgcagtggacgcatatagctactacgtatgttaaagttgtattttttat

SEQ ID NO: 32346 - DNA, 340 bp, Zea mays
  Clone ID: UC-ZMFLB73298H10_FLI
gcctcggcaacgcgctcgcgctgctctccatggcggccgggagctatttcaactcgcttgcgctcagcgctgtcgggtcgatcacggcgcgcggcggggaacgcgggtggctcccggacgacctgaacaagggtcatatggactatttcttctggatgatggccgctcttggaacgctcaacctgctgcacttcttgcactactgcaacagacgatacagaggcaacaacaacaacacttcttgacgtgtgctgtcatgctgtgtgcaccatgtttctcaaaatcatagtttgataatactatattttgtaattatcataataatactatagttttagcc

SEQ ID NO: 32347 - DNA, 876 bp, Zea mays
  Clone ID: UC-ZMFLB73299A08_FLI
cgcggcgctgccgccgccgccgtcgccagggaggcggacgctgttcctggacctcgacgagacgctcatccactcccagacggagccgccgccctcgcggttcgacttcaccgtgcgccccgtcataggtggccatgcggtcaccttctacgtcgtcaagcgcccgggtgtcgaggcgttcctccgcgcggcggcggatgccttcgaggtcgtcgtcttcaccgccgggctgcaggagtacgcctccctcgtgctcgaccgcctggatccagacggggaggtgttcgcgcaccgcctctaccgcggcgcctgccgcgacgccggtgacgggacgctcgtcaaggatctggccgccaccggtcgggcgctggaccgcgctgtcatcatcgacgacaatcccaatgcctacgccctgcagccggagaacgccgtcccggtggcgccgttcgtggatgatgacaacgaccaggaactgcagaggatgacggcgttcttggacgtcgctgcggggtacgaagacacccgggacgccatcagatgctacaaggatctcgtcacggcaacctgagccgctatcccttcttaagccagtttcaggtttaatgttagcacatttttctcagattagtctactggttagtgggaaagagaaacattgctgcggaacaggacgtgtggtaaagctttgattttttcaggatcttcctgaacttcaatgcgagtattatgagaccaaattgaattgttacagtagaatgttcaaatctccggttacaagactccttttcattttggatatataatcaataaattctaccgctttgtgaagcacttttagggagtcagattaaaggtgaacatgagattgcgatgagc

SEQ ID NO: 32348 - DNA, 908 bp, Zea mays
  Clone ID: UC-ZMFLB73299B08_FLI
ccaatactctctccctcgccgccggccacctccgcctcctcccacgcgccacctccgcctcctcccacgcgccacctccgcctcctcccacgcgccacctccgcgacaaaccactgaaggagggagaggactcgctcatatcgtccgatggaggaggactcgatcaaggggatgatctccgcgatatcctgggtgcccaggggcgccgccaagagcgtgcccgtcgttgccgacccgcccactcaggaggagatcgccgaggccatgaagaccttcgacctgggcagagactccgggagcgacgctgacgaggatgatgatgctgccaccatggaactcgacggtgcggcggaaacggtggaggaggttgatgaggctgcccgagccaaggccgtagccaaggcgctctgcaagggctctagcaaggcggacgacgtcgctgatgagctccgcgaactcaacatggacgcgtacgatgatgaagatgaagaggtcgatattttcggctctgggctgggggacttgtactatccgagcaacgcaatggacccatatctgaagaagaacaatgaggatgatgaggaggacgacgatgatgatgaggaaatcgaagataagatgatcatgcctactgattttgttattgtctgtgcacatagtgaggacgatatcttctctcttcaggtcaacattcttgaagaaacaaatgatggtgaacaaaatatctttgtgcatcatgacgttcctctcgctgattttccgctatgcacagcttggatggattttaatctgaaaggtggtgaaaaagggaattttgtagccgttggaaccatggatcctgccatagaaatatgggacttagatatggttgatgaagtgcaaccgcacatggtgctaggaggactttc

SEQ ID NO: 32349 - DNA, 1391 bp, Zea mays
  Clone ID: UC-ZMFLB73299B10_FLI
ctggttcccctctccatatctctcctccccagctccctccccctctcatagatcgatcacacagcctgcaggcacagacaagagttaggctgttctacctgatcatatgaccctccagcaattctctcatccacacacaaactgaagcaagaattattgcttatctatatcctgtctgtcctttcctctatttcccccctcccctttctatttccattgtgcagcttgttattagtagatagcagtggatcgatgtgtgatggaggaaacaagctagctagctagctaccagctgaagcagcagggagaagaaggatagagagagagagagagagagaaaacatcttcttcatccatagtctcggcctttcttcaccaggtcgtctgcagatctgtctcctgtgaccttccagaggccaagctaggccaggaaggaaaaatggcgtccccgtcgagcaccagcaacaactcggccttctcccctgtggcggcgtcggccgggacgacgatgcctggtgccggggcgccgtgcgcggcgtgcaagttcctgcggcgcaagtgcctgccggggtgcgtgttcgcgccctacttcccgccggaggagccgcagaagttcgccaacgtgcacaaggtgttcggcgccagcaacgtgaccaagctgctgaacgagctgctgccgcaccagcgggaggacgccgtgagctcgctcgcctacgaggccgaggcgcgcgtcaaggaccccgtctacggctgcgtcggcgccatctccgtgctgcagcgccaggtccaccgcctccagaaggagctggacgccgcgcacgccgagctcctccgctacgcctgcggcgacgtcgccgccggcatccccaccgcgctccccgtcgtcagcgccgcccccaggctctccacggcgccaatgacgacgacgagccccggccagttcgccgccggcatgtacggcagcggcaggaggcttggggtcgtcgacggactagcagcgccaccgctgcctccgtcgggcggcggcggcggctgctacttcatgcggaaccaccacaacaacgtcgtcattagtagctccccaggcgctgacgtggcgcccgtcctgccttacgcttccgtggctaattgggcggtgaatgccatcagcgcgtcgacgaccaccacctccggatcagagagcattgggttggatcacaaggaagggggagacagcagcatgtgaagtgaaggggaagcgctgcgctgccgtgaatggtaaggcgctgtttctttctctctgagtaattaagtttaatcctgcacggcggccatgcccatgcatgatgtatagctactgtatgtgctagctagtttgtgtgttttaattatatacatatatagctgttctt

SEQ ID NO: 32350 - DNA, 1311 bp, Zea mays
  Clone ID: UC-ZMFLB73299C07_FLI
cttctgctctctctcgcctctggtgcgcagagctatagctctcttgaagcctcgagactcgtctcgccgctgctctgctccccagctctgccgctgcgtgcctgcgtcagctgtcgcattgcagccagcgagccttgagctgctagctctctcttccccacagttcccaggcatggagttcgaggatcgctgccacaaggtccaggagcccaagttcgactgcctgctcttcgacctcgacgacaccctgtacccgctgagctccgggatcgcggaccatgtcaagaagaacattgaagattacatggtcgagaagctgggtattgacgagagcaagatcgagaacctgggaaatctgctgtacaagaactacggcaccacgatggctggcctcagggcgatcggctacagcttcgattacgatgagtaccacgccttcgtccacggaaggctgccgtacgacaacatcaagcccgaccctgttctcaagcacattctcaagaacctgcccatccgcaaactcatattcaccaacggcgacaaggtccacgccgtgagagccctggagaggctgggcctggaggactgcttcgaggggatcatctgcttcgagaccctgaacccgccgtgcccgcctcagggagaccgggaggccgagatcttcgacatcgccggccacttcgcccgctccggcgccgccgccgagctgcccaagacccccgtcctgtgcaagcccaacgtcgacgccatggaggaggcgctcaggatcgccaacgtcaacccgcacaaggcgattttcttcgacgacagcgtacgcaacatccaggccgggaagcagatcggccttcacacagtgctggtgggcaagtcgcagcgggtgaaaggcgcggaccacgcgctggagagcatccacaacgtcagggaggcgctgccggggctgtgggaggaggccgagaaggcggaggacgtgctctacgccgagcgcgtcgccatggagacctcggtcaccgcgtaaacccctctctcgaatcctccggtgcaccgtcagcccaaccttctcgacatccaggaccgggacgatcgcataccactctctccccgagccagggctggtggtctcacgctggaactgaatccagccatggccgggccgagaatttccgacagcaagaaggggtgcagcatgtaaaggggggagcagatgatatcatgtttgggatgctcccagatatgtatagttatgtatcagccagttgtttgtaaattaccaataaatattagaagtaataagaaaaaatggagtttacttgt

SEQ ID NO: 32351 - DNA, 2376 bp, Zea mays
  Clone ID: UC-ZMFLB73299E08_FLI
gttccagttgacattgtgaagttgaacatccctgactactttcaaatagtcaagcagcccatggatttgggtacgatccagaaaaggatgaaggcaggcatgtactctacacctccggaatttgctgcagatgtgaggctcactttcagcaacgctatgaactataacccagctaacaatgatgttcatttaatggccaaaactttgagcaagaactttgagagccgatggaagcttattgagaagaagctccctaaaccagatgagaagcctcctcagccagatgagaagcctcctcaaccagttgagaagcctcctgtgaggaagcccacaaaaaagaattcaactaagagagtttccattgagaaagaagacctcactaagaaaaaaccctcaaagaaaagtgtacctaagcagtacatctttcggggagaagattcagctgacagtccagttctgcaaccaaagaaaaggaaaacctctcctttggtacaagatgctcctttggtaggggatattgttccaaccagaaagagaataatgacgagtgagcaaaaatatgatttaagtgcaagattacagtcatatggtgcattcattccagatcatgtagttgagctcataaggagtcacgctgactattgcgacgccaacgaagaggaattagagcttgatatggatgctctaggtgatgatacactttttgaattactgaggctacttgatgactatgacagagttaacccatcaagaaaccttacagaacaggatcctcatgaggttaagtctcgaagtcaatatgaactcatcaatgcgtcagtgtgtaacgaggaagtaaatgagctctttgacgaggacgttgatattggggagaatgaccctccagttttgacttttcctcctttggtacttgaagatgaaacagcagacagaagccgcaaacatagtgcatctagcagttctagtagtgactcagaatcatcctctagtggttctagtagctcttctggaagtgatacagatgccaaagctgctcaacaaaacagcgtgtcaaaggaaaaaattctacctgtggatggcctgggtcatgaaaaggattcactggacacattaaatttaccagagcaaagtacagaccctgtctctgtttctgcttatggtgagggggggtatgtatctgagaaggtctcccctgagaagcaaatccgagctgcccttctgagaagccgctttgctgatacgattctgaaggctcgcgaaaaggctcttgatcagactaccaaaaaggatcctgagaagcttcgacgcgagagggaggaacttgagaggttacaaagacaagagagagctcggttgcaagctgaggctaaagctgcagaggatgcctgcaagagggctgaagaagcagcagctgctgaggctgctgcagaagctaaacgacaaagagatattgagagagaagcagctcggaaagctttgcaagagatggagagaactgttgacatcaacggagggagtcactttctgaaagaccttgaaatgcttagaggtatcacatgcgaagagatgcccaacttggttggtgaagggagccctgggtttcaactgggaagcagcaacgccctagcaaagctcgggctgtacatgaaagatgacgaagatgacgaggagggcgatttggcagatgcaccagtggtggttgatatcgaagagggagaaatagattaagcgtgcttcttctggaccattttttatacgcgacaggagacctgtgggcatcactgatctgcatagcttttctttggcatacaaagcgacctgacgaaaagatcgcctcgcaccagacctggaggtctggtattcgtttttgtaactgcccaagttttggagccaagtcactaggttcgtcgagcttatcgtttggattgagaatctctggacttctgatatccactttcgataaggacttgttcggttaagaggtgatcgaaggagattggagaggggattggagaggattaaatccctttctagtcaattgaacagaggtagcaactgaataagccctaaaatggaatggcgagtttactgcatatatgatgaggccataaaagcggatgaaaagggaggagaaggcacaaggagtgatatatatgatgaggccataaattcggatgaaatgggagaagagatggggtagtggggagaaggcacaaggagtgatggtgatggctcttgagctggtgccagccgtttttgaggggtagttttagagccatttccgtgtcgtgaatgtaatatcggaaactgtacaaaagttagctagttagacgatggaaatcattctttccttcaatttatgcagtgcctgttctt

SEQ ID NO: 32352 - DNA, 1526 bp, Zea mays
  Clone ID: UC-ZMFLB73299F12_FLI
tcccgtcgcatcccatcccactaccacccatctcgtcgtccgccgattcgatccggttcttccaacccaggggcagtgatggcgacgaagaggagcgtgggcaccctcggcgaggcggatctgaaggggaagaaggtgttcgtgcgcgccgacctcaacgtcccgctcgacgatgcccagaagatcaccgacgacacccgcatccgcgcctccgtccccaccatcaagttcctcctcgagaagggcgccaaggtcatcctcgccagccacctgggtcgtccaaaaggtgtcaccccaaagtacagcttgaagcctcttgttccacgcttgtctgagctccttggagttgaagtcgtgatggccaatgattgcattggtgaggaagtcgagaagttggctgccgctttgccagaaggtggagttctgctcctagagaatgttagattctacaaggaggaagagaagaacgaacctgagtttgctaagaagcttgcatctgttgctgacctttatgtcaatgatgcttttggcacggcacacagagctcatgcttcaaccgaaggagttaccaagtatttgaagcctgctgttgctggcttcctcatgcagaaggaacttgactaccttgttggagctgttgccaacccaaagaagccatttgccgccattgttggtggatccaaggtctcaactaagattggtgtcattgagtcgttgctggcgaaggtcgatatcctcatccttggtggtggtatgatctacacattttacaaggcacagggatattctgttggaaaatctctcgtggaagaggataaactcgagctcgcaacttctcttattgagaaggcgaaggcaaagggggtttctcttttgcttcccactgatattgtagtagcggacaagtttgcagccgatgctgagagcaagattgtccctgccactgctatccctgatgactggatgggtcttgatgttggccctgatgccaccaaaacattcgacgaagcattggacaccaccaagactgttatttggaacggccccatgggagtgtttgagttccagaagtttgcagctggcaccgaggcgattgccaagaagctagctgagcttacaaccacgaagggtgtcactaccatcatcggcggtggcgactctgtcgctgctgtcgagaaggctgggctggccgacaagatgagccacatttcgaccggcggcggtgcgagcttggaactcttggaaggcaagactctacctggtgtccttgccctcgatgacgcctagatccgctgctgctgctgctactcaggttctgccagctttgcgtgtcatcttgtttcggaccttggtgtagcactgcaaggctaaggtttactcctccacacatggactttcgaggataggcttgccaccgtgttttgctagatgagtcgtgaaataagcttttacttcctcgctgctgtgggtgaagtgactggaattcggaaatttggaactaacaaaaccccccgtggatttgtatg

SEQ ID NO: 32353 - DNA, 1562 bp, Zea mays
  Clone ID: UC-ZMFLB73299G10_FLI
cttcagcatatatttgcttcatcaagtcacacatatggtggcttgactctggatttacattgtaatcgattgggtccaactgctttatttcagatatgtgagtgcgctgttttgactgatcgattggaagtacttaatctatctgggaatcgcctcactgatgcatgcagttcttacctattcacaatcctgaaaaagtgcaaagcactttatagcttgaatgtcgagcagtgttctatcacgtcaagaactgttcagaagatgacagatgcactccatgaagagtctgtcctttcacatctctcattaggaaagaacaacccaatttctagcaatacaatgcttaaccttctatccaaacttgcatctctcacaaggttttcagaactaagcctgactggtataaaactgaataagttaatggttgataagttgtgcctccttgcacaatcctcgtgcctatcaggacttctgctaggtggaacttccattggaccggtggagacaactaggcttactgaggcattgtcttgtacatctcaagatttcctaaggttggagttgtctaattgtgggctcacaacacctgatttcacacaaatctgtacaaatctctcccggatcaatattcttgagttaaaccttggaggaaatccaattaacctggagggatgtgatgctgtacagcgaatgcttgtaaatccccaatgcagtattagatctctcagccttgacaaatgcaatcttggacttgctggaattgtccgtgtcattcaatcattaccagaaaacagccaattagaggagctgcgcgtgtctaagaacaccaacttggcgttggagacaacaacaaagtatgacgaagacatgcaggaagtatcaacagcttctgagcaaaagcaatgtaatgaccctgaaacaacgaatgatatagctccagggaacatagattttgcgaacatgcaggttccagacagtgaagatgaagcagataatgatgcccaccgtgccagatctggttcacgcaggagctgtgcaagttcatcgcagaaaaactcttactcttcttgtcagatgattgaagaactggcgaaggcccttatttcagcaaagcagttgatggtgcttgatcttagctgcaatggtttgtcggaggaggcagtccagtcactgtattctgcttgggcgtctgttccgagaggcgatggaatggctcggaaacatgtaaataaggaggtggtccacttttcagtggatggtatgaggtgctgcggcctaaaaccctgctgcagaagagacctgcaaatgtgaaccctggacgaccttccgatgctaaattatggttgcactctgtaaataaatcatgagtgaatcaactaggcgttgaagcattgtcaatgcaacttcacactagtcacgatagtttggtgagtaattatgctgattcgcgggaatgtatacactacaatactagatgcttgagatttgggtatgcagttgtttcctgaggtgcagttactccttcgaaatcgtgccgtgtgacaagtttttcaattaaaagg

SEQ ID NO: 32354 - DNA, 2261 bp, Zea mays
  Clone ID: UC-ZMFLB73299H05_FLI
cttcgttctgctctccggctctcccgcatccaccccgtctcatccccaatccgaccacctcatccctcgcctccatggccctacccctcgcgtcaccggcgggggcatgagccggtgactgctcacgcggcctcgtctgtctgcgcacgcgcgcggggtcggcgagtgagcattgcggcggtccgcgatcgcccgtgggggagcatggcgtcggcggcggggtcggccggcggggccggcgcggggtctggcgggctgaagacctacttcaagacccccgaggggcggcacaagctgcagtatgagaagacgcactcccccgccgtcgtgcactacagccacagcggcaagaccgtctcccagatgacagtggcatatttgaaggagaagccagcaggccagggttccacgccttcaacaccaagtgctggtagtgggatgcggtctgcagctgcaagacttctcggcactgggaatgggagccgggcacttagcttcgggagcaatggtaccagcagggctgtctcaggaagcagccgcatgggtggaggaattggtgtgtcgactagtgcaagtggatcgcaaggcatggcaaactatgatggaaagggcgcgtacatcatatttaatactgcagatacactcttcatcagtgatctcaactcacatgacaaagatccaataaagtccatccacttcagtagctcaaacccgctttgccatgcatttgacccagaggccaaggatgggcacgatctgcttgttggggtgttctcaggagatgtctattcaatgtcactgaggcagcagctgcaagatcctggaaagaagcccgtttcatatcagcattttgttaatagagacaaagataaagacaaagatccaagtcaaggtggcgctgccagcagtcggagcacttgtgttgcatgggttccagagcgtgaaggaatttttgttgttagtcatgctgatgggaatctgtacgtgtatgacaaatgcaaggatggaaatactgattggacatttccaactgtaaaggatcaaagtcaggtgctgatttcacatgcaaagtcgagtaagagcaatccaattgcaaggtggcacatctgtcaaggtgcaatcaatgacatttccttttcaccggatggtgcttacttggcaactgttgggcgtgatggccatttaagagtatttgactttgctaaagaacaactaatatttggtgggaaaagttactacggtgcactgttgtgttgctcttggagtgcggatggcaaatatttgttatcaggtggtgaagatgatcttgtgcaagtatggagcatggatgatagaaagatagttgcatggggtgaagggcataattcatgggttagtgcagtttcttttgatccgtattggtccccaccaaattctgatgaaacggaagaaaatgtcatgtatcgctttgggtcaattggacaggatacccaactgcttctctgggatctggcattggaagagattgctgtccctctacgccatccgtctggtggctcaccgacattcagtagtggaagcccatctgcacagtgggataatgcgtgccctccagccggtgttctacagccttctccacggatgcgagatgtgccaaagctctcacctctcgttgcacaccgggtacatgtagatcccctatccggcctggaattcactagtgaatcaatcctcactatatgccgcgaggggctgataaaaatttgggcccgacccatccatagcgaaagcaaccagcagccggattcttctgaacaggttgtaggcaatgccactgctaaggataagatgttaacatcgtcaaataaagcaggtgcttccagccccagcttcaagcaaccaccacctgttcttttcacataattgaagaggctttgctagcatttttgttatgcttgcttggccatggctattcatctatctttagtcactaacatgaggttaaatggagcggaataacttggggaggctggcacggaaggcttgaagaggctttgctagcatttttgctagacattttcttttcctgcttcatcggcgacgtcttagttacagaagtgtcattgttgccatcgatgttggcaaaagaaaataacggaacttgctcctgtacatatacagacattgctgtaagatgaaatattacaagcttactggtttgatatttttttgttcttctataactttctacttgtagactagagtatacccatttttggtgc

SEQ ID NO: 32355 - DNA, 1244 bp, Zea mays
  Clone ID: UC-ZMFLB73299H06_FLI
tttattcaactcacatgtgctacttgtgacagtcttaaccataggatgttactgtcccaggtaaaccttgtatcataattaaattatttttactctttatgtatagctagatacatgtgtggtctaatgattgttccattagggggtaataataattttaggatcaaaccatcacatatataactatttttagcaccttaattctccaccaaagactagaatttgctcctagatccttacaacctcaagttttggattaggtcattgtgtaggtttctttgtctttccttggcttagtgaattcaaaacattaagtttatgactatgttgggcaagaataacttcaatgttttgtgagtccggatcttcaaaatgtatacactagcaaattacccgaaccttattcaacgcaaaatcatataacaaactttatttcatgcaatttagaagctaaataaatttccatatattattctagtttcatcatcaatattccttacatgtataagtaatcctcccttaagccatatttacaactaaggacaatgagtaaatttaaaattaagaatgctattaaaacaatttatttaattttcattttctctatggtacatgcaaatggaataccaaatgtttcttaagaaaagtatagatactatctttctaggcacttgtagcaatcatagactctactttgttttatgaccattaatttataataagttaaatttgtgattgtacatataatcacacattccataaaatttatttatttttacatgccaacatgttgaactaatgacaccatgtgcaggatactatgaagaatgaagcaagaataaattggattgagaaggaaatcgagttgaatatgcaagagcttgctcaatctctccttttgagatgtgatgagaaaactagcaataagaagaccaagaaaaccttatgggatgtcctaagaagtttatactatgctactcattccccacaacatatgatcgatagacatgtttccagagttatctttgagcctgtttaaaaatgtttaagtggtagaccattatgttaggtgtaaatgtgtacataaaagttatcataaggagtaatggtagcagaagcatgcagttgtaagtttatttgttgcttagaatagaaattagtgtagctataatatcaagaatgttcctatataagtaatcatattatggatagaggtgttcatatgaataataattttatatgtt

SEQ ID NO: 32356 - DNA, 1326 bp, Zea mays
  Clone ID: UC-ZMFLB73300C06_FLI
tgatgcaagggtaagccttggattagtttcaccggaagacaagggcttccctaacatacatgtaagaagaatacacagagcactggattctgatgacgtggagctagtccggatgctactcaaggaaggaaaaactaatcttgatgatgcatatgcattacactatgccgtcgaacattgcgactcaaagatcacaacagaacttctggatctcgcgcttgcagatgtcaatcataggaacccaagaggttatacggtccttcacattgctgctatgagaagggaacctaaaatcattgtctctcttttgaccaagggagctcggccatcagacctcacatttgatgacagaaaagcagtgcagatctctaaacgacttacaaagcatggggattactttgggcctactgaggacggaaagccttctcctaaagatagattatgtattgaggtactagagcaagctgaaagaagggacccgcaacttggagaagcatcagtttctcttgcgatagaaggagactctgcgcgtgggaggctactctaccttgaaaaccgagttgctctagcaagaatactgtttcctatggaggcaagggtagcaatggacattgctcaagtcgatggaacactggaattcacccttgtttctagtgtgaatctgcctgccgagatacaacggacagttgacctgaacgatactcctttcacaatgaaggaagaacacctggctcggatgagagccctatccaagacagtggaagtcgggaagcgtttcttcccgcggtgttcgaaggtacttgacacgatcatggacgacgaagccgagatggcttccctcgggcgagacacatccgcggagaagaagaggaggttccatgacctgcaagacctggtccagaaggcattcagcgaggacaaggaggagaacgacaggtccgcggcgcggtcaccttcctcctcgtcgacgacgacgacgtcgatcggggccgtccggcctcggaggtgaaagggaaaacatgcatgggttctgtttccgtcccgccattttggtagccgatgcggtggccacatagagaccgtaatcatgctcacttttgctggcgtatagcattaatgcagaacacgtatactaactaactatataatatacgagtaggtgtagatcggtactggaggttgtaatggcagtagcgaaacatagtgcattctggcgggcgtgtgtgtcgagcaggtagctggctgctcttgattgtaatggcgttttgagcagctaactaggatccctcttcacttcactcgaaaagggtctggcatggcttgtgg

SEQ ID NO: 32357 - DNA, 643 bp, Zea mays
  Clone ID: UC-ZMFLB73300D07_FLI
gccggatcttcggccctctccttcgccaggcccgtcaaggcaatcaacacaaattctctagctttctccccggcgaggaagggcaacacattcctccgcctgcaaccaatgcctatgagatctgtttcctgcgctgccaagaaggatacaacagacaaggtttgtgagattgtgaagaagcagcttgctcttcctgaccatactgaagtttgcggtgaatcgaaattctctgaactcggtgcagattcactggacacggttgagattgtgatgagtctcgaggagcacttcgatattagcgtggaggagtccagcgcacaaacaatcgccacagttgaagacgccgcggacctcatcgacaagcttgttgctggcaaagcgtagttctgtacctcctctatcgttgtcctaccactctaggtctatcccttgatctaggtttctatggtctgaagatttgtgattttctccgcactgttgttgctatccccgtgtcgtaataatacgagatgttttaagcggttgaacattacggtggtgtaatcagagtaatctgttgctgctatccccgtgtcgtaataatacgagatgttttaagcggttgaacattacggtggtgtaatcagagtaatctgttgctgtt

SEQ ID NO: 32358 - DNA, 1538 bp, Zea mays
  Clone ID: UC-ZMFLB73300E06_FLI
cccaaggccctcaacctgtcatcgcagaaactccccccgctctcttcatctgccacggcctcgccaccacctccgcccgacggggacgataagccggaccccatcaagctcgctttcgcccgcgctgccgcatacaagaaggggagggacagtcacagcccgagcccgagcccggcgccggccccgcctcccacgccgccgccacagtcttcaccaccgtcgcagccgcaggcttcggtcagtgagcccggcagtaaggaggcttttaagcgggcgttggagtaccgaaacggcaacggggccggagcgggcgcggctggtggtgactccccgctgctgggaggctcgccggattttggtcagaatgccctaattagtgaagaagtctcgtttggcaagagaggagggtacgagtttgatgaggctgattttttgggtctcgacttctttgagaaaaaacgttctaaaggtctaccacctgggctggctccagcttttgagcctttacgagatgacgattttcctgaggtggacataatagttggagaccccagcaaatttgacaagtctcctcgccgaactgaaatccaaccggtagacaacggggagtcaggggaagcatctcaatcgactactaaaccaaatgaagctgacaaggctgggatagcacccccttcaactgttattgagactgaagaagatgaagatgtttatagacccacagttagatcatggggaatgtttccgaggccacaaaatatttcaaaggcgtatggcggtggaagaaatatacgccttggtggagagactcaaagtgcagaagaaaaggcagccaaagataagcgcaccaaagagctaatagctgcatataggaatcgacagaacatggtaatcgatgcaaagacaaaagcagagtgcatcaaggccttgagggaaggtgatgagatgatgaatactggaaggcttaaacaagcattaccttattatgaaaaagtgatggacgctgtggactttaagactgaatttcatggaagggctgctctgcaatggtccatctgtcttgattcactttgcaggtccaaggaagcaatgagcatgtatagcaaacttaaaaaccacccgaatagtgagatcagcaagaaagcaaacatgttcgtgttcagctttcaggcaatggatttcatgaaggtgagcagcattccagtgcccaaaagcacaggctacgagacgtacttcaccaaatttggcagcaagaagaattactacgcgagcttagaagagccggaggtgggaatcgagcagatcgtcccgtacatcatctttcttgtttcgccgatatttttagttgcttttgttgcactgagaaaatccttccaactatgaacagaaatcatggacgagttgctgaggttttaataccgtataggagcacatagcttggcaatagaagattattattatgatttttttgttttcatcaaaagagcaaattattttgtgtagctgagctagggactaatttttaatcccttttcttt

SEQ ID NO: 32359 - DNA, 1898 bp, Zea mays
  Clone ID: UC-ZMFLB73301C06_FLI
caccactaccctgttgtggtggtggtggctatcctggctacggtgcaggaggctatggtgctggggcagctggatatggatatggtgctaaccctgcagttggatatggaaattatggggctggagggtatgggggtgttcctgctgcttatggtggacattatggaaacccaggtgcagctggttctggttaccaaggtggacatccaggctcaaatagaggaccttggggcagtcaagctccatctgcatatggaactggagggtatggtggcagtgctgggtatagtgcttggaacaactcttctggtggcggcaatgctctgaatagtcaagcccctggtggacctgcaggctatggaagccagggctatgggtatggtggatatggaggggatccatcatacgctagtcacggaggatatggggcttatggagcacgtattgatagtgctggcaatcctgctactggtggatcatctggatacaatgcaggctatggaagtggtggtgccaactctggctattcaagtgcttggagtgatccttcgcaaggtggtggatttggcggttcggtcaatggaggtgctgaaggacagtcaacttatggcactggctatggcagtgtgcagcccagggttgctcagtaaagagaggcattttgagtgtgcgaaatgaaccagtgcatctgggcagtctatgtattgatttgtcattccagtctctctggttgctctcagcattttgaagattgcccatttgctgcttaaatcagtatttatccgggttggaatgcttgatcctttagcggcttactactagaacgtctagtcaataagtagctaaaatgtggagtagcagtatcttgcggaatgcttttattaatttttacatttagctttatccatctgtgtggtttgccatgagtggagtttcaggttgcttcatctctagttataagctagagtagcttgactacttatgggcaaaattatctagttgtacctctattctacagatcatatatttgtgtttgacattagtatttatgctggatcttgctctacctatattctggaatgttctctatttggtggctgtattgacatgtggtattatcaacattgatgggtttgaaacagatgcaaaccctgaaatatgcaatcatagttacttgatgctgtagctgcttctaacagtattttcaactgtagtgcaagtgtttttatgtagctggaatggtacacccttcaagtatatcaccaagctatgaattccatccatttggtcctagatttcaatattttcaaagcagcagtaagcttattagcagcaagattgtagcgccaagtttctgaggttgaatgggatggcattctttttttagatatgcccaagcaaggtctatgaaatcaggcatttgaaaaaggcattttgcacagtgatttacatgaactggcgagaagttccaatatcggggttctgacagaatgcaagataccagcttaagtgcttcattttctgaagggtcttgtgctgtgctacaagatagtggacgaagtgcaacatgttggctggatccactttggctgggtctgagggagcatgggccaagatcttgggggctcggctgtgtggtgcaacgggcagcttgcttgcatactggtgatcgtggatgcttgtgatatagcattgccccccaatgtataagtgaacttttagtgctagaggcttccttttgttggcatgatgtctatggtttataggtgcagtagttgcataacacatagtatactcagtatactttgtgtggaagctattgatgcttttctttttgtttagcatgaatgccatataattgtacattgaattgacatattaagttattgctaaaaccc

SEQ ID NO: 32360 - DNA, 1342 bp, Zea mays
  Clone ID: UC-ZMFLB73301D12_FLI
agcagatgtcgtgcggtgcagtgcagtgcaggtgcgggatctctgaatcgctgacgcccagcctcctctgtcatctccctcctcggacctcgccacctcacgcggaaggaggggaagaggaagcgcggagactggaaatcgggccccaaatccgcttcggtctctcgatcggcgaggcatgattcatacaaccggctaggatggcctcaaaagctataaaaagaaggcctatcagcgctgagactgatacaacaggggaaaaacaaatggatacagcactgtcagatcctgtaacagaacctcttctaggaaacactcctcaggaagagaaatccaagacatatgagcctattacacggtcaggtttctgggatgggacggcacaggagtgtcttcgttggacacatcttttagcagcttttgttgctcaatctgcaagaaacatagtaaatgttctttctgaatttggatatttgctagcaagactctttggttgctcttctgcttccaaaagttcacaaaatggacagacacttccagttaacctcagtccattacaggaagaaaggttaagattgttgagacaaaggatagatgtgccatatgactgctcctctgtcaagcatcaggatgccctgaaagaactttggaagttggcttaccctaacagacaacttcctcctctgaagtcagatctctggaaggagatgggctggcagaactccgatccatccacagattttagagcagctgggttcatgtccttggagaatctaatatattttgccagaaattacccagattcctttcacaggctactgcataaagcagatggtaagagagctgaatgggagtatccttttgcagtaggcggcgtaaacatatcctatatgttagttcaaatgctggatttacagtcaggaaaaatgagaacaaaagctggtgttcactttgttcaactactcgatgatgacggtgtggctttcgataaccttttctgtgtagcatttcaggtgcttgattctcaatggcttgcaaggcgagcgagttatatggaattcaatgaggttctgaagtctacacggggtcagttagagcaagagcttactatcggaggtatttctcgcattcaagacatgccatcattcagaatgctgagaaggtagcgctgtttgtacttcacaggaaaagagatacattttagattccaatatattgtttaaatttgttgtccgttctttcactggattttgaagacgtgacattgtgtatgttattgagtatattgtttgtaatgtcgcagcttaaagctacagatcataatatatgatatgatatcttg

SEQ ID NO: 32361 - DNA, 1885 bp, Zea mays
  Clone ID: UC-ZMFLB73301E04_FLI
gtccgatctcgtggcggacgtcccaccggatttcgagcccgagccgcgcgggttcctgccccacgtccacagccccgaggcgcgggcgtgggcgctggaggtgcacgcgctgtggaagcgcctggcgcggcgggtggcgcccgacgtcgcggcgcggccggaccggcacacgctgatgccgctgcccggcagggccgtcgtgccgggatccaggttccgggaggtatactactgggactcctattgggtcatcagaggattgctggtgagcaaaatgtacgacacggcaaagactattgtgcttaaccttgtatacctgttggaaaaatatggtttcgttccaaatggtgcaagatcctactacactaaccgaagccaaccaccacttttgagctccatggttttagaaatatacagggcaactggtgatgtggagtttgttaggacagtattccactctctgcttaaagagcatagcttctggatgtcagagattcataatgttgctatagcagacaatcatggtcgggtccataatttatctcggtatcaggccaggtggaacaaacctaggcctgaaagtgcgacaattgatgaggaactggcttcgaagttgaattctatggcagctaaggaaaaactgtactgcgaaattgcttcaacggcagaatcgggatgggatttcagctctcgatggatgaggtttggatgtttgttatccttaaaaaggaactgacgagctaacagttctgctgctttcgcactggttaaaacaagtactgcaatagaagacaccaagctccccgaccattacgaatttatttttgcaccgtgtaccacacacaggttgtttctgactacttttactgttttattcaggaattctactgacatgacaacattggcaaccacttacataatacctgtggacttgaacacatttctttttaagatggagctggatattggtgccttggctaaagtcgtaggagataatgcgacttcagaattttttttaaatgcttcgaaagcacgtcatattgcaattgactctattttgtggaactctgagatggaacagtggcttgactattggcttcctggtgatgcagactgtcaggaagtacacgaatggaagcctaactcacagaaccgcaacatatttgcttccaacttcgttccgctgtggctaaatgcataccattccgagtcatggcgagcctcaaggcatctggattacttcatgccgcagggatagcaacttccctgacaaacacgagccaacaatgggatttcccgaatggatgggccccactgcagcatcttatagctgaggggctgctgcattctggatcagaggccaaaaaactagctgaggacattgctacgaggtgggtgagaacgaactacgccgcttacaaagcaacgggtgcgatgcatgagaagtacgatgttgaggcttgtggagaatctggaggcggtggagaatacaagccccagactggttttggctggtccaatggcgtggtgttgtcattcttggaagaattcgggtggccagagggcaaggaaatagcttgttgagcggcgaagcgctcacgacagggtggatctggtcttgccggagagcaatctggttaggcatcgttcatgtcacacatgtctagctacgagagtggcgcattgccttctgcagttcgtcaagtgcgtttgtgtgttcttgtttgcttttagttgcgactaggctgtagatccttcttgtatcacaacaatatatgtactgctactgtaccggccccggcctcttgtttaatctgaaatgctcattgtatatcctcttacgaaacgcaaacacgtgctttggcacgttcgtcgtcgaaaagag

SEQ ID NO: 32362 - DNA, 1498 bp, Zea mays
  Clone ID: UC-ZMFLB73301E06_FLI
ggttcgtctaccccgtggtgtcgcactggttctggtccgccgacggctgggccggcgccagccgcacgtccggcccgctgctcttcgggtccggcgtcatcgacttcgccggctccggcgtcgtccacatggtcggcggcatcgcggggctgtggggcgcgctcatcgagggcccccgcatcgggcgcttcgaccacgccggccgctccgtggcgctcaagggccacagcgcgtcgctcgtggtgctcggcaccttcctgctgtggttcggctggtacgggttcaaccccgggtccttcaccaccatcctcaagtcgtacggccccgccgggaccgtccacgggcagtggtcggccgtgggccgcaccgccgtcaccaccaccctcgccggcagcgtcgccgcgctcaccacgctgttcgggaagcggctccagacgggccactggaacgtggtggacgtctgcaacggcctcctcggcgggttcgcggccatcacggccgggtgcagcgtggtggagccgtgggcggccgtcatctgcgggttcgtgtccgcgtgggtgctcatcggcgccaacgccctcgcggcgcgcttcaggttcgacgacccgctggaggcggcgcagctgcacggcgggtgtggcgcctggggcgtcctcttcacggggctcttcgcgaggcgaaagtacgtggaggagatctacggcgccgggaggccctacgggctgttcatgggcggcggcgggaagctcctcgccgcgcagatcatccagatcctggtgatcgccgggtgggtgagctgcaccatgggcccgctcttctacgcgctcaagaagctgggcctgctgcgcatctcggccgacgacgagatgtccggcatggacctgacccggcacggcggcttcgcctacgtctaccacgacgaggaccctggcgacaaggccggggttggtgggttcatgctcaagtccgcgcagaaccgtgtcgagccggcggcggcggtggcggcggcgaccagcagccaggtgtaaaaaaaaaatcaggagcaaattgaaaccgagctgaagttacgtgcttgcctttttcagtatgttgtcgcgtatcacgtttgaggtggatcgtatctgccggtcagtacgcagtgtttgggcaaatacttggctacttgggagtcgcaagaaattgtgtaaattatatagaggaggatggcgacgaagcacgcatgtgttacgtagttggggtttgtgtgcacatggtggtgggcaggggctaggagagggtttatctttaggttattttcgtagtggaatgaatcttatgatcggatatccatcgtcggaaggtgtggcgggctgctggtcaagataggtggcttctatgactatgagggttgaaacaacaagtggacgattctgtcctgtggtcactgctcatcatccaatctagcggctttgacggtcgtgcctttttagtatcaataatattattccaagtttaaaat

SEQ ID NO: 32363 - DNA, 1141 bp, Zea mays
  Clone ID: UC-ZMFLB73301E08_FLI
gtagtttctgctagctgagcgagatcgatctcgtttgtactttctccctttgaggaaacaactccccttttctgtgcttcaagttgttctgagatctccagcatggggaggggaaggattgagatcaagaggatcgagaacaacacgagccggcaggtcaccttctgcaagcgccgcaatgggctcctcaagaaggcgtacgagctctccgtcctctgcgacgccgaggtggcgctcgtcgtcttctccagccgcggacgcctctacgagtacgccaacaacagtgtgaaggctacgatcgagaggtacaagaaggcacacgccgttggctcttcctctggccccccactcttagagcacaatgcccagcaattctaccagcaagaatccgcaaaactgcgcaaccagatccaaatgctgcaaaacactaacaggcacttggttggtgactctgtgggaaacttgtcactcaaagagctgaagcagctggagagccgccttgagaaaggcatctctaagatcagggccaggaagagtgagctgttggctgccgagatcaattacatggccaaaagggagactgagcttcagaatgaccacatgaacctcaggaccaagattgaggagggagagcaacagctgcagcaggtgactgtggcccagtctgtcgcagcagcagcggccaccgacgtggagctgaatccgttcttggagatggataccaaatgcttcttccctggcggccccttcgcgacactggacatgaagtgcttcttccccggcagcttgcagatgctggaggcacagcagcgccagatgcttgccaccgagctgaacctcggctaccaactggcgccgcctgacactgacgttgccaacaataaccctcagcagttctaaactggatccatgagaaagccaactgtgaccgatggaagctggctgttgcctctagatgatattggcttccataacctagcttattatggtgtgtattgttgccttttgtgtgtgattctccttactactgatggagaataaacctaatcgattgggcataatgatcaaatgctacagcacccgtgaggctgtgatcaggacatcatgtttgttttgaatagcacttttatctattacgagg

SEQ ID NO: 32364 - DNA, 1071 bp, Zea mays
  Clone ID: UC-ZMFLB73301E09_FLI
cacacacaccacacacacagacacactgacacacccacacactagttgtatgtgctagagctgcagttggcttggcatcagaggccatgaaactgaaacaggagcaagcagacgacgactgcagcaagatgcagggaggtcgtggcctgatgagcagccttgagctcaggctgggcatgtcttcagacaatggcgacgccagctgcggcggtgatccgtggcttggcgttggagtgcacccctggagccttgcctccagacaagcagagaaggtagccctggagcaagaccaccagcagcgttctccgccgcagccggtgggatggccaccggtgggcgcgttccgcaggagccacctgcaggtttcttcgaagaccgtggaggaaccggcgggcaaggtgaagtccggcggcgagaggctggcgccggcggccaccatgttcgtgaaggtgaacatggagggctgcgccgtcgggaggaaggtggacctgctggcgcaccgcgggtacgcgtcgctgtcgcgcgcgctgcaggccatgttccgtggcttcctgtcagatggtcagtggaggatcgttggcagtgaggacgacgccgacgacgacaacgagcagcagccggagccgacgaagaaggggggcagtaagagcaacaagaaggcgtacattcttctgtacgaggacaacgagggcgaccggatgctcgtcggcgacgtgccgtgggagctgttcatggcttcggtgaagaggctctacatcgcacaggacccaaggaagacgaagaattagctaattaagctagttagggcctggctaggagaaacgttgctggctgccttattatttctacaaatagctccaagtcgaagcagatagctaagctagcactcccttcttcgatcctgtaatcctgtcgagcatcagttcatatacagcgcgtgtagtcggcatctctagtccaatattaatatataggaaattttgccttggacttctatatgtcctgtagaccttgaacaatacttctaatgtctgacttaagttattgatcatctgaactccgttcacaaat

SEQ ID NO: 32365 - DNA, 1208 bp, Zea mays
  Clone ID: UC-ZMFLB73301F03_FLI
gtgcccggaggggtccgtgcccatcaggcgtgtcacggagtcggacgtgctccgcgccagctccgtcaggcggttcgggagggcgcccgcgggcagggtgcggcgcgactccgtctccggcggccacgagcacgcggtggggtacgtggccggcgacgagtactacggcgcgaaggcgagcatcaacgtgtgggcgccgcaggtgagcacggcgtcggagttcagcctgtcgcagatctgggtcatcgccggctccttcggcaacgacctcaacaccatcgaggccggctggcaggtcagcccggagctgtacggggacaacgcgccgaggttcttcacctactggacgacggacgcttaccagaccaccggatgctacaacctcctctgctccggcttcatccagaccaacagccgcatcgccatgggcgccgccatctcgcccacctccgcctacaacgccggccagttcgacatcagcctgctcgtctggaaggacccgaaccacggcaactggtggctggagttcggctccggcgagctggtggggtactggccgtcgctgctgttcagccacctggcgtcgcacgcgagcatggtgcagttcggcggcgaggtggtgaacacgcgcgcgtcggggtcgcacacggccacgcagatgggcagcggacacttcgccggggaaggcttcggccgggcctcctacttccggaacctggaggtggtggactgggacaacagcctggtgccgctcgccgccggcttccacgtcaccgccgaccaccccagctgctacgacatccagggcggcgtcaacgccgtctgggggaactacttctactacggcgggccgggcaggaacgtcaggtgcacctagctagtagcagctatagctcttcgtcatctcgtctcggcccgttaacctgatgtgatgatgccgctagctaggattttctcttcttccatatattgcccacaaaaaggttaattaatttctcaaatgcgagagtcacggatcatgtagttttcttttctttttgatttcctattttcttggtggtctctgaacgaaacaaaagggtgaagggttaagctcagttcaaacgtagtccagttcatcaggtcgtagcgacgatgatggtcgtcgagttgtaacgtacgtaaaagccccctgaacaatatgtagccacaaggcacaatctagcagt

SEQ ID NO: 32366 - DNA, 1173 bp, Zea mays
  Clone ID: UC-ZMFLB73301G02_FLI
gattcatccacccagcaggcagcagctacagcaagatggtgcacccgatcgcggaggccgacgagcggagccccttcggccgcctgacgccggacgagttctacgcgcgccacggcgtgacccactccgcctcgtccttcgtcaacccgcgggggctccgcatcttcacccagcgctgggtgcccagtggggacgcccccgtcctgggcgccgtcgccgtcgtgcacggcttcaccggagagtctagctggacaatccagctcaccgccgtccacctcgccgccgcgggcttcgccgtcgccgcgctcgaccaccagggccacggcttctccgagggcctccagggccacctccccgacatcaaccccgtgctcgacgactgcgacgccgccttcgcgcccttccgcgccgactacccgccgccgctcccctgcttcctctacggggagtcgctcggcggcgccatcgcgctgctgctccacctgcggaacagggacctgtggcgggacggggccgtgctcaacggcgccatgtgcggggtcagcccgaggttcaagccgccgtggccgctcgagcacctgctcgccgcagccgccgccgtcgtccccacctggcgcgtcgccttcacgcggggcaacatccccgagcgctccttcaaggtggactggaagcgggcgctcgcgctcgcctccccgcgccgcaccacggcgccgcccagggcggccacggcgctcgagctcctccgcgtctgccgcgagctgcagcggcgattcgaggaggtgcagctgccgctcctcgtcgtgcacggcgccgaggacaccgtctgcgacccggcctgcgtcgaggagctctgcaggcgcgccgggagcaaggacaagacgcttcgcatctacccagggatgtggcaccagattgtcggcgagcccgaggagaacgtggagaaggtgttcgacgatatcatagactggctcaaggcacgcgccaccgctacagccgcgggcgcgcaccacggcgagcagtagtttgggcacgcctcctgcgtgcgtgcgtgccatggccaggcttgccttcaaccgcgcgtggtccattcaccatcccagattctatcctaggttccttccagctatattcgagtacggatccagcaataaacttgtgctgtctgctgattac

SEQ ID NO: 32367 - DNA, 1218 bp, Zea mays
  Clone ID: UC-ZMFLB73301G05_FLI
gcctccgctcagccggcaggcggtgacggggcagtcgggcaccaccaccgcccccagcgggcagtgcgtgggcgttgcgctgccggtggtggagaatgtgggggcagtggttgattcgggtgatggcgagctggcgagggagcggggggcgccggtggggaagctggtgtccgtggaagatggggaggaggtggagcaggttaggtatgctccgtgtgtccagagccggagcccgataacagcgccattggggatttcagtcgctgggggcagtggtatgagggtaaggaggaagttggatgattcagtggtgtcatgctatgattctggacaattgctggatacgggttctctgtgcgagggtttgcagcggtggctgtacagtaacggcactggagtgacggtgcaagccgtcgatgctttgaatcatgggttagatgagctgttgcgaagattgattaaaccgaccgtagatttgtcgagggtaagagccagcagtagaagaattagcaaagtcaatcaaaagtttgctggtagaatgaattctttgcaacatccaaatcagggtcagtgtacaacgttgcaagattttgcagttgctgtgcaatctgatccacgtttgcttggtccaaattgccccacgcaaatcgagaagatacaggcaatgacatttggaggggaatgatacatagtagcccgttatagctgatgaatttctcaaaaggagatgctgttagctggcattgaagtaaatgaagcggcagatccaacagcgctacaaaatctgagtattgcagcactcacggagtcacgggcaagaaataccaaggcccaacaagtgaacaaagggtgatgcaatggacagtgtagcataaattcttttttgggaatatatagcccgtcgataataaatcgaagaatcaatatggttggctgatgtccaggtcaagctgagtaactccttgacaaacatactctcaactcttggcacagactatgttccggtagtacttttagagatttgttgcgatgttgtaatagagcattttcctcttattacagacttaaatgtaatcatttttctcagtgatcaatgatcataaatgatgcctttaatggctcattgctcctgtacattgtattcagattatggcaatgaccgattgcaattaagataaaagtttaaccctgttgaataaatatatgttttttatgccc

SEQ ID NO: 32368 - DNA, 495 bp, Zea mays
  Clone ID: UC-ZMFLB73301H10_FLI
atgtcccgcgcccagattccactcccttgttgcatcgctactctgttcccagctcggggcctctgacgaggcccgaggcgcaggcgccaacctcccggcccgccctagggtttggggctgatcgatccggctaggtcttggcgggagctgctccaatgggggatcgggaggaggacgaggagctccagatggcgctccgcatgagcctccagggctccccgccggcgcagcctgagcccaagcgcagcaagcccccgccccccgctgcggagtcgccggaggcagaggcgcgccggaagcagcgcgagctcatggccgccgccgccgagaagcgccgccgcggtgcagcgtcaccggcctccgtctcggtggcgcggtctcttctgcagccagtggtggtggagtcagcccccgccccggaggtcaccaaagagcaggtggaggagccggaacaagctggcgtatctatggaagaagcgaaggaggtggaggagg

SEQ ID NO: 32369 - DNA, 972 bp, Zea mays
  Clone ID: UC-ZMFLB73302E05_FLI
cgggctcacctccaacctggccggcagccgcaaccccagcctggactacggcttcaagggcaccgagatcgccatggcctcctactgctccgagctccagtacctgggcaaccccatcaccaaccacgtgcagagcgcggagcagcacaaccaggacgtgaactccctgggcctcgtctcggccaggaagaccgccgaggcgatcgacatcctgaagctcatgtcgtccacctacatcgtggcgctgtgccaggccgtggacctgcgccacctcgaggagaacatcaaggcgtcggtgaagaacaccgtgacccaggtggccaagaaggtgctgaccatgaacccctcgggcgagctctccagcgcccgcttcagcgagaaggagctgatcagcgccatcgaccgcgaggccgtgttcacgtacgcggaggacgcggccagcggcagcctgccgctgatgcagaagctgcgcgccgtgctggtggaccacgccctcagcagcggcgacgcggagcgggagccctccgtgttctccaagatcaccaggttcgaggaggagctccgcgcggtgctgccccaggaggtggaggccgcccgcgtggcggtcgccgagggcaccgcccccgtggcgaaccggatcgcggacagccggtcgttcccgctgtaccgcttcgtgcgcgaggagctcggctgcgtgttcctgaccggcgagaggctcaagtcccccggcgaggagtgcaacaaggtgttcgtcggcatcagccagggcaagctcgtggaccccatgctcgagtgcctcaaggagtgggacggcaagccgctgcccatcaacgtcaagtaaagaacgccaaggagaagaggagggaggggaggaaatacgtggaaaaaaaaataaaacctgtacacgtgtatgtccagatcgcgtgccgtcgatcgttcttcgttgttgatttttggttgtattgatcgatc

SEQ ID NO: 32370 - DNA, 2183 bp, Zea mays
  Clone ID: UC-ZMFLB73302F07_FLI
gtttttcagagaaatgggtgttgataagaaaacaacaggaaaaattctgtgtcgttcgcctgaaatatttgcttcaaacgtggataacaccctcaagaagaaaatcgattttcttaccaactttggtgtttctaaacatcatcttcctcgcatcattcggaagtatccagaacttttattgttggacataaattgtacattgctccctaggatgaactacttattggagatgggtttgtctaagaaagatctgtgctcaatgatctttagattttccccacttctaggttacagtattgaacttgttatgaaaccaaagcttgagtttctgctaagaaccatgaagaagccacttaaagcagttgtagaatacccaaggtacttcagttattcactcgaggggaagatcaaaccgcggttctgggtattgcagagtagaaacatagactgcactctgacagagatgttagcaaagaacgatgaactctttgctgaagagtacttgggacttggaggattgctcgagaaacctctacaatcaagcataggcagttaatttctggacttataagattgaaccatgcagtgcactatgccgaagctgtacagctttatgcttggattggtgaggctgtttttcagatgggaggtcacttttttttgaaaacggaggagatgtgtcgctggctgttcttgctatggtacccgcaaaaataattaaaacaaggactgtggctgacgcactctcaaacaacagttgggtttcagatattaaaggaggactgtccatgattggtctgttcgaaattttcagctatgggacaccacacatggagtttctttaaccactgacaatgatcgccatatctggagattctctggttggggtgaattctcgtcgaaatcggcctacagagtcttcttccatggtttggtctcctttgatccttggaagcgtatttggaaaacttggactccacctaattgcaagattttcttttggatacctgtccgaaatcgctgttggactgcggaccgattggctcggagaggactggcacacctagtccattgaattctttgcgaccaggaagaggagaatattaatcacaatttgttttcctatgttttcttgagggaattctggtttagagttttctcctggctggtgtatgttgaccgtgtgccggggtcccaggagcaatcgcttgcagattggtggtgaaaggcttgcaaacatctcccaaaagaaaaaaagggaagggcatgaattcgatgattatgttgggagcttggatcctatggaagcatcgcaatgcctgcgtcttcgaaggtttgcagctgagtatgtggaatgttctgcatgctctcgaagatgaacagcatctctggtgtctcgccggagtgcaaggactgcagagtttaggcctgggctccctgagcggttaggtggcatttcctggtctggtctcaccatttctatttgctgtaagagttttgttcttgtaagcacagcccctcacggctcgggctcggtccggaatgaggggtaaaacttgtacgggaggccacttttctggtgcttagtattaaaaaggtaatacttgttctcatgaaagtgacctaacaaaagttataggtacaaatatagactggagtgatgttgttaactcaataccaaaacagcaaagcattgggttttgagaatacttcattcaaggtttaagaagaaattgcaaagatgcggtttcaaactaggaaacggagtgaaggatgccccacacctttgagtggatgcgcgcaggaaccaatgcaagctgtagtaaggccttgaagtataaggcaacccaagtctgccatcatctctttctcgttgaactgaagcctgtccatgcctccatggcccagtccagcatcatcgccaatcagagctgagggcagccgcagagccagcggtagctagtcggctagtccattgactggccggtgcaggggtcacggactcacggttctgcatttcatattttcgtttaggtgtcgtttggatccgtttattttggaggaattagaatctatttaatagagtaggctatttagcttggaatttgacattccaccactttacaatgttaaaaaataagttatctcaaatttatagaatggaattgactttatgtatcttc

SEQ ID NO: 32371 - DNA, 524 bp, Zea mays
  Clone ID: UC-ZMFLB73302G02_FLI
caggcgtccgttcggccggccagccggccgatggtttcggccgcggcgcaggcgggcgtggtcgcgtcgtgcgtcgtgcgtgctcttcgtccccatggggctggccggccggcacctcagccgcaacaaggtgctcttcttctccggcgcgctcttcatctcgcttgctgtcgggatccacctatccccgtaccccccttccctttccctgccccacctcgcctcctttttactcctcccccaccctggctccgcgtccgcttcctccgggtcttcctgcgtccagttcctgcaccgcgtctcgtggtctgacgccgccggagccgccgacaatggctcgggaggcggaaaagcgcgggcgtggtcgtggccgccctcgctggcgtccgcctgcgggttcgctcgactgtcgcgcgacgacgcgtcactgctgctcaatggctcgtgggtgatggtggccggggactcgcaggcgcggctgctcgtgctcgcgcttctccgcctcctgctcgacccggccgcgg

SEQ ID NO: 32372 - DNA, 2424 bp, Zea mays
  Clone ID: UC-ZMFLB73303A03_FLI
tccgcttttcggctcacgggtcgctgaattgctctttctgctcgctcgctcgctgacttccactcaactgctcgcctggccgcctcctgctagtgcttcaatcgcccggcccccactcgcttgaaggcttccggaagctcgatcccttccgctcgctagctggctgcacagatcttcctcccgaggttcctctttctaccgtcgagtcgaatcggatcaccggagctatcggattcctcaaaatccgagactttggccgcccgccaccccgtctcagtggcggagctgctccgtctggtccgcctctgcctctctggcttgggggcgctctagggttcccgcgcgcgcgccccgtgatgctcgggaatggcgcttaaggccacggcgcagggcgccgcggaggcggccgtagcggccatcggccggggctacgacgttgtttccgacgtccgcctcaagtactgcaagggcaagctcgcggacccggacgcgcgactcattgacgtttcccgcgatggggtccaggacgtcctgctccccggcgggatcaaggtcgctgccgtccccaagtccgtcacgtgtgacaagggcgagcgcacgcggttccgctccgacgtcctctcctttcagcagatgtcagagctgttcaaccgggagctatcgttgaccgggaaaattccctccggcatgttcaatagcatgtttgatttttccgggtgctggcagaaagatgcagctaacaccaagtcacttgcttttgatggttggtacatttcgctatatacgctcgcactgtcaaaatctcgtattctactccgggatcatgttactcaggcagttccttcaacctgggaccctgctgctttggcaaggtttattgataagtttggaacacacatagttgtcggtgtaaaaatgggagggaaagatgttatatatttgaaacaacaacattcgtcaagcttgcaaccagctgctgtgcagaaacgactcaaggacatgtcggacatgagatttctggatggaaatggacagtatgacatgaacaacaagcatgtgcacgggaaggacaagcatgatgcaagagatcaacggctaagatttgtggaatcaagtccgtcaagttcatactgttcaaaggaggacttggtgatggtggttaagcggagaggtggaaaggaatgggacaaagatatgcctcacagtgaatggataaacactgttcaatcagaacctgatgttatctcaatgtcctttttacctattacttcattgttgagcggagtacctggctgtgggtttctgaatcatgcaattaatctatacctgcgctataagcctccgattgaagaactacatcaatttttggagttccaactaccaagacaatgggcacctgtgtacagtgaccaccctcttggtcctcagaggaggaaacagagcagtgcatctttgcccttaagttttatgggaccaaggctctatgtctgcactaatatggttgatgtgggtgaaagacctgttactgggatccgattgtatcttgaggggaagaagagcaacatgctggcaatccaccttcagcatctatgctcgcttcctcagatcctgcagctccaggatgatccatacaaccaccggtatccagaaccagaaccagaaccatatgaccgcaagtatgtggaaccatttggatcctggaagcgtttctcacatgtttacacggcaccagtggagtcggatgacgacgactccatcgtgacaggggcgcagttacatgtgagcagccatgggttgacgaaggtcctcttcctccgcctccaattcgccagagtcagcaatgctgcgctcgtcaagaatcccgagtgggaagggtcaccgaatttggggcagaaatctggcctcatctcgacgcttatcagcacgcatttctccatggcggctcagaagcctgcccctcgccctgctgatgtgaacatcaactcggctgtgtaccctggcggtccgccaacgccagtgcaggcaccaaagctcctcaagtatgtggacacggcagagatggtgcgcggaccacaggacacgccgggatactgggtggtctctggtgccaagctgcagctggagaggggcaagatatcactgcgggtgaagtattcgctcttgacagccatggtacctgacgaggagtatgaagaatgaacaagggtgggaggaactcagtctcaaaagggggaagatgggggctagctaatgtgcatttgtgcattgcaagtaaagagtttcagcatgcttctttggaaacctgacttatgtgcatcgcctcatctttcgattataaccattttctcggctgatcggcggctgtccgtagaatctttgaaattaaattcgttttgcagaaaagggagacagtacattctacac

SEQ ID NO: 32373 - DNA, 546 bp, Zea mays
  Clone ID: UC-ZMFLB73303A07_FLI
gtgaaactagctgaaggtttcaatggggctgatcttcggaacgtgtgcaccgaagctggcatggctgcaattcgtgcagagagagattacgtagtccacgaagacttcatgaaggctgtgaggaagctaaatgatgcaaaaaagctggaatcgagtgcgcattacagtgcagattttggcaaagagtaatgatgctaatgccgatgcaacggacaaatgcatttggcatgtatcatcaggcgagcccagtcagatgcgatgcaaaagcgagaaaggaaccagctatttatgttcaggctacaggcagcttctctttttttccttctttctcgtattcacaattttagtgaggaggattgtcgagctgaccggtgggagaaaccagtcgagaatttagtagctttgcaccagatgccatttgcttctgtaaatcacacattatctgcttccgtgtgtagaatggtaataactcgtcccagctccatgtacttttgacagtgtgctcgacttgcgtggtaaaaacagagaaaagaacaatttgtgttc

SEQ ID NO: 32374 - DNA, 1788 bp, Zea mays
  Clone ID: UC-ZMFLB73303A10_FLI
ttactagctggaatatgtgaaggagatgcaaccatggtatgtgatgcttttcttctcattcattgatttcaacatacatttctatcaataaaagtaggcaaagacattgtaacctatgaacaaatcttaatattttgaactatattcaggacacgtggagactaagtaacaaggtaacagtgtatcagtggtcatatggattaggtaccgctaggctatagtttctttcagttgtttagcgtgacgaacttttctttgcttgaatatgttgaatgttttctttgtccttcatcagcgataaccccttccttaaatgttaacttcgtactttctaagctgtaccttcatctagtatgtagttctgtgttcatggtttatatcaggagcaatgatggattttgtgaagtccattttcatcgttatatttgtcagtcatcatcttggatttatcttgagataaaatatttactgtgtatgtttgattagtttgttcaactaacctagatctgcttgttattaatatatgtggttcaccactgggtttggattagctattttggctactgctcttaatttcttggctaagatgttgagtttgacataaatttttcactgtgcagaaggattatcggttagtgagaaactgtatctgcgggcaaatttatgactctagccctgtagattttgtcagtgatgtgggcacccagtttctccaaaagcctgctgttggaaatttatctcagtcaactatattacgttcatggatggcaaaggttctagcttctggcatggatactctcttcccaagcaggattgaagctcagcgtgcagagtactggcacacactatactcagcagcaggattgggtcctgttcttatattttgctcagaagatgataatcttgctccatgccatattatctgtggctttgcaaggcgattgattgaactaggcacagatgttaaacttatgaaatggagcgactcccaacatgtcggccattacaattcacatgaaattgaatacaggaaagctgtagatgatacgttgaagaaggctcttgttaccttctgccaccgaagccaactatatgactcaaatatggctggtgaccaggagtataagatagcgcactcagtgtgcagtctacacaatgctgcagccaattcaaatgagagcttaagaagggttgctaacagtcctagtgatcacttcttcttgccaagttcgaaggaccatgatgaatctcgggaacccagttctctaattgaggatcagaggcgccacatctcacatccaccctgcatggagcctaaaggagtccttggccaaatcctgtttgatgtttgtgttccaaataatgttgaaggatgggacattaagccgacagtgtccccgaatggacggccaacgtttgcttctgcccggcaacttggtccattcaatcccataaggtacttccggcgctcaagactgtagttttctgcaggagttgaggtttttgtatatatataaccgaggcaaggtggctagtagcaactctgagcaagattttacctatgtaagttccctgtaattgtttctgtttctgcttttgcaccgcttggcgagagaatgcacatatgctttgtatatcatatgagtgtgtgtactagaagggagatcctggacatatagtttctaggcgggttgcaaggtgcacgctaacattgtagccaaggggaatggattattatgttcctgtagtttcctctatatttcatgtttgtgaaatataattattggg

SEQ ID NO: 32375 - DNA, 1395 bp, Zea mays
  Clone ID: UC-ZMFLB73303B05_FLI
gccccgtttcaccacggctctcccccttccacacgcgcagagcagggagcgctgccacgcccccaccaccagacgccgcggccagcgcacagcgacgaccatggctgtggctatggcctcggcattgctcatgctcgcgctggcaacggcgtcggcagcggtcagcggcgccggcgcgccctggaggagcaggaggccgaggccggaggccgacctggtgaccgggctgcccgggcagccggcggtcgggttcagccactacgccggctacgtcgacgtcacctcgggcggcggcggcggcaaggctctcttctactggttcttcgaggcggagcgggagccggacaagaagccgctcctgctctggctcaacggagggcccgggtgctcgtcggtggcctacggagccgcccaggagctgggcccgttcctggtgaggagctacggcgcgaacctcacgcgcaacgcctacgcatggaacaaagccgcgaacctgctgttcctggaagcgccggtgggcgtggggttctcgtacgcgaaccggacgtcggacctgcggcggctgggcgaccgcgtcacggcgcaggactcgtacgccttcctcctcggctggctggacaggttccccgagttcaagggccgcgacttgtacatcgccggagagagctacgccgggcactacgtcccacagctcgcggagctcatctacgaagggaacaaaggggcgagcagggacagagccatcagcatcaaaggtttcatgatcgggaacgcggtgctgaacgacgcgacggaccagctgggcatggtggagtacgcgtggagccacgccatcatctcggacgagctctactcggcggtgcggcgggactgcgactccttcaaggaggaggccgacggcgggcggcccggcaagggctgctccccggcgctccgcgcgttcctgggcgcctacgacgacatcgacatctacagcatctacacgccgacgtgcctgctgagcaacctctcctccgctagcgccgcggccggcagcgctaggccgcggccggcgaggctcgtcgcggcgccgcgcctcctctccaagcatgaggagtggcataggctgatgaagcgtgtgccggcaggatacgacccgtgcacggaggcgtacgtgaccaagtacttcaaccgcggggacgtgcagcgcgcgctgcacgccaaccggacaggcctgccctacccgtactcgccctgcagcgaggtcataaggaaatggaacgactcgccggctaccgtgctgcccatcctcaagaagctcatgggcgccgggctgcgcgtctgggtctacagcggcgacacggacgggcgggtgccggtgacgtcgacgcggtacagcatcaacacgatggggct

SEQ ID NO: 32376 - DNA, 1509 bp, Zea mays
  Clone ID: UC-ZMFLB73303C01_FLI
aacgggttcactaaagaggaagtctgcaacaagcagattaaccctgagatccctacagaagatcaattttctaggggtcagaaacatgacactttactaatggatcgagtaccttctgtcaagaatccatttaatctagacgatgacaggaatgacgacttatttgaacttcccactgagagctgctttttggaggtaccaaatgttgttgaatcgagaaaacaagttgactctacatcccgaatggtggttccaccaatagtctctaaccaaattaggatggctgaagttcaacaatgccataactcaattgaacgcatattatcttcatcaagtgccagtgaaaatggtgaagtggttggtccggaagacattactgtcaggagtagttctgaactggtgaacaagacttgcttgactgaccatgccctgcaggaaaatggacatacaagtggtgatatttttgtgccatctcaggcagcctccacagagcttagcacaatatctatgcaggatatcagtgcactcagtgaagttgaaattatgcaaaccgaagatgctagtgcaaaggacatgactgcagtatgtagcattgattgtattgaaatgaaacaggctatcaacactacagcaaatgatacatatgcagctattgttgaagaaaagaagttgattgaaggcaccactgcaaggatgaatggggtgcgagagacatattatgttgaagaacagacacaagctagtgacacaaaggagttgagtgcagtacagaacatagggaattctgaagaaaataagcagactgaaaatactgatgcaaaggagactaatgcacggtttaatgcaaacgatgttgagcacaaaacacagactgcaaaggagattgctgcagccgaaagcacaagcagcgttgaagagaagcagcagctaaacatcgtggttgtccaagatggaagcaacaagaagatgaatgaagagattgcatcgacaggtgcccaactgaattcaggaagagttcgtgtcccgctgaaggtcctcctcgccgaggcaagcatggagaaccaagtgaagaaacccagcactaaggaacgaatgctgtcgttccggcgccaggtgaccaaggacaacaacttgtcagtgaaatcggggtcacgcaaatctggccctgatgaccaccattggagctccccagccaaactgccacataaggacgttgacaagatttccagagaaaagaagcagccgtggatgccgttcatctgctgccactccgtgcgctgataatatattttgcatcagttgacaactctacatacatgtgctgctgtaactaatgctatccgtctttgtgtagatagtctgcaatctagtatctgatattttgaatcagtgcaattttgatgtatccgctacctgacttgttagacatttgcgcgtgaatctgtcctgatgttcagattcagctagtgtttctgtggactgaacaggcctggaatcttgtaccggatt

SEQ ID NO: 32377 - DNA, 672 bp, Zea mays
  Clone ID: UC-ZMFLB73303D03_FLI
cgataagaaaacaatttcagaaaagttccagttagtacaaaccattcggtcgtggtaaaagtaacatttgaaggaaacctcatcctctccccatttgagatattccctcgctcgctcagcagcaggaggcagcggctgctgtcaacaacaactggctgtccgacaccgcatttaagcttcaccctcccctcgggcctcctccactaaaactcggatagatctcagtgcagtgcttccctgttccctccatcaagaaacagcaaagatccagtgcagagagagagagaagcgccatggcactctgaacaagaaaagaaagagctagagagatctcagtcagccagtctctcacaacacaatgccggcaaccaccaagccgatcttgctcccaagggcgtgggcagcagcgccactcctcctcctgctgctgctcgtcctgcacgggagaggaggccactgcgtcggcatggaggcggcggagctggagatggactcggaggcgcaccggcggctgctgtgggaggcgaccacggggcggaggtacatcagctacgacgccctgcggggcgacgtggtgccgtgctccaggaccggggtgccctactacaactgccggatctcgaccaccgccaacccctacacccggggctgcgagagcatcaccaggtgcag

SEQ ID NO: 32378 - DNA, 934 bp, Zea mays
  Clone ID: UC-ZMFLB73303D12_FLI
gcaaaggggcggtcaaggagactggagccacaccagacaatgctcagacctacaataccaatttgatacgccatgttgttaatgacagcggcacaccggcgaaaccaggggaagagattgatgtctacatattttcattgttcaatgagaacaggaaacctggcatcgagtcggagaggaactggggactgttttttcctgataagagctctatctacagccttgattggacgggccgaggcaatgtggatgttatgactggagcaaacattacaagtgctaatggtacctggtgtattgcttcaactaatgcttcagaaactgatctgcagaatgccctcaactgggcatgtggtccaggcaacgtagattgttctgccattcagccaagccaaccctgctaccagccggacactttagcttcccatgcttcgtatgcattcaatagctactaccagcaaaatggagccaacgttgtggcctgtgactttggaggtgccggaatacgaacgacgaaagatccaagttatgacacttgcgtctatttggctgccggcaataagatgagcacgacgaactcaacatctcttccagctcgcagcgactccggtccagtcccatgcgccaaatgcttcgccactttgctccccatgctggccatcgtgatggctgcagttatggtgtgatctatggaaaaaaaaaatgctccagctagcctccttaagacctgagatgaaaggtgaattgcgtaatgctgctggtaaccattgaagttctgtttttgccatgagcagtagactagtagtagtctagtagagaggcaccttatgctgtaggaattctctggtcagttaagatgtacatcggcgcgcggacaatatatatcagctggtattaagaacttgatatcgtattatgctgtgtttcggctctc

SEQ ID NO: 32379 - DNA, 1726 bp, Zea mays
  Clone ID: UC-ZMFLB73303E11_FLI
gaactaaccccaaatatcaataaaatgtccagcaaagaacagcctaggaggaaaaccactccacggtaaccaccagacacctttataagcatttttcagctcacaactgctctaccccttttgacagttgagggatcatctcctccacatcaacatataattggacctcaattctggcctaacaacccagtagaatgggagcacaatacatttacatacccgagtgggttgcagcctgcagatggagctcccttcttcctctagcgctgcacagaaggatatttttgcaatcttctatggcctgctatagcatatgttgtgtatcagcgttcaaaacaatcacactctaggtttccatatgattcatttattgcataatctagccactttctatttttaataactactcaacaatttgagatatgcacaataaactgaaatcctcataagggataagatcttttactttggaactgatcattaacttcatatttatgcaaacataatcgagtttctgctgaatgttatttgaagtatgtctttttcatcatatttttttgagagtgtaatctgtttaagatttattaacttaatacatgaagtagattttacaaaggatatgctatcaatttcttgtgttaatattatgcttcccctgtcattgttcgtgttaatagtaatctgcccctgctgaatacacattatctgcaacgatatatacttaatgcttgccatatttcattggctgtcaatttatttcagctgcaatattctttgggcacctttttaatgaatctgaagctacactctaataaatagtatcatccttgcttcagctgacttatgcaccaagaatacacattgcaatttctgggtctacagttaaatcaaggtttacagatgatcgctttcatgcatgcaaggaggacgccaaatttgcatgggtcagagcactagatttcacacctaatagctcttttggcgagtgttccactcttgtcctgaaactgagcaaaggtgcatcagtatcatatattcttgaaagtttacccttctcaggagaattaggggaattggccattgcttcgatggatgtgtttggctcctcctccaatgtggttcctcttgttgactgcccaaatggcttttctgtgccttatgaagtactttttcgtctgaactctcttgttcacatggggaagctagttgccaggcatgttaatgctgatctgtttaaagtccttgaagatctgtcaatcgatactttaaggagaatatttgagaaaatgagcaaattaaaatctacctgctatgaacctttgcaattcatcagacatgaggctcatagcatgaatatgagaaagaaagccttgtccaacaagagggagagtggaaaattgatgaggtgttacagaattcacatcacaccatcaaaaatatactgcttggggcctgaggaagaagtttcaaattacgtggttaagtaccattctgagtatgcttctgactttgctcgagttacttttgttgatgaagattggagcaagctttctcccaatgcattgtcagctagaactgaacaaggtttcttttctaaacccttgaaaactggcctgtatcatcgtattctctccattctaaaagaaggattttgcattggccccaaaaaatatgaatttttggccttttcagcaagtcagcttcgtggtaattctgtttggatgtt

SEQ ID NO: 32380 - DNA, 1684 bp, Zea mays
  Clone ID: UC-ZMFLB73303F11_FLI
agacggtgagggaggctcagaagacgttccgggtgacggaccccaaccagcgcctcgaggccggcacctacctgcgtgttcatgtgcatcctaaacggtttccaaggtgctatcaaattgactggaaatccagggtaatagcagtcgctgatgaatacgttgttcttgataaacctgccgcaacatcagttatctgcacagaataaaattcacatccactaatatgagtatgtacaatgtactaccactgcaacatttgacgcagccagaagcacgagttcttggtgaagcaagttttggtttattggatgttgtaggcagctaagttacaaatgaccagtcagtcgctaggttacggttgaacttttctgagtttcagatgataacaacaggtgaattttgaacctttaggtgggcggagcaactgataacattgaggaatcctgtgcagtctttacttcgcgtgcattaggattggaaacgccattgctgacgactcaccagattgacaactgctctgaaggctgtgtggtactatctaaaacgaaagagttctgctctgttttccatggactgataagggagaaacaggttaaaaaactctatcttgcacttactacagcacctgtgtcaacaggaacgattacccattatatgcgcccagttaatcgcgctcctagattagtttctgaaggaatattattcatttttgggtgccgtgaaactgtgtgctctctttatgaacatatgtgcacactgaccaccttttgttgatgctgtggccgctactgaagatagtgaaatactgtattgaaagatggcatctctgtcaaatggaggtactcgattgtaggaaggtaccatggccaagctcttcgatcaggaaagcttacaatgtaaatggttgtgggtggccacagcaagaagctgcttatgaatgtaaaatcaatctcttgacagggaaaactcaccagataagggcacagcttgctgctataggcgctcctattataggggattctgcatacatgactgcagcaatggcagcgatggtcaacccaagcataaacccattcggtagagagaggctgagttacaacagtgaagaggagaaagaagccgccgtcgaagcatggattgcctcccacgggaaggagccaaaatccgtaattgggctgcaagcgtcagagatctcttgggatcacgagggcaagcaccattcttacaaggctggagttccgtggtggtggcaggatcctgactcctgagtgcgatggtggattggatgggggagttccatatgaacccctggaattctcgcctttttagaggacagatgtttttctacattgttccgagtgctgagcgaccactgtccaacacgaacattggtttggtttggttgctgcgcagaaattgttgggtcaccgaaaactgaatttgggcttgggagatgaaactaagcccgagtctgagctctcgaccaggccgacacgaacaccacaccagagctccttcaactgggaaaagcagatccaggccaacacgaacattgctttgctgttcattctagggcatgcaacgtcattcgttctatggctgtagctgtatggttgtgtgcaaggcctagcttctatttgggacagctctcacaataatattccctggagattgagttggggtg

SEQ ID NO: 32381 - DNA, 866 bp, Zea mays
  Clone ID: UC-ZMFLB73303G11_FLI
ggtcggagaaccacagaatccaccgcatcgcagagacgagtagaggttagatttaggctgaggtaagatggtgtgcatccggcaggcgaccatcgaagacctgctggcgatgcaggcgtgcaacctgatgtgcctgccggagaactaccagatgaagtactacttctaccacatgctctcgtggccgcagctcctcttcgtcgccgaggactacggaggcagcatcgtcggctacgtgctcgccaagatggaggaggacccctccgagccctgccacggccacatcacctccctcgcggtcctccgctcccaccgcaagctcgggctcgccactaagctcatgtccgccgcgcaggccgccatggaccaggtcttcggcgctgagtacgtgtcactccacgtccgccgatccaaccgcgctgccttcaacctctacacctctaccctcgggtaccagatccaggacatcgaggccaagtactatgccgatggggaggacgcgttcgacatgcgcaagctgctccggcagccacagcccaagaagcaccaccaccaccaccatcacggccccggtgggtgctgctcccacgacgcaccagttgcggcgactggttcttctccccagtcttctggttcacccgataagaaggctatcacttgatgtaggactcgtatctacagagaggaatcaccaagccaattgtactcatctttcctctcactgggtatacaatatagtagttgtagcggtctttccgtagtagaacggagaaagacctgtgcagtgagtatttgtgtacttggccgatggctcgaatcgtctgacctaatcagcgagaatggcaaccaaatatgcttcgtacttg

SEQ ID NO: 32382 - DNA, 1359 bp, Zea mays
  Clone ID: UC-ZMFLB73304B08_FLI
ttcacccgcgacgagcacccaccaggcatagagagagatggcaagtctaaccggcctcaccgcgaaccctaatccgaacaagtcattcgagatactgccgaacccaggtgactctgtctccagcctcagctttagtcccaagagtaatctgcttgtggcaacctcctgggataaccaggtgaggtgctgggagattgttggtggtaacagtcagccaaaggcgtccatttctcatgatcagccggttctctgctcggcttggaaggatgatggaactactgtcttctctggaggctgtgacaagcaggtcaaaatgtggcctcttctgtcaggtgggcagcctcagacggttgctatgcatgatgcccctgtcaaggaggtcgcctggattcctcagatgaatcttcttgtatccgggagctgggataagactttaaggtactgggatacaaggcaatcaaatcctgtgcatattcagcaacttcctgaacgttgctatgctcttactgtgaattatccccttatgattgttggaactgctgaccgtcatcttgttgtcttcaatttgcagaatcctcagacggagttcaagcgaatccaatcaccactaaaataccagacacggtgccttgctgcattccctgatcaacaagggtttttggttggttcaatagaaggaagagttggcgttcatcatatcgatgacgcacagcaaagcaaaaacttcacattcaaatgccacagggaaggaaatgatatattctctgtcaattcactcaacttccaccctgtccatcacacatttgcaactgctggatctgacggtgctttcaacttctgggataaggatagcaagcagaggctaaaggcttttagtagatgcccccttcccattccttgcagtaccttcaacagtgatggttccatatttgcttatgcggtttgctatgactggagccgtggggccgaaaatcacaaccctgcagctgcaaagacatccatctatctccacagtccacaggaaaccgaggtcaaaggaaagccgcgcattgcaacaggcaggaagtgattgcattgaaggtgttgcaaggaaccatgatgtcatccagcagttttgtcatgcctccctcctgtcttggaagtctggtagagtgtaaatttcagctaacttatgcgccgattatagggtttctgtagtacctggtgtttgtggtgtcttcaaaatagattctgtcgacgttctgtgatgatctccttactgcttatttctggcagtaaaatcagtgtatcttaaaaaggttgtgatgtaaattttcgtgcatatggaccccgatactaatggagttttacttcacagat

SEQ ID NO: 32383 - DNA, 1755 bp, Zea mays
  Clone ID: UC-ZMFLB73304D06_FLI
ctcgcctcggcttggcagtcggcactccctctccaccgcgctgcaggggcgacgcaaggccgagcgctcctcgatccagatccaaggtaggagatggctctcacgagaattggcctcgccggcctcgcggtcatgggacagaaccttgccctcaacatcgcggagaaagggttccccatctcggtctacaacaggacaacctccaaggttgatgagaccgtgcagcgtgccaaggtcgaaggaaacctcccagtgtttggtttccacgaccccgcgtccttcgtgagctccatccagaagccccgtgtcgtcatcatgctcgtcaaggctggggcgccggtggaccagaccattgccacgctcgcggcgcaccttgatcagggggactgtatcgtcgatggtggcaacgagtggtacgagaacacggagaggagggagaaggcgatggaggagcgcgggctcctatatcttggcatgggcgtctccggaggagaggagggtgcccgcaatggcccgtccttgatgcccgggggctccttcgaggcatacaagtacattgaagatattcttctcaaggtggctgctcaggtacctgacagcggcccgtgcgtcacatatattggcaaaggtggatcaggcaacttcgtcaagatggttcacaatggaattgaatatggtgacatgcaacttatcgccgaggcttatgatgttctcaagtcggtgggtaagctcacaaacagcgagctgcatcaggtgttctctgagtggaacaagggtgagctcctcagtttcttgattgagatcacggccgacatctttggtatcaaggatgacaagggtgaaggctacctggtcgacaaggtcctggacaagaccgggatgaagggaactgggaaatggacagtccagcaggctgctgagctttctgtagctgctcctacaatcgaggcgtccttggactccaggttcctcagcggtctgaaggacgagcgcgttgaggcttccaaaatcttccaaggtgactactccactggcctaccggtggacaaggcacagctgatcgaggacgtgaggcaagctctatatgcctccaagatctgcagttacgcgcagggcatgaacatcatcaaggccaagagctcagagaaaggatggggcctcaaccttggtgagctagcgaggatctggaagggagggtgcatcatccgtgccatcttcctcgaccgcatcaagaaggcgtacgataggaaccctaaccttgccaacctcctcgttgaccccgagttcgcccaggagatcatagacaggcaagctgcctggcgcagggttgtctgccttgccatcaacaatggcgttagcaccccaggcatgtctgcaagtctggcctacttcgactcgtaccgcagggataggcttcccgccaacctggtgcaggctcagagagactacttcggcgctcacacgtacgagagggttgacatgcctggttctttccacaccgagtggttcaagattgcgcgcaactccaagatctgaacatggcctcgtgtttgcatatgccagtatgccaccgtgtcgagtaatcaatcatattactgcttgcagggaggaactgtgtttgatttttattttccatgcgcaatgcttaatttaggtcaggaagtccaaagtctctcccattgttttcctgtaagagctaagcagtaccagatggagaaccttatatttgctggaacatgaataaaagcatttgac

SEQ ID NO: 32384 - DNA, 1960 bp, Zea mays
  Clone ID: UC-ZMFLB73304H06_FLI
cctcccctcaacctagcaccgccacttgcgcccaccacgccgccgcaccgccgctggtgaacgaatccgtccatcccgtacaccagccatgtcctgacacactgacacacacctggtggaggaggaggcgctacctccgtccgccggcggtgcaggggaggagccggccatcctcagggcggcgttgggctccggcaagctgcgcatcgaggggtcgctgagcttcaagcgggcgcagaccgcactgcaggtggagaccgagatctccatccggaccgctgccatgcccgcgccgggaccgggacccctacccaggggaacccccgagaggaacacacaacaacgtctcaccagtcagccaccaccgtgctccatttcctttctctctctcggctcctccgctctcttgcccgagtcgctagcttccctgccccgcctcctcccatccccgtggacagacaaccccccacctccgcttccatagcatccgagctaaggtcaactcctccatcggcggagcgagagcggggaagagacgggagggtcccgaatccgagccgagctgcgctccccgcgcgaccgacactcaggtcttgtcgtcccatgcagatctgctcttcctcctgaggccatccatgaatccgtggcacacaggaagttaagattaatctagacatgataatctacaggcttatgagggcttacataagttcatcttctctacggaaatctgcattgagggctcttgcaaaggcactgacgacagatcaactcttcaacctaagagagcagtttacattattcggtccaaacaagagtggccatatatcattgcaaaatatgaagacggccttgatgaaaattcctcgggtgcaatgaatgattctaggattcttgactttgttaactcaatatgcaatatccaatatggcatgattgattttgaagagttctctgctacggccattagtgtatatcaaatggaaggcctggagacctgggaagaacatgctcaacaagcatatgaattgtttgacaaggagggcaaccgaccaattgtgattgaagaacttgcatcggaacttggacttggcccttcgatctcatttcatgttgttctcaaagattggatcagacattcagatggacacccaggaagttgagttgccccttgaccaggaggaatccacctaccgtctggacgaaaaacgatcccatccatggggcagcgccaggtgtaccgaatctttggcacagcgatcagggatctatttcgcaaatgaacggaaagatagcacaattctttttctttttgtgctagtgccagtattgtggaacgaatttataaggtttgtgggttgggctgctaacatttatgttcgaatttggacgcctctctctctctcaggttggaaaggggttgctgaaggacgagaatgctcagaagcttgcgttgcagcactggctggaagcgattgacccgcggcaccggtacggccacaaccttcactgctactacgactgctggctccactccgaaagcaagcaacctttcttctactggccgcacttgaagaaatcttatatcagtttgaggaaaaactccaagctgaaagagaggaagctgctaggaagcaggaagagttgcaagcacaactacaagctcaacaggccgcacttgaagaaaaccaaagtttgctgcgccaggcccaagaggaagtgaaggggatgcataccaagtttgaagagaccaatgcactgctacgagctgtcctgaaacttcagaaagattgaggtagggatgcataccaagtctggggatgatgcctttgcttaaggtttttctaccttgctagaacatatctgtggttagaactttgtcagaactacgtgcaatctgtttgaatgcttcaaacctttgtggtggaacctttgtatgtttgaacctctgttgtggaag

SEQ ID NO: 32385 - DNA, 980 bp, Zea mays
  Clone ID: UC-ZMFLB73304H10_FLI
gaaacatgaagaaacttgaagagtggtctttaactgtggaggagagccaggtagtattaccttgtttgaagtcactgcagatacagtggtgtcctaaactgaaagctctaccagaaggcctgaagcatgtagcgctgtgtgaacttcatgtggagggtgcacatagcctaactgaaatcaaggacctgccaaaactatctgacgagctccatctcaaagataataaggtgctacagaggatctccaacctgcccatgcttcgttccctcattatcgatgactgctcaaagttgaagcatgtggcaggtcttgatgcgctgcagcacctcagacttgtctttcctccgtccaccgagacattttatttcgaagagctagtaattttctggagcgttgccttcccacggtggctggagctactgattcagaagtgcaaaggcctgcgacggtttgagttgcagtgtggtctgtcattgctcaggagctgcctcgacggtggcaagaactggcatctcgtgcagcagatccccgaggtgcgcatcataagctgcgatggcaagagatactttcggtataacaagagccgccgcatctacgaaactaatgcacagtcagaagaatgaagccatttctgaaaaccttggcacgacactggtttgttttgggtcagccacacgtttcagttgtcgctgtccctactttgttccgggagtattgagagcttgtgttctgttcacgattgattcaggtgttttcctttgttttgcgtgttttttttcttcttctttttatcgctgagccgatatatatgcactggttctcctctgaatatgggtgtccttcaccaggactcaatatgtgtaattcttttctgtttcctggtcatgattgtctgtaaattgtaaacattgggtttgatggatatcgacactggagtgtaaagtgttggcggttaaatacacggccctctttcctggctc

SEQ ID NO: 32386 - DNA, 1693 bp, Zea mays
  Clone ID: UC-ZMFLB73305A11_FLI
ccggccggaccggcaggccagcacagcatggacctcgccctcctagagaaggccctgctgggcctgttcgccgcggctgtggtggccatcgccgtggccaagctgaccggcaagcggtaccgcctcccaccggggcccccgggcgcccccgtggtgggaaactggctgcaggtgggcgacgacctgaaccaccgcaacctgatggccatggcgaagcggttcggcgacatcttcctgctgcgcatgggcgtgcgcaacctggtggtggtgtcgaccccggagctggccaaggaggtgctccacacgcagggcgtggagttcggctcccgcacccgcaacgtggtgttcgacatcttcacgggcaaggggcaggacatggtgttcacggtgtacggcgaccactggcgcaagatgcggcgcatcatgaccgtccccttcttcaccaacaaggtggtggcccagaaccgcgccgggtgggaggaggaggcccggctggtggtggaggacgtgaggaaggaccccgaggccgcggccggcggcgtcgtgctccgccgccgcctccagctgatgatgtacaacgacatgttccgcatcatgttcgaccgccggttcgacagcgagcacgacccgctcttcaacaagctcaaggcgctcaacgcggagcgcagccgcctgtcgcagagcttcgagtacaactacggcgacttcatccccgtgctccgccccttcctccgcggctacctcaaccgctgccacgacctcaagacgcgccgcatgaaggtcttcgaggacaacttcgtacaggagcgcaagaaggtgatggctcagactggtgagatccggtgcgccatggatcacatcctcgaggccgagaggaagggcgagatcaaccacgacaacgtcctctacatcgtcgagaacatcaacgtcgcagcgatcgagacgacgctgtggtcgatcgagtggggcatcgccgagctggtgaaccacccggccatccagcacaagctccgggaggagctcgcctcggtgctgggcgccggcgtgcctgtgacggagccggacctcgagcgcctcccctaccttcaggccatcgtcaaggagacgctccgcctgcgcatggccatcccgctgctggtcccccacatgaacctcaacgacggcaagctcgccggcttcgacatccccgccgagtccaagatcctcgtcaatgcctggttcctcgccaacgaccccaagaggtgggtgcgccccgacgagttccggcccgagcgcttcctggaggaggagaagtccgtggaggcccacggcaacgacttccgattcgtgccctttggggtcggccgccggagctgccctgggatcatcctcgcgctgcctatcatcggcatcaccctgggccggctggtgcagaacttccagctgctgccgccgccggggctggacaagatcgacaccacggagaagcccggccagttcagcaaccagatcgccaagcatgccaccatcgtctgcaagcccctcgaggcctagaaatcaatgcgtgtttcctgcacgcgcccccgcagatgaagcactatgtattttctcttttttttgtgtgttgtgttttttttactaagaggagatgtatttcttgttcgtaaaatgcacttagtcaaatggatcgagattatgttgatcattaaacacc

SEQ ID NO: 32387 - DNA, 2304 bp, Zea mays
  Clone ID: UC-ZMFLB73305E06_FLI
cggcgtctgtacaatgagcttattgagctaagaggtaacattagggtgttctgcagatgcagacctctgagctccaatgagctcgcccgtgggtgttcatcagtagttgagattgactcatcacaggagactgagctgcagtttgtccccaatgaaaaagaaaggaagccctttaagttcgaccatgtttttggcccagaggatgaccaagaggccgtgttttcagaaacagtgcccgttgttgggtcagtgatggatggtttcaacgtatgcatctttgcatatgggcaaacaggaaccgggaaaactttcacaatggaaggggttccagaaaataggggtgtaaattatagggctttggaagaattgttcagaatctcagagaaaagaagtgcatctgttgcatacacattttccgtaagcatcttggaagtttacaatgaaaagatcagggatcttcttgatgagagcaatgatcaatcaaaaaggttggatattaagcaaaatgctgatggaacacaagaagttcatggtttggttgaggctccaatttataacatagatggtgtgtgggagaaactgaagtttggcgctcaaaataggtctgttggctcaaccaatgctaatgaactcagcagccgctcccacagtttggttagggtcactgttaggagcgagcacttggtgacttatcagaggagcagaagccacatgtggttggttgaccttgctggaagtgagagaatagctaaaactggggtagaaggagataggctgaaagaatcacagttcatcaacaaatcactatctgccttgggtgatgttatatctgcccttgcctcaaaaaattcccatattccatacaggaattccaagctgactcatttgctccaaagctctttaggcggagattgcaagactctaatgttcgtgcagataagcccaagctcaatggattcaggagaaactctcagttcactcaattttgcgagtagagtccgagctgtagaacatggccctgctgctcgtaagcaagcggatccagctgggagtttgaagttaaagcagatgactgaaaaacttcagcatgaggaaaaggagaatgcacagctgaatcaaagcttgcagctgatgcaactgaagtatgcttctcgtgagaatgtcttcaggacactaaatgaaaaggtgaaggatgctgaacaagcatgcagaaattatcagcagcggattagagagctggaaaatgaattaggcaatgagaagagggcttctagggattctgctagatcctcaaggcccccacttgttcctacgagacagagacaacctcagggaaggactaacagcttcgcaccaccttcaggcccttctagatggaggctcaaagcccccgcaaaacacaacaaagagaacattcctgtggcgatgaataaaccaaatgctggggatgatcctaataagcctgtcggcagagcaaggcgtgtttcacttgctccggtgattcgacaaatccccatccagcccaagaggcgatcttcgatggcagtgctaccatccgtgagagagcatctttctgtgctaaacgacaagaaagcaggatctcgactgtcgcaagccaacatggcaagaggatcacttggggcatttggcttgaatttggttccaggaacacccctagcaggacatggtggacctgttgatgctacaccagatggagcaaagttcaggagatttgatttcggaagcagcagcaagttcacaagccctgccccaaatgtgggcatgtggaacaaaatggtcacgccgcagcagaagctgggaatggcaccggcaggagcgaagctgtgtttcagcatccagaaaagagttacgcctccacatgttcgggcgaaacctggattgggcatcttcgacccagctctgcgtgagaatatggtcgtggggagagccggcaatgcgctgcgggtgctcaaccccaagcgaaggcaatctgttatctaactcttgaagccaaaggtacagcagatgtttggacgttcaaacggagcgtgtggttcttagtgaaaccgtgaagatgttcttttcagcatctttaaatggattctgcttggttgttactagttgataggaaagctatgttaatactgttaatggaagttgttaattgtatttgttcgttactaagaatcgcttcaactgttgagcaattttaggacttgtttggtagagtcccgcttcacaattctctaatagagtgattctgattgattctctaccgaaagtgaatctatttgacgaaaaaag

SEQ ID NO: 32388 - DNA, 1725 bp, Zea mays
  Clone ID: UC-ZMFLB73305F10_FLI
ctccgctcggccaccagctttgaccgcctcccctcccctccgctcctgttcctccataccccacccccccgcaggagcggcgcggcggcggcggcaaaggcggctaaggcaagatgttcgggcgcgcgccgaagaagagcgacaacaccaagtactacgagatcctcggggtgcccaagtcggcgtcccaggacgacctcaagaaggcctaccgcaaggccgctatcaagaaccaccccgacaagggcggtgaccccgagaagttcaaggagctcgcacaagcctatgaggttttgagtgatccagagaaacgtgagatttatgatcagtatggtgaagatgcccttaaggaaggaatgggtggtggtgggtcccatgctgatccattcgacattttctcatcattctttggaccctcttttggaggaggtggtggaagcagcaggggaagaaggcaaaggaggggagaagatgtagtccactcacttaaagtttctctggaagatctttacaatggaatctcaaagaagctctctctttcacgcaatgtcatctgctccaagtgcaagggcaagggctcgaagtctggtgcttcaatgaggtgccctgggtgccagggctcaggtatgaaagtcaccattcgccagcttgggccttccatgatacagcagatgcagcagccttgcaacgagtgcaaggggactggggagagcatcaacgagaaggaccgctgcccagggtgcaagggtgagaaggtcgttcaggagaagaaggttcttgaggttcatgttgagaagggaatgcaacacagccagaagatcaccttccctggtgaagctgatgaagcgcctgataccgtcactggagacattgtattcgtcctccagcagaaggaccactccaagttcaaaagaaagggtgaagatctcttttatgagcacaccctgtctctgaccgaagctctatgtgggttccaatttgttcttacacatctggacaacaggcagcttctgatcaaatcaaaccccggcgaagttgttaaacctgaccaattcaaggcgataaacgacgaggggatgcctatttaccagaggcccttcatgaaggggaagctctacattcatttcacggtggagttccccgactcgctggcaccagagcagtgcaaggctctcgagtcggtacttccgccaaagccttcgtccaagctgacagacatggagattgatgaatgcgaggagacaaccatgcatgatgtgaataacatcgaggaagagatgcgcaggaagcaggctcatgctgctcaggaggcctacgaggaggatgacgagatgcctggcggagcccaaagagtgcagtgcgctcaacagtaagcaggctaccgtaattggattcaaggcactttggttgctcttcaattatgcgagtgcgcctgtggactgtatggttctatggttttgctgtcgctgagctacgaagtaggaagctgatgcgccccctggccatgcaagcggggaatgtatccttttttgctgcaactgaaaaatgctacccaggcatagctggctaccttataacttttgcttgtgagatttgctagagtgacgattttaatttataggtggacttaatgtttgtgtaaggctaggcataacatcatgtctcaatggacgttgtcgttgcacattggtgcattttattttaatgtaacgcctgtgcttgtgc

SEQ ID NO: 32389 - DNA, 525 bp, Zea mays
  Clone ID: UC-ZMFLB73305G02_FLI
ggtctcaacgaccccatcgccagaggaatagggacagcttccagtgctcatggactggggacagcagcactgtcagccaaggaacctgaagcgcttcctttctgcgccatcgcttatggtctcacgggaatttttggctccttggtttgctcggttccagtagtgaggcaaagcttggtattcatagctggttaggagcagctcgtgatgatctgaatttgaggatctgattctttagataaaggaaatcgtttcatgtgtaaaagaagtcgtgctcagaagacgaggaagcaaaacgcccccacgttttgggtcaggatgaagaaaggtgaataattccgtaatcaggatgtaactaaaacactagagcaaggcggatccattgtttgtttgatactttgtgatatcacctttctcccttcactgacacgagagatataaagtacttgtaggtttcataaattcgacaatttgtttagacaaattacggtttgtagttggagaagaaaaaatcattccagatct

SEQ ID NO: 32390 - DNA, 2152 bp, Zea mays
  Clone ID: UC-ZMFLB73305G12_FLI
gaccgacgacctcgaagcttggcctgcgcggtggtgacgatggatgtcaaatgccggcgtctggaggggaaggtggccgtcgtgacggcgtccacgcaggggatcggcctagccatcgccgagcgcctcggcctggagggcgccgccgccgtcgtctcctcccgcaagcagaagaacgtggacgaggccgtggaggggctcaaggccaaggggatcaccgtggtgggcgccgtctgccacgtatccgacgcacagcaacgcaagaacatcatcgagacggccgtcaaggtcgcaactgtggaagggggttccagtctttcagggcttgttttgttgtcctcgtatttgctcagtccaaaatagttcattttcagatggattacattgcattgtcagcttcctcttgttgctaagcgatcccatcaggcctccctgcggttaacgttttgctgaaccttggggaagagggggattcctgtcaactctgtttttttcctagtaggatctggctctgttgctcacccgacattacctgcctgccctcgttagtcgccacctcgtattttctctagctgcttgcttaatactagcttcgtgctaaaatagtactctctccgttattttttatttgtcatgtttaatataaaaatgaactaacgagcgacaaatatttaattacggaggtagtagtcgttttagaaaatttgtagattcgtacaattcttgatgcatgtgttttgtatgtgtgtctagatttatcatctatttgaatataaacataaagaataatagctaaaccgactaatattttggaatgtagtacattttttggtgcaacggcattgtccaaactagctaagaaacatgggttcatggttggtaaaacacagacattgatagatacatctttaaactgggtaacagtgagatctatttgtgcataagtgcaaataatgccgctactagagctagaattgtctttttcttaaattatgaactaagacaacctcatttatacaaatatctactggaatttcacttatgagtataacgctcttttatcagtttagtcaatagcttttccaagcttacgaacagtagcgtagtatatatttatcatgtgaaagtgaaagtctcgagccaaaaggccgtgtcatttctcttttatctgttcatcttgtgacattgaggttgatggctagctcaacttgcatttacttcattagtacttcgacacacagtggtcataccttgtcttattcgcttgcatctaaagtgtacctttttcgtatctcaaatcacttgttttgttgatcatgttgtacattattttagtttatgttcatgtcttatatattgaaaagcatttgaggatgtgaggattcgtgtagcagtaatcaactgattatatggttgcagaactttgggcacattgatattcttgtctccaacgctgctgcaaatcctactgtgaatgtcatacttgaaatgaaagaggttgttctcgataagttgtgggatattaacgtcaaggcttctattcttcttattcaggatgctgctccccacctacgggcagggtcatctgtgatccttatttcttcaattgctggttacaatcctgagcaaggattgacaatgtatggtgttacaaagaccgctctctttggtctcacaaaggctcttgctggtgagatgggacccgatattcgtgttaattgtatagcccctggttttgttccgacacggtttgctagtttcttcatagacaacgagaccattaggaaaaagcttaacgagaggactatgcttaagagattgggttccgtggaagatatggcggcagctgccgcattcctggcatctgacgatgcatcattcatcacagctgaaaccattgttgttgctggaggggtgccgtcgagattgtaaatttggctcaagtttgtaccgattgttactaggttggtgacatagcaactatactgtaataatccactctgaaaatgtgggtcgtgctaagttggccaccgttagatctaataattttttaggtgtcttggtatttgtttgagataataatctactcagattatctgtcacttagttcaaattttattggattatataatataaatagataatcccaaac

SEQ ID NO: 32391 - DNA, 2068 bp, Zea mays
  Clone ID: UC-ZMFLB73305H03_FLI
cctttcagccagtcagtcgccgcctccgctgaactgcaagtccaaactagctagctcactgggcaccgatttcccctaaaattttcgctgcttccaggaggccgcggcgaccatgggcaactgctgcgccgcgccgtcgacggagggaagcggcaagacccgccccaagaagcagaaggagaacccctacaacgtcgcctacaaccgcggcgcggcggcgccgccgccgcccccggcgcgcccgggcctggtggtgctgcgggacccgacggggcgggacctcggcgcggagtacgagctgggcggcgagctggggcgcggcgagttcggcgtcacgtacctgtgcacggagcccgccacgggggcgcgctacgcgtgcaagtccatatccaagcgcaagctgcgcacgcccgtggacgtggaggacgtgcgccgggaggtggacatcatgcgccacatgccgccgcaccccaacatcgtcagcctccgcgccgcctacgaggaccgagacgccgtgcacctcgtcatggagctctgcgagggaggggagctcttcgacaggatcgtcgcccgcgggcactacaccgagcgcgccgccgccgccgtcatgcgaaccatcgttgaggtcgtccagaagtgccacaggcatggcgtcatgcaccgggatcttaaaccagagaactttttatatgcaagcaaggacagttcccctctaaaagcaattgattttggcctgtctgtgttcttcaggcctggtgagcgatttacggaaattgtaggcagtccatactacatggccccagaggttctgaagcgaaactatggccctgaagttgatgtctggagtgctggagtgatactttacatacttctttgtggtgtaccaccattttgggcagaaaccgaacagggagtagcgcaggcaatcatacgatctgtggtagatttcaaaagagaaccatggcccagagtatctgagcctgctaaagatcttgtcaggcgcatgcttgacccaaatccattgacacggtttactgcagcacaagtacttgagcatccatggctacatgactctaaaaacacgccagacgtttctcttggcgatactgtccgagcaagactgcagcaatttgctgcgatgaacaagttaaagaagaaagcactaagggtgattgctgagcatctgtctgcggaggaagtagctgacataaagcaaatgttcgataagatggacgtgaacaagaacggcaagctaacattcgaggaattcaaggccggcctccgtaagctgggaaaccaaatgcatgattcagaccttcagatactgatggatgctgccgacgtcgacagaaacgggaccttagattacgaggaattcgtcacggtgtctgtccacgtgaggaagataggcaacgacgaacacatccagaaggccttcgcatacttcgaccggaataagagtgggtacatagagatcgaggagcttagagaggcactggctgatgaactggatggcagtgatgaagacatcatcggtggcatcatccgggacgtggacacagataaggacgggaagataggctacgacgagttcgcggcgatgatgaaggccggcactgactggaggaaggcctcccggcagtactcgcggcagcggttcagcaacctgagcctgaagctccagaaggacgggtccctcggcgccgacacacggtaggccgccgagtgtagtggtggtgctggtgttcgtccgtctctttgcttgcttgcttgttttgctgtgcggggtttttgttggttggtcagacagtcagtcaggtcattagattccacctccacgttctgtttccattacacggtgaaccctcagctggagctgtgattcttgggcttgtgattgtagaagaaagatgcacgtacaacgtacgtattgtagatgggtgcagcagcgtgtgctgacaaagaatgctggagtagcacaagacacgagtagtcttgctttgcttgtaacttgtaagtagaatttgttttgtgtgcttgcaatgcatgacgatggtgattgccctgc

SEQ ID NO: 32392 - DNA, 935 bp, Zea mays
  Clone ID: UC-ZMFLB73305H07_FLI
ggcgtggcgaccggcgggccgacggcgtgggggctgtgctacaaccacgagatgagccccgaccagacctactgcgacaagacctacacccagtacccctgcgtcgagggcgccgagtactacggccgaggcgcgattcctgtctactggtaatgctggccgctgaatcaattcgaaagttggagagcagtagagattagcaaccaagccctgaatctctctctggtcgggcacttctttcaggaactacaactacggcgctgccggtgacgggatcaaggcggatctgctccaccacccagagtacctggagcagaacgcgacgctggcattcatggcggcgatgtggcggtggatgacgccgatcaagaagagccagccgtcggcgcacgacgccttcgtgggcaactggaagcccaccaagaacgacacgctcagcaaacgcctgcctgggttcggcgccaccatgaacatactctacggcgagtcgatctgcggcaagggatacgtcgacgccatgaacgttataatctcgcactaccagtattaccttgatctcatgggcgtcggccgtgagcactctggcgacaaccgtgattgcgccgagcaggcaccgttcaacccctccagcccgacggatgaccagaagcagcagcaatcaggaagctaagacggactcattgcgccattgccactgatcaagcttccacagcgctagattgagctacagattcttcaggatgcgtgaagctgcatgcatcgtgttgatgttgttttgaatagactgtatgtactgtctatgtgaattgcgagatttgtggttatttactaccatgttgtccatagatagtctgttttggtttctttggttctgtcagatacgttatacacatgtttaaagagaactgaacataccaggaccctttttccgcttg

SEQ ID NO: 32393 - DNA, 576 bp, Zea mays
  Clone ID: UC-ZMFLB73306B04_FLI
ctcgaggaggcagcaatggtggatgtttggatcgaggtggaggctaaccagtacaccgctgcactgaatcccatcctcttccaggtcctcatcagtcctatgcttgggggaaccaccgaccagaaagttgtggatgagaaccttgagaagctgaagaaggtgctagaggtgtacgaggcacgcctgaccaagtgcaagtaccttgctggagacttcctcagcctcgccgacctgaaccatgtgtctgtcactctctgcctgttcgctacgccctacgcatctgtgctcgacgcctacccgcatgtgaaggcctggtggtctggtctgatggagaggccgtctgtccagaaggtcgctgccctgatgaagccatctgcttgaaacggttgccctgtcaatcggtgaatggaataagccaagtctgttctgggttgtttgcttgttcagtgatgtgtcttctatgacgaaagttgagtgcctatgtgtgagcatgcttgcttgtaacgagacattgaattgttcggaaatgagcattcctgtgctcttcttgaaaataaactttgcgttaggttcctc

SEQ ID NO: 32394 - DNA, 1234 bp, Zea mays
  Clone ID: UC-ZMFLB73306B05_FLI
tcaaactttgggacatcaggaaaatgtcttccgtcgtgagatcgtagggtcttgcattatagcaatttattatgtaggatattttttttactggaccctaagcttctctgaaatttgctataggacattaaaaattattaggacactacctagtgtcttctagattttttttgacagtgtcaggcagcaataaaaaaattggacaatgccttgagcaaaattatcctgctatgtacttttaagttccatttcctttttttgcgggtctagtttctattgttttgaatttgattctgttgttttcacagtcgcccagtgagtctagtggactgggactataggtggatgccatttccatcagaagctcataatcttaagcatccaggtgatcagtctgtggccacatacagaggccattcagttctgcgaacacttatccgttgctatttctcccctgtgcacaggtcaggaacagcagatatttttatttatgtcaccagcatactgaaattttcctttgaaatactttcaaaaggttacatttgttagtggaaagttgaccgttaacttgagtaggaggccttgcagttgtgctacctgcttctaagcttgtaattagtgatatataatgaatatttggtctaatttttgtatttatctatgtaattaaggcattgcttcgccttacgctttagcgcttaaaaggtaaaaaggaggtcgataattaagatcatacatctaaaacaattatcagtgatgacatgaataatttccatgttcagttcatatcgttgtgctttctgtttcagcacgggtcagaggtacatatacacgggatccagtgacaagtctgtacatatttatgacgtggtaaccggggaggctgtcaagaggctttcgtggcatggctccatcatcagagactgcacctggcatccatactacccaacgctcgtcagctcctcctgggacggcttcgttgcccggtgggaggcctcgggcgacgacgacgaccattcggtgctcgtcgccgacgagatgagaggaagcccttactaccggagatacggcgatcccttggtgatgtagagatgtctgcaaagtggttaacaccaaatggtagtgagcatgtactttgctttgttgtttgggaattacaactgagcagcatgtacagtgccgtttggctcatgtggttgtatagccttacgataaataatatgtagggatacag

SEQ ID NO: 32395 - DNA, 3548 bp, Zea mays
  Clone ID: UC-ZMFLB73306C02_FLI
caccaccgcatcgtcgccggcggccaccgggggcgatgcgtcgggggcagccaaaggaggcgcggtggcgcgccgtgccgccagttcacccaggcgctccagagcctctggaggcacagtcccccgatccctcctcctgcgcctcccgctgccggcgctgccaccagcggcgaggccgaaccctcgcggcagccgccggtactcgagaacgctgccttcgaggagtactataaggttcagcaaattgtccgcgaggaggagtgggatgccttcatgagtgttctacggaaaccattaccagcgacttttagaatcaatgcctgttgccagttttataaagatatctgttcaaagttagaaaatgaatttaggcgatctttggagagtgagtcttgcatggcacctgaatttctcccggaaggaattgaggaaaaatcaggcactcgaaagttttcatgagtttctgaagcatgagagtgaggttggtaacataactagacaagaggctgttagcatggttccaccactgtttctgaatgtacaacctgatcaccatattcttgatatgtgtgctgctccaggctctaaaacttttcagttacttgagatgattcaccaatcaaaagaactaggtctacttccaggagcattggtacgtttctccctaagttgcatctggcactaaaactattgctcgtgtaactcttgatgatttttggagtcatgttagttgttagtattcaattttgttacatgtagctagtagaactagtcgttttataatttccaaagacttatgagaaattaatactttagttatattgatatggcctaggaccaacttggcccagtaaacggctcagtctggcctgtaggccgtggcgccggcatggtaaggactaaggaggacctagagcctaggtggctaggaggtctatctcctgtagtcctgtactacccctgtccctaagtcagtccctatatatagaggccccatgtacccttgcaacttaaggagaagtagatcaaagggacaaagggttagcccatcttttcttcccctgacttgggcgttgtcctactggtcactcttcctgtcctctcatttctccccaaatccccctccctaatctggggcaatctaagtactaacatatatattctcccttgttcttgtgagactggttaggtgatagccaacgatctcaatatgcgaagatgtgacctccttatccataatacaaagagaatgtgcaccgccaacctaatagtaacaaaccatggagcagaaaacttcccctattgttctcttgcaaaggattgttcaggttcatataaagatccctgcaaactacaaaagctagaattcgaccgcatactttgtgatgttccgtgtagtggtgatgggactattcgcaagggtcatgacatgtggagaaagtggtaataacaggatctttgttttgtctgctgttttatgcttccctgtatgtatcctcaggtcgcaatctgttattgttgttcaggaactcaggcatgggtaaccaacttcatcttctgcaagtaaatattgcaatgcgtggtattgcgttacttaaagtgggtggaaggatggtctattcgacttgttcattgaatcctgttgaaaatgaagctgtcatagctgaggtgctgactgcttcctactggctcggtcccatccgatgcgatgccataagaggggttcctggtgaccaaaaacgtgtgcgaggacaccactcagaatgaatgtgctcccctaatctaccaatcgagagggcatggcagtcaggtgaagaccgatgcacatggcactccactgcacatccctgccctaatgatctgctgctaattgagccattgagctccttcgaagaagtggaaactctgttgaactccttgatgtttctagcgagctacctgaattggttcggcgtcctgggcttagcacttggaaggtacaagatcgagaatcttggtttcagagtcacgatgaagttccacacaataggaagaatgtagtatttccaagcatgtttcctgcaagtaatagcaccgaggaaagccataccgtgtgtggtgatgttgaagtgaacataaataatatgaacagcttctcaagaaatatcaacattgaagaaacaagcaaacttaatcaagatatggatggagtttctgttagtcccactaaaattttggaatgcacttctaacattgtgagttcaaagtttccactgcatcggtgcatgaggattgttcctcatgaccagaacagcggggcatttttcatcgcagttcttcacaaattatcgcccttgaatggcagtcagataaaggatactaaaattcagcacagacttgggacagacagaactatacagttccagaaagagcccaagccagaaacacgaccctatgaaactactttgacacgccgtcagcacaatgtttctgaagttgatgatactgaagtgcttggtaggggacagaaattaggcacagacagccaaacttcaaaggataagaactcaagcgaggtcgaaatagttagcattctagcagagtcaggagatagaatggagttgcaaaagcaaagcaggtgggaaggggttgatcctgtcttagttttgaacgatgaagcggtgataaagagtatacaatccttctttggcatcaaggaatcattcccactcgaaggtcatctggtgactagaagtcctgataatgcaaggagaatatattacgtatcaaaatcagttaaagagattttggagctgaattcaaaagttggtgggcagctgaagatagcttcacttggtgttaaaatgtttgaaaggcatagatcaaaggatccctgtccatgtgcatataggttgtcttatgatggattatcgctggtgcttccatccatcagcaagaggatactatatgcatccgcactcgagttccaccgccttgtacagtaccgaagcataagctttgctcattttaccgacaccagattcggggagcaggctgcgtccttgacgcctggttgctgtgttgtagtgttactcgaagggaataggcgtgtagattccatttgtaaggatccctccacaattgccgttgtttgctggagagggaaggggaccattaacgttatggtttctccctcggataggaaggatctccttgaaaggatggcgtatcgatttggatgatggatgccctaacgacgactatggagcttgccttggcatcttgacaaggacctaccttcctatttggttggctgctaattaaaacttggtataccacattaattaattctaggcatgtgtgttttgtttcacattataaagtgggatttgtcaaactttgttacgaatagcaggttcttagtaatttacacacgtcggttggttgggcctggacgaaggaaggatttgtacagatcagatgagagagttttgagtttgcaactatgaactatgtactactatctatctctttcgaccaagagatgaaaagcaaaacataactaagct

SEQ ID NO: 32396 - DNA, 309 bp, Zea mays
  Clone ID: UC-ZMFLB73306C04_FLI
cctcaaccatccttgggcaaatccatgtggtatatcttcgttcaggtcccaatcacaggagcctcaacgaagatataccacatcggtgggtttctgcttgcagttttttttcctgaacgcaagtgtggctagaatttgcagttttgcttcgtgtaaagtaccgcgtcagtttagcgtgatttgttccagtttttgtaatatttcaattcatgttagtattgatgcgtccgtgcgtcgtcgagatcgtagtattctgtaggaaggaggctactgagtttttgtgcttcctgtaaatatattcatcattct

SEQ ID NO: 32397 - DNA, 1214 bp, Zea mays
  Clone ID: UC-ZMFLB73306C05_FLI
acagcgtgacgatcaccgagttcggggccgttggtgacggcgtcaccctcaacaccgtgtccttccagaacgccgtcttctacctgcgctccttcgccgacaagggcggcgcgcagctgtacattcccaggggccggtggctcaccggcagtttcaatctcaccagccaccttaccctcttcctggagagtggcgctgtcatcgttggcacgcaggacgtttcacagtggcctgttgtcgaacctttgccatcatatggacgaggaatggaccttccaggttcgaggcatcgaagcttaataaacgggcagaatctagttgatgttgtaattacgggaaacaatggaacaatcgatggccagggttctacatggtggaactggtttcgttcgaataagttgaactatagtcgccctcatcttgtggagtttgtggactctgagcaaatcgtcatttcgaacataacatttttaaattcccctgcttggagtatacatccagtgtattgcagcaatgtagtggtccatagtgtcacaattcagacttcattggatgctccacttaatcatggaatcgttccagattcatgctcaaatatgtgcatcgaggacagcagtatcagtgttagccacgacgccatatcactaaaaagcgggtgggacaagcaaggcattgctttcgggaggccaacctcagacatccacataagcagactggatctgcagtcctcactgggcgccgctctcgcgttcgggagcgagatgtcgggcgggatctcggacatccatgcggaccgcctcctcatccactcttcgtccagaggcgtcttcttcaagaccgcgccgggacgcggaggctatatcagagacaccgtgatctcagacgtccagatggaagacgtcgacgtcgccatcgcattcaccggtgactggccaagccacccagatgaccagttcgacccggccgcgctcccggtggtcagccacatcaccctgaagaacatgactggaacaagaatctcggtcgctggcgttttgtcaggaatcgccggcgacccgttcaccgacatctgcctctccaacatcaacttctcactggccgattcggccagtcccacctcccactggtcttgctccaacgtctccggatactccgagctggtcttccccgagccttgcctggatctgcagacccaatcctcagacgcttccgtc

SEQ ID NO: 32398 - DNA, 2159 bp, Zea mays
  Clone ID: UC-ZMFLB73306D02_FLI
attcccatggacatgtggttgtccattacacagatgttgatacaaatgttcagctcctttttaggtaccgttgctcatgttgcagcccgaggttgtagctacacaggaacacaaattcagcttttgagcttgcaagaacggatgttggctgtgtttttgcaaatcagggtgacaataatgttgaaagaatccagcgttcgaagtatttccaagctcttcttcagaagtctaaagcaaatgtttctgaacaacggaatgcaacatgtcaagagttctcagttcaatgggctccatgcgtcgatgaaagccaagctgaaatggaaaatgagaagctaagcatcagggcttcaaagttaatgatgcaaacgaagttgacatcattgtatagcagtaagtccttgaagacaaatggcgtacccaacaaaaatatgttcaaatcagagaactcatctaaagtgtgtgccggtgttgaaaatagaacaagtcaaaatagtaacaggcggcatgcttacctggacgttgaggaggatgagaaatcccatgggcaattgcagaatgcaaagtggaaacatacagggttcagaagtcctatatttgaggttgcaaattctccatcaagtaatgatgaagctgatgctcctgccaatgagtttacgactgccaagagaatgatggggttggatgttgtgcaaaagccagcacaaaatggtccacaaggtgcttctgtatcaccacaatgtgataacaactatagtacacggaattatggcgtgagaccaagttggaattctcgtcgtggaccacgtggtagttttataccccctatcagaaacaatggaggatcaggtacaacgatctcacgggtcactggtaaaaatgacgagtccatggaagattcaacaaggaaatgtattgaaatgctttgtgctcctgatggtgagcttcctgagaagctgaggaatctagaacctcgccttattgaacatgtcagtaatgaaataatggatagggatcctaatgtccgctggaatgacatagctggtttggaacatgcaaagaagtgtgtgacagagatggtgatatggccactgctacgtcctgatatattccgtggttgtcggtctcctggaagaggtctactgttgtttggacctcctggaacaggcaaaaccatgattggaaaggcaatagctggtgaagccaaggcaacatttttctacatatctgctagttcactaacaagcaaatggagaggagttacttctttggagtctggctggggctagaggaatttctcatctcactctagtgccaagtgcaaactagggctcctcagtcgaggtcaagttgtcttttttactgtaatagattggtgagggtgaaaaacttgttcgggcactttttggtgtggccagttgtcgtcaacctgctgtcatatttgtggatgagatagactcattattatctcagcgcaaatcagatggtgaacatgaatcaagcaggagactgaaaacacagtttctaattgagatggaaggttttgacaccggaaatgaacagatcttacttataggagcaacaaacagaccccaggaactggatgaagcagcgcgcaggcgactcacgaaacgtctatacatcccccttccttcattagaagcacgggcttggataattcgcaatctattggagaaagatggacttttcatgctctcggaagaagaaacaagtgccatctgtaaattaactgaaggctactcaggatctgacatgaaaaacttggtgaaagatgcctcaatgggaccactaagagaggctcttcagacgggcgttgaaatcgcaaagctcagcaaggaggatatgcggccagtgatgctgaaggatttcgagaatgctatgcgggaggtaagaccttctgtttcctcaagcgagctggggacttatgaagaatggaacaggcagtttgggagcctatcgatctagtctgtcggcaggcatcaacgaatacaatcatgtcggcactatagaaaaaggagctcaacgattttagccggaacatgacatgcataacacagctctacagtttaacaatcttttgaagcatcaaaatttgaactgtctatttggagtgctgagtaatatccaggagcctacatatc

SEQ ID NO: 32399 - DNA, 563 bp, Zea mays
  Clone ID: UC-ZMFLB73306D09_FLI
cgggacatggggaaaggcacttggtgcagaggtctatgactgcaacaacatggtggagcaggagctgcctggaggcgggctcctcgtgtaccagagcttctgtgctgctgaagacgctgttgctacctcgcccaaatctgttttccactgctttgacggcgagaacgtggagagtgctcctcctcctatgaagaaggactacaagctggctaatcttctctgctgggaggaggaagcggatgccatggaggagaaggcgggagtgcttgatgagtaagacgggcttctggggtcgatttgcttctgagttgtttattttatatcgtcgcaatttcgtggttgtcgtttggttattctgtgaagcagccaagccaggctattgttatgaaaatttgtcgtctgtaagcatgtgaacttccgatgttgccacatgctggatcagtctgaataagtaagtatgcagctctaggtggtcagctgcgtctaccacaatgagcatgaacgtatggagaaatatctgtgaacccattttgtttatgaataagatttgtttttttcgagtt

SEQ ID NO: 32400 - DNA, 463 bp, Zea mays
  Clone ID: UC-ZMFLB73306E02_FLI
gtgccgatactgtaccacaagtatcaggaccaggtggacaatttcgctgcaaaggcgcacagggagctctgcaagcaatacgcggtcctggatgccaaagttctgagcaagattccaagagctccaccaaaagataagaaacagaactagaacgtggaggatgacaagcgccttgttttcggcttgggcgacgagagtttgtagccaatggtctgatgtggttcgtgggctttgtgtaggtgcacagtttcacgtatatgttctggtcgtgtaatctatatgtttatataaacctgtaggggtgttgatgaccatcgaaagtgtcgtaaatattcagtagtatatgtagcttagggcttaagcggttgtgtttataaggtcattgtcgttgtcgatgggaagtattatcatgttattttcaggactcaggagtataaaatgaaataaaatgtgaattcatctg

SEQ ID NO: 32401 - DNA, 1692 bp, Zea mays
  Clone ID: UC-ZMFLB73306E03_FLI
ccagctattgaccgccgcctcccttcccctccgctactgctcctccccaccccactcccccgcaggagcggcggcggcggcggcgaggtcgtaccccacatcggcgagcggcggcggcaccgccggaggcaaaggcaagatgttcgggcgcgcgccgaagaagagcgacaacaccaagtactacgagatcctcggggtgcccaagtcggcgtcccaggacgatctcaagaaggcctaccgcaaggctgctatcaagaaccaccccgacaagggcggtgaccccgagaagttcaaggagctcgcacaagcctatgaggttttgagtgatccagagaaacgtgagatttatgatcagtatggtgaagatgcccttaaggaaggaatgggcggtggaggatcccatgttgatccatttgacatcttctcatcattttttggaccctcttttggaggaggtggtggaagcagcaggggaagaaggcaaaggaggggagaagatgtagttcacccacttaaagtttctctggaagatctttacaatggcacctcaaagaagctctctctttcgcgcaatgtcatctgctccaagtgcaagggcaagggctcgaagtctggtgcctcaatgaggtgccctggttgccagggctcaggcatgaaagtcactattcgtcagctgggcccttccatgatacagcagatgcagcagccttgcaatgagtgcaaggggactggagagagcatcaatgagaaggaccgctgtccagggtgcaagggtgagaaggtcattcaagagaagaaggttcttgaggttcatgttgagaaggggatgcaacacaaccagaagatcaccttccctggtgaagctgatgaagcgcctgatactgtcactggagacattgtattcgtcctccagcagaaggatcactccaaattcaaaagaaagggtgaagatctcttctatgagcacaccttgtctctgaccgaagcactatgtgggttccaatttgttcttacacatctggacaacaggcagcttctcatcaaatcagaccctggtgaagttgttaaacctgaccaattcaaggcgattaatgatgaggggatgccaatttaccagaggcctttcatgaaggggaagctgtacatccatttcacggtggagttccctgactcgttggcaccagagcagtgcaaggctctcgagacagtacttccaccaaggccttcatccaagctgacagacatggagatagatgaatgcgaggagacgactatgcatgatgtgaacaacatcgaggaagagatgcgcaggaagcaagctcacgctgcccaggaggcgtacgaggaggacgacgagatgccgggcggagcccagagagtgcagtgcgcgcaacagtaagcagactatcatcaaggcaattgggaggggtggtgcccttaaagcatgggagtgatctctggttttgctgtcgccgagctgggaaataggaagctgaatcgacctcgcaagcggggaatgtatccttttttgctgcaacataaaaaatgctacccaggcatagctgggtaccttttaacttctttttgtgggatttgctagagtgatggtttcgatatatagggggacttgaatgtctggaatgctacggtataacgcacatttgggtgcaatgtctgttgcattgctgtctg

SEQ ID NO: 32402 - DNA, 1027 bp, Zea mays
  Clone ID: UC-ZMFLB73306E04_FLI
agcacttgtgctttaggacactgcaacgtttcacggctgctaccctggagcatggcatgcacccaccaaatgcaccaaagccagaatggcgagcccttcttgatgagatggcagttgtggcaactgaggaatatcggtccattgtcttcaaagagccacgctttgtcgagtatttccgccttgcaacccctgaaacagagtatggtaggatgaacataggaagcaggccatccaagagaaagccgagcggaggtatcgactcactccgagcaatcccatggatctttgcttggacacaaacgcggttccacctcccggtctggctaggatttggagccgcattcaagaatgtcctccagaaggacatcaggaacctccacatgctccaggaaatgtacaatgagtggccatttttcagggtgactattgatctggtggagatggtgttcgccaagggtaatcctggcattgccgcactgtatgacaaactcctcgtttcagaggaactgcatccattgggtgagaagctgagggccaactatgaggaaacccagaagcttctacttcaggttgctgggcacagggatcttctggaaggtgacctctacctgaagcagcggctccgcctgcgtgatgcgtacatcaccaccctgaacgtctgccaggcctacaccctgaagcggatccgtgacccggactaccatgtcgcgctgcgcccccacctctccaaggagatcatggactcgaccaaggctgcggcggagctggtgaagctgaaccctggcagcgaatacgcaccggggctggaggacaccctcatcctgaccatgaagggcatagcagccggcctccagaacaccggttaaaccacgaagaggggatcttttttctcctcctgatcattggctctaggtccttcgtattttcgcggattgtaacttcggccacctctctacaccgtgaggaaataatggtggtttctgcaaaagtggtggtaaataaaagggcgacaactatcttgtttttc

SEQ ID NO: 32403 - DNA, 1226 bp, Zea mays
  Clone ID: UC-ZMFLB73306E06_FLI
caccaaccggcagctcagcgtgacgcaccccgtgcacaggctgctgctgccgcactaccgcgacaccatgaacatcaacgccctcgcgcgccagaagctcatcaacgccggcggcatcttcgagatgaccgtcttcccgcgcaagtacgccatcgagatctcctccaaagtctacggcagctggaacttcaccgagcaggccctccccgacgacctcatcaagcgaggcatggccgttccagatccgtcgagcccctacaaggtgcggctgctgatcgaggactacccgtacgcctcggacgggctggccgtgtggcacgccatcgagcagtgggtgacggagtacctggccatctactaccccaacgacggcgtgctgcaggccgacgtggagctgcaggcgtggtggaaggaggcgcgcgaggtcgggcacgccgacctcaaggacgagcactggtggcccaagatgcagacggtgccggagctcgtgaaggcctgcaccaccatcatctggatcgcgtcggcgctacacgctgccgtcaacttcgggcagtacccgtactgcgggtaccacccgaaccggccgtccgtgagccggcggcccatgccggtgccgggctccgacgcgtacaaggagctggagaagaacccggagaagttcttcgtgcgctccatcaccgcccaattccaggccgtcgtcggcatctcgctgctggagatcctgtccagccactcctccgacgaggtgtacctcggccagcgcgacaccaaggagtggacgtcggacgccaaggcgcaggaggcgttcaagcggttcggcgcgcggctgaccgagatcgagaaacgcgtggaggccatgaacaaggacccgcgcttcaagaaccgctacagcgcggcccagttcccctacaccctgctcttccccaacacctccgacaagggcgataacaccggcgtcaccgccaagggcatccccaacagcatttccatctgattcgatcgagtcctggccagcgtttcacccaaaaaagcagagctagcggtgattcccgtatgtcatccgtttcattttttacatgaatgagaagcgtggtaataaaaaggtttgtagttgcgtgcgcgccgtgtattccttggtgtactggtgctggcggtaaccacttattaccagggatccttgtaatttttcctgttggtttcccaataataatgtgaatatattggtc

SEQ ID NO: 32404 - DNA, 1211 bp, Zea mays
  Clone ID: UC-ZMFLB73306E12_FLI
caggcacatggagggctttggtgtcaatacctacaccttgatcaacagggatggaaagcctcaccttgtgaaattccattggaagcctacttgtggtgtgaaatgcttgctcgacaatgaagctgtgactgttggaggcacctgccacagccatgcgacgaaggatctatatgattccatcgcagctgggaattaccctgaatggaagctctacatccagactattgatcttgaccatgaggataagtttgactttgacccgctcgatgtcaccaagacctggcctgaggatatcatcccgctgcagcccgttggacggatggtcctgaacaagaacgtcgacaacttctttgcagagaatgaacagattgctttctgcccagcgattattgttcctggaattcactattctgatgataagctgctccagacgagaatcttctcctatgctgatacccagaggcaccgccttggtccaaactatctgatgcttcctgtgaatgcaccaaaatgtgcccaccacaataaccaccatgatgggttcatgaacttcatgcacagggacgaagaggtgaactacttcccttcgaggtttgatcccgcccgtcacgcggagaaggtccccattcctccccgtgttctaacaggctgtcgtgagaagtgcatcattcagaaggagaacaacttcaagcaggctggcgagagatatcgttccttcgaccctgcaaggcaagaccggttcatccagcgatgggttgacgcactgacagaccctcgcgtgacccatgaacaccgtaccatttggatctcctactggtcccagtgcgacgccgctcttggccagaagctggcttctaggctgaacctgaagccgagcatgtaagatcgacgaggaagaaagcaggcaccggtggccaaggatgcaacgcaacatggagcgtgtgatgtttacaccaatataattgaataaacaggggatgtgcgcgttgtcgtacttatgctgatgctgatggtcggtggtcgattatatatactggaacttctggtgtatgctcttctcttctggggagacgtaatgtaacgaagaagaatgtgtcattgtggcctgtggtacaaaccctgctgtgtatgggcctgtctataagaaacagcgatgagttgtgacgttatgtttctgacagtttatttactaatgagcacatctttgattt

SEQ ID NO: 32405 - DNA, 526 bp, Zea mays
  Clone ID: UC-ZMFLB73306F03_FLI
ttccatgtgagataagttttccttttggcgaaagaatcctttcgcaagaacattcattgtaacattgaagtattgtataagcttttcctggtattgttttagaaacagagacctgtttatggaggttgggaacaacaccttggattggagcatacagccaccaccccaaaaaggtcctacttaggcaacaaccagaaccgccattcttttgagaagcctgtgaggatttacaactaaagctaggaatactttttacatgcgatgaatgatgaacaggatatgaagcagtcttgttccaaaagcagtcttttggtgatgtacatggagcttttgcatagagtagtttatgtggcaattatctcaagaattttcatctggtggatgtacagggtccgtatagcaacatttccttgtagaaagttgaagctgtatatcgagggtggatttacatgtgttaatcttttcgaccccaagcctctgggaggctgtgaaccatagcctcatgaaatatgcctgttgttcattc

SEQ ID NO: 32406 - DNA, 2209 bp, Zea mays
  Clone ID: UC-ZMFLB73306F06_FLI
gcagaggtaatggatgggcggaggaggggcggcggagctatggcgtggctgctgctgcttctcgcctcgctgtgcaccggcgcgtgcgggctcaatgcggacggggtgctgctcatgtccttcaagaacacggtcaccgcggacccgctgggcgcgctggccggctggagctacagcgacgccgcgccgtgcgcctggaacggcgtcatctgcaacggcttcccgcaggacgacaccgcgccggcggcggcgaacgtgacctcggcctccgccgacggcaacggcaccgcgacggtcgcgcgcaacgccaccggagcaaccgcggcggccggcctcggcgcgtcgctggcggcggccacggtgtcgcgggtcatcagcctcgtcctacccaacgcgcagctctcggggacgctgccgcccgacctcggccgcgtcgagcacctgcgccacctcgacctctccgggaacggcctcagcggcagcctgccgcctacgctgctcaacgccaccgagctccgcgtcctctcgctcgccgggaacgcgctgtcaggcgagctcccggacgcggcggcggcctatgcgcgcggcctgcagcagctcaacctctcgggcaacgcgctcgcgggccgcctccccgccgcgctgtgcaggctgccgagcctccttgcgctggggctcgccagcaaccacctcgccggtgagctccccgtcggaggcctcgggacgttggagcttgttgacctgagcgacaacgacttcaacggctcgctcccgtcggacttcggtgggaccgcactccgcctcctcaacgtttcgtccaacaagctcgccggcgctgtgccgaccgagctggccgccgtcgtccccgcgaacgcgacggtggacctgtcgcggaacaacttcaccggcgcgatcccacaggccggcccgtttgccgcgcagccggcggcggcgtacgagggcaacccgaacctgtgcgggccgccgctgaagcaggcgtgctcgatcccgtcgtcgctgtcgaagcctcccaacgccaccgactcgccgccggcgttcgcggccatccccaagaaccccgctcgcgccccgccgcaagcccaggggcagccgccgagcgagcaggataagcttcgtcccgcgtccattgtggccatcgtcgtcggggacatcgccggcgtcggcctcctcttcatgctgttcatgtacgcgtaccacgtcaggaagaagaggcggcagcgtcgggagcaggacccgacgccgccgctgcacctgcagcagaagagcgcgcgaggtttcgacggcggcgtagtcaagacgctcgacatcgccggaggcaaagaagagaaggcgtccacgtcgacggggtgctgcattggccgtaggaacgacagctcggacagctccgagtactccgcgtcgtcggacggcgagtcctccgacgaggagggcctcaagaagaggggaagcttcatcggccggagcaccccgcaggagcacggcagcaagaagcacaacctgccccagcagcagcagcaggcgccccccgcgcctgcgacgctggtgacggtcgacggcgacggcgagctcgagatggagacgctgctcaaggcgtcggcctacatcctcggcgccacgggttccagcatcgtgtacaaggccgtgctcggcgacggcaccgcgctggccgtccggcgcatcggcgagagcggcggcgccgaaaagctcaaggacttcgaggcgcaggtgcgcgccgtcgcccggttccgccatcccaacatcctccggctgcgcggcttttactggggcgccgacgagaagctcctcatccacgactacgcccccaacggcagccttgccaacatcgcattcagcaggcgcttcgggtcgtcgtcgccgctgcacctgagcctggaggcgcggctgcggatcgcgcgcggcgtggcgcgagggctggcgtacatccacgagaagaagggcgtgcacgggaacctgaagccgagcaacatccttctgggcggcgacatggagccatggatcggggacctgggcctggaccggctggcgtcgggcgaggcggcgccgcactaccgcgcgggcgcgtcggcgcggctgttcgggagcaagcggtcgatgcactcgacgagcagcctgccggacctgtcacagatgcccgggccgggcgcgagcccgtgcgggtcggcgtccg

SEQ ID NO: 32407 - DNA, 727 bp, Zea mays; identical to SEQ ID NO: 229
  Clone ID: UC-ZMFLB73307A03_FLI

SEQ ID NO: 32408 - DNA, 1753 bp, Zea mays
  Clone ID: UC-ZMFLB73307B10_FLI
ctggagtaccttgaggagcgtcgcctcaaggatctggtcaagaagcactctgagttcatcagctaccccatctccctgtggactgaaaagacaacagagaaggaaatttctgacgacgaagacgaggaagagaagaaagatgctgaggaaggaaaggttgaggatgttgatgagaaggaagagaaagaaaagaagaaaaagaagatcaaggaggtttctcatgagtggtcattggtcaacaagcagaagcccatatggatgaggaagccagaagaaatcacaaaagaagaatatgctgccttctataagagcttgacaaatgactgggaggagcatctggctgtgaagcacttctctgtggagggtcaactggagttcaaggctgttctctttgttcctaagagggccccctttgatctctttgacaccaagaagaagcaaaacaacatcaagctctatgtgcgcagggtgttcatcatggacaactgcgaagagctgatccctgagtggctgagcttcgttaagggtattgttgactctgaggaccttcccctcaatatctctcgtgagactcttcagcagaacaagatcctgaaggtgatcaggaagaaccttgtgaagaagtgtgttgagctcttctttgagattgctgagaacaaggaggactacaacaagttttacgaggctttctccaagaacctcaagcttggcatccacgaggactcgcagaacaggaccaagatcgccgagcttctgagataccactccaccaagagtggtgatgagctgaccagcctcaaggactacgtgaccaggatgaaggagggacagaatgacatatactatatcactggtgagagcaagaaggcagtggagaactcccccttccttgagaagctgaagaagaggggctatgaggttctgtacatggttgatgccattgacgagtatgctgttggtcagctcaaggagtttgagggcaagaagcttgtctctgccaccaaggagggtctgaagcttgatgagactgaggacgagaagaagaggaaggaggagctgaaggagaagtttgaggggctgtgcaaggtcatcaaggaggttctgggtgacaaagttgagaaggtggtggtgtctgatcgcgttgtggactcaccgtgctgccttgtgactggcgagtatggctggaccgccaacatggagaggatcatgaaggcacaggccctgagggactcgagcatggcgggctacatgtcgagcaaaaagacaatggagatcaacccagagaaccctatcatggatgagctccgcaagcgtgccgaggctgacaagaatgacaagtcagtcaaggatctcgtgatgctgccgttcgagactgctctcctgacctccggcttcagcctggatgaccccaacaccttcggcaaccggatccaccgcatgctcaaactcggtctgagcatcgatgaggacgagcctgttgaggcagaggctgagatgcctcagcttgaggacgacgctggtgaaagcaagatggaggaggtcgactaagtgtcgcatcgcatgcttgccgtttatcttatccctagctaagctacctgtgatagcttaattttcactattgttcgaggtttttggcacgttatcggttgtcctgctggccaggctataagtctggtttatctgttatgtttaccctttttaacagtttgtcgttattattcgtaatggtaaaaatgtagtacatgttttgccc

SEQ ID NO: 32409 - DNA, 1194 bp, Zea mays
  Clone ID: UC-ZMFLB73307D05_FLI
aaatttcttggaaaatatgcaatatcagccgaagaattctctgaggaaatggttggggccaagtctcggaatatagcatacctcaaaggaaaagtaccttcatgggtcggtgtcccaacgtcagttgcgataccatttggcacttttgagaaggttttgtcagatgggcttaataaggaagtagcacagagcatagagaagcttaagatcagacttgcccaagaagattttagtgctctaggtgaaataagaaaagtcgtccttaatcttactgctcctatgcaattggttaatgagctgaaggagaggatgctaggctctggaatgccctggcctggtgatgaaggagacaagcgttgggagcaagcatggatggctattaaaaaggtttgggcatcaaaatggaacgaaagagcatattttagcacacgcaaggtgaaacttgatcatgagtacctttcgatggctgttctcgtgcaagaagttgtgaatgcagattatgcttttgtcattcataccacaaacccatcgtctggagattcttctgagatatatgctgaagtggtgaaagggcttggcgagaccctcgtgggagcctatcctggtcgtgctatgagctttgtttgcaaaaaagatgaccttgactctcccaagttacttggttacccaagcaagccaattggtctcttcataaggcaatcaatcatcttccgttccgactccaacggtgaggacctggaaggttatgctggagcaggattatatgatagtgtaccgatggatgaggaggatgaggttgtacttgattatacaactgaccctcttatagtagaccgtggattccgaagctcaatcctctcaagcatagcacgggctggccatgccatcgaggagctatatggttctcctcaggacgtcgagggagtagtgaaggatggaaaaatctatgtagtccagacaagaccacagatgtagtatgtatgcatctattagacagctcaataagcactgttgtacgcttgtatggttgggacatatgggcgttatggcatgtatagttgtatgcctagatgtacaacacgtgtactcgtatatatatatataaatgctgaaacaagcattggtcctgtactgtagtttctacatttcattgtcaccaataattaagtgtactcctatggctgggagtctatg

SEQ ID NO: 32410 - DNA, 1158 bp, Zea mays
  Clone ID: UC-ZMFLB73307E02_FLI
ggatcagtataatcaggctgactttgcggaaacatactcagacgctaaattcttcattattaaatcttacagtgaagatgatgttcacaagagcgttaagtacaatgtgtgggctagcactcccaatggtaataagaaacttgatgctgcctatcaagaggctaaagaaaaatcaagcgaaactcctgtttttcttcttttctctgtgaatgcaagtggccagtttgtcggccttgctgaaatggtgggtcgtgttgattttgaaaaaacagtagagcattggcaacaggacaaatggactggttgtttccctgtcaagtggcacattgtgaaggatgttccaaacagcttgctgaagcacatcattcttgagaacaatgaaaacaagccagtgacgaacagcagagatacacatgaggtgaagcttgagcaaggccttcaagtgcttaagattttcaaggatcatgtctgcaagacatccatactggatgacttcggcttttatgataatcgtgagaagatgatgcaagagaggaaagccaaacagcagcagtcgctgaaaaaggtcattgatgtgaagctgcccagcgtcaccgacatggagagaagtcctaaagtggagactggatcaacagaactcactggggttgggactgacgtcttgaacaaagagcgtttattaggcaaagcaggagagaaaaatggcgagaaaggaaatgatgtcgccccacaggacctgaaaacacaaactgagaagttggcgggtctaaatggctgttaatatttttcgttagctcaagccgttgacagtggtgtcggggtggaacctaaggctgtggtgggttgtttgaggaaattctgatgtcccattgagcttgtttcctatagttcataggagctagaggcttagctagttgcttgtgtttggtggtagtcatggtctgtgttctggcgtgtcaggtattttaggaatagaaggatgattaactgggttttgcaatgatggatcatgggttttgaggctgtatttttcgtttatttgcctttcctctctggattctagttcctctctctctctctctctagattctggacaagtgtagtgcttattttaagttggttggtttaagaacctgaaatgaacatgggaattctatc

SEQ ID NO: 32411 - DNA, 582 bp, Zea mays
  Clone ID: UC-ZMFLB73307E12_FLI
tgccattgcacaaggattgaaatcattggctcttagtgaaacaagagtcctctcaagaacaattgctgattggtttacatccctttaaattttgagttattcaatacatctgttgaagtttggagttcttcttacaaaggaatgccttcatcaggtctcaacttcccattttgttgaagcagtccactattgtaatgagatgtaaggatacaatgtattatgtatggcacataagagcagtgcatttttgggctgtgctgagctggtcatgctcacccgcaggccctagccgtactacaaatatctgatcaagattggtggtttggggccttacttggatcgtagttgcaagctataaaaagcatcgaacccaaaagtccaagcagctcgatcctgtttgaggtacggtgccagcaaggttaagttggccaaatctgttgcacgcagacagcccaatgggggtttctgcaggctggcgaaagtaaaggcgtgcgataggaaatctgggaatgttttatattgccacattgtaattccacgttataggcgtatagctcaaatacatttggacggtttggaggt

SEQ ID NO: 32412 - DNA, 925 bp, Zea mays
  Clone ID: UC-ZMFLB73307F05_FLI
gggcacagcagtagcaagagggatagagcaaggccacacacacacacacaccactaggctaggttagccttttaatcgtcgtcgagaagcaagaagggcgcgcacgcaagcaggcaagcaagaagagagccgatcgaccgagagctagcacgcgatggcgaggtcttccaagatgatggtggcggcagctctgctggccttggccctggccgtgtcgaccgccgaggcgaggaacatcaagaccacgacgacggagaagaaggacgacgcggtggtgcagccgcagaccttcccgcccttcgaccgcctcggcggcggcgcgtccccggcgttcggcggcctccccggcggcagcattcctggcagcggcagcatgcccctcttcggcggcggctccccgggcttcagcggcttcggcggcatgcccgggtcgcccaccgccggctccgtccccaagcacgccaacaagccctgaacgccaacaagcgtggtagtagagtggtgctactgttactgtagtacgtcgtcgtcttcatgcatgcgtggttcgtggtttcccctagctccatacgagcagtagttgggccttgcacgtaccgtacgtctagctagctatatatatatagcttgtgttctactgccttttagtttaattacctgcctgcattggagagttggatctgtttcatttggtggtgtttgctttactattaggtcagtatctgtttgtggagacttggtgtttaatttatttagccgtttgtgactggttgtagctagcggtggtgcggtggtgatgttcttgaggcatgaataatgctacatgcatgtgatgtatccatgttttgtgtgtggtaaacctgttgtttgtataagctgtatgcatgggtctttaatttgtttttgaagcagggttcacgttatt

SEQ ID NO: 32413 - DNA, 1918 bp, Zea mays
  Clone ID: UC-ZMFLB73308A03_FLI
gttcgttccagctataaaaggccaaggaactgaggagcagcagcacaagtggttaccactggcttacaagttccaaataattgggtgctatgctcagacggaacttggtcatggctcaaacgttcagggccttgaaacaactgctacattcgatccgaagactgatgagtttgtcatccacagtccaactctcacgtccagcaaatggtggcctggtggcttggggaaagcttccacccatgcagtggtgtacgctcggttgataactgaaggaaaggactatggcatacatggtttcattgtgcaactgcgaagcttagaggatcactccccacttcctggtgttaccctcggtgatattggtggaaagttcggtagtggtgcatataacagtatggataatggtgttcttcgatttgaccatgtgcgcatcccaagggatcaaatgttgatgaggctttcacaagttacaagggaggggaaatatgttcactcaaatgttccaaagcagctgttgtatgggacaatggtttacgttcgccagtcaattgttgcagatgcttctaaggctttgtcccgtgctgtttgcattgctgtacgatacagcgcagtcagaaagcagtttggctctcaagatggtggccctgagactcaggtccttaattacaagactcaacagagcagactctttccattgctggcttcagcatatgcatttagatttgtgggtgattggctcaactggctatatacggatgtaactcagaaactggaagccaaggacttctcgaccctgcaggaagctcatgcatgcactgctggtttgaaagctgtgacaacatcagtaacagctgatgcaattgaagaatgccgaaagctctgtggtggacatggttacttgaacagcagtgggcttcctgagttgtttgcggtctatgttcccgcttgcacttacgaaggagacaacgtcgttttgcttttgcaggttgcaaggattctaatgaaaaccgtttctcagttggcatccgggaaacagcctgttggcacaatggcctacatgggcaaagtgcagtatttgatgcaatgcaaatctgctgtcagttcagctgaagattggcttaaccctgatgccatacaagaggcatttgaagcaagagcgctcagaatggcggtaaactgtgcccagaacataagccaagctgcaagccaagaggaagctgcaggtttctatgagcggtccccagatttgcttgaggctgcggtagctcacatccagctgattatcgtgaccaagttcattgagaaggtgcatcaggagattcctggacacggagtgaaggaacagctccaggccctctgcaacgtgtacgcgctgtacatcctccacaagcacctgggcgacttcttggcgactgggtgcatcacgcccaggcagggagcgctggcaaacgagcagctgggcaagctgtacgcgcaggtgcgtccgaacgctgtggcgctggtggatgcgttcaactacacggaccactacctggggtctgtgctggggcggtacgacggcgacgtgtaccctgcgctctacgaggaggcgtggaaggacccgctgaacgagacggtggtgccggaggggtaccacgagtacctccgcccactcatcaagcagcagcagctcaagctctcgaggctctgaagtctgaatcctctctctctctctctctctctctctctctctctgatgtggaagccagccaagatgtgtgtacgttagacatgtgtggtgggtttcagttgatacacgagggagtgagtaataaagagcgagcgagagatgaaacaaagaactgaatttgtatcgtacaacaaagaactttgccgtttggttcacatatttataacgtaatgggtaattgataacgtt

SEQ ID NO: 32414 - DNA, 562 bp, Zea mays
  Clone ID: UC-ZMFLB73308A06_FLI
gttccaggcagccaggccctctctttgctgagccgagatctacgggaagcccacttgcaggtgctcctcggaggaggcggacagagatccagcgacaacagcagcagcagcagcgccacgaacatttcggctgatcctcttctgtcgtcgttcggccttggcttccctacctcagacgcggagcaagcatccaagtcgactgtttccattcctgatgatgcaacgacggtgaaagaagcgcccgctcaggcacggaagctaagtatcgattcgtcgctcacaagtgaagaaagggagctgaagcggaagcaagcccgcgtcagagccacgttcgtgcaggacctgctgctctctactctattcggcgactgatgacgaaccagagcgagcctggtattatcactggaaggtgcagagttgatgtgggcgtgatgtatctttctaagttattgtaagccggtctctgtcttcacaactgacgatctgtgtgtggtacgcaccacgcacgcaagtcgcggttgtgcgtgtacgtctgaactctggagcattggtttgttgtacc

SEQ ID NO: 32415 - DNA, 1355 bp, Zea mays
  Clone ID: UC-ZMFLB73309A09_FLI
gcagaaactgactcacagtcagattcagaagattcagaacctgaaaaacctactgtccctgcgaaaaggcctctagcaacaaataaaaagaatgaacaacgagaaatctgatgacagctctgatgagagttctgatgaaagtgatgaggaacctccacaaaagaaaactaagaattctgcaccttctggtgctgcaaaggctgccactaatgtttcaaagaaaaaaagcagcagtgatgaagatgatgaaagttcagaagaaagctctgatgatgaggatacagaacaagttgaaactaaggaaacttctgtagtcactacccagaagccggcacataatgaacctaaaactcctgccaaaagccaaagtcaggctactggttcaaagactatttttgttgggaatttagcctacagtatagagcgtgaacaagttaaggaattttttgaggaggctggtgaagttgttgatgttcgtttggctacttttgatgatgggagtttcaagggttttggacatgttgaattcgctactgttgaagctgctcagaaggctcttgaatttgttggtcatgacctgatgggacggcctctaaggattgacatggctaccgagaggggtgcatacactcctagcagcgggaaggacaacggttctttcaagaagttcgctccaaggtcaggcaacaccgtgtttattaagggctttgacacctctggtggagaggaccagatccgcaccgctcttgaagagcattttggatcatgtggagatatcacccggatttcaattccaaaggattatgacactggtgtaagcaaaggaatggcgtacatggatttcaaggacccagattccttgaataaagcatacgagttgaatggaaccgaccttggtggctacagcttgtatgtcgatgaagccaagccgagacctgataacagcggtggcttcagtggtgacaggggtggtggcagagggaggagtggcggcttcagtggtggcagaggagggaggagtgacagggggcgtggtggtagccgtgggcgtggatttggaggccgtggtggaaggggtgacagaggccgtggtggaaggggtacgcctttcagacagaccgctggtacagctagtacaggaaagaagaccacctttggtgatgacgattgaagatccatggctggctattatagtgaaaaacgcaaactatattgtaccgttcagacctattgttatctgaggctgtactgcttttttgcttgataattcgacaattgtttttaccatttttaacatttggtgctatcaaagacatgactttttaagtttttataatatgagtagcggcaagttc

SEQ ID NO: 32416 - DNA, 1327 bp, Zea mays
  Clone ID: UC-ZMFLB73317A03_FLI
ctcccatatccgctcccctacctctccagcatcctcccgtctccgtcgtctcgtctccgctcctcacctcgccagccatgggcaagatcaagatcggaatcaacggtttcggaaggatcggcaggctcgtggccagggtcgccctgcagagcgaggatgtcgagctcgtcgccgtcaacgaccccttcatcaccacggattacatgacgtacatgttcaagtacgacaccgtgcacggccaatggaagcacagcgacatcgccctcaaggactccaagacgcttctcttcggcgagaagccggtcaccgtctttggcatcaggaaccccgaggagatcccgtggggtgaggctggtgctgagtatgtcgtggagtccaccggtgtcttcactgacaaggacaaggctgctgcacatctgaagggtggtgccaagaaggttgttatctctgccccaagcaaagatgcgcccatgtttgttgttggtgtcaatgaggacaagtacacctccgatgttaacattgtttccaatgctagctgcaccacaaactgccttgctccccttgctaaggtcattcatgacaactttggcattattgagggcttgatgacaactgttcatgccatcactgccacccagaagactgttgatggaccctcagccaaggactggagaggtggcagggctgccagctttaacatcattcccagcagcaccggtgctgccaaggctgtcggtaaggttcttcctgaattgaatggcaagctcactggcatgtccttccgggttcccaccgtggatgtgtcagttgttgacctcactgtcagaatcgagaagggggcctcttacgaggaaatcaagaaagctattaaggctgcttctgagggcccactcaagggtattatgggctacgtggaggaggatctggtttccaccgacttcaccggtgacagcaggtcgagcatcttcgacgccaaggccgggattgccctgaacgaccacttcatcaagctcgtctcttggtacgacaacgagtggggctacagcaaccgcgtcgtcgacctgatccgccacatgttcaagacccagtagagagagatatttctgcctccctatcgtgggtcgtccccaatggcctttggtcgcagaccatctttgctgcttgtctatgctgagaataaatgtgaacggtgcccctggacgctggatccatgctggttttggacacgttgtctttttgtgtttaacttatctgctaccgtcctgtaacgaattcactaagttctagttcttttgtgctttgttaagaatataaacaatgaggtttc

SEQ ID NO: 32417 - DNA, 1754 bp, Zea mays
  Clone ID: UC-ZMFLB73317A04_FLI
tggccacctcccgttttgtgggtgaatttgcatgctggcggtcgttatataacttcattgttggaagaatgtcagctagtgttcaccatattcttcggtggtgtttgctcacttgccaagattcagtggccttatatggtgttggaataccttgctaatttgcatgtgattcatgggaaaattcatatgcatccggtacaagtttgtgtcaggtcctatgcagtgatgccatctgctaagggtcttgtggcagagacgcacctccacttcatcggcacctacaggggcgtcgtcagcaccgccttctgtactgagattgttgagtctgcagatgcctatatctttgcaggctccattttcaaggactacagctccgtcggttactcattcctcctcaagaaggccaaggccatcattgtccagcctgagcgtgtgggagtgggaaatgggttgtcattcagatgtttgatgatgaaggagtactggactgaaattgctaagaaggttaaaaagaacaccactacgtatgagaactacaagaggaactttgtacctgaagggcaggcgctggagagcgagccgaatgagccactgcgagtcaatgtgctcttcaaatacatccagaagatgatgacagttaatagtgtcgtgatggctgagaccgatgattcttggttcaactgccataagctcaagctgccagaaagctgtggatatcaattccaaatgcagtatggtttaattggatggtcaatgggtgcactgcttggctatgctcagggtgcgaatcataagatcttatcaccattgactgccttgcatcctcttgtcgcagtttgctatgaccatgatattataatggatgctgccggttttggtgatgagctggtggtcatcagcttgggtgctgactgccaaattattgcatcctaccacaggtggcctttcggacagactggaactggtcatttctccccaattggtggctaccaggttagacaagatatggtgctcatcttggatgttgctcgtttcattccattacaatttttttgggaagccatgaatacaactaatgactcaactctgagagggtccatgcttatatcaagaaaggttgcagagtcttcattgttgtacacagtgagttgcagagatgaaaactggaaaatcatgccaaagttttgtgttgaagatttaccaagtcttctgaaggcagggattggtgcttgcgtgggcttggttacctctggtctgagtgttgtcagcagtggccaaggcaatttttcagtatttgtttgggatcctggtgatagcggcttggttacctctagtctgagtgccgtcagcagtgaccaaggcaaattttcagtctttgtttgggatcctggtgatcgtggcttggttacctatggtctgagagttgtcagtattgcaagagttactgctattatgtcaggcacatatgcaagaggtgctgctacaacttcctctccgaagatgcgccagacccagttcagatggagggccgaggagaggcatgatgcattcaacaatgatgctaatccacagataaagttgatcctacaccgtcagcggcttgggggcaagccgtatttcaaggagtggggaatgttagatatattaggtgtagtagatgagctatgggttatgtgggcttgaggagatataaatataggctgagtcagctgtaaaaggcatcaaacaacgaaatacaaaataccaatttactt

SEQ ID NO: 32418 - DNA, 938 bp, Zea mays
  Clone ID: UC-ZMFLB73317A06_FLI
gattttagccgccgccgctgctcatctcacatccctcgagaagacgcctgctcctcgccgatcgatacgatggccgtcttctccgacctccacaccgccgacggcctcaagtccctcgaggctcacctcgccggcaaaacctatgtgtctggtgactccattactaaggatgacattaaggtcttcgccgcggtgccgtcgaagcctggcgctgagtttcctaatgccgcccgctggtacgagaccgtctctgcggctgtagcctcaagattccctggtaaggctgttggtgtaaatctgcctgcgggatcagctcctgcggcagctgctcctgcggatgaggctgaggacgatgatgaccttgatctttttggtgatgaaactgaggaggacaagaaggcagctgatgagcgtgccgccgctgccaaggcctcttctaaaaagaaagaaagtggtaaatcctccgtccttatggatgtcaaaccatgggacgatgagactgatatgaagaagctggaggaggctgtccgcagtgtccagatggagggtctgacttggggagcatcaaagcttgtgcctgttggatacggcatcaagaagatgactatcatgttgacaattgtcgacgatcttgtgtccatcgacactctaattgaggaccaccttacgcaagagcccatcaatgagtacgtccagagttgcgacattgtggctttcaacaagatctagagttcagtttctgagtttgggcaacggcagcggctcagctcgtcaagtttgtgctgggatgccagtttatcccttctagtctattacagaaatgttgttcggagctgagtctattataaacatcttggtctgagtttattgttgagtggtgccagtttttttcaatatacatttatcttaaaaacagcggtactgatgtttttttgtct

SEQ ID NO: 32419 - DNA, 622 bp, Zea mays
  Clone ID: UC-ZMFLB73317C05_FLI
tgacaaccatgatcaacttgttaagatagccaaggtacttggaacagatgggctgaatgtctatttgaacaagtacagaattgagcttgaccctcagctcgaagcccttgttggaaggcatagcaggaaaccctggacaaagtttattaatgcagacaaccaacacctagtgtctcatgaggccatagatttcctcgacaagcttttgcgttatgatcatcaggacaggcttactgcacgtgaagctatgacacacccatacttccaacaagtgagggctgcagagaacagcaggacgcgggcatgagaggccaaagaccaaagaggcaaagactggtgctaaccgtggatcagatcatctgctcttggtggagccatgctcttaccagtgatgaatagtggtttgggggtttacttggcaaaaacaaacagtagctatggcgcctgttgtacccttaaccgcgtcgagacgtgactgaattactcaggtcatcggcttgtgggacgtgattgcgaacgagattattcatgtaagatgtttgtcataaaaggtcgtcgttggctgattgtgctgtttgtattgttgagctagtaaagaatatccaaaatttgtttggacttc

SEQ ID NO: 32420 - DNA, 1256 bp, Zea mays
  Clone ID: UC-ZMFLB73317F06_FLI
cttggttggagggaactatggcctgctcaacacgactacgtttgaaccgaaccctgactactacaagtggactagccatgcataagtttctctctctcttctctcacaaagctgggatactgagtgataagagagggagaaattgtgtgctcaatcccgccatgaaaacctagcatctttctgctttagggggtttttggttagggggactaaagattagtctctagtttttagtctcatttagtccattttttgccaaacactatgactaaaatatagactaaaatgatttagtctttagtccttcacatatgtgctaaaagagattaaatcatattaatttcacttttacccctcatttagttcaattgtactaatagtaggagaatgttaaaggtcattttagtcttcttacgagtcatttagtatattcttactatttttatcccatagaatcaaaaatgttagggactaaactttagtcccctaactaaactttagtccctagactaaagaaaccaaacatgaccttaattttctctgtagcgctctactgtggcaccgcctcatgggcaccaaggtcctctctgcgacgttcaacggcacgaacaagatccgcgcctacgcacactgcgcgaagagatcgggaagggtcctctgctcctgatcaaccttgacggcaacagcacgaaccgcatccacgtcacgagccaaggcgcacaggcacagagtgcgcggagggagagagcggggggacgcctggtcgcttccctttccctgcgcttggcggagcagccgagctgctcgcaacaagagaggagtaccacctcgctcccaaggacggcgatctgcagagccagcaggtgctgctgaacggccatgttctggcaactgacgccgacggggacatcccagagctggagcccgtgcgggtggatggaacgcagccggtaaccgtggtccgtgggcccttactcgatcgtgttcgctcacatccccggcttctacgctcctgcctgtagctagaatttttacaccccagccttttccttcctggtgtgtatcataggttcggataaatccgggcgaacggcgaagcttgttcgcctgtccgtgcgtgaagtaaagctgcgaggctgaaaggtgtgcgatttgtcattgtttgggaaacaagtgttcggataatgtgtgagcaaaggggaggaaagtggagatgaaaataataaaaggaaaaaaaaggtttcgaatttttctct

SEQ ID NO: 32421 - DNA, 1834 bp, Zea mays
  Clone ID: UC-ZMFLB73317G02_FLI
cgcagagcacagcactccacctcactgctccagtcgcgagccgcagctgcgcgtcgcgtcgcatcgcacgcatctctcctgccctccagctccaaagcttcgtcgtctgcgtcgccccgcgccccgtcttgctcgctccaagctagacaccataccacccaggtgacttcgcgcgccactccttccttccctccctttccccacagctttactctcccctcccgtgtccagatcccgaggcccctctccctcgatcgccgcctcccggtagcggatccggcgccggctcgcgccccccgacaggttttgttttatgcttgttcatttgtctatggacaatggactagttgctgcactgcttttgtgagtcaccatgggaagcagtggagcagatacatcgtctaagccaaacaaggcatccgccccacaggagcagcaacaacctgctacctcaggtgctgcaacaccggctgtttatccagactggtccagcttccaggcatatcctccaatcccaccacatgggttcttcccctcacctgtggcatcaagtccacagggtcatccttacatgtggggagctcagcctatgattccaccatatggagcaccgccatatgtcatgtaccctcctggagtgtatgcacacccatctatggcctcgggtgcacatccatttactccttatgccattacttctccaaatggcaatgctgatgctactggaactactgctgtagcttgtgatactgatggcaagccctctgaaggcaaagataaaagtccaactaagagacccaaaggaactttgggcagcttgaacatgcttactggaaagaaccccagtgaacatggtaagacctcaggtgcatcagctaatggagccacttctcaaagtggcgaaagtggcagtgacagttcaagcgaagggagtgaaggaaattctcataatgattcatacaagcatagtggacaggaacaagatggagacgtacgaagttcccagaatggtgcatcacgttctccatctgagggaaaatttaaccaagctatggcaatcatgcccatgccatcaagtggcccagtaactggtccaactacaaacctgaatattgggatggactattgggccaacacagcaagctctgctcctgtaattcatggcaaagtgaccccaacaacagttccaggggctgtggtcccagcagagcaatggatacaggatgaacgtgaactcaaaaggcaaaaaagaaaacagtctaatagggagtctgcacgcagatctaggttgcgtaaacaggctgaatgtgaggagttggctcaacgtgctgatgttttaaagcaggaaaatgcttcacttagagatgaagtaaaccgtatcagaaaagagtatgaggaacttctatcaaagaataattcactaaaggaaaaacttgaaggcaaacaacacaaaactgatgaggcaggacttaacaacaagctgcaacattctggcaatgacatccagaaaaaaggaaactaatcgagctatcatgcaatgcttgcatagcatggccctaactagattattgggaggcgcaattgtagtatgcgtgttaactccttactttattgcagttaattgttaccaggttgtgataatgttgatgccaaccttgtgtgtgggtgtttcctgtttcagatctatcttggcttatcttttagaagtcaagatgtgactgaagatgtaggctgtgacccagttcactgtatctgaaatagtggataaactcaaatttacaatttgtattgctgactaatattgttatgtatacctggcaaaaggttttctttg

SEQ ID NO: 32422 - DNA, 2513 bp, Zea mays
  Clone ID: UC-ZMFLB73318A03_FLI
caaaaaaacatttttccatcaccaacagaggaactgcgatttagcaagcgctgcgcaatgttgatgacctccatttttagattacttgttgtttctagacccgaagagtgtaggttctagtaattatttgtgcctagctctatattttttctttaaagaaaaaggaagaaaagcattagaatctttcacgttgaatttagaagaagctctatcatcaaacaattttttattgagaaatatttttccaaactttttcgagcagttctctaaaataaaccatggagctgagagttaaaaaaagcagcttcttctcatttagttgatgcatggaatcctatatgtgtcactgagtttactttaaagaattacagagaatcaatctctgatgatcaatgaatcaccatacacaaagaacacaagcaggaagagctcaaccaatctatctcttgctagctgctagggctattgtttccattttgcagactttgtgattcgtaaaattctttggttggtgaaaatagaatttttctaaataattaaatatttatattgtcaaataaaagcaccagcaatggtacctccatgttcatgtttataattatctgtgattcttacatatttcaattactatgcttatttgttaaggttaagaagtattatcatgtgacctgccttttgtccacctgcactgcttgttcgtagatgtgcatgcttgtccctcttgcactgcttgtctgttacctgcagcaatctttgccaaacggacacagggaacctatgcccccacaggattgcacaacacgtgggataggtaatgcaggtattgcccccgctggctgtggctggccggtgtgcaattcactaggctgccaaatgagccctaaaggccccagcatgggcgaccctctccagagtgattcttatcaatcttgcattggaaaaacacggagcctattattatcagggaagcatttgagccaaagtactatgtacatcaccatgcttttatgtgactatatatataaatataacaaataaagttttattggaccagttctttgaccatgccattggtatcaacgttccaaggtcccgcttcctaccagttaaggcgacatcagatttgaagctagtacagtctgatctatataccttggttgatggcttcgttacacgtaattcagccagaacaaatccatcaaatccctcaattgaacttggtcctgagttcaagaaggttgggagcttccttggtcgcttcaagtccatacctagcattgttgagcttgacatcttgaaggtttccggtgatgtttggttcggttctggaattgtactgaaggggaaagtgaccatcactgcaaaacctggcgtcaagctagaaatcctagacggagcagtgattgggaataaggataattttggaaaaggaaagagaaaacaataccagatgccttacaacctgaattagggatgaaactgctaattgcacatggaagtcaccaagaacttggtaaaggtgattcaatgacaaatctaatgattaacatgtgcgatgtggttcacatgttaatgcatgcaactgaagtgcattaccaatgtcccaagagggtaagggtacagtctgatgtatctgaaaggattgctaatggaactagtgttcatgtaaatactcatgttcaaaatttgaatctggatattgaagagcaatcacacaaacactcgatttcacacatcgaggagccaaacactaataattcagaaggatccctggctggtgctgctgtctgggatgtatttcgcaggcaggatcttccaaagcttaatgaatatctagctgttcatcgggaagaatgtgcagctagatgtcaagcagtgtcttctgttaaatatcctatttatgatcaaacagtgtaccttaacgattatcataagaagatgttgaaggatcaatatgagggactgaagacaatcgagcagattacaatggactcagcttcggtcgagaccaatatgttcaagctctgcaaggtgaggtttgttcagtttggccaaaaaggcatcccctacctgaacacctacgatggtcgcgccatccgctacctcgacccgctcatcaaggccaacgacaccatcaaaatcgatctggagaccaacaagatcatggacttcatcaagtttgacgtcgacaacatggtcatggtgactggcgggaggaacaccgagcgtgtaggagtcatcaagaacagggagaagcacaagggcagcttttgctgcttggagctttttgctatgtctagttttctcctatttgttgtacaggaaaacttagaatagaattcaaatttggtggtcacaaaagtgtggagactttaattcatatataaagttaggcttaacattagtgcaaacagttgtattttagtttagatttagagtacacttatgtatgcgttgtttgacaatgcttatttatgatatattgaatggtacttatttatattatattaatt

SEQ ID NO: 32423 - DNA, 1244 bp, Zea mays
  Clone ID: UC-ZMFLB73319A11_FLI
gaccaaggccggcctgccgaggcctctccgcgcaggcggcggcgttggcattgtctggccggcggcgttgccggaccacccattccacaagaagcaggacgctgtctggccggcggcgttgcctgaccacccattccacaagaagcaggacactggcgggcctgcggcggaattgccggaccacccattccacaagaagcaggacgctgtctggccggcggcgttgcccgaccatccattccacgagaagcaggacgttgtctggccggcggcgttgcctgaccacccattccacaagaagcaggacactggcgggcctgcggcggcattgccggaccacccattccacaagaagcagggcgctgtctggccggcggcgttgcccgaccatccattccacaagaagcaggacgttgtctggcctgcggcgttgcctgaccatccattccacaagaagcaggacactggcgggcctgtggcggcattgccggaccactcattccacaagacgaagcagggcgctgtctggccggcggcgttgcccgaccatccattccacgagaagcaggacgctgtctggccggcggcgctaccggatcacccgttccacaagaagcaggacgctgtctggccggcggcgttgcctgaccatccattccacaagaagcaggacactggcgggcctgcggcggcattgccggaccactcattccacaagacgaagcagggcgctgtctggccggcggcgttgcctgaccatccattccacaagaagcaggacactggtgggcctacggcggcattgccagaccactcattccacaagacgaagcagggcgctgtctggccggcggcgttgcccgaccacccattccacgagaagcacgacgctgtctggccagcagcgttgcccgaccacccgttccacaagaaggaggatgctgtcgggccggcggcgttgcaggtggaccacaagatgcacgacgcggtcaagcgggcaggggagccggatcccggatacgtcatgtatccggcatggagccccgtccgcccctaatcgtcgattcgttgttggagaacgacgacgctccgccggcaacggcgaatgccacatgcatacatgctcgtggctcccatgcgatattaagcactagtagaggaagtgtgtgatgtgtcaacgtgctactgctatactgtatatgcatgcctactgtatatgcatgcctattctcacgtttatgcat

SEQ ID NO: 32424 - DNA, 1145 bp, Zea mays
  Clone ID: UC-ZMFLB73319D05_FLI
ctcaagtgttcccagtgacaaaaagtacagaaatgaagataatgtgagcctgggcgatcagtcagatggggccgtcatgccatctcccacaaagaagctgcaaatatgcaaaggcccttcagatgcaccttcaattaggaaatcaactatcagaatcctgggtgttaagggagctgctctaccacccacagggaaatctcaagttgaaactcggaaatgctttgctaatgctacagcagaagtgatttctgctagtacaaacgagatcagtgagccagataatgcagctgccccattgcttgcacagcagttgccaccagacactgcaaagaactccactgtcatcatgcatacccatgaaacaagtaaagtcaatcagttggctgctacatggccaagggcgaactttcaaactgattacaacaagaagccttccaatgtacccataatggctaaccagcccagtgggttcgctggtgcgactgctcccttggtgacaccaaagatggaaatcggaaacatgaaggacagttccaatcctctctcaaatcctgcttacgcaagggcgcttgtaataaagcagcaagagcagctccttcagcaatataaattgggcagttcaccgcagcgacagcatcatggacagcatctctacatcaaagggccagctctgtttgagaatgatgacccgccaccggtcaagccgctgggaacaaggtgccagctctgcaagcttgatgttgctttccggacacaaggggatgctggccgtgatgccaatgctccaccagtcattgcagttttggcatgccaccatgtgttccacagcaggtgcattgaatctgtttacgggctcgctgagcctgctgagtgccttgcctgcctggagtccggtgcagcgcactgattgctaaccagatacaccaggtataggataaagtttcctcttatattgcgtatagagagggtgcagtatcatctccattgatacaagtttccgatggtataacggtgcaggtcaagagtctgaagtgctccatttctgtgggcctttagatggtgtaagtaggctaccattggagttcaatagggagctgaattatgggacatgtcacatgtctgatatatatgtttatttatttccc

SEQ ID NO: 32425 - DNA, 1518 bp, Zea mays
  Clone ID: UC-ZMFLB73319E06_FLI
ttcttgctatccaatccatccataaacataactacatccacagagatattaagcctgataatttgcttctagataaaaatggtcacatgaagctgtcagattttgggctgtgcaagccaattgactgttcaaagctctcaacgttgaatgaagatgaacccatgggtgatgacaacatgagggaatcaatggatattgatagttctttgtccaatacagcaaatggtagaagatggagaagtcaacacgaacagcttcagcactggcagatgaacagaagaaaactggcattctcaactgtcgggacaccggattatattgctccagaggttctgctgaagaagggatatggaatggaatgtgattggtggtctctaggcgcgatcatgtatgagatgctagttgggtatccaccattttatgccgatgatccaataactacatgccgaaagattgtgcactggagaaaccatttgaagtttcctgaggatgcaaagttgtcaaatgaagcaagagatctcatttgccggttattatgtgatgttgaccacaggattggcagtgcaggggcagatcaaataaaggcacatccttggttccaaggagttgcatgggataaactttatgaaatggaagcagcatttaagcctcaagtaaatgatgagctggatacacagaatttcatgaaatttgaggaactggaaaatcctccagccaaaacaggctctgggccttcaagaaagatgatgctgaactccaaagatctgagctttgtggggtatacatacaaaaactttgatgcagtgaaagcaataaaaatttcagatctgcaaaggaattcatctctaacaaggccttccattggttcgatattcggtccatcaggcatggattctcccatggaaccaaacggaagggacacacacatgcacacagtttcatctggtgacccaatgattccctaaccttcagtgccgtctgtcctcagcaaatttccgaactaaatcagcgtgcaaacgccagggtgatgtggctccagctggacaacatgcttatttttagccaggtctctgctctctttatcgtgggcaagcggtttgtagaaatccaccaaagtttctagttgtaaaatagtatgccacagacttcaacaaaggtcccatgcattattggctcatcagacatgggggcagtttttttttggagaaattgcaccttgcggctggctgcccaggttggcagagcaaattgcggccttctcttgtggcagttcccggtctgcaggaaagggaaatacgacggtgttgttgcagcaggaattctcatggttagtgtcgttgttggtgtttgatatgtatcaggaattttcacatttgaagtagggtttctgttagcagagttgtagctattgacaagcaacatccttttacggagttgctttttttcgttgatgtatggaaaacgagacattgtagaaatcgaagttcgatctagccttgtatgctgcttatctgattc

SEQ ID NO: 32426 - DNA, 1245 bp, Zea mays
  Clone ID: UC-ZMFLB73319G09_FLI
gccgccatctcccggaatgacggggtgacgaaaccgcgccgcaccagacaagacagaggagccgccgccgcgacccacaggccaccgggtcgccgaggaggggatccagcgagccatgtcgaccgacgtgcccatgagccccgagctcgagcaggtggacggcgagatccaggacatcttccgcgcgctccagaatgggttccagaagatggacaagatcaaggactccagcaggcagtccaagcagctggaggatctcacggccaagatgagagagtgcaagcgcttgatcaaagagtttgaccgtatactcaaggatgaggagaaaaagaacacccctgatgtcaacaagcagctcaatgacaagaagcagttcatgatcaaagaactcaactcctatgtgaccttaaggaaaacgtaccagagcagccttggtaataagaggatcgaactattcgatacgggtaatgaccaggtggctgagggaactccagttcaaatggcatcagaaatgtcaaatcaagaactcattagcaccggaaggaaacaaatggaccaaactgatcaagctattgagcgctcaaaaatggttgtagcacaaactgttgaagttggagctcagactgctgcaactctgacacagcaaacggaacaaatgaagaggataggcaatgagctagattctgtccacttttcactgaagaaggctagtcaaatggtgaaagagattggccgtcaggttgctactgacaaatgcattatggcgttcctgtttctgattgtctgtggtgtcattgcaataattgttgttaagattgtcaacccgcataacaagaacatcagagacattccgggcctagcacctcccgccatgaacaggaagctgctgtccatcgacgctgcaggactctgagcgttgtgaatggctgcctcccgcagcacagcgcaacgcagcgcgtcagagttctcttatgagccacgatacatggcttcgcgattcttttgtgcttgtagtttacgtccgcccattctttccctattgcattggtgagtagtagcctcaggtttgtagcgggactcttgttgtttattgcttgcgagcccatagctttctggttgtttgtgtatatgcggtagtgatgtgaatgtgagagtcgagtggagattcttcatggttcgttcttatgagttgtgactggtttgtgagcttgtggtgaaaggttcgcagcttgcttggcatgcgtc

SEQ ID NO: 32427 - DNA, 1548 bp, Zea mays
  Clone ID: UC-ZMFLB73319H11_FLI
ttctttttgctaaatgttctttagcaatttgattagtcaaagaggttgcttgtttttttgtgggaacgagattcgggactcaggagctcacttgctcccactatgacattgtatatgtaccagacacttgcatatactaattgttttcttttaaatgcactttacttaattatactgacatatgtcattggagctgtgatgcctcatccatccctaaagatgtatagaattcatcgcttggatcaataagtgttgtttaacaggcagaaatgggtgcttaggatcttaccactgtttatttaaaatttagatagataaagagcactgaagattgttagttaattaggaccgacgctttgaatcattagaccaaggaatatgaatgcgcaaattcaaacgtactacaccttttttgtgctttctttttaggacaggagtaattgtccatcgtaacgggggtagaaagtgcagaacgctcattgttctctttttcgttgtctaaaacgttgagtttctgatctgtataagactacaagttgctcagagggccttttctggaaccatttccctcgaactgattttaattgtttccttcttttccttatccacaataccaaactatgttacataaaaactaaatgatacgctgactgctcagaataaaaaaagtggtgctacgatcctccgtctgacttatgatcgcttctcttttcttcagccacttttcttttttgttgtctagaaaacaaaaatatattgttagtgaccagattgtaatagaaaatattgtctgctttattttctcgtcattagataaattatatacccttaaattgcttttgccattgattctagcatatgtcattaactaatgtttttaccacctttttctagaacgcttgtttgtctttgtcactttctgcaaccttggttctgatgttgcttgtcattcatttctcagcgtcgggcttgtaacttgtgtttcgtttgcttggtccatttattttggttgtctgtagggaagagacgacgacatggatgtagattccattctttgtgtgagcactaccgccatatagttgacaacgatgaccgacactgtagattccattctttgtgtgtacaccaaggtatcggtgtctacgttgatctggcgatgcgcttttcacggttactgcgaccgtgatgggcatctaggtgctcaaaccattagttggactgaggaacacggagcagcagcaacaatatcgtaaggagagtgcagaagttggacaaatggaagtagctcttccactactggagcaattgctggtggagtggttgctggcgcagccttgctatttgctgttcctgctatcagttttgcctattggcggcacaggaaaccacaagagcattttttcaatgtatatggcttcaaagttagtctttgattattatctttcttgcaacataagggcaaacaacgtttatatgtagcaaacaaatacagtttgcaaacgttttaggaacatgtttttacaataaagatatacttatagtttcacc

SEQ ID NO: 32428 - DNA, 638 bp, Zea mays
  Clone ID: UC-ZMFLB73325B01_FLI
ccgagatggtggcgctgtcgggggcgcacacggtgggcgcggcgcgctgcagctccttcgcgccccgcctctactcgtacgggcccagcggcgcggggcaggacccgtccatggaccccgcgtacctggcggcgctggcgcagcagtgcccgccgcaggggaccggcgccgccgacccgcccctccccatggaccccgtcacgcccaccgccttcgacaccaactactacgccaacctggtcgccaggcgcggcctgctcgcctccgaccaggcgctgctcgccgacccggccaccgccgcgcaggtgctcgcctacaccaacagccccgccaccttccagaccgacttcgtcgccgccatgatcaagatgggtgccatacaggtgctcaccggcacagccggcaccgtccggaccaactgcagggtggctagctagctagctcatccatgagaatgtacctgtagactcatgtgcttaaaatcatacgacgaaactgtacgtacggcgtagagtggtgtggcggggtccaatgattcagattgtacgtacgtgtccatcgatccaactgtagttgtgtacgcagtacagtacgtgctagctacggatcagttgcttatatatagcttgtgcgttttt

SEQ ID NO: 32429 - DNA, 1026 bp, Zea mays
  Clone ID: UC-ZMFLB73325C06_FLI
cccctgctcctgctggggcaggagcagcgcgagatggcgcggcattgtggaggcggccgtgagggtttggccggacagctcgctcgctcctgcccctgctcctgctggcctcgccggcggccacgcgcctggcgtccgccgcctgcgcgggcgagaagttcccggcggggcgtgcgtacgcgtcgtgcgaggacctgccgaagctgggcgcgtcgctgcactggacgtacgacgcgtccaagagctccctgtcggtggcgttcgtggcggcgcccgcggcggcgggcgggtgggtggcgtggggcctgaaccctacgggcgagggcatggccggcgcgcaggcgctggtggcgctggcgggggccggggccgcggcgcccgccgtgcggacgtacaacatcacggggtacgtcccgctgggcaaggcctccacgccgctggacttcccggcgaccgacctcgccgcggacgccgcgggcggcaagatccgggtgtacggcaagctgcagctgcgcaaggggatgaaggccgtgaaccaggtgtggcaggtcggcgcgtcctccacgggcggcgcccccgacaagcacgcgttccaggcggacaacctcggcgccaagagcaagctcgtcctcgccggcaaggcccccgcggcggccgaggccccctcgcccgccctcgcgcccgaggccggcggcccgtccgcgggcggcgacagcggcgcgggcgcgtcctcgtccacggcgccgtccaagtcccccaacgccgccgtgcccgcggccggcgtgtccgcgcccgcgctacttgcgctcgcgctggtggggtttttggcggcggtatggtgacgcgtgaatggtggagccatcatcccggcgaaggtggcggcggcgggctggggacgaaatatcgcgctgttttctttttattggggttcgtttttaagctttgtttttggccgtgaaataaaaatagttgctgtacttgttgagctgttgtttggtagagtcatagtgacgatttattattact

SEQ ID NO: 32430 - DNA, 680 bp, Zea mays
  Clone ID: UC-ZMFLB73325C08_FLI
atgttccgggcgaagactagctatagtattgttgaggctgctcatatggagctagcggagcctactataaaggatgcttttggaaaatgtgtgcaacaaggagcatcacgagttattgtcagtccatatttcctttcccctggacgacactggaagcaagacattcctgctttagcagcagaggcatcaaaggagcactcaaatataccctatattgtcactgcccctcttgggctgcatgagcttatggtggatatcatgaatgatcgcatcaagtactgcctgcgacatgttgcgggtgatgtcgatgagtgtacagtgtgtgctggaaccggaaagtgccgcctgtactcctgatggagcatacctgggaggcacatcgatactgttaccatttattatgagatctggagaatacgagatctgaccatattctgagcagatcgtcagaattagacaagtgccaaattagttatgctgtgcatgcttgcgaacatcaataatggtagagattcattagctaatcttgagtttatttacataacgaacaaactcagtcaagtgctctgatatttccattcacatgtaatctatattcctgctaccttgtagttgaatgaattaacatggatcaaatgataatataatgtgcgcttgtttgatttgccagttttttgttt

SEQ ID NO: 32431 - DNA, 1955 bp, Zea mays
  Clone ID: UC-ZMFLB73326B04_FLI
ggaattaaaggagggcgcggcggtggcgagcaccttccgctcagcgaggtagctgcacctgcaccggcgagctagccgcggcctctatgctcgcggggatctgaactagccgccgctgccccatcgcggcgatgactgcggcgccctctcctcatatcccattcccaacacaacactcattttctccattcccacgtaaaagatagaaaggcgagcatcgcagtgcacacgcgcaatggaaggctcgccggtggcgcgcctcccggaggctaattctctccccgacggcttcgtccccgacagcgagagctcagacacggacgcggctcctccctcctccgcgcccatagttgacgatgcaatcgactccgatagtcccgacgccaccaaccccggtggtgaggaaaccctaagtgatccctcccttcccgcgtccaccgccgaagatgcctcctcagccgccgctgctgaagcattggacacactttgtctggacgttgttgcggatccggagcgcgctctaggggagcacggacccaccactgctgcaagaggtgaaggatccttgaaggaaaatcgtgcatcagagcaagtgggcgctccaagtgatcaaaaggtggtcaaggggagcggtgagccaaaacgcaaggtcatcaagcatagcaagcttgagaaggacaaagagttatttcaactagcccagcaataccacaaagtggttgcagaaagggatcaagccattgcagtcaaagatagactagaatctctttgtagggaatttcagcgtcaaaacaaaatgctaaaggaagagtgccaaagggtatcgacagagggacagaacatgcgtacggaattgtctgaaaaatttgatcatgccataaagggtgtcagtgccaaacttgaggagcagagagttgagcgcatttctcagctagaagagaacaatacgttgagaagtaaactgaaagaccttgctgatcaatataacattactcagcagaaatatgctcaccaattgaaagagaaaatgctggaacttgaacttgctgatctgagacttcaacaacatcaagagaaggctgctcaggaacatacacaaatgcagttgtatgctgaacaagtttctcagcttatgactactgagaagaacctgcggttgcaactagcttctgacggggaaagatttcagcactttcaggatgccttgtcaaaaagcaatgaagtctttgaaacttacaagcaggagatggaaaagatgatttcagtgataaagaatcttaagaaggagaacgaatttctgaagggaaaatgtgagaactcagatattgctattgtgaagctcattgaagagcgtgagctaacaaagaagcaaatagagaaattgaaaaatcaaagggagaagctcgaatccctgtgtcgaacactacaggcagaaaggaaacaaggcccctccgccagtattccagatgccccttctagccaagaagtgtcagcgacaagtcaagaatcttaacattccagttgccccttctagccaagatgtgtcagcaacaagtcaagaatcttggcagttgtgcttgtcaatataccgttggtgccagctacagcttgcggagatttctgaagcctgacattcagctgtcaacctaccgtccgtctcaggccttttgatattgtggctagagcctagtggtgcattcctactcggtgttgttaccaagcatataagctctcggctgattccatctcttgtttttgtttgagacaaagcctgctgcattggagataattagatttttgccaatcataatattgtcttcttgttataattaccactgtgtctatgaattgtgggtctagctgggtctatgaaatgtgagtctgatgacaattttacaaacttgtttcttgctgatggtaaatatcagaatctctcgctgcattgtgagtgtgtt

SEQ ID NO: 32432 - DNA, 1602 bp, Zea mays
  Clone ID: UC-ZMFLB73326D08_FLI
ttggtcatgcccttccctcccatcaattcttcaatgctgcgtaatccctactgaaagaggcaccaatcagccattctgcaacttgccttcccgtgcttgcctcactgacatgaactcatcgtctttcttcctctgatccataagatctggccaacaagatcggtggcgcacaggtatcgggtcatcacttggtctctgaattctcaggattggagttgaagaagagcatcatgcttggtgggcagagcgagaccgtcaagtacagggtctttgctggaacatggaacgtgggcggcttggcgccgccggatgacctggacttggaggattggctggacacgaagaacgactcctacgacatctatgttcttgggttccaggagattgtgccgctgaacgcgaggaacgtgcttggccccaagcagaggcgggcggccatgaagtggcagctgctcatcggcgacgcattgaacagcacgaggcatggagctgcaggaatgcatggtcaaggacaggggggcgcgttcaggtgcctcatgagcaagcagatggtcggaatcttcgtgtcggtctggacgaggagcagcctctgccggcacgtccgccaccccggcgtgtgcagcgtcggcgccggcgtcctcggccggctcggcaacaagggcgcggtgtccgtccggttcttgctccacggcacgagcttctgcttcgtctgctgccacctggcctcaggcggcgagaagggcgacgcgctgcgccggaacgccgacgccgcgggcatcctctccaggaccagcttcctcggcttcggcggcgtggcggcagcacccggtgaggtgcccaagaagattcttggccatgaccgcgtggtgttgctcggcgacctcaactaccggatcgccatggacgatgacgaagcacggcagctggtgagggccaggaaatggggcatgctgctggagggcgacgagctgctgctggagctctccagtggccgtcagttccacggctggcacgagggccacgtcaccttcgccccgacctacaagtatagccgcaactccgaccacctccactggtgcgctgacggcgtcgccgccggccgcgagaagcagcaccgcgcgccggcatggtcagacactgacgcccaggcccagcccgctcgacatatccatgcaagcgagatggtttcgttctcacgctgttcgccgctactgctatttaattatttgcaggtgcgaccgcatcctctggcgcgggaaggggatgaagcaggtccggtacgagcgctgcggttgctaccggctctccgatcaccgcccggtcagggctttgttccacgccgtgtgcgaactggcggatggctaagctgtaggctagcttgcgtgctttgaatgaaaagcgtttaattaacaaacgagactcttaattttacaaagtgttcaaaaatttcggccagaaatttcacacggaactggttactggttcctgcatcgatgcgctttcaagctggtttgcgcctgattcctatctgctggagaaaattggagcacattttctgttctcggctgaggatatatggaaccaaaggatcattgaccaatt

SEQ ID NO: 32433 - DNA, 1277 bp, Zea mays
  Clone ID: UC-ZMFLB73333E09_FLI
ccacccccacccatcccttgcccgttcgtcctcctccctcccctctacggaacagaacagccctgcccaaccaaagaaccttgagagccttgaggtggggtagggtgtgtctgcctggcacagagagtagcagagcagtgcagagcaaagcagtcaggcaagcagcagcaatgccgtacacagctccgcggccgtcgccgcagcagcacagccgtgtactgagcggcggcggggcgaaggcggcgtcgcacggggcgtcgtgcgcggcggtgccggcggaggtggcgcggcaccacgagcacgcggcgcgcgcggggcagtgctgctcggcggtggtgcaggcgatcgcggcgcccgtgggggcggtgtggtcggtggtgcggcgcttcgaccgcccgcaggcgtacaagcacttcatccggagctgccgcctcgtgggcggcggcgacgtggccgtggggtcggtgcgcgaggtgcgggtcgtctcgggcctccccgccaccagcagccgcgagcggctcgagatcctggacgacgagcgccgcgtgctcagcttccgcgtcgtcggcggcgagcaccgcctcgccaactaccggtcggtcaccaccgtgcacgaggccggcgccggcgccggcaccggcaccgtcgtggtggagtcgtacgtggtggacgtgccacacggcaacaccgcggacgagacgcgcgtgttcgtcgacaccatcgtgcgctgcaacctccagtcgctggcgcgcaccgccgagcgcctcgcctagagagacgagaccagacgagacgagagccctgctggcggctggcgccggcgccttgtttcttgactccgtcgtgttcttttgccctccaaggggaggagatcagatcgatccgtgaactcgattgaggttctaggatagcctgtgtttcgttttctttttcttttctctgtttgcgacacagagtacaaatcattgtatgggtgttgcctgatatcattaacccttattcatcacatcacatacatgtacaacctttaaattagccgtctacctcccttccctcttggcataggtaaaccactacttgaggagaatgatattagatgcaaatttgtgctgtgtgtgttcctgcggttttagcaccgtttctgcaaagaaatttatggaaacctgaatacagatcgggtaggtggggtcaattcacgagatcagtatactgtggaacgagttgcacgaagcagatgcacatggaacttgataaggagcattcctatttcttctact

SEQ ID NO: 32434 - DNA, 1713 bp, Zea mays
  Clone ID: UC-ZMFLB73333H05_FLI
tctctacaaacattgtctattccgaaggattggaagtgtgctaaacaggacccaaagtggaaggatgccatgaaagaagagttgcttgcccttcaaaagaacaagacatgggaacttgttcaccttcctgaaggaaagaaggcggtagggtgcaagtgggtcttcacagtaaagcagacccctgaaggaaagattgataggtacaaagcaagactcgtggcgaagggatatagttagacgtatgggattgactatgatgagacatttgcacctatggcaaaaatgggcatggtgaggaccttaatctcatgtgcggccattggttggacgtttcatcagctggatatgaagaatgcatttcttcatggtgacctgcaggaagaggtctatatggaaattccacctgggtttgcaaatgaacagacagttgggaaagtgtgtagacttaagaagtcactctggtctgaaatagtcaccacatgcatggtttgatatattcaggcgagcagtatgtgatatgggctattatcaatgcaatggagatcacacggtcttctacaaacatcagggttcttgtatcactattctggttgtttatgttgatgatatagtgatcactggagatgatgtgaaggaaattaggaaactaaaggaaaggctaggtagagcctttgaggtaaaagatcttggaccacttcgatacttccttgggattgagattgctaggtcatctaagggaattattctcttaacggaagtacgtccttgatttgttggcagaaacaggaatgcttgggtgtcgtccatgtggctcaaccattgataagaatcaccaaacttgtgctgagttaggtgaccctatggatcgagaaagatatcagaggatagttggtcgattgatatacctctgtcacacaagaccagacattgcttatgcagtgagtgtggtgagtaggtacatgcatgatcctagagttgggcatatgagggtaatttatcaaatcctgagatacctgaagggaacccctggcaagggtttgtggtttagggcaaaccaacacctgaatctagaagggtattgcgatgctgactaggcaagtagtagggatgatcggagatccacatctggatattgtgtttttgtgggtggtaatctagtttcgtggagaagcaagaagcaagcagtggtatctcggtctactgcagaggcagaacaaagagcaatggatctagccttatgtgaaatgatgtggttgaaaggtcttctaaaggagcttcaggtgtagaagaatgagaccatgttacttcattgtgataatgttgctgcaatcaacatagcaaataatctagttcagtttgaccgcatgaaacatgtggagattgataggttctttatcaaggagaagattgatggtggggctttgaagttgaattatgtcaagtctcgtaatcagttagcagatagtctcacgaaaggtctaggtcctaaggataatgagttggcttgtaacaagatgggaatgttgaatatatttagcccatcttgagggggagtgttggtgtaaatagaacaagtgtaaggggtttcttgtataatggtgaaatataatgtgagcttgggggtgttgtgaggaataactcaccccaaatcaacaacaaatactgaatgttaagatgatgaattgtagcactttacttcattatttggatagc

SEQ ID NO: 32435 - DNA, 449 bp, Zea mays
  Clone ID: UC-ZMFLB73337A08_FLI
gtttccatcctgtcgtgggatcccagccaccgccgctagaagaagagctcggcgattcccaggtcccgcgagaagatgccgaagcagatctatgagattaaggacttcctcctcaccgcgaggaggaaggatgcccgctcagtgaagatcaagaggagcaaggatgttgtcaagttcaaggtgcgctgctccaagtacttgtacacgctctgcgtcttcgatgctgagaaggcaaacaagttgaagcaatctcttcccccaggtttgaccgtcgaggaggtctgattggatacatggcaacgccgggttgaactacccaagcttctttatcagtagcagagcatgctactcatgtacttttggaacctaagctattagacctgtcagtgttggatgtgtggatcttgcatttttgtggagaaataccaatttacctcgttcaaggatgc

SEQ ID NO: 32436 - DNA, 400 bp, Zea mays
  Clone ID: UC-ZMFLB73337C10_FLI
gttctgtttcgtcctacttctaccctccgttgtgatgaaaaggctgctgatcgaaacatagatggcgtaacaacccagatcgtaacagcacgcctcgagtcgcgggcttcgtgtaatgtacagacacattcgaacattcctgacaacaatgttctctgccatgctgccttcaagtccgtatgtagaagatgtctcattgagagcatggccgactttttattgcttgtatccgaagtattaacttatactatacgctgctccaatctcgttcaccaggaaatcatgttagtccctcgttctttcaaaagcgtgataaaatgtagaaaaggcatcaagaagcccatctctagttgtaaatccttctgctttttctaagtacagatttttattgcacatctag

SEQ ID NO: 32437 - DNA, 1443 bp, Zea mays
  Clone ID: UC-ZMFLB73338A02_FLI
caacaataacttctgcacatggaccccatgagtattctacacaaagtgatgagtgtactagttctaagcaaagaacatactctagctcatgtccagagaatggaacgcttagtgtttatcctttatgtacatctgatcaagcattctcaactgacaaattggctgctcaggatactgatgattctgactgtgaggtatttagagttaagagacgatctagcatagttatggagaaaagatgttcagaagatctaacaataactttaactgagaatcaggctttaagacggttaaagaaagcctgttcagatgacagacaagagaacgcaactgaatcacattgccttgacttcatttctggaaatacagataatttcatcaatcgaagcaaacaaaaaatgaatgtagatcagctagatgcaaaaaatgtggaagatgaagttgctttcggccagaaatctatcggttgcagttacctgtctccatctgtagatcttgggccgaaacgcttgaaaattcgtggcccatccttcccaagcactgtttctgaagtggaaatatcttataggttccaggaggacattgacttggctagtcagcatactcaatgaagtatgctgctcttggtgctaactgctaacatcaatcgtaacttctggaagatgaaagctcttttttcattggatggttcagaactgattctatctacaggtctccaatggaggcactgttatggctggattttatgattctattgccaggtcataggcgatttttctgatgatccgtagctgcacatcacttatttcctttctttgtaggttttccactgtgaataggttagtctactacttttaacaatttggttcattctttttccaccacagatacacctgtacctagaatgctttaatagatcctcatacgaaatggacattgtacattttttttaacaagtcagtcttttgctcattataatctggaaccatttgcaattcttattcttgttcagttgttggcaccggtacatttgtcctcagatgtgttgataactttgatatgttaataaatcgtttgatgctgacaggaattcacttccactgactgtcatgttgcatatgcaacaaagtagatgctttgtgataatgttgaagcgcatgcaaatgctcgaatcaatcatgttctatagaaagtggatacaacagaaggaataaaggagcaacttcttgctgttagatcctggtctactgaaatctgtcacataagatttactttctcttttaagttcaggatataatatttggttagacaattattttaatttgatcatatgtctggttggttagcaaagtaggcaatttgatttgtcccctaagtagcttctatttgtagaatgaattcgtccattataattctccataatgctttaggtagtctatgcag

SEQ ID NO: 32438 - DNA, 1313 bp, Zea mays
  Clone ID: UC-ZMFLB73344A03_FLI
ctcagcttcctcattggccatccttcgtcttccatggagaggctccttgccggcctactactcggcttcctattattgatcgcgtcagtaggaagccatgcaactcgtgctccagatcagtactggaagtctgctcttcccgacactcccatgccgagctccctctcccaactcctcaacaccccagctggcaagggcggcgtcggtggaggcagcagcggcaagaagcccggcggcaccacggtgggagttgggaaagggggagtgggcgttaacgttaaccctaccaaacccggcggcgccggtacaaccgttggcgttggcaaaggtggcgtcggcgtcggcgtcaatcccgggtacggcaagccgggtggcaccacggtgggcgttggcaagggcagggttggcgtccacgtgaacccgggcaagaagcccgtccacgtccccgtcggccctttccagtacgagtacgccgcatcggagacgcagttgcacgacgaccccagcgtggcgctcttcttccgagaggaggacctgcagcccggtaagaagacgaccgtccagttcgccaacaccgcgatggccggcgccaagttcctcccgcgaagcgatgccgaggccatcccgttctcctccgagaaggtccccgagatcctcggccgcttctcggtggacccggactccgtggaggcggcggagatggcgcagacgctgcacgactgcgaggcgcccgcggccaggggcgagaggaaggcgtgcgccacgtcgctggaatccatggtggactttgccaccgccagcctcgggaccagccacgtgagggccgcgtcgacggtcgtggggagggagggctcgccgaggcaggagtacaccgtgacaggcgtgaagcgggcgggcggcgggcgcctggtggcctgccacgcggagccgtacgcgtacgccgtgttcgcgtgccacttgacgcagcagacgcgggcgtactcggtgtcgatgctgggcagggacggcacggccgtggacgctgtcgcggtgtgccacgccgacacgtccggctggaaccccaagcacgtcgcgttccaggtgctcagggtgaagcccggcacggtgccgatctgccacttcctgccgcaggaccacgtcgtctggacccgcggcggctgagagtggtcgccgtttgcatgcactggtcatgacgccgccgtttgcttagattatgtttgtatagtttcgaataatcagacatctctgttacttctgctagctctcaggctaagcaagcttctaattgatctccgacgacgcttgttggatct

SEQ ID NO: 32439 - DNA, 332 bp, Zea mays
  Clone ID: UC-ZMFLB73344B09_FLI
ccggactacaagctcgccgagagggaaggcgtgctctacctcggctggaagaacaggcccctcattgtttcatcggcatggcactagtgttggcctcgtggagaatgttggcctcgtggagaatgtttcttgtgactttctacctcgttgttagtatagatatgcttggctgagcactaaaactatatataggaagcctgtggtggtactgagttgtacaacacctataacctaataacctgatgttgtgaattgtgatggcagtcactaccagcctgataatgtgtagcagtaagttcgagtatatgtttcagttaatcgattttgctttg

SEQ ID NO: 32440 - DNA, 1565 bp, Zea mays
  Clone ID: UC-ZMFLB73344B10_FLI
ctccatttcggcctctgtcccttgcaagttcaatctcacctccaaccatgggtaaagagaagtcccacatcaacattgtggttattggccatgtcgactctggcaagtcgaccaccacaggacaccttatctacaagcttggaggcattgacaagcgtgtgatcgagaggttcgagaaggaggctgctgaaatgaacaagcggtccttcaagtacgcgtgggtgctcgacaagctcaaggctgagcgtgagagaggtatcaccattgatatcgctctgtggaagtttgagaccaccaagtactactgcacggtcattgatgcccctggacaccgtgacttcatcaagaacatgatcactggtacctcccaggctgactgtgctgtccttatcattgactccaccactggtggttttgaggctggtatctccaaggatggccagacccgtgaacatgctctccttgcgttcacccttggagtgaagcagatgatttgctgctgcaacaagatggatgcaaccactcccaaatactccaaggcacgttatgaagagattgtgaaggaagtctcatcctacctcaagaaagttgggtacaaccctgataagattgcctttgttcccatttctggttttgagggcgacaacatgattgagaggtccaccaaccttgactggtacaaaggcccaaccctgcttgaggctcttgaccagatcaccgagcccaagaggccttcagacaagcccctgcgtctgcccctccaggatgtgtacaagattggtggtattggaactgtaccggttggtcgtgtggagactggtgtcatcaagcctggtatggtagtcacctttggtccaactggcctgactaccgaggtgaagtctgttgagatgcaccacgaggcacttcaggaggctcttccgggtgacaatgttggcttcaacgtgaagaatgttgctgtcaaggacctcaagcgtgggtttgtggcctccaactccaaggatgaccctgccaaggaggctgccagcttcacctcccaggtcatcatcatgaaccaccctgggcagattggcaacggctatgcccctgtgctggactgccacacctcccacatcgctgtcaagtttgctgagctcattaccaagatcgacaggcgctctggcaaggagcttgagaaggagccaaagttcctgaagaacggtgatgctggtatggtgaagatgatacccaccaagcccatggtggtggagacattctcagcgtatcctccccttggtaggtttgctgtccgtgacatgaggcagacggttgctgttggagttatcaagagtgtggagaagaaggacccaaccggcgccaaggtgaccaaggctgctgccaagaagaaatgatgcgatcctgcgcctgctttagcaatacctagttttcatcattacaagttttgtttgtggtcgttgctgttattgtgtgaactgttgagctctgttagcctgtgcacttttatctatttatttggtaccttgttgctatttccccttctgcaatacaagaatgctgtaagagct

SEQ ID NO: 32441 - DNA, 1263 bp, Zea mays
  Clone ID: UC-ZMFLB73344G07_FLI
ctcatgactcacccttcctccccagctttccaccaccttgtatacagcgcacgctcggctcgctagctaccgccaagcgagctctcctcctccacttctgttccatgcaccgccgcccgctccaggttcctacttcctagctaggcgaggctggcattaaagactgaacgcgctccgcgtgtttcgtttctgcgtgtcggttcgccttgctgggatggagaggccgtggagggacaaggacaagggagcggcggctccggcggcggggagggcgcggcggtacggcgaccagccgtccttctcgtccacgctcctcgacgccatatacaggtccatggacgagcctgacgacggggtaacatcgtcctcctcaaccgccgccaagaagcagaaccaggacctgcgccacagctgctactactacaaggcgtcgctggcggcggggagctaccgcggcagcagcagggcggcggcgccccgggggccacaggccgccaccacgtcgagctcctccgatcagtgctccagctacggcgggttctcgtcgtcggaggcggagtcgtcgcagcaccggcgcctgcggcccatacgcacgagcctcgccaccaccgcggtggccgtggccgcgcccgcactcgcgccggagaagaagaaggccggcgtcagcatccgcgccaggctgagggacctccgccgcaagccggcgtcccccggccccggcgcgcggctggcggggttcctcaacgccatcttcagcggcaggcgcgcgccgccgtcggcgtcctcctgctcgcgctcctgcctcagcgagacgccgtccacgcggggccagccgaagcggaccgtgcggttcctggacagcgacggcggcggcgagcgccggaggacggtgccggtcggggtggcgccggagctggagcagatgctgctccaccggatggaggtggacagcggcgacgacgacgacgacgagagcagcgacgccagctccgatctgttcgacctcgagaatttcgcggccgttgacccggacggcggcgccgcgtacagtgacgagctgccagtgtacgagacgacgaggctggtgctgggccaccgcgccattggccacgggtacgcgcgcacgggaggagtacccaccagagtggtgtgaattgtgatcttgctgccggccgggatccattccggttcctgagcgccagggggtaactgtagaatacaagtgagcggtttgtgagggaaatggcaaagcgagttccaatc

SEQ ID NO: 32442 - DNA, 1948 bp, Zea mays
  Clone ID: UC-ZMFLB73344G09_FLI
gttggaaccagtggatcaaaaataatttcttctgttagtgctgaagaaagcactactccgccttcagcagatacctctgaaacagagaatgcatcctctgatatgcctcccagtagtttaaggaaatacaagatttcaaaacgtggacctaggtacagggagcgttctcctggcaaaaggcagaaggtttttacttatgacatttcttttgcaagcaatatactgaataaactttcgattccggagattcgcgacacaagactagagtctagagaacctggaggtgataaactacaaattcttgacgagtccactaagaaaacttcaagcaaagatatctgtggagaaagcccaattactactactgaaaatgtgggaagagagagtaaaaaagtatcttcaacaaagaatttcttggagcacactctttcatgttggagtgccttagagcgagatctatacttgaagggcatagagatatttggaaagaacagctgtctcattgccagaaacttactatctggtatgaagacctgcatggaagtggccaactacatgtataacaatggtgcagcaatggcgaagagacctctcttgaataaatccatctcaggcgactttgcagaaactgaacaagactacatggagcaagacatggttgccagaacaagaatctatcgtcggaggggccgcaatcgaaagctgaaatatacttggaagtctgcagggcatccaactgttagaaaaagaattggtgatgggaagcaatggtacacacaatataacccatgcgtgtgccagcaaatgtgtggtaaagattgcccctgtgtggaaaatggaacttgctgcgaaaagtactgtgggtgttcgaagagctgcaaaaacaagtttagaggctgtcattgtgcaaaaagtcaatgcagaagcagacagtgcccctgttttgcagccagtcgtgaatgtgatccagatgtttgtaggaattgttgggtgagctgtggagatggttcactaggtgagccacctgccagaggtgatggttatcagtgtggaaatatgaagctccttttgaaacaacaacaaaggattttgttaggaagatctgatgttgcaggttggggtgcattcatcaagaatcctgtaaataaaaatgattatcttggagaatatactggtgaattgatctctcacaaggaagcagacaaacgtggcaaaatttatgaccgggcaaactcatcatttctgtttgatttaaatgaccagtatgtgttggatgcttatcgcaagggggacaaattaaagtttgcaaatcactcatctaaccccaactgctatgcaaaggtgatgctggtggctggcgaccatcgggttggtatctatgcgaaggagcatattgaggctagtgaggaactcttctatgattatcgttatgggcctgaccaggctccagcttgggctaggagacccgaagggtcaaagaaggacgaagcatccgtctctcaccatcgagcacacaaagttgctcgatagctgaagagcagctccggatgatacaatatgcagtaaattatatatttaatacatgatttagtcctagttcattatacgaggacttcgttggtagataagcatattgtatattcattagtgaataaactcccatacatcaagttggggaataagtgcatataaatattttttaccttaggtcggaaggtgacaaactgacaaccttgttaggttgagtaaagttagtgcttacaggttttcaaactggtgtggccattgctagagtatcaaatagctgagatggctacaactatagccttgtttgtatttttttttggcaagagggatggaatttatttgccaaatgtacacattgttgcaggaagtatttaatgatttaggaggtgttcttcagtcaccctcctaaattttagaaatt

SEQ ID NO: 32443 - DNA, 1346 bp, Zea mays
  Clone ID: UC-ZMFLB73345A07_FLI
tgagaatggtgaagctgatgagtgtgatggaacgcctacaagtgtagctgaaagttctagttcggtatctgttggtgaagtagtttctcatggtaagaggatcaatgatattgcagaggacaacatgagagcacataacatattgtatgaagctgttggtgaaaatatttcaggtccttcattccatttgaatgaatattctagtggaaccatacaagctactggcaagccaaacgattgtcgacgtattgattcagctgtgcggaatttgttgctcaaaggattaggtcagccgtttagtgaggaagatattattggtatctatagaacaccactgctagatcagcgagggcaagttcgttgtggtctcttccagaaggagatcgaagagaccaggagtcgtcgggggaatgcaaatgtacgttatgcttggcttccttgctcaagatataccatggagcagatggcaatgcggggtgctctggaaatcgcgaagcctcataaggggtccatttgtggtgttgggacttggcttgctcctgcaaactgtacaaattcatgtgccagatattctgattttcatgaagatggcatcatcagaatgatgttgtgccgtgtaataatggaattacatcgtatgggatgctaatgtgcataaacacatatatgctgaatatgctgttattgtccaagcacctctcgtgaccaatgaatgttcgggcttgaaggatagcgtgcccaacatatctgagatcataagttctggttctcgagacaatctaaccaaggaggataggttcgcgccttgtggtgtcgaacaagaagcacctaggctggggcgtgctccaagggccccctcctcaccatggatgcccttttcgatgctttttgctgctatttccacgaaagtgcctcgttcggacatggagttggtcatcagatactatgaagaattcaagaggaagaggatgagccggagcgacctggtggtacggatgaggcaaatagtcggtgataagatattggtttctacaataatgaggcttcaccaccagaagaagcccccatcgatggcagcagcagcagctgggctagcaagagcactcgcaaggggggaagagggagggggagtagccgagtaagattagtttaagccgccttgtcttttgagaaatttatggagcacatatgctttgtcgacatggccagacccaaggtatcaaaagggagggagatgagctgagcaactgttgtagtgtagtctcaaactcaaagcgtttaggtcttgacatttgacaaactaaaactcagaaacattatcatgagtagtgtttttttttagattc

SEQ ID NO: 32444 - DNA, 1990 bp, Zea mays
  Clone ID: UC-ZMFLB73346B09_FLI
cggaagtgcaagggcatctaatcatgcaggtagtaacatgacttctgacaaccagtctcatcaagcctcccaatcagttggtgctgcaggttctcatgatggtggtaatgtccaaggacaagatccggaacgatctacccctgaaggtggcacaaataccagccatgatcaaggtcaacagagttctacaggtgctgagggctcacaagttccgcttagacgtaatagcggacatgggtgggtaacttctgcagcaagtgcatttgatgctgcaaaagacataatggaagctcttagaagcaaacatactaatctagccaatgagcttgagcttttactgtcagaaattggatcacggtttgttactctgcctgaggaaagacttctagctgtggttaatgctctgcttcatcgctgctacaaatatccaactgcaaccactggcgaggttccacagtctctcaagaaggaactctctggtgtatgtagagcttgcttctcacaagatgctgttaacaagcatgttgattttgtgaaggagtacaagcaagattttgaacgtgatcttgacccagagagcgctactacttttcctgcaacccttgctgaacttacggagagattgaaacactggaagaacattcttcagagtaatgtagaggatcggttcccagcagtattaaaactggaggaagaaagtaaaacacttcgggattttcatgttgttgatattgaactcccagggcagtacttcacagatcaggaaatcgcaccggaccacactgttaagttggacagagttggacctgacattccaattgtccggaggcatggcagtagctttcgacggttgacactcattggttctgatggttcacagcgccattttattgttcagacatcactgactccgaatgctcggagtgatgaaaggatgctgcagctattccgtgtgctaaataaaatgtttgacaaacacaaagaatctaggcggcggcatctggctatccatactccaataattattcctgtttggtctcagcttaatcaagccgtttcagggcagctctctcctgaagcaattgtggagctacgtctgcaagcatacaatgagattacaaaaaatattgttaatgataatattttctccctaatatatgcacaagattctgccaactggcaactacctgtggaccttcaagaaacaatttgcaatccaagtggctctctcctgcttcatgtcgtatatgctgcagattggcggcagggctcctaacaaaattctatttgctaaaaatactgggaagatcttccagactgacttccatccagcttatgatccaaatgggatgattgagttcaacgagcttgttccatttaggctgacacgcaacttgcaagctttcttctcgaattttggtgttgaaggtctcattgtgtctgccatgtgctctgctgcccagtcagtggtttctcctaaacaaagccagcacatttggcatcatttggctatgtttttccgagatgaactgttatcttggtcgtggaggcggcctctgggcattccatcagtccctgtcgctgctggaatgatcaacccatcagatttccaacagaaggtggtaaacaatgtggagcatgtcatcagtcgtatcaagtcaatatcgccacattgtctggctgaggaggaggagaatgcaaccgagccacctcagtcggtacaaaaaggcgttaccgagctggtggaaacggcattgtcgtccaggaacctgtgcatgatggatccgacgtggcacccatggttttgaaggcatccagcacctctgtagcctgaccaaactgacggcgtgtacagattttcatgtccggcaacgctggttgagactaaaaaactcgttgcgttatgtagataaagccagggtgtcatcatgtgttcgctggtgtaatggagcagattagcttggtaattaatgagacattgcattttttt

SEQ ID NO: 32445 - DNA, 1479 bp, Zea mays
  Clone ID: UC-ZMFLB73346B10_FLI
gtgaatccgtgacaaccggcggcggcgagggaagaatcgaagatcgccgcagccgcaaggaaggaaaccgagaacaactcaatccgctggctatggcgttgctgatggagcccggcgctgagcccctgactgagagcgagcaggccgacctggccggcatcgccgccatcaaggagtcggcggcgcgcgaatacaaggagcaggggaaccagttcgtccggatgggccggaggcactacgccgcggcggtctcctgctacacgaaggccatcgctcagatggagcccctctcctccctcgacgcatcagccgctgctgacgcctccgttctcttcgccaaccgagcacatgtcaacatcctcctcggtaaccaccgacgggccctcgacgacgccgagcaggccatccgcctctctccctccagcgtcaaggcgtactaccgagcagtgaaggcggcgcttgcgctggacttgttaacggacgcggcgtccttctgcaggaaggggctcgaacaggacccccctaacgaggaattcaagaaactgttgtcggaagtggattcaaaactgagagagcaagatcgtcagagagcgaaggttgcacaagcaatcgccaaagccaaggatcttgctgctgctatgggaaagagaggggtgaaacttgggaaggcagcctatcaagagctgacaggggtaaagaagccagtgctggatgagcagggcgtgctccactggcctgttcttctgctctacccagaggtcatgtcgagtgacttcattgaggattttccagatacagatactttctcgccccaccttgatgtcatgttctcagaaacttctccaccattgccatgggatgataaccatgtttacacaagggactcaatcgaattatattatcagggtggttttggcaaacctttgtcccgaagtgaggtattaagatatcttctagaaggcaatgtagattcgaaggcgcttccagatagccttcttgacggggaagacgaagaacatgacagtaccaaatgtaccactgttacatcaactgatagctccagtaagtggatcaaggtaaaagaaggaaaaacacttcaggaggtgctgcaggataaaggctatattgttcctgcaattcctgtgttcttcgttgtttcaaggaagtccacattctataaagacttcaaggctggaaactggtctttgccatgaaacagaaccggacactaaggttcagcttaaatcgatctctgagacgggcagcggatatggcaagaaagcagaagatgccctcttgtgatcatggtcatttggtttaaaaggagtgtgcttttttcagtgtctgcagactgacagccttttgttaccgagatagacagaaaagacgaggcaatgtaatatgaatttttatgtgaaccgattcagcgtttagcatggtcgtagtatgttaagtctcggttgaaacgttggtgtttct

SEQ ID NO: 32446 - DNA, 2022 bp, Zea mays
  Clone ID: UC-ZMFLB73346C08_FLI
cgagaaggtcaagccgcgaagagaagagacgcacgtcacagatccctctccactgtctcaccctttctctctcctcgaccctcccgacgcggcaaagcaaaaacaaagggaggagaggagggagagaagggagaagacgaggccaaaaatcccctccccctccccaaatcctagcccaataatctctcaatcaggggattcttaggtctgatcaggtcggaggattcggcagggcgcagccatgaacgaaaaggcgtccgtctccaaggagctcaacgccaagcacaagaagatattggaaggtcttctacggcatcctgagaatagagaatgcgcagactgcaagtcaaagggtcctcgatgggcaagtgtgaatctaggtatctttatatgcatgacatgttctggcattcatagaagcctgggggtgcacatatctaaggtaagatctgccaccctggatacatggctgccagagcaagttgcatttattcaatcaatgggaaacgaaaaagcaaatagctattgggaagcagagctgcctcctaactacgatagggttggaatagagaatttcatccgtgcaaaatatgaggacaagagatgggtaccaaggaatggaacatcaaaatcttcgtccagtgttcgagatgagaagagccaagagtctccggctagtgctaataggagtggacatggtcatagatcttcatttgagcaaaaccgtgcttcaccagctcttccgagcaaagttgcacatgcagcttcaaggatatcctctcaggcatcacctcagcccccgaaggtagaaacaccagttccaaaggtggttttacctcctcagtcacagaaatcccccgccaaagttgatgcaacaccgcctaaagttgagaagccatcggttacaccacctcctaaagttgattatgccactgatctctttaacatgttgtcaatggatggaacaacagagaaagagtcagcgtcatcttcaaacgacgataatggctgggatggcttccagtctgcacaaccagtacctagttcagagaaaaaagattctgccaaaccagcagaaagcaagacccagtctacatctggaatggaagacttatttaaagactcaccagctgtgccattatcctcagctccagctgtttcccaagtaaacgctaagaatgatatcatgagtttgtttgagaagtccaatatggtatcacctttcgctgcccatcaacagcagctggcgctcatgtctcagcagcaagctcttctaatggctgctctcaaagctggaaatgcaccacaaatgatgattccagggactgccaatcagctaaatgctaacggaaccttgcctttccaaaactggacaaatctttatcaaaatcctgggtcgactccagcagcagcacagaatggtgccaccaaggttgctaacaacaatcaggacttctcttctggtaccttcggttttggcacacctggggtgtacaacattagcccaactgtcccagcaaatggggccacgacagcaggtgctatcaacaacggcactgcatcaactgcctcttctactctcccctcacaatctggcaaagactatgatttttcgtccttaactcaaggatttttcaccaaacgatgagcgcctagtgagcttgaaaaccaaacagaccacaggatcatgttggacgaggcatattgatttagggagcacaaggggcttacacatgcttatttcgaggcagattttcttctggtggatatattgttgtttcatgaccttgtagctgtcggacaataagagtggaaatatgccgcaaaatagctttgttgtttctaaaagcgaagaatacattgccggttatgtcaacggcttttactcgaggaccaccttgtcagttatacaagtctaatgcagtcttttcactatgttggtcttgatttatctacgacgtcgatactgattacagattgttttgtattgtattttacgacaattggattttatttgtttct

SEQ ID NO: 32447 - DNA, 1641 bp, Zea mays
  Clone ID: UC-ZMFLB73346D10_FLI
cccgactccgctgatcccctcaccacgcaaccctcgccggatcccggcataccgtcgtggaagcctctcgctggcggcaagctcaagaagccgctcactgacaagcagcgcgctgccgcggagcagcgcctgtcccacctccgcgcccacctcatcctgcgctccctcgactccccagctggcggggcccgttccctaccgccgccgcaggaggcggcgctcgatgccctcggcctgctcatttttttccgcctcgacctgcagtccggcgccccgcgccccgacctcatcgctccgctcgtcgcctactacgaccgtgtctgcaagcgcagcttcgtccgcggcgtccgtgtcggcgtctcgcgccaccacatcatccgcgcgctctgcctaccctcgaagcccgcctctgcggcgccggccccagcagacgtcgatcccgcagcggtggtcgctgccgttatgcagctccttcaggattatgtcctgctcccgttccagggggacgacaggtgcatactaccgcagcaggtggctgccgcagagcagatggtcagggagggggcggcgcatagggttgattggggagagctgatctggggcctcgtcgagaaggagatgctcgagctgcccaagagggaagactgggtgtgctactacgggccgcacctacagcggctcatttatgcccaaaagccacatctgttggagctggtggaggaagggcctgttcaggagccgtctgctaatgtggatttgaaaaggaagagcatggtggagctggagcaaggggatggggatagagaagcgggtaacaatgtcaaaagcaagagcttgaatgattcagaatcggggaaggctggtgcaaggaatgatggtttggacgagttggagttggctgatgctgttacgaggaacaaggtcatgggggagttcggtttaggggatgtagatgctaggaagaacagcatagtgaaactagaggttgtcgacgaagatgcaaggtgcaagtgcttgaatgaaattcaggctgtggatgctatcaacaacaatatagttgaattggatgcggccaatgaaagatgcaaggtgtaaaagcttgaatgatgaatcagagccagtggaagaggatgttaagggtccaagcttcgatgacatgaacaccgtggatgagcacgtcgatggcacaaacacggatggatcatgtttgggatttgtggcagttgaagcggtgcctgctgtaaatgtagagcctgacgttgttccagattatccagtcatcccaactgcttcaccaacaaacataaagaggttgaagacgttccacaaacctagtactaacacgaaatcaaacattggtcaaaatttttctaggttgctagaagaacacccgaaaatagcatatgatatttgcaatggtccaataaatatgtacaagtgtactaagaaacttttggagtgtggtttcacaggcaaagtacttcacattgcaatcaaaatactaaaagaagattgggaagctcgtcagatattcatggcattagatagatctgaatctgtaacctttatttccaatgccgttggcgattatagctagatgatgttgtatggatgttgaataatgtgaacaataatgtagtg

SEQ ID NO: 32448 - DNA, 1018 bp, Zea mays
  Clone ID: UC-ZMFLB73346E10_FLI
gtaatgtgcgagatgtgaggaattccatatttgtgtggcgaggcaagccgtgcgacaagtgccagatgtacgatgaaatgattgaatcggagagcgtcaccgtttgtgtggattatcaagtcaggcaaataacggtcacttggtcgtggaagggcttcttattgcagtcatagtgttccagctctccaggaagagttacaaaccaccaaagaagccactcactgaaaagtgccgctggaccacatacgattgttgatggtaaagaagttgtgaactttgcatcagcaaactacctcagtttaattggcaacgaaaagattattgattcttgcatcagttcattggagaaatatggtgttggttcttgtggtccatgtggcttttatggaacaactgatgtccatcttgactgtgagtcaaagatagctaaatttttggggactccagactccattctttattcatatgggatttctacaatattcaatgtgatacctgccttctgtaagaaaggagatatcatagtcgctgatgagggtgttcactgggcagtgaaaatggtctccatctatcaagaagcactgtggtgtacttcaagcacaatgatatggcttcacttgcaagcactttggaaaaacttactcgtggaaataaacgtgctgaaaagattagacgctacattgttgtagaatccatttaccagaattctggccaaattgcccccttggatgagattgtcaggttgaaggagaaatatcgattccgtgttattctggaggagagtcattcttttggggtgcttggcaagtctgggcgtggccttgctgaacattatggagttcctgtgagtgtttggcctcagcttttcttaatgtttcaccataatgccccacctgtggtgtctgaccggggtgcgttgttacctagctcccaaacgaggcctaactgtttggtgaaatgcttgggacaaagtggccatcaagaatggagtcatggaacatcagcaggacactacaag

SEQ ID NO: 32449 - DNA, 1410 bp, Zea mays
  Clone ID: UC-ZMFLB73346E12_FLI
ctttttgaatagtttccattctaacgttgttttggtcataaaatggcaaggggcacaaataggatagtttcttctactttgttttactacattttctgtgagtaccagttttataaaaaaaacttgacctgcggggggtaagacagcccccgggtattgtattaagaataagaccttctcacacaggtcaagaaaacccccgaacccctgccccacacatacacagcggcatcgaagctcatgtgagaacgaccacgaccagggctgagccttagacctatgctttggcgtggaacagacgagaggatttttttaaccacagcctggaaattcgctcccacggggagtcgaactcaggacctgaggagtgctactcagaccacctaaccaactcagctagaggccctttcgcgagtaccagttttatcatatttctctaattctctttatgtttcaggaatggtggcagctttaacaaacgagagtgcaacaagcaaatctgtatattttgctcattgcacgtcagagatgatattcattactcatttgctgacagagcaacctgagaaactcgctggtcctctgctggctgacacgtatgtaactctcttaaaaggtcgcaatgcatggtatgggcaaatgcttgccaagggagagttgagtcctgacatgggtgatagtatcaaggggaagggaatgattcaggtaatggaatgacttttttctttccattttgtcttgttttattctgagaagatgtcaaagctattatagtactacatccgttctcgaatatttgtcgcccgctagttcatttttgaactaaaccacgacaaataaaaaagaatggagtgagtatttgataaccctgacatttgcagccatccaattttgcttttttacacggttaccatgatcattttaccattccattggacagggtatctctgcagttggtgcattttttgagctgcttagtcaacccagcttaagtgtgcagcacccagaagaaaacaagcaggttgctccagctgagctatgcccaatcctgaagaggctttacagaatactgataaaaagggagctcccagcaagggacattcttcaagccctgagggacgaaacgatgaatgatcctcgggaaaggattgagatggcacaaagccatgcattctaccgcccgtctctccttggaaaaccatgatctagttagtcttgtagattagtagaatataaacggacgctgtgctgcaggtttctccactgtgcttgctgtccttgtgtccgagctacatggggatggggctttgtcagttgtcgaattctttgtgcttcctcgttgccatggtgtacaagagattactgaaccaataaatgttctaagtgcatattatatgaacacccaatttg

SEQ ID NO: 32450 - DNA, 1875 bp, Zea mays
  Clone ID: UC-ZMFLB73346F04_FLI
caccaacaacaccaccagtccaccaccacccacctcccacatgtgcacacgcgcccacctcccgtccaccaccgctatatatcccggcgccccttcctccctcccccgtccttccctccgcctccgcctccgcccccgcccccgcccacgcccactcctcgctgccaccactcctgtcacctcttcccgcgccgacgcagccgccatggaccccgtcgccacatgggggctaaccccgctcgcgggcgccgacccggagatctacgacctcctggagcgcgagaagcggcgccagcgtcgcggcatcgagctcatcgcctccgagaacttcacctccttcgccgtcatggaggcgctcggctccgcgctcactaacaagtactccgagggcatgcccggtgcccgctactacggcggcaacgacgtcatcgacgagatcgagaacctctgccggtcacgcgcgctcgctgccttccaccttgacgccgcgtcctggggcgtcaacgtgcagccctactcgggctcccccgccaacttcgccgcctacaccgcgctgctcaacccgcacgaccggatcatggggctcgaccttccctccggcggacacctcactcacgggtactacacggccggcggtaagaagatctccgccacctcgatctactttgagagcctgccgtacaaggtgagcgccgcaacggggtacatcgactacgagaagctcgaggagaaggcacttgacttccgccccaagctcatcatctgcggtggcagtgcgtacccgagggactgggattacgccaagctcagggccgtcgccgacaaggtcggggccctgctgctctgcgacatggcgcacatcagcgggctcgtcgccgcgcaggaagctgcaaatccttttgaatattgtgatgtggttaccacaaccacgcacaagtccctcagagggccaagggctggcatgatcttctacaggaaaggccctaagccccccaagaagggccagcctgagggtgctgtttatgattacgaagacaagatcaactttgcagtgttcccatctctccaaggtggccctcacaaccaccagattgctgcacttgctgttgctctacagcaaactatgtcgcctggcttcaaggcctatgcaaagcaagtgaaggccaatgctgttgcaattggaaactatctcatgagcaagggctacaagatggtgactgatggaactgagaaccaccttgttctctgggatctccgcccccttggcttgactggaaacaaggtcgaaaagctatgtgatctttgccacatcacattgaacaagaatgctgtcttcggtgacagcagtgcattgtctccgggtggtgtccgcattggcgcgccagcaatgacctcgaggggtctactggagaaggatttcgagcagattggggagttcctccaccaggcagtgaccatctgcctgaacatccagaaggagtacggcaagctcctcaaggacttcaacaagggcctggtgaacaacaaggacatcgagaacctcaaggtccaggtggagaagtttgccgactccttcgacatgcctgggttcacgcttgagagcatgaaatacaaggagtagatatgcctctttcatgcgcggcaaggtcctcctgtaccgatgtctttccttgtggtggcgcagggtgccatggcactgcattgccgccacacttacgatgatgatgatgggttatggattttgtctacaatgtcagcaggataggctcacaattgccccctgccctccggtttggtcgcctctcaggttttcatttggtagttgttcgcagggaaccatatgagaattgcaatgtcaatcaggtgtttgccaat

SEQ ID NO: 32451 - DNA, 3992 bp, Zea mays
  Clone ID: UC-ZMFLB73346H05_FLI
gcggaccgggcgcgagttcgacaaccacgcctctcggtcattcttcctcaccagtggcattcagttgcgtctctcgtgcccctacacctccacccagaacggctgggcagcgcatgattcgcaccaccaccaacatgatccgctgccttctcttccaggcaaatctccctgcgagctactgggcagaggccctgcacaccgccacccacctcctcaaccgtcttccctccaaggcggtgagccaccctactccctacttcgcgctgtacggcacagcccccacctacgaccaccttcgcgtgttcggctgtgcctgctaccctaacacttccgctactgcccctcataagctttctcctcgctccacccgctgcctcttccttggctactcctttgaccacaaggggtatcggtgtctggacctcgcctcccaccgcatcatcatctctcgtcacgtcgtcttcgacgaggatgtgtttccccttgctggccctccccacccaccgacctcgactccctcctcgagtccgatccgtctccccctcctcccaggtgccccgccttgcgccgttacccgcaccccgtgcggcctcgacgccgcggctcgcgcctattcccgcgccacgcgcggtcccgtcgatcacgcctgcgccacgcgcggcctcgtcgaccacgcctgcgcctcgcgaggcccaccgacccctctcgcaccatgcgcggccctgttgacgcccacgactcgcttcgccgaccccgcgctcgtctactatcgccgccgccacgtcactacctcggcacctgctgacccaggcccatcgacgagcccagtgcgcttcgctgaccccgccgtctatcaccgccgtgagtcggccacacctgcggcccccgacgtcccggcagaccgccccgagccaccggtgtaccacccggtcgccatccaccgcgaccccgggcacgtccacccgatggtgacccggcgcgccgccggcgttcttcaacctgttgaccgactgatcttggcagctgatacgactaccactccaccggacgcctccccagtcccctcctccgttcgcaccgctctcgccgacccacactggtgacgcgctatggaggaggagtacgcggccctcctggccaaccacacctgggacctggtgccgtgtccactaggcaccaacgtggtcaccggcaagtggctatttcgctacaagcttacctcgaacggctccctcgaccgctacaaggcccgttgggtccttcagggcttcacccaacacccgggagtggactacgacgagacctttagccccgtcgtcaagttcgccattgttcgcaccgtcctctccctcgccctctcctgggactggggatccatcagctcaacgtcaagaatgccttcctccacggcactctgacgaagactgtctactgcagccagctcaccggcttcgtcgacgaagctcatccggatctggtctgccggctgaaccgctccctctacggcctcaagcaggcgccgcgggcctggtacagtcgcttcgcttcctacttggcctccatcggcttcgtcgaggccaagtcggacacgtccctcttcatctaccgccgcggcgacgacaccgtcttccttctgctctatgtcgacaacattgtgctcacggcatccaccgccgaccttctacagcgcacgatcgtcgccttgcagcgggagttcgtgatgaaggacctggggcccctccaccacttcctcggcatcaccgccgagcatcggtcccagggtctcttcctccatcagcgccaatacgccatcgacatactggagcgggctggcatgtccgactgcaagccctgctccacacctgtcgacactcaggcgaagctctcagaggacgacgggcccccggtagccaatgcgacgtcttaccgaagcctgaccggtgcgctccagtacctcaccttctccaggcctgacatcgcctacgccgtccagcaggtgtgcctgcatatgcacaccccgcgggagcctcatctcatcgctctcaagcggatcatgcgctacctccgcggctccctcgactacggcctcctactccgaccatccctgacgtcggaacttgtggtctacaccgacgccgactgggctggctgtccagacatgcgtcgatccacctccggttacgccatgttcctgggcgtcaacctcgtctcctgggccgccgagcggcagcccgtcgtctctcgctccagtgctgaggacgagtatcgcgccgtggccaacggcgtggcagaggcctcctggctgcgacagctcctccacgagctccacagtcccctccagcgcgccactctcgtctactgcgacaacgtcagcgcagtatacctctccaccaatctcgtgcagcatcagcgcacgaagcacgtggagatcgacctgcacttcgtccgcgagcgtgtcgccgccggtgatgttcgggttctcagcgtccccaccacgctgcagttcgccgacatcttcaccaaggggttaccgtcgagtgtatttttagactttcgctccagtctcaatatctgtacaggatagagttgtgattgccggggggggtgttagaatacccgtttagggttagtttggatactctagtaatgagaggggttcaagtggattgagatgtattgcaggagtttttaacttattggggatttatacactctctaatccctccaaaccacttcaatactagagtacccaaactaggccttagggtttggggattttcccgtgtaattactatctcacccctatgtaatgggtctggcccagtttactgagtctattaatacatcacccaacccctgttagggttagggtttcctattctaactcttataatattatctaataaattactttgtagtctttgtcatatgccatgtgacttatattggcctaagttgttacttttgtttctgtacgtatatggggattcagaatgagaaagagtgtagcaaattaatataattaggtgctgcagtttttctctatgcaatgctattatgaacttccttttgtatttagcacaatcctgaacttcactggtagcatttaacattattatttaatctaaaacagagcaacaaggtgctctgtatttaggagtggtatttgtagtgagtgaaatgatgatttggaaattatcatattagtatatcatatttatgtgtggatgataacagttactatgttgcaacttgtgagacaattttttagtgtaaggatgcgccatgcacagaatcattattttctctgtctgaatttaatggcttgtccgtggtttggtgtctgtggttgcctccatgggtatattacataaccatccatttggaactctgttattgcagtgatgatttcagaaatatcatggagaggtcattgaggaagatagcagaagtggtggtaggggacctggctgtgcagacaactctaggatcaggattacccttagcaactctcttgcccaaagttggtcatctgagttccccattgcttgaggagccaaacaataacaaatacatccagatcatcagaagtatgcctgaagtggaactcttctacacattcctgtacgcaaacatgccaccagaaacatgatctgtacattgatgcgaaaagaacacttgcttctgaattttggctccaaagatctggtggtacatgtggatgatgttcaaccgtctgaaatcaggaaaccaacaaacgcagacagactggatttctgcccttgtatatactgagatattccgttgttgctagcaggaaccgagtaaagctccttccatttcgattctttctttctttgaagtttcggttgtgcacgtttagatagtcacacgcactggggctgctatttcgctatatttttgatcgatgacagatgttccagaagttttacttgccacaagtggctaatgtatacattgcaagtctgttg

SEQ ID NO: 32452 - DNA, 737 bp, Zea mays
  Clone ID: UC-ZMFLB73346H09_FLI
ccgagaacaagccgccgtcagcaccgccacagccacaagccttccagccggccttcagccaacccaaccaggcactgaacagtctggatttcagcctgcccatggacgggcagaggtccatcgccgagctgatgaacatgtacgacaacaacttcgtgccgaacaagaacccgagcagcgacagcgtcgccgtcatggagaggccaaacgcgatgccccagcagaggatccagatggacgagggtttcttcgtacagggcaacggagccttcgacgacgtcaacaacagcatgatgcagcagcagcagcagcaggcgccagtgcagcagcagcagcagttcttcatccgcgacgacacgccattcgtgagccagatgggcgacatcgccgccagcgcgccggagttcaggttcggtcctggtttcaacatgtctagcggcgtcgactacccaggcgcggcacagaggaacgacgggaccaattggttctactgaagaataaataaacctgtagggctgagaaaagagagggagagagagagagagagagaaaagcgtcgttataagctttgggtctctccatggtgctcctgctccatggttctcctaagttgtcgagtgtcgagtctatagggtcttggtcgtataggtttctgcagtagctgcaaggcggctggaacttggaaactggtttatacttgtactccctaccggaatttggctctttgctgagtgccc

SEQ ID NO: 32453 - DNA, 1555 bp, Zea mays
  Clone ID: UC-ZMFLB73347G09_FLI
cgacaacttcctcgccgtcctcgccatggtttctgtcgtcgccgtgctcttcgctgcatggccgatcagcatcgaggaccttgcctgccggctgcacgcggtgcggccactccacgtcctcacggcggcgatcctgacggcggccctcgcgaagctgaggcgcatgagccggccgagcgacgtgtatctcgtggagtacggctgcttctggcccaagccgtgcttccgggcgccgttcgcgacgtgcctggagcacgtgcggctcttgccgtacctggtcaacgaggacgacatcagctggggctggcggctcctccagcggtccgggatcggcgaggagacctgcgtgccgtacgcctaccactacctgcccccggaccgcagctttagggcctccctggacgagaccgagctggtcatcttctccgccgtcgacgatgtgttcgcccggacgacggccgtgacgcccgcggacatcggcgtggtgatcgtgaactgcagcatcttcacgcccacgccggtgttcacggacatgatcgtgaacaggtacaagctgcgcgccgacgtgcggagcgtgaacctgtccgggatggggtgcagcgcggcgctcatctcgatcggtctcgccaggaacatgctgcaggtggcgccgccgggcacgcacgcgctgatcgtgtccacggagatcctctcgtcgcagtactacgtcggcatggaccgctccatgctcctgcccaactgcctcttccgcatgggcgccgccgccatgatcatgtccaacaccgcggcccgaggcgcgcggttccggctcgcccgcgtcgtgcgcacggtggcctccgcgcgggacgccgcctaccggtgcgtgttccaggtggaggacgaggagagcaacacggggatccggctctccaaggacctcgtgcccactgccgcccagaccctgaaaagcaacatcgtcgccttcgggcccctggtcctgcctgcctcggagaagctcctcgtcgctctgtccatcctgaggcggaggctagtacagagcagccgggggagggtgtaccgcccggacttccgcaccgcgttcgagcacttctgcatccacgccggcgggcgcggggtcatcgacgaggtgcagcgcggcctcggcctctccgacgaggacgtggaggcgtcgcggatgacgctgcaccggttcgggaacacgtccagcagttcggtggtgtacgagctggcgtacatcgaggccaagggcagcatgaggaagggagaccgcgtgtggatgatctccttcggcgccggcttcgactgcagcagcgtggcgtgggagtgcatcgagcccgccgccgacgctgctgggccgtgggccgactgtatccaccgctacccagtgcagctccctaaattgatggaggcccttgattgaatccgtacatgtagacgtgaagtggcataatcaatcaatgttgtactgtatctttaatgtccaaatctgtcatcaacggacgggacatgtgattttttaacggactagttccaaataaactgttactgatctttc

SEQ ID NO: 32454 - DNA, 1451 bp, Zea mays
  Clone ID: UC-ZMFLB73347H06_FLI
aggaagagaaagagcaagatgttggtagcagcaaggatactagtgttgatggatttaaaagtcttttgaatttttttaagtctcgaattcctgaattcaaagttcaggtgataaatgttgatgtgtctgaggaaactgaattggctgcaaattcgtccgaagaatcagtgcaagacgatgtgaagagtactccagaaggctcattggaagagccaaccactgaggaacttgagcaggaggaggatgttccagaagaagatatggatgaagaaagtaaaagtacgaaagtgaagctttttatcagtggtgtggttcacaataaagaagatgctggaacaaaatcatacgttcgtgttccagctgaaataaataacatggaaaaagactcctttgacctgtacattcctggaaatggttctggtcatgatctgcctgaaacgaaggctgcaaaacagaaagttgcagatatggctgctaaattagcctcagagcttatgccgtctgatgttgccaaggcattatggggtacaaccaagagttcttcaaagataaataaagaagttcaggagcttttaaggcttaccttaagcaaggcccgagtcaagctgaccgatgataccttttttaaccggatcattatggacactaacagcatggatccatttaatggtaaagtttccccagttaagttgatgagcatttcttgtatgatctaacagttggaatgctgggctaacataggtctctatgtgggagcatttagtccatatggaccagaaattgtgcagctccgtcggaagttcggccactggaatagttccgatgacgttgagtttttcgagtatgtcgaagcagtaaagttgactggtgatctgagtgtccctgctggccagataacattccgtgcgaagattgggaagggcaagcgacttgagaatcggggcgcgtatccagaggaattcggtgtgattgccagttataaaggtcagggtagaatagctcagcctggattcaaaaatcctcgatgggtggatggtgagctgttggtgctcaatggcaagagtacaatcccacaccttggaggcgcagagctcggtttcctgtacagtgtacctgagcagagttttctggttctcttcgatcggcttaaccttcccgagtgttgagactcctaaaaggagcagatttctcacatgtagattgcatgaacgcacagaggctggccccagttccaagtgttcgaacaagtctgtggcctgcgggcccttttttccgtcgtcctctgggctattttgctacctgagattagggatgaaagtggtaatccgaactgttagaacaaatttaatattttaaaatagatatgtataaaatttgatgttgatcttttcttatgttatcaagcacattagtacaaatatgaataaaatattatataagttgttttatgt

SEQ ID NO: 32455 - DNA, 1654 bp, Zea mays
  Clone ID: UC-ZMFLB73349A01_FLI
tgaaattacaacagcaagaatcagcagtggaacaacagcaagggggagaggaaaagctccccgaaaatctcctcctctactttgagcaaatcctccacgatgacccactcatagttccattgcgcaagatacttctggtgcagagaccacaagcttgccatctccgccgagatcctccccgagctttaccatgctgctcgggatgcctactacaacgcaagggatgccccactatcgcgcactaatctcatgaggcacaccaaggcactgctcatactttgtcctgacctactcactgcatggaactccaggaaaatggtgctatcagcgttgtatgatttcacaaagctcaaggatgaactgcaattgtgtgccttgatcctttcctactctccaaagaacgagagcacatggagccataggagatgggtgataaaacaagttgctgagcaacatcaagatatgttggagcttatagggaatgaatccatactggtcaaagagatagcagagaaatcgaaaatgaactatcgtgcatggaggcatcgatgttggcttattccttacatgacaaggaaacaagtgctggatgaactgaatgagtcaacaagatggagtgagctacatgttgctgacaactgctgcttccactatcgaagatctttgctgcttgcgctactagacaacttctttgggaatgaagaggattcccttagttgggagtcagatatttgcttgctatggaaggaggagcttaggtgggatgagatgctgatcaaacgctaccaggggagagaggtttgaaaattagcctgttgttgttcttccacttgtagttcttgttggcgggtgtgtgttttgtttatactagctgtggtgatgtattgctgcagtcgttatggaaccaccgtcggttcctttcacacttgtggatacaacacttgctcactgttgaaggaaactggcccgcaacgacatcccagatggatatgtttgtcatccaggagatacaactgctgtcagagtgcctgcatgatcctgtggatgagtttgaggagtcgcgtgtccaagcagagctttcagcgctctacattatgtggataacaaagcaagtcccggatgtgaaggggaagctggaagagaggttgcattttgcctccatggggaggctgaaggacgtgctggcaggagcctgcaggccagagaagaggttttggatgaatttgctcaacctggctgatcaatccagtgacgtacaataatacatgacctttcttgttgagtttgagccgtcaacatacatgacatggacgccaagctcttgcttcaggtcctgtctcccggatttctgccaagtttttgcttcagcccaagagcaggaaaccagataatgtagatgctaaaaaaaagctctttgggtattggaccagtgagtctattgcgtgaaaggttcaagttttgaagaggacagttgcttagactccaaggtattatctccactgaggccattggcatccagaacaaatctagaaagcactgttaaatttctaagagtttctgggattaaattgctgagagtttctggtatattcgggcttcttgagattgccaactgatgatgggatactagagattgctccccgtgctttctgat

SEQ ID NO: 32456 - DNA, 760 bp, Zea mays
  Clone ID: UC-ZMFLB73349A11_FLI
cgcagattttggtttaacaaaacttacagaagttggtaatacatcactacccacacgtggaatcgtgggcacatttggttacatgcctcctgaatatgctcggtacggtgatgtttctccaaaggtcgatgtttatgcctttggcgttgtcctctacgaacttatttcggccaaagacgccattgtcagatcaaccgagtcttccagtgattcaaagggattggtttatctgtttgaggaggctctcaacacaccggatcccaaggaaggccttcaaagactgattgatccggcgctcggcgaggattaccccatcgactcgatcctcaagatgacggtcctggcaagggcgtgcacgcaggaagaccccaaggcaaggcccacgatgagatccatagtggtggcgctgatgacgctgtcgtcaaccagcgagttctgggacatgaacgcgatccaggagaaccaaggtgtcgtgaacctcatgtccgggagatgactcctgtccctgtgggctgtggtatatattattgtacgtcctacctgccttcccctgggcaattgtacattagggctcatttgtacggcccgttgacggccagagaggagggccactgtaggtatttacaatgtaatatcttgtcactcaagggttttctcccgtgtttaggctccctttggaacaaaaaggaaatttcctgaacctgtgttttttgctgtattttttaactaatttctatgaaattcttatagcattcatgtg

SEQ ID NO: 32457 - DNA, 571 bp, Zea mays
  Clone ID: UC-ZMFLB73349B01_FLI
ctccaccagattcggtgctcaaggcgctgaacatgacctccccgaagggcggcggcgacgccccgcgggggttccgggagaaacccaggaacgccgagaagccgaccaagtacgccggcagccccaagagcaacgctccccgcgtgatccaccagcctcgctaggttcgctgggggaactcatcaggaaggctgctgcccctcttgcagccttgctcctggctgccgccgctgtcgtggtctgctctttcaagtcgaagtaacggtggttcgagctagtggatagtgtggctcaactgtagaagttccttttgtatagcaagcaagtaaaaaaaaaaaatgaccaaaaaatataacaaaatgcagctgtaagtttactgctgctctctaagtcgtgttcagtcatccagtgtgtctagtctagggaaaccccataaaaatggtgaaggtggaatcccatcccagtgtcataattaaggatgcacttcttctgtaagcaaatgtatgatgtacaatggccggccggcagtctaaatgttacaactagctcttcttggtgaattcaccggtcc

SEQ ID NO: 32458 - DNA, 1517 bp, Zea mays
  Clone ID: UC-ZMFLB73349B04_FLI
ccataatcgaccatcgaggaggcgtcgttggagcaccacaaggagctcgagctgccgtacaccaaaagccaacgctcggagcgcaggagtaagatcaaaagggaaatatctatcatgaagatcgtaagacatcccaacatagttaggcttaatgaggtgttggccggcaggacaaagatatacatagtcttggaacttgtcactggaggtgaactgtttgatagaatagtccgccatgggaagctacgtgagaatgaagctaggaagtatttccagcagcttattgatgccattgattattgccacagcaaaggagtttatcatagagatttgaagcctcaaaacttgcttcttgactctcgtggaaacttgaaactttctgattttggacttagcacattgtctcaaaatggagtaggccttgtacacacgacatgtggaacaccaaattatgttgcacctgaggtgctaagtagcaatggatatgacggatctgcagcagacatttggtcgtgtggtgtcattctctatgttttaatggctggttaccttccctttgaggagaacgaccttccacatttgtatgaaaagataactgcagctcagtactcatgcccatattggttctctccaggagccaagtcattgatccagagaatacttgatccaaatccaagaactcgtatcactattgaagaaataagagaagacccatggtttaagaagaactacgtaactattagatgtggtgaagatgaaaatgtcagcctagacgatgttcaagctatttttgacaatattgaggacaagtatgtatcagacgaagtaacgcacaaggatggtggtcctcttatgatgaatgcctttgagatgattgcactatctcaaggtttggatctctcagcattgtttgataggcaacaggagtttgtcaagcgccaaacacgtttcgtctcaagaaagccagccaagactgtagtagctacaattgaggttgttgctgagtcaatgggtctcaaggtccactcccggaactacaaggtgaggcttgaaggtccagcgtcaaacagagcgagccaatttgctgttgttctagaggtctttgaagttgctccttctctgttcatggtcgatgttcgaaaggttgccggtgacactccggaataccacaggttttacgagaacctatgcagcaaactttgcagcataatctggaggccaaccgaagtttctgccaaatctacgccgctgaggacgaccacctgctagccgcctagcccagcactgagctactgtagtggcatcaccaagagacgtgattcgtagccgtcagaaagggagagcttctgttgaatctagcattgctcgtggagctgggattcatgttgaccaccaggtgtttgtatattgtagtaacgctattgtagatagtctgtatagctccatttgtgcagttgtacgtagcaggaatatgttaaaaaacaacttttaatgtcaggtataatcggtttgcatcc

SEQ ID NO: 32459 - DNA, 772 bp, Zea mays
  Clone ID: UC-ZMFLB73349D11_FLI
gtttccaaagtcatgatattttaagttcaaacccttcgactatgaatcaaagaaatggacacctatttcatgcatcatctctgggagagagtacacatactccaggtcatgtcacattggatggatacgaacacacaacttattctcagcgaagtttcccaatctatcgtgggcaaccatttcagcagtacaacaacatgacttccagttacatccgaccgatgagggctcatcacaatggtcagcctgtctggtctaattataggctgacagaacctccaccaactacaatgggtgacggaatgctctggggagggaggggtggccattcgtttgcagcgagcggactgccacctacacttaggaaagattttgggagaatcttttagtcctgaatccggaggaatgccgaatgccaccaaattgatggcatcagttgtttgcatctgcaattccgggttggattatttgctgggggtgcctactggtattgcaatttgttgtgttcctccgatgtctcccaggatgttcggttcaaatgattatatggtacgggatatgattacagtgctcgttctttgctatacctgcacgatctagtagaaaaatgtcagttgtgctacttgatgcgaatcttgctagttcgaggtttgggagagtttttctgtctcggttattgtcttcctttctctattctatttttgacagagggttaagttcctgaaccttaacatggctaagactgaagtgaaggccacgtggtcgtggtgac

SEQ ID NO: 32460 - DNA, 2425 bp, Zea mays
  Clone ID: UC-ZMFLB73349G09_FLI
caaaaggctattacgcttgtgtgcattgtgacaaaaatccttgctccaaaagaataaggaacaagatatgctatgtttatcatcgacgtttccttccaaaagatcacatttggaggagaaataaaagttttgatggtcatagtgaacaacgtgagaaaccagaggaatttagcatagatgagttgatgcaacaattggagagggtaaaagatgtaagaccaggaatacatactaaaagcaaaaagagaaagagggaagtagaaggtcaatgttggaagcgaagatcatgtctatgggatttgccatattggtcaagtttgaagttgcgccacaatcttgatgtaatgcacattgaaaaaaatatatgtgagtactttcttggtacatttcttggcattgttggaaagacaaaggacaccattaatgctaggcttgatttggaggacatgggcataaggagacatttacacttaaagcataatggggactcatacaattttccgcatgcaccatacacaatgaataaaacacagaaggttgatttttgtgactttttgagaagtgtgaaattccccgatggctatgtttctaacttagcaacatgttttagtactgatggatgcaacctccaagcattgaaaactcatgattgtcatatccttcttcaaagaattttacctgctgctattagaggaatcatgagtaaggacatatatgaagcacttgctgaattaggtatttttttcagcacttatgtgctaagacattgaagttggatgttttacaaagaatgaaagttgaaatcccaatcattttgtgcaagcttgagaaaatatttcctccttctttctttgatgtgatgctgcacttggctattcatttacctgacgaggcaatcctaagaggaccagtgcaatatgggtggatgtatccagtggaaagaaggttgtatacattgaaacgttttgtaagaaatatggctagacctgaaggatccattgcagaagcatatgttgctaatgagtgcttgacagcttgctcgaggtacttcgatgatgttgacacacgacacaatcgggagggtaggaacaaagagcgtgttgatttgagcagaggcaaattttatgtttttcagcatggagttgaacttcttggagcaccaagaattacatacctccaagatgattatgataagatggtttggtatgtcctaaacaattgttcggaggtcgagccatatataaagtacgcatttccttatacgtttgtcatttttatatgaattgttattatcgcctctaatatataccatatcaggatgtataaggaagagttagagaatgaagggattgttaatgtggaaaaaaccattcagaagcacttttcctcctggtttaagaagcatgtgagtttcaagttcatatcctcagcatcaataattgacttgttttcaccatggattttttatgtcttcagattgcaagtttgcgttttgtcgagggagaagacattgatgatgacctatatgcattggcatgcgaaccagatttgcgagttcgaattttttctgcatgtcttgttgatggtgttcggtaccacaccattgaccgtgagagaaatagaagaacccaaaacagtggagtcatggttgagggcactcataataatgaattcattgatttttatggctgcttaaaagaaattatcgagttgcagtataactcagatttgatggagcatcggacagttgttcttttccggtgtgattggtttgacactcatagcaagaaagtcagtatgaaatatgatggatattttagaagcataaaccatagtagttgttggtacaaaaacgatacttttattttagcagcacaagcaactaaggtattttatttgcaagacatcaagaattctggaagctggaagattgttcaaaaatttacacataggcacttgtggtgtgtggctgaaaatgacattgatgaaagacctagttcctcaggactatcataccaagatgatacatgtgttggttctgaagtgcaagttaatgaaggagatatggagataactggacatcaggatgctgacgaatctattaatgtcagtgcaagtgtggttgatgaatttcgggtgcaacgagaagaggaagtggaagagtatgagacaagcgacaatgaagatgaaactggatggcaatatgctagtgacaacgaagaatcaataactattgtcaatgacgatgatgatttcagcgataacgagtagcatgttttttgtttgatctgagagaagtgaactctatgccgtattttgtttgatttttaagaagtgaactagctactgttatttgagagaagtgaactgtatgctacaatttgtttgatttttaagaagtgaactagctactgttatttgagag

SEQ ID NO: 32461 - DNA, 1256 bp, Zea mays
  Clone ID: UC-ZMFLB73351A08_FLI
atcatggcggagcacttggcttcgatcttcggcactgagaaggacagggtcaactgccctttttacttcaagattggggcctgtcgtcatggggatcgctgctctcgtctgcacaacaggccaactatatcaccaactcttgtgcttgctaacatgtatcagcgccctgatatgataacccctggagttgatgctcaaggccaacctattgaccctgagaagatgcaggagcattttgaggacttctatgaggacatctatgaggagttggggaagtttggtgagattgagaatctgaatgtttgtgataaccttgctgaccacatgattgggaatgtctatgtccagttcagggaggaagagcaagcagccgcagcatacaatgctcttcaggggcgcttttactctggccgccctataattgttgagtattctcctgtgaccgacttccgtgaagcaacctgtaggcagtttgaggagaacagctgcaaccgtggtggctactgtaatttcatgcatgtgaagcaaattggcagggatctcaggaggaagctgtatgggcgttctgcttccaggaggtaccatgggagaagccgaagccgaagcccgccaccacaaaggaggggccaccgtgaccgtgatgactaccaccaccgtgaccgtgatgactaccgtggtggcggcggtggtggaaggggaagaggtagcaggtatgacaggtacgatgacggagcaggcagaggtggcaggcatggcaggtatgatgatggagcaggcagaggcggcagacatgacaggtatgatgatggaggaaggcgcaggcatggtagcccctcaaggcgtgcaaggagcccagtcagggaaagcagcgaggagcgaagggccaagattgagcagtggaaccgtgaacgggagggaaaacagtgagctctccgtggctactgtttgccggacttgttgcttagctccggctctcatcgctatattctaagtatgcttgtgtggattgcattctgcatggctaagtaaaaccttttaagatcaggattcctcggttcattttatggttaaaccagacatcatttgtttccatctgtgttgtgtcggatcctttgctattatgttattttgacaattggtgtcaaatcttttgtggtgtgctattagcttatgatgatgtcagttgtggtttgtcactagatttgccatctggctttcagtcgtgtgttatgctgttccatggcggatttcttgtt

SEQ ID NO: 32462 - DNA, 1132 bp, Zea mays
  Clone ID: UC-ZMFLB73351H04_FLI
gaggttttgaatggattacttagtagagacgattttgacgtggcaattcgatttcccattgggataatacctgctggttctgataattcattggtgtggactgttcttggcatcagggatcctgtttctgcggcaatcgctttagctaagggggatttcacaccaatagatgtgtttgccgtaaagtggatccaagctggagtgactcattttggtttgacagcttcctactatggtttcgtagctgatgttctgcaactgtcagaaaagttccgcgtgcagctcggtcccttccgttacgttgttgctggccttctgaagtttctttcattaccccagtacagatttgaggtggactatctcccttcatcgctgcaggggagaagttctgaatcaagaccactggctgaaaaacgtcacgaacagctttctgatgacggcaaggttaggagaggcacacagaccaacggtaggatcaaagacgactgggttaccaggaacggggagtttcttggcatttttgtttgcaatcacttctgcaagcctgcccaggggttactttctcctgttatcgcaccgaaagcgcggcacgacgacggcagcctggacctgattctcgtccatggaagcggcaggctgagactgttttgcttctttgttgcctatcagctctgctggcatcttctactcccctacgtggaatatgtcaagataaaagaagtgaaggttaggccagttggcagtacccacagtggttgtggcgtcgacggtgagcttcttgatggagagcgcggtgctgaatggcagtgctcgctgcttccagcacaaggcaggctgcttggccaggatcccggtgctttcaactagttagggctcgttcggttagctctcaatccatgtagattgagtgagattagatgagtttgaatcccaaacaagtcaaacttcttaattttttccaatcccatctaatccatgtgtattgggaataaccgaacaaggcttactgttttatctgtccagcagtaccgaggttgttggttaatttcatgataagagagcgagtttcagcaatgttcgtatactgattatacagtattctgtctctatagattgtagctgcagcagtctg

SEQ ID NO: 32463 - DNA, 402 bp, Zea mays
  Clone ID: UC-ZMFLB73354B06_FLI
gtgattactcaaggtgctgatccagtggttgttgctgaggacgggaaggtgaaaacgttccctgtgatcctattgcccaaggagaagcttgttgacaccaacggcgcaggtgacgctttcgtcggaggctttctctctcggctggtccagggcaagagcatcgaggactgcgtgacggctggttgctacgccgccaatgttgtcatccagcgcccaggctgtacctacccagagaagcctgacttcaactagtgcaatactcaggcacgttacgagcggttcggcgtgtacactccctgtatcctttccggtccggccaattttttgtacgaggcatggtttgccatcattatactgttagcttcggcgatgcttgcaatgcaacgagaatgcgttggaacc

SEQ ID NO: 32464 - DNA, 1791 bp, Zea mays
  Clone ID: UC-ZMFLB73355D01_FLI
tctgtactccctagcagcggcagctaggggaggagaggggaagaagaaatgctctgatgccatgttggagtgaatgaaaaccctaattgatagatgggctaccgtattacaagtattacatacagtctacccttaatgggctggtctctaggcccatagtgcacacacacaattagtctaacaagtagtgcctctattcatgcttgagttctgcaaactgatatgtcattaactgtttctcacactttaacacttacgtctttggtattcttacaattacaacttgtatgcatcacatacgtgcaggcatagtatatttctagtatttctcatgctgctttatcatttgtttgcttcttttcactcacaatgtgcccttgtttgcttaaggctagtgtttttatgcaaattgaattgaaattcaactttcaactgcctaactacatatcttgaaccacatctgctaagttcaatcttcaatgtcaatcttgttccataaacccctaatccctctggatctgattgtagatgaatattcactcttttgaatatttgcaaactttgttccagaagtattcttcttgttgtttgttccagaagtctgttaaaactgcagtcttcttttacttgtgcacttcaccttttccttttgttgcacttcgtgctcctgtatggtgactgttgaaaggtgttactagtattttaaagtacttagaagaaaatgttttgttccagtgttatttcatcttaataattcattgctgagtcaattacattttctcacttctagtgcacaaagcaatgcaaagatcgaagagctactccaagaggaccacaatgctaaacgtaggcgggaaaaataccaaaaacaatcatccctcttgtcaaagctcactcgccaactcagcattcatgacaatagagcagcttcatatgggaacgatagttctggagctggtaagttctatacttcaaacaagaacatttttcattgtagtccacaaatgtgtagtataatgagctagtaacagtatgatgcttagttcataagttcacgtgcagtttctagaaccccagctaactagttagatacctagatcgatattgcttgttgtaaatatgtggaccagttgtactttccatttattgtagtttttttttttttttgccttttgggtattaattgaggagcctaacctcgtgtggacataaatgtacttgcagagggtagcccccggtctcctggccactctggtgaggattggaagtctgccttcgactcagcaacaaatggctctgttgaccggtccagttcacagcatgagacaaggtcaaaaagtgctgacagtcgaggccggcgccatgaaaacggggatgccaactctggcagccgacgcacacctaaccggttgccaccggcaccaccaaatggggggagatactaagtatgttgattgatcattacctgtgaccaatcatcatcatatgctcttgccaggttctcatcctctactgatactggttattggtggaagaaaacatatgggaccggagaacggaaagcttactggaagatttggatggacggtgtgtatcaagagaaccaaagttgtttatagaaaattagaatcatataggtcattgatgattgtcatttcccgatcgttttggtgtatttgatcttttggatcctcattgccagtgggattttgttgccacggatcagttaattttggttttgtacgcttcttctgtaagtctccccatcaaactggcaaatgtattctttac

SEQ ID NO: 32465 - DNA, 779 bp, Zea mays
  Clone ID: UC-ZMFLB73363B06_FLI
caacctggtgccctacccgaggatccacttcatgctttcgtcctacgctccagtcatttctgctgagaaggcctaccacgagcagctgtccgtggctgaaatcaccaacagcgccttcgagccatcctccatgatggccaagtgcgacccccgccatggcaagtacatggcatgctgcctcatgtaccgtggtgatgtggttcccaaggacgtgaacgctgctgtggccacaatcaagaccaagcgcaccatccagttcgtggactggtgcccgactggcttcaagtgcggaatcaactaccagcctcccagcgtcgtcccaggcggtgatctggccaaggtgcagcgtgccgtgtgtatgatctccaactccaccagtgttgtggaggtcttctcccgcattgaccacaagttcgacctcatgtacgccaagcgcgccttcgtgcactggtacgtcggtgagggtatggaggagggcgagttctccgaggctcgtgaggatctggcggcgcttgagaaggactacgaggaggtcggtgctgagtttgacgagggtgaggacggcgacgagggtgacgagtactagacgctctactggcgcggcgtcgtcgggcttgtgtgccactgctatcctgtgatctgccctgagtggctcctatcgtgttatgtttctgtcggttcttatctatctgtcgttgtgtggtttacaacttacgttgtaagactttattcccccgctttgctactgggttattaagtttggcgttattgttttcttg

SEQ ID NO: 32466 - DNA, 1338 bp, Zea mays
  Clone ID: UC-ZMFLB73363C10_FLI
ctacgccgccacgtgacaccgtcgccgccgccgccgccgccgccaccggggtcgccgtcgatgggattttgacggagttccccttgctctcggatgactgcgttgcgacgctcgtggagaaggaggtggagcacatgcccgcggaggggtacctccagaagctgcagcgacggcatggggacctggatttggccgccgtcaggaaggacgccatcgattggatttggaaggtcattgagcattacaatttcgcaccgttgactgccgttttgtctgtgaactacctcgatagattcctctccacgtatgagttccctgaaggcagagcttggatgactcagctcttggcagtggcttgcttgtctttggcttcgaaaatcgaagagacttttgtgccactccccttggatttgcaggtagcggaggcaaagtttgtttttgagggaaggaccataaaaaggatggagcttctggtgctaagcaccttaaagtggaggatgcatgctgttactgcttgctcatttgttgaatactttcttcataaattgagtgatcatggtgcaccctccttgcttgcacgctctcgctcttcggaccttgtcttgagcaccgctaaaggtgctgaattcgtggtattcagaccctccgagattgctgccagtgttgcacttgctgctatcggcgaatgcaggagttctgtaattgagagagctgctagtagctgcaaatatttggacaaggagagggttttaagatgccatgaaatgattcaagagaagattactgcgggaagcattgtcctaaagtctgctggatcatcaatctcctctgtgccacaaagcccaataggtgtcctggacgctgcagcctgtctgagtcaacaaagcgatgacgctactgtcgggtctcctgcagtatgttaccatagttcttccacaagcaagaggagaaggatcactagacgtctactctaattgtggtacgcttcaggtgtgctcctcaccgctctaggagtttttgattggttcaaacatcttaaatttagtttggccgctggaggattatggtttagtcaagtagttgctgaatggaacaacaaaacacgcacactacttggtccataaagacaagaaaataactggcagcgtcccgcgagccagcgctgcaatccagttcatgcaagaccctagagtccagggggggtgctggtgtaggtagagagggaacaaggcattcacatacgccgtagagatgagagagcctctcgtatgttttgtacttttgctccttcagtttgcaatgaactatataaacaaggattgccttggggcagtgaac

SEQ ID NO: 32467 - DNA, 1190 bp, Zea mays
  Clone ID: UC-ZMFLB73366B02_FLI
ccagctttggctgcccttgcttgctgctcagttctttgccccctgttcctcctcctcctcttttcgcacctcggcgcctgcttcggcatcaactgcgaccgagatggaggcgcaagacgactgcaagtggcgccaagtcccggcgttcggcgactggaacctgtgggacgacatgcccgtcacccagtactttcaggcagggaccttcttcttcgccgcgccgacgacagagaaggacgacgacgaggatctcttcaaggtgccccagttccctgccacgccctacagctacaagaaggtgaaacaaaacacaacgctgcatttaatttctttcaccaatcaccctcgaaaaaaagttttcttcttccaccagctctaaagatatcagcactgtttcatgcagtactttcatttcaaatctccacttccatatagtagtacatatatacatatacccagtctgcactagcgatgagaaagatactgaccaattctgtggtcgatgcttgcatgtgcagtgcgttgttcgagtgaagggggagaaaggaactgctgtgcctccggcggcgaggaagggaggaaggaggcgccgcgtgaacgagcaacagaagtggaagcccaagggagctgtggacgaggacctctacaagatatccccgcagcttctctgcaaggtgaagaaggcaaggatcctgtaatcctaatttgcaccccacgtgtacctaagtgggtctacttcttatctagttctcgtcatgtgattggcataagcctttatctagcctaagctgaccctttgcaagtagcttttgttaggataacaacactagatagaacagctatactttgccaatatatgctgtgacctttcttcaaaagcttaagcacttcatttttcacagcaagtggagctttgccaaagatcatgagcaataaagctggactgtaaactccagaaagattttaggtgagagttttgttctcatgctcttttgtttgtgttgcagaagaagctcctgaggaatctgctgggagggtgcctgggcctgagctgcatcgcatgaccgagagacgcatcgcttaataagtttctggggagtttgttgttcggtgggtgctctggagagttgtatagtgtctacgctaatatggaatcaatggaaacttactgctgcttttgcactcttttg

SEQ ID NO: 32468 - DNA, 1337 bp, Zea mays
  Clone ID: UC-ZMFLB73366G03_FLI
gctactctctcctttctcactaccccgcccgtcaaagcgagagcgccgtatcaccggtctatccatcccttcaccgctgcctcgacccgcgccgaaagatacctttcccccccttcctctcgcgccgccgttttggtgcgaccatggcggcggagggggaggccaagaacccgtccggcggtggcgaagggggtaacccccagcaccagcaggcagtgcaggctgcgccggcggagccgccaacggcacagggggaagcggtgcaggaggctggagcgcaggcgacgggacaagagccggagggggagaaggcgaatcgagatggggagggaagcgcgggggagaaggacgacggcgcgtgcagagatctggttctggttgaggatccggaggtgctcgccgtcgaggacccggaggaagctgcagcaaccgcagcactccaggaagaaatgaaagcgctcgtggcatccgtccctgacggtgctggggcagcattcacagccatgcagcttcaggagctagagcagcagtcccgggtttatcagtacatggctgcccgagtacctgtgcctactcacctcgtcttccccgtatggaagagtgtaaccggtgcatcctctgaaggcgcccagaagtaccctactttgttgggcttagcaacactctgcttggacttcgggaagaaccctgaaccagaaccagggaggtgccggcgaacggatggcaaaaaatggcgatgttggagaaacactattccaaacgagaagtactgcgaacgccacatgcatcgcggtcgcaagcgtcctgtacaggtcgttgaggaagccgagcctgactctgcttcaggctcaaaatctgctcccagcaaggccaccgaaggcgccaagaaggttgacgacaagagcccaggtagcaagaagcttgccgtggcggcggcagctgcagctgctgtgcagtctacgtaattgatgcagcattttagtagtcgcaggaagagcatggcggcgctggcaactagcgccttcttttcattgcatgtgatctttagctataacctcatttagcacactcccagtggtgtccgtgggaggaggaagccgcaagaacttcccccgtagggtgtcgactgaaaaaattcacttgtagctgtatagtttgatctctagctttgtcgtgcctccggccttcaggtaggcgatgcggcatgatgttataaatcctctcccagaactgacaatatcgcattgtaacccaagaagccggtgcaagaacctgtgaaactgcattgatgcgcaattatgtgattcatcagttgtataacaaagtggaagatgcat

SEQ ID NO: 32469 - DNA, 1492 bp, Zea mays
  Clone ID: UC-ZMFLB73366G04_FLI
cgtcggctcgccgcagcagaagttcaccgtcatcttcgacaccggcagttccaacctctgggtgccgtcctccaagtgctacttctcgatcgcttgctacttccactcgcgctacaagtcagggcagtcaagcacttacaagaagaacggaaaacctgctgccatacgctatggaactggttccattgctggttttttcagtgaggatagcgttacattaggtgatctggttgtgaaggatcaggaatttattgaagctacaaaggagccagggcttaccttcatggttgcaaaatttgatggcattcttgggctaggctttcaagaaatctctgttgggaatgcaacaccagtgtggtataacatggtgaaacaaggtctcatcagcgaccctgttttctctttctggtttaaccgacatgctgatgaaggagaaggtggtgaaattgtgtttggtggaatggattctagccactacaagggtgatcacacgtttgtcccagtcactcggaagggatactggcagttcaacatgggtgatgtcctggttgatggaaagtccactgggttttgtgccggtggctgtgcagccatcgcagattctggaacttccttgcttgctggccccacagccataattactgaaatcaatgaaaagattggtgctgctggtgtagtcagccaagagtgcaagactgttgtttctcaatatggacagcagatcctagatcttttgctagctgagacacaaccagcgaagatctgttctcaggttggtctgtgcacttttgatggcacccatggtgtcagcgctggaattcggagcgtagtggatgatgaagctgggaaatcaaatggtggtctcaagagtgatccaatgtgcaatgcttgtgagatggctgtggtatggatgcagaaccaacttgcccagaacaagacacaggagctcatcctgaactacattaatcagctttgcgagcgtcttccgagtccgatgggagaatcagccgtggactgtggcagtcttgcgtccatgcctgacattgcgttcaccattggaggcaagaagttcaagctgaaaccagagcagtacattctgaaggttggtgaaggacaggctgcccagtgcatcagcggattcacagctatggatatcccaccaccccgtggccctctctggatcttgggtgatgttttcatgggagtctaccacaccgtcttcgactatggcaagctgagggttggcttcgcagagtcggcctagggatatggtttggcagcaacccgtccagaggcaaacgcgtaatttgtgtgtttatgcgaccggcgatgtgtgtatatatgctactacatgtttagtgatgctttccgagacctgagacaacgcccgtctgttttaacgtggcgcaagaataattctggttctggatgtattctccgtacacaaaggcgtgtctgatgcaatggtgaccatcttgcggttgcgtgtttg

SEQ ID NO: 32470 - DNA, 901 bp, Zea mays
  Clone ID: UC-ZMFLB73367E05_FLI
aatgaaccacctctgtgctctgagagtgatggatcacgtttcccttggtataaacctctcgatagttgcctctttcctgcagttccgagttcaggtgaagggaatagttgggccgtctcgtggcctgaaagacttaatattaagcactcggctacatctaacaattcttccattcagtttcctcaagaaaaaattgattctgatacaagttattggaaggaccttgtttcagaaatatatctcaacgaatttgcagttaattggtctagtgttcgcaatgttatggacatgaatgcgggttttggaggatttgcagcatcaattatcaatcgaccgttgtgggttatgaatgttgtacctgttgatcagccagatacattgcacatcattttcaacagaggtctgattggggtatatcatgactggtgtgaatcttttaacacatacccacgaacttatgatcttattcacatgagttatctcttagggccccttacgaaaaggtgccacatcattgaagttgcagctgaaattgacagaatacttagacctggtagatggtttgtgctgcaagacactatagacatgataagaaagatggaccctgttctcaggtctttgcattacaagactacaattgtcaaacatcaatttcttcttgccaccaagggtttctggcgccctggcagtataggttcttagtcatgatgattccggcttccacccaaaatggtattggctccatggactcattgtgttgattcttcttattctttttacgtcgattcttctcatagcatagattagatgcttcattgaagccccatatcaagttgagtttcatgttccaattttcccgctttgttttactattttaaaaatgttttggccttggtcatgc

SEQ ID NO: 32471 - DNA, 590 bp, Zea mays
  Clone ID: UC-ZMFLB73369D05_FLI
cgctggactacatcatcgacacggtgcccgtgcaccacccgctggagccgtacctggcgctgctgaagctggacggcaagctcgtgctgctgggcgtcatcggcgagcccctgagcttcgtgtcgcccatggtgatgctggggcggaaggccatcacggggagcttcatcggcagcatcgacgagaccgctgaggtgcttcagttctgcgtcgacaagggactcacctcccagatcgaggtggtcaagatggggtacgtgaacgaggcgctggagcggctggagcgcaacgacgtccgctaccgcttcgtcgtcgacgtcgccggtagcaacgtcgaggcggaggcggcggcggcggatgcggccagcaactgatggcaccgcgtcgtcgagtcgaaccacgtctgtgcgccgcgtgcaacgttcgttcgggtcgagtctgcgtgcaacgttctgcttcctttactagttgttgtctttccgccttcttgccgttctgttctgggctttgagatgagacgatggatggtcagtttttaatgtcagactgaataactacgtatagtactgtagtattactcggagtacgcc

SEQ ID NO: 32472 - DNA, 1121 bp, Zea mays
  Clone ID: UC-ZMFLB73369G08_FLI
caaacaccggaatctagtcagccttcaagggtactcgttgtcacctgttgggaacctcctcttttatgattatatggagagtggcagcttatgggatgttttacatgaaggctcatccaagaagaacaaacttgactgggtgactcgcctacggatcgctcttggtgcagctcaaggcctcgcttaccttcaccatgactgcagcccacgaataattcaccgggacgtaaaatcaaagaatatactcctcgacaaagattatgaggcccatcttacagacttcggcatcgctaagagcttatgtgtctcgaagactcacacgtcaacctacgtcatgggcactattggttacattgatcccgagtacgcccgcacctcccgcctcaacgagaagtctgatgtctacagctacggcatcgttctgctggagctgctgaccggcaagaagccagtggacaacgagtgcaatctccatcacttgatcctatcgaagacggcgagcaacgaggtcatggagacggtggaccccgacgtgggagacacctgcaaggacctgggcgaggtgaagaagctgttccagctggcgctcctctgcaccaagcggcagccctcggaccggccgacgatgcacgaggtggtgcgcgtccttgactgcctggtgaacccggagccgccgccgcagccgcagcagcagcagcagaaggcgcacgcgcaccaccagctgccgccgcagccgtcgccgccggcctacgtcgacgagtacgtcagcctgcggggcaccggcgccctctcctgcgccaactcgtccagcacctcggacgccgagctgttcctcaagttcggcgaggccatctcgcagaacatggtgtaggggaagacgtagacgttcggtgaggcgccttgagtgaggccgattgcagggggagtagtttgactgacattttgtgggacgcagcgcaggagattaacatgggactcagtagctagggtgttgttagctgtaaaaaaagtcatgtgacgcaagagcagcggagcttcttcctcttctttatcccccctccccatttttctttggtggtctaacttactaggaggctgtattgatccatcatcatctctcc

SEQ ID NO: 32473 - DNA, 2683 bp, Zea mays
  Clone ID: UC-ZMFLB73369H04_FLI
gcgccagcgaactccgctccctctacgcagccgtatcgtcccgactcgacgacgccggcggccggcatcagccccgttcggcgcgccgccgcaccacagggcacctacccagcaagcgccgccgccggggagccggagaggtgggccccggggatgacgatggcctcccggcgcggaaacagtccaggagggtgaggcggcggcgggagctcgctgccaaccccgcggaggggttctcggtcgccggcgacggtgcgcggcggctgcgcacgcacctgtggtatgcgaaaaggttctccatggagaggcggtggacattcatcttgcccgtcggcgcccaggggaggggtaagggctcaaggagtgttctcaagcgtctgaaaaatgggacaactatccatgatgctggctacttcattccaatagagctggatggtccagaggacgccctgttatccgttctcagaatggttctgcgcccatcgcctgcagaaaaaacacccgatttgaagcatctacaggatcaagttatgcgaggtgtttgctatgagaatgctatgctttgggatgttaggagtatgcattctcaaattgttggaccagtaacatatatgtggcgtccattctcaagagcagatgacaaatctgggattgaaggagatcagtgtacttctcactgcattcacgatgaaagcggcaattcctcacgacgccagttgtggatatggattcatcctgctgcacttgatgatggaattagtgcaatacaatttgcatgtgagagacagattcaagattctggtggtgtggtcaaatgttgttcattagagggaaaaattggaagattggaagtcaatggatgcaaggctatgcaatctcttaagaagattttgcatccaaccagttcaagtaagatcaacacgatatcaacaagtgatatctccgcatcaactgatactctcctggattcctgtattgcccctcatcttttgaaagcttctgtcattagtaatgctgagattcttcaacctggtgctatactatccatggtagttcatgaccccagggaagtttcagtcaagggaatagattcttctaaaatagtctcccatgacaaacagagcgaagttttggaggaagatgtagccccaaatgctaatgaggcgtcatcagaagttgcaaatatattgccattgatgtggatgcaccctgggaaacatgatatactcctttctgactgtagggaactgtgggactccaggcaaaccataaatcctcctgtgtcagatgaggttctctgtaaggagaagcactctgaacgtataaagtttttctgcttggattcaggaaatgatcaagagcaaacaacacaagagaaggacaacttcattcgatcctgcccggttattcttttgaaacatgccagagaaggaataccttctctagggtggtccatcattctacctttgagttgggtgaaacctttctggctctttctagtatctcatggtgcccatgcaattggcttaagagagagacggtggattgcagcaaagttgagaatgccatgctttccttatgattatccagatagcaaagcgtatgcatcatacatgtccaaagaagctgctggttttgataaagtagttgagcgccgccctgttgccaagagaccaccaagagttcctgtgcctcctttatggcactgtatcatgacttgttttcgtaaagattatgatggcatattgggtgttcttgaagtagacgacttggtgcgggctaacatggtattacctaaaaactcttctgcacattgcgaatctggagacgcagaaccatcgcaagcaaatgttgcatccttgcaacttcatgtgccaagaaccacccaaatgttgagacagtatgtggaagaatttgataggaagtatctgagctcatcatctgacatgaaagtggattctgatgaacccaacctagcttctgataacactgtcggcatgacacggttcgcgagtgaattatgccttacaagggttctgatccgagctttcaaggaaggttcttttgaagagggtgcagttgtttgtgccccattacctgcagaactttcagcttggaaaatcagatcaaaggaagaagaggaagaatgcgtagaaaaatgggagctccagcttcctcagtcccatgttagttcctatttctcgtggtttgatcccagcacgagcagcctccagttgcctacggatggcgtcgcacgggaggcgttcaggtggccgataggctttgtcaccagtggtttcatccatggaagtaacgggcaagacgcagtggcggtcgcattctgcgaggcaaagcttctggcagcgttgaggcgacagcaatggacgcatggaaacttgcagagccgggaggtgtgcgtccttgtcaggaacgcgagatcggctgcctaccgacgagcgctggccaccaccgtcctggagcatcaggaatcagacctagcgtttctgtagtctagtcgggaacctgttgacgttgattttttctctctctctcccttttggagttccatccatcctccactcatccgttgatgaacctaagtaatttactggtgattacagtttatttgtgcgatgcaaaatcattaaacagaagaagtaaatgcatctatctcatttgacgg

SEQ ID NO: 32474 - DNA, 867 bp, Zea mays
  Clone ID: UC-ZMFLB73371H12_FLI
gtcgcagcaacgatggggaggtcgccgtgctgcgagaaggcgcacacgaacaagggcgcgtggaccaaggaggaggacgaccgtctggtggcgtacatcaaggcgcacggcgaggggtgctggcgctcccttcccaaggccgccggacttgtgcgctgcggcaagagctgccgcctccggtggatcaactacctgcggcccgacctcaagcgcggcaacttcacggaggaggaggacgagctcatcatcaagctccacagcctactcggcaacaaatggtccctgatcgctggaaggctgccgggcaggaccgacaacgagatcaagaactactggaacacgcacatccggcggaagctgctgagcagggggatcgacccggtgacacaccgccccatcaacgagcacacgtccaacataaccatatcgttcgaggactggggccaggggaaggcgctcaagtgccccgacctgaacctggacctctgcatcagcccgccgtgccaggaggaggaggaggccatgctgctgaggccggtgaagcgggaggaggccgggctctgcttcagctgcagcctggggctccccaagagcgcggactgcaagtgcagcaacttcctcgggctcaggaccgccatgctcgacttcagaagactcgagatgaaatgagagcttccatccatctctgtctgtctctctctgtaacttcacccctgataacacgcagtagtagtagtcaccaactgatttgtcgctccattaattctgtctctctctctctctctctcgctatgtaaattagcatcaccaactgattgattgatcatgggcaattaataatacttgttgctgctgcaaattgacatt

SEQ ID NO: 32475 - DNA, 447 bp, Zea mays
  Clone ID: UC-ZMFLB73372A12_FLI
gggggcctctacaaagggttggggccaagctgcatgaagttgatgcctgctgctgggatttcctttatgtgctacgaggcttgcaagaagattctgatcgaagaagaggatgagtgaagtgtgtgcggatgcattgcgtcattagaactcagttttgcgacatcctgaattcctgatagcaggcagcttctttcggtatttctttgagtcgactggtgctggagttggttgaaactcaagactgaggttactgctgcagtcagcataagttctttttttttgatgagtcgaccaaggggggagaggcccccaccagatccactgcattatgtagctcttcgagttcaaagtacacgccaagcacatattcttaacccccactttgcacccagtttgatcttataaattcacctgtttttttccagatttaaacttttacttttgggt

SEQ ID NO: 32476 - DNA, 1308 bp, Zea mays
  Clone ID: UC-ZMFLB73372G01_FLI
tgagcgccacggtgcgcgtgctgacgaacaacggccgggacatcatcttcgcgccctacggggagcactggcgccagctgcggaaggtggccatcacggagctcctgagcgcgcgccgggtgctctccttccgcgccatccgcgaggaggaggtcgcggccacgctgcgcgcgtgcgccgccgccgcggcggagtcgccgccgcgccccgtggagatgcgcgcgcggctgtccgcgctcgtggccgacgccacggtgcgcgccgtgatgggcgaccggtgcagggaccgcgacgtgttcctgcgggagctcgaccgctccatcgggctgtcggcggggttcaacccggccgacctgtggccgtcctcccgcctcgtcggcctgctgagcggcgccgtgcggcgcgccgaggagtgccgggacacggtgttcgggatcctcgacggcatcatcaaggagcacctgcagaggatggacagcgccggcgccggcgccggcgccggcgaggctgcaggcgaggaccttctcgacgtgctgctcaagatacacaaggatggcagcctccaaatcccgctcgacatggacgtgcttaaagccgtcatctttgacatcttcggcgccggcagcgagacgtcggcgaccacgctggagtgggccatggcggagctgatccggaaccccaaggcgatgcagcgggcgacggccgaggtgcgcgaggccttcggcgcgcgcggcgcggtggccgagcacgagctgggcgagctgcggtacctgcacctcgtgatccgggagacgttccggctgcacccgccgctgccgctgctgctcccgcggcagtcccaggagccgcgccgcgtgctgggctacgacgtgcccgcgggcaccaccgtgctagtgaacgtctgggcgctgggccgcgacggcaggtactggccgggtgaccccgaggagttccggcccgagcggttcgaggccgaggccagcgaggtggagttcaagggcgccgacttcgagctcctgccgttcggcgccggccggaggatgtgcccgggcatggcgttcgggctcgccaacgtcgagctcgcgctcgccagcctgctgttccacttcgactgggaggcgcccggcgtgtctgaccccgccgagttcgacatggccgaggcgtttggcatcaccgcgagacggaaggccgacctcctcctccgccccatcctccgcgtgcgcctccccgttcccggtgtctaatcgccgcgccgataatggtttgcaagctcgttacttgtgtcagtgtgcattcacgtgatcgaca

SEQ ID NO: 32477 - DNA, 2318 bp, Zea mays
  Clone ID: UC-ZMFLB73372G03_FLI
atgcttggccaaggcggtggaaggggcgggacctgggcccggtgccatcgggatgtttgggaagctcggtcctaggatttgcaagttgctcggtgggcagggcgtgcaagccaaggcgggattactaggcatcatgggaagtttggcgcaggtgggagcaatcagttcccagaatatgcagcagactctgcaaagtatccgcgactgccttgagaacagcgattgggctactagaaaagcagctgctgatacattatctgtctttgctacccattctgttcacttgataggtgacggaacagctccaaccattgctgctctcgaagcttgccgttttgataaggtaaggcctgtcagagatagcatgattgatgcagtacagttgtggaaaaagttgactggagaagatgcaaatgatggtagaaataaggatcttgctgatggtgaagggaaactggactcaagaaggtcaatacaaagaggtggaaaatcagaatcctttgatgattcctctccagattcacctagtaacaacgtgaagggcagtagcatagctgaaaaggcagcttttcttttgaagaaaagaccaacattaactgacagggaattgaaccctgagtttttccaaaagctcgagacaagaaaaacagatgacttggcagttgaggttgtagtcccccacaagactctacaatctcacttgcgaggtgaagatgaaacagaagaagatgatgatcctgttggtccagctgacagcaatggatcagctgaagatgaagcaaatctaactcaaatgcgtgctagctttaattttcagaatatccgggataaatgggctggccaaaggggaaatagaaacaaaattacaaaagctaggacaactgatgttgaagataggggcgaacccagtacaaaagattccactgctgcagccatgaacatttctggagaaggccctttcataaataataaaacaaattggttagcaatacagaggcaattgtcacacttggagaggcagcaaactagtctcatgaacatgttgcaggatttcatgggagggtctcatgacagcatggttacattggagaacagagtacgtggtcttgagagagttgttgaggaaatggctagagaaatatcactctcctcaggcaggagaggtggtggtccagcgttgggctttgattcatctcctggcagatcatctaaacacaatggtttccatgaatattctaattcgaaatatggaaggagtggtgatggacggatgggatttgcagaaaggtatttctctgcagatgctatggcttctggtacgaaaaaccaatcttggagaccagattctgaaccatgggactcatatgcttattctggatcaagaagtggtatgaatgtgaggagaggattagattctgtttcatcagacaatagaatggcaagaaatgaacggagtaatgatcaagtgggtccccggagaggttgggacaaaggtcagggaccctttaggttcggtgagggtccttctgcccgaagtgcatggcgggcctcaaaagatgaagcaacactggaagctattagagtagctggtgaagataatggaaattcaagggccgctgcaagagttgctattcctgaactggatggagaagctttgaatgatgacaaccaaggggatgaaagaggcccactttgggaggcctggactcgtgcgatggatgctgttcatcttgaggatatggactctgcttatgctgaacttctttcgactggtgatgctgaattacttgtaaagttgatggagcaaactggaccggtcgttgatcaactttcaaatgaggttgcaaatgaagtcctacatgcagtggggcagtttctcatggaagaaagcttatatgacgtagcattaaactggcttcagcagttgactgatctggtaatggaaaatggctctgattatctcggaatacctctagacgcaaagcaggacgtcttactgggacttcatgaggcgacagcgattgacctgcctgatgactgggagggagcgacaccgttgcagataatgaagcagctagcttcatcctggcacatcgacctacagcaacttatcaattagggtaacattgattaccgacatatgggttaatttcatttgttcgttgcctcttggtcttgtctggcctgttgctattaggattaggaatattatattggttggagtggaagtggcactgtgttgaaatggattggttgttggggaaatatgatgtggatattgtctcaccttcatctaaaggctttcataattcatagtt

SEQ ID NO: 32478 - DNA, 816 bp, Zea mays
  Clone ID: UC-ZMFLB73376C06_FLI
gtcgtctcctgcgccgacatcgtcgcgctcgccgcacgtgaatccgtcgccctgggtggcggcccggcgtacaagttgccactgggcaggcgcgacgggctggcgccggcatcgaacgccgccgtcctagcggcgctcccaccgccgacgtccaaggtgccgacgctgctgtccttcctggcgaagatcaacctggacgtgacggacctggtggcgctgtcgggcgggcacacggtgggcatcgcgcactgcggctccttcgacaaccggctgttcccgacgcaggacccgacgctgaacaagttcttcgcggggcagctgtaccggacctgcccgaccaacgcgacggtgaacacgacggccaacgacgtccgcacgcccaacgccttcgacaacaagtactacgtggacctgctcaaccgggagggcctcttcacgtcggaccaggacctgctgaccaacgctaccacgcgccccatcgtcacgcgcttcgccgtcgaccaggacgccttcttccaccagttcgtctactcctacgtcaagatggggcaggtcaacgtgctcacgggctcccagggacaggtccgcgccaactgctccgcgcgcaacggcgccgctgctggtgacagtgacctgccgtggtcgtccgtcgtcatcgagaccgtcgcggacgccgccggtagcctcgtgctctagataataagcaaataagcagtttgaagcttgcttcgcatgcatgttgcaacaaataagcagctagtagcgatcgatcgattggaaataaagcagctagtagcgatcgttattacagaaacg

SEQ ID NO: 32479 - DNA, 752 bp, Zea mays
  Clone ID: UC-ZMFLB73376G05_FLI
gcttgagacccatcttgtgccgtcttccactgcccccgagtccaaggtcttctatctcaagatgaagggtgattactacagataccttgctgagttcaagactggagctgagagaaaggacgccgctgagaacacgatggtggcatacaaggctgcccaggacattgctctggctgagcttgctccaactcaccctattaggcttggactggcacttaacttctcagtgttctactatgagattctgaactcacctgatcgcgcctgcagtcttgcaaagcaggcttttgacgaggccatctcggaactggacaccctgagcgaggagtcctacaaggacagcactttgatcatgcagctccttcgtgataacttgaccctatggacctctgacatctcggaggaccctgctgaagagattagggaggcgcccaagcgggactcgagtgaggggcagtaaagccggctttatgtgcctagaaactagtagctagtgtttgctgctgtcgaatgacactatgcaatgtgatctggaacctggtttcttgggtgcgacgcttgtagccgtgttatgactgtcgtccgtaaaatttgggggctccccgtaagggatgctgcctggcaaggcctcggtgtcccacctcgtctgtggcgtggggcgctggagcccggtctggttgggttgggaagccctttaaactgttgtcacttgcattttaccttttccatcgctgtttattgtgagtggtcct

SEQ ID NO: 32480 - DNA, 149 bp, Zea mays
  Clone ID: UC-ZMFLB73378G12_FLI
tggactgttagtagtttgcgttgcgtcggttgagagggaacgttggtggtggtggtgtgtgtgcagtcaggcgtggtgctccctttgtttcctggatgggatgttgctccttgaataataatcgtagtggccttggagcccttttcctg

SEQ ID NO: 32481 - DNA, 1340 bp, Zea mays
  Clone ID: UC-ZMFLB73379B11_FLI
cactctagcaatggcttctgaggttgtccgccctagcgacgccgagctactaaaggcacaagccgacatatggcggctcagcctctcctacctcacgcccctgtcactgaggtgcgccgtggagcttggcatccctacggcgatctaccgccatggcggggctgcctcagccgctgagctggtcacggcgctgtctctcccctccactaagctgccgttcctccgccgcctgctgcggctcctcgccgcgtcgggcgtgttcaccgtcgacaagcagagctcggaggaggagcggtaccgcatcagccccgtgtcctacctcctggtggacggcatccctcacgaggaccacatgaaccacaccgctctggtgctcacctgcacctcgacgcgctacatcgaggcggggatagggctggcggagtggttcaagagggacgtggtcacgtcaccgttcgaggagctgcacggggcgactctgttccacgagagcatggggagcctcgacgcagatttccacgacatggcgagcgaggccttggacgcccacgacaacttcggcatcgagatagctatgcgggagttcagggacttgttcgaggggatccagtccatgacctactgctgcggtaacttcggtgatgacaagggtgccagggccattgtcaaagccttcccacacataaaatgcactgtgctggcccctcccaagatcattgccaccaaaccggccgatggagcgatgataaactatgtcgaaggtgacatgttcagtttcattccacctgctcaaactgtcgtgctaaagcttgtgctgcaccacctgaccgatgaggagtgcgtcaagctcctggctcaatgccggaaggcgattccttcacggaaggatggcgggaaagttataatcggtgatattatgattgaccactctgggcctatgctggaaactcacctcctgatggacatcggcatgatgaccatgacaaaaggacggcagagagatgaaaaagaatggagcgagctcttcaccaaagcagggttcagcgaatacaagatcctgaaggaatttggagctcgtgttgccttcgaagtctatccgtgagattgcacctggactatacatatatatttacatacatatatgtatgtgtgtgggtgccttgcgtggcttggcgtgatgatgtcataaataaaaagggtgggtgtgcttgcggtattcatggatggccatggatctgagcacatgacgttggatgctttcttaaggctctcgtggatcttctatatttggaagaagctgtaaaataatatatcgccatctagtgttggcgttggcttgt

SEQ ID NO: 32482 - DNA, 2299 bp, Zea mays
  Clone ID: UC-ZMFLB73379D12_FLI
ggcatcgaccgcaccgtcctcctcgagctggcgctcgccgcgatggaggagctcatgaaagtggcgcagatggacgagccgctctggctccgcagtcccgacggcagcggcttggaggcgctcaacctcgacgagtaccaccgagcgttcgccagggtgttcgggccgagccccgcgggctacgtcaccgaggctacccgcgaggccggcgtcgccataaccagcagcgtagacctcgtagacagcctcatggacgcggctcggtggtcggagatgttcccgtgcatcgtggcgagggcgagcacgacggacatcatctcgagcggcatgggcggcacgcgcagcgggtcaatccagctgatgcacgcggagctgcaggtgctgtcgccgctggtgccgatccgtgaggtggtgttccttcggttctgcaagcagcacgccgaggggctgtgggccgtggtcgacgtctcggtggacgccatcctccggcccgacggcggccaccaccacgcgcagaacggcggcggcgccgggtacatgggctgccgcctgctccccaccggctgcatcgtgcaagacatgaacaacggctactccaaggtcacgtgggttgtccacgcggagtacgacgaggcggtggtgcaccaactctaccgcccgctgctccagtccggccaggcccttggcgcgcgccgctggctcgcctcgctccagcgccagtgccagtacctcgccatcctctgctccaactctctccctgcccgcgaccacgccgcgatcacgccggtggggcggaggagcatgctgaagctggcgcagcggatgacggacaacttctgcgccggtgtgtgtgcgtcggcggcgcagaagtggcggcgcctggacgagtggcgcagcggcgagggaggagacgctgctgggaacggcggatcagcagccgcgggcgagggcgaggagaaggtgcggatgatggcgcggcacagcgtgggggcgcccggggatccccccggcgtggtgctcagcgccaccacgtcggtgcggctgcccgccacgtccccgcagcgcgtgttcgactacctccgcgacgagcagcgccgcggcgagtgggacatcctggccaacggtgaggcaatgcaggagatggaccacatcgccaagggccagcaccacggcaacgccgtctccctcctccgcccaaatgcaactagtggcaaccaaaacaacatgctcatcctgcaagagacctgcaccgacccgtcaggctctctggtggtgtacgccccggtggacgtgcagtccatgcacgtcgtcatgaacggtggcgactccgcctacgtctctctcctcccctctgggttcgccatcctcccggacggccactgccagtcaccaaacactgcacatcagggttcaccaagctgcggcggtagcagcagcagcagcagcacggggtctctagtcacggtggcattccagatcctggtgaacaacctgcccaccgcgaagctcaccgtggagtcggtggagaccgtcagcaacctgctctcctgcaccatccagaagatcaagtctgcgctccaggccagcatcgtcacgccctagctattagcgggcatttgacatggattccggccgccggttctcagaaaaaaggacggagtagtcggatgccatgtcaaatgcttagctagaggacgacatgctgtgacggcgcagatgctaaacaaggctgtgctcgtacgtacgtcgatcgcttcacatcagaccggcggggaactggtgcttgagaaggcagtgaaagaaaataagggtattaaaataaattatgtagtagtgtggagtatttattgcatagagcaatatatatatggggtgaggtacacagggattaagtcaagaacgaaccgttcgctaggctttgattgcttgagcaaacacgttttgctatcgctcaagcttgttatatgctcatgtggtggttcgggtattgacttaagtctctggcaaaagaaagtgaaacaccacctattagggcttctcctatatataaaatatatatgtagcagtttgttttcactgccttctcaagcaccagttccccgccggtctgatgtgaagcgatcgacgtacgtacgagcacagccttgtttagcatctgcgccgtcacagcatgtcgtcctctagctaagcatttgacatggcatccgactactccgtccttttttctgagaaccggcggccggaatccatgtcaaatgcccgctaatagctagggcgtgacgatgctggcctggagcgc

SEQ ID NO: 32483 - DNA, 681 bp, Zea mays
  Clone ID: UC-ZMFLB73387E11_FLI
caaaaacttaggggccaggggatggcttttcttgttggtggtggatcagtcatgcagaaaatccttgctcctagagaggtgataactgttgatgctgcttgtattgtggctatgtcggccaccattaacttccagttgaagagccctaaccagcttagaagagcagtttttgggggtgataaccagctaacagcatctctcacgggaccaggtgttgttttcattcaaagtctgccattccatcgactctcacagagaatcgccagtagatcagtggcaggcccaagcttgagggacaacccaaagttcttcatccagattgtcatgttcttcttcctggcctatgttatgattgtatcatccataattctgacagatgtttaggcgattcagtgagcttttggtgtattcctagacaagttatcgaagagttaaagctacctccccaatgttaatgtagatgtaagagaacgaatttcacaagctgttgttagaaaccttagcagaaggttcttcatttttttttctctaacagtttggagggggcggggcgggtttcttggttagcgtgtaaagaggaagacagcaaaatcaagttgcacagcgtatggtgaatatacagtaattttcctcctaaactggtgcgatgcattttgaataattgaatcagtgatttggctt

SEQ ID NO: 32484 - DNA, 940 bp, Zea mays
  Clone ID: UC-ZMFLB73389D11_FLI
ttctctaaattggcttcatgatagaatgcctgttatcttaggcagtaaggactatgttgatgcttggttaaatgatgtttctgtaaaacttgaagaaattactgcaccttacgaaggagctgatctggtttggtatccagtgacatccgcattgggtaaagcatcatttgatggacctgagtgcatcaaagaggtacatatcggagctactgataagcctatttcaaaattcttcaccaagaaatcgactgcctacgatctatcagggaagtatgagaatatgtcacgggagcttgctcatgcttacaaagcagcgaaagtggaatgcgatggatcagtagaaaatcaaggaggggacggcaaccaacaccagtcccgagagaagcaaactactaattgtactataaaggatgaacctgtcaccttggaaccacaagttttcgagacaccgtggagcatcgagcatgaagatactatgactctggctggtgccactttggaaacacaacgtgatttgggattcaagagaaagatcgaggacactcaagtcgaagctagcatgaaaccctctcagcttaccaggaaggaaaaagctgtaaaagcagcttcggatgggcaggcatcgttgctttcatatttcgcaaggaagcagggtcgctcgatgaagtagtttgcggtagccgtgccatgtattcctgtgtaactcaaactttaccagtacctgtcctccgtgttcgggacaaactatttcggttttaattttgttttggctaccactaaaatgaaccagctagatttctgcggtcattaattttctgcggcccaacttagccgaggccaatgaaaaaagaactttatttccggtagtctggtccaatcactgaattaagaaccttgtttttggtggttatgttaagccgctgaacataagggtgacgat

SEQ ID NO: 32485 - DNA, 793 bp, Zea mays
  Clone ID: UC-ZMFLB73389H04_FLI
gccagcagctgagaagaggatgagcgccgtggccgccatggcgacgtcgtcgctgaaccccaacgcgccgctcttcatcccggcggcgtaccggcaggtggaggaattctcgccagagtggtacgagctcgtcaacaccaccgcctggttccgggaccactggttccgccagcaccagcaccacgaggccgccttcgccgccgccgacgccgagctcgacgtcgccgcgctccttcccgacgactccgtcgacctcctcgacaccgacgacctcttctacgcgcctgacgtccaccacccccacaacgccaagccggcgctgctgcccgggtacgacctcgacatgctcagggcgctgagcctcagctccccccgggccgccgccgcgccgtcgccgtcgccgttgctgcgcgcccagcagcagaggcacgcggacaggccggcgcaccacgccaggggcgccgcgcgccgcgtcatcatccaccagcctcgctagaagcagcctgatcatggcgggctgccgccatggctgttgtgcctagtgtaacctcaagcaagtctagtctgtttctgtctgtgtatacgactaaaaaaacaacagatgggggattcggacgaggcggccagtgctctctcctcatagccagcttctcctgttcaagctcagttcttgttcatccagcagagcacaaaaaaaaacagacaggcggagtgatgtacttactattcctcctcctcctcccatgtccatgttgttgaatatatatatgatggcaagcagcctgatcttttc

SEQ ID NO: 32486 - DNA, 834 bp, Zea mays
  Clone ID: UC-ZMFLB73395G11_FLI
agagctttgtcatctctgaaatcatccccgagatggagatctgcgattttgacttcgaaccctgtggctactccatgaatgcgatccatggctctgcattctccacaatccatgtgacgcccgaggacggtttcagctacgccagttacgaggttatgggcttggatgccactgctctgtcttatggtgaccttgtcaagagggtcctccggtgctttggcccctcagagttttccgttgccgtgaccatcttcggcgggcgtggccatgccgggacatggggaaaggcacttggtgcagaggtctatgactgcaacaacatggtggagcaggagctgcctggaggcgggctcctcgtgtaccagagcttctgtgctgctgaagacgctgttgctacctcgcccaaatctgttttccactgctttgacggcgagaacgtggagagtgctcctcctcctatgaagaaggactacaagctggctaatcttctctgctgggaggaggaagcggatgccatggaggagaaggcgggagtgcttgatgagtaagacgggcttctggggtcgatttgcttctgagttgtttattttatatcgtcgcaatttcgtggttgtcgtttggttattctgtgaagcagccaagccaggctattgttatgaaaatttgtcgtctgtaagcatgtgaacttccgatgttgccacatgctggatcagtctgaataagtaagtatgcagctctaggtggtcagctgcgtctaccacaatgagcatgaacgtatggagaaatatctgtgaacccattttgtttatgaataagatttgtttttttcgagtt

SEQ ID NO: 32487 - DNA, 1703 bp, Zea mays
  Clone ID: UC-ZMFLB73397C09_FLI
gcagctgacgccgccccgttcgcctccgtcgccgccgccatcgccaccgccgaaccatggagaccacggagccgtcgcgtggcaccaagcgccctctcaccgccactgcaggcgatgacgacgatgctggcctggagcgcaagccgcggttccctaaggggaagaaggccaagtaccgcgacgtcggtgcggagggaggcccctctggcaacgctgtggacctcgacagcatgctgaatccggagcttgcggcggagcggcgggcgcggcagcgccacgtccagctcaaggagggagacgacgcgaagggaggtgccgctgaggtgaagggcttcgaagtccgctacaacgacagtgttaactttgttgacgatggtatacggatagagccgtttaacttggagcgagaaagggaagaagggtatttcgatgagaatgggaactttgtggagtatgcaagaggcaatgagattaaggatgcttggttggacagtgtggaagttgacccaacatatgctgcaaaggttcagaacaaaggcaaagagaaagtagacgagtttgaggacctctcttccgatgacattgggaggctaaaaaggcagatagcaaacttgcttgagccaggagaaacgataatgcaagccttgaaaaggttgaagggtacatccacggataaacgtggaaagatggctgaggggactaaacgtatatttgatgaattgactgaagctgccatgaagctaatggagaacggcgattataatgtttactcagatgatcgtgagacctttgaacgcgaggctgctgggtatgaacgtttggcacgtgctcgacttggtttgccagaagttgatggtgtctctgaagaccaaaaatataatcagacaccatcatctgcactggaaattgaccaaccatcatctgtactggaaatggaacttggtccctcgactgccaatgtatatacagccactgctgcaatcaatgatgatgacagtaacctggacatgtttggtgatgatgacaacgatgataccaaacatagttctgatgccaatactgtaggttcaggtttgaaacctggaacctcagatgtgaagaaagccgataatggaagtgtggactcagactatgtatacgatccttcttcaggttactactatagcagcagcacaggctattactatgaccctaactctggatattatggttctgcatctacgggaacctggtattcatacgatgagcaaactggaacatacaaagaaattcaggatgaacaaactggcacggttaaagaagagctgggagatgccatcaaggagtaaccgagttgctacggcccttctcgttcttgattgctgatgcaactgaggtagttcagaccgcccagtgttctttaaagcgaggcagcgagctgtagcttcagtttctcggtaggcgctttgggccacgactcgctaaactgccttgatagatgttttatgaagaaattaagaggaaaccagtcagatcatactataggttgtaaaccagaaagtgatcgactgcaactgtacaattgcaatattaccgttctcggcagaggcttgttttattagctactattcctgctatttctgtagaaatatgcaataacacccaattcctatgtgaagatgtgtttgaacttaacagatgagaacgttatgtttggtgtgatt

SEQ ID NO: 32488 - DNA, 1072 bp, Zea mays
  Clone ID: UC-ZMFLB73397D12_FLI
gtcgacttcccatagtttccactccacttcgatcctatcgtatcctccccaaacactccaccaagaaccttttccccctccaataatagtccaagttactcggaggaatccatgtgcggcggtgcaatcatcttcgactacatcccggcgcggcgccgggtgtccgccgctgacttctggcctgactccgaagccgacgccgaggactccgactcgcacgcccctgaccctgagagagtgccgcgcccgcgcgggaaggcgaagcgtgggcgcaagaaccagtaccgcggcatccggcagcggccgtggggcaagtgggcggcagagatccgcgaccccgtgaagggcgtgcgcgtctggctcggcacctaccccaccgccgaggccgccgcgcgcgcgtacgaccgcgctgccaggcgcatcaggggcgccaaagccaaggtcaacttccccaacgacgcctcctcctccagcgtcaccgcgccgacggcggcatctggggtggcggcacaggccccggccgtttttctcccggcgcccaaggtagaggcgcgcgcacaggtgtccgacgaggtcaaggagctgtccgaggagctaatggcctacgagaactacatgaacttcctcggcgtcccgtacatggagggcgggaatgcagctgtaagtgccaccaccgctgccgctgccgctgccgccgtccccgaagaagcgcaggtgccggcgccagcgccagccgggctgtggagcttcgaggactactactacccgccgtcactgtcgctcttcactgaataatgaacgcggtttgccgtgcctgtgttgttatctcttttgtatctgtggctcgcgagttgaggcatgtaaacaagctttgcagttttttttttaactccggtctgtgcttctcagcagctcgctgcggtgcagaggaatctgtttcattctgttcgtgattgaaactagttttacggttacaacgcgcagatggaggatcgtcggacactcggaccattgtaacaaggcttgcataccatttggaagattttaccatactgaattggcgacacgcatc

SEQ ID NO: 32489 - DNA, 1385 bp, Zea mays
  Clone ID: UC-ZMFLB73397G07_FLI
gagaacccctcctcgacctcggcctctcctcttcctcctccgctcccaaaatcctagggttttgctcgccgcggcgcgatggagcccacctcatcggcgtcgatcgcgcggcagacgtgggagctggagaacaatatccccgcggcggcctccgacccggacgcgatggacgcgatctaccgctacgacgacgcgtctcaggcgcgggcgcagcaggagaagccttgggccaacgacccgcaccacttccgccgcaccaagatctccgcgctcgcgctgctcaagatggttgtccacgcccgcgccgggggcaccatcgaggtcatggggctcatgcagggcaagtgcgagggcgacgccatcatcgttatggacgcattcgcgctccccgttgagggcaccgagaccagggtcaatgcccaggccgatgcctacgagtacatggttgactactcaaccatcaacaagcaggctggaaggttggagaatgtggttggctggtatcactcgcaccctggctatggatgctggctgtcaggaatcgacgtgtcaactcagatgctcaatcaacaattcacagaaccattcttggcagttgtgatagaccccacaaggacagtttctgctggtaaagtggagattggagcctttagaacatacccaaaagattacaagccaccagatgagcctgtatctgagtatcagactattccactcaacaagatagaagattttggtgtccattgcaaatcgtactatgctttggatataacttatttcaagtcatccctggattctcacctccttgatctgctctggaacaaatattgggtcaacacgctatcttcatcatcgcttctgggcaacagagattatgttgctgggcagatctttgatttagctgataaactagagcaagctgaaggccagctggcacacagtcgatttggtggtatgattatgccatcgcaacgaaagaaagagcaagaagagtctccactggctaaggtaacacgagatagctccaaaatcacagctgagcaggttcacggcctcatgtcacaggtcataaaagacatccttttcaactctgttcacccgtcaagcaaggcaagcacaagtgctccaccagattcatccggtcctgagcctatggttgaagcctgagttccagcggaaggggacaatggatatttgtgttatgttatctgattcagaaggtgcaaaacaagttatcttttgagtacagaatcatcatgtaattatgagttgccatcttgggctgccactgagagggtgtgatttgggtccggttagcaatctcatgtattggatttcggatcagtattcgaagctttcataacgaggagccatcatcttatttt

SEQ ID NO: 32490 - DNA, 822 bp, Zea mays
  Clone ID: UC-ZMFLB73397H04_FLI
aagaatttcgtggatgaaaaccaaggcaatgggcttggctcatatgacctttctctggtttatcctaaaagagttttctttgaacaagatatggaagcaacactatccgagctgggtattcaaaaccgtcatgcaatgattgttgttccacatcggcagtctggtcaggtatcaaggcgtcactcctcggcatcttatgatatgggtgtcaattcaggtgcggatgatgttggtggcaattcaggtgcggggggatactttggttacctgagaaccgtcctgtcttatgtgaatccactctcctacctgaggggaaataccaactcatcaaatacagagctacagtcaaatgaaggcctgcggcagcttagacatggatctggtccatggagtgagccacggcctcttggcaataggggccatgaagtgactgatgcagactctgcaaacacgctgcgaaggcggcctagaccatttggtgccaatatccacactctggggagcgaggatcatggtccgtctgatgaaagaaatgttttctggaacgggaactcgacagagtttggaggcgacgacagaaaataggttgtggcgtggctggcagggcctgggacgacactatcagacagaatcaaagttgcgaatagacagctgaaacaaatgcctcgacaggcttattgaggaataagtattgagattatagtgctgaaataatcgctgaattgtgatgtttacatttgtggaaacatacggtcgctggatccgtatactcgttgtatagtacatagccacagatatattaaatccgaactgcttggttct

SEQ ID NO: 32491 - DNA, 1249 bp, Zea mays
  Clone ID: UC-ZMFLB73401B09_FLI
agctggcaaagcagctgcagggtgagaccaatataaagccattgtggggtaccgcacagctctttatgcatccacgttacatgcatggcgctgctacgagcccagaggttaaagtatatgcttatgcggctgcacaagttaagaaagctttggaggtcactcactacctaggtggtgaaaactatgtgttctggggtggaagagagggttaccaaactcttctgaatactgatatgaagagagaacttgaccatctggctaactttcttcaagctgctgttgactacaagaagaagattggattcaacggaacactattgatagagcctaaaccacaggaaccaacaaaacaccagtatgactgggatgttgcgactacgtttgcttttctacagaagtacggtcttacaggagagttcaagattaatgttgagtgcaaccatgctactctatctggacacagctgccatcatgaattggagactgcacggattaatgggctgcttggaaatatcgatgcaaacactggtgatcctcaagttggttgggacacagatcagttcatgacagacattgcagaggctactttggttatgtcaagtgtagttaagaatggtggacttgcacctggtggtttcaactttgatgccaaattgcggagggaaagtactgatgttgaggacatgtttcttgcccatatctccggaatggacaccctggcacgtggcctccgtaacgttgccaagctgattggggatggttccctagatgatcttgtccgcaagcggtaccagagctttgatagtgagattggtgccttgatcgaggctgggaaaggagactttgagacgctagaaaagaaggttctagagtggggtgagcccactgttgcatccggcaaacaggaactggcggagattctgttccagtctgccctatagatgatggtgccatgtccataggtccaggaataagcaagggtgcgccctcctccgaacacgcactcgtcctcctcaccacggggatgttatggttccgtgcgatggactacctacaatacagcatggaactgagataattaggatgtaatctgtcagaaaatttccagaattgttacctccttttgtttagagtggattagtggaatcaaactggagttagttaaagcttatcctacattttggtgtggcgatcgtgtttggtacttccttgaatgctgtttcatagtgtggcaacgatgttgctgctt

SEQ ID NO: 32492 - DNA, 1349 bp, Zea mays
  Clone ID: UC-ZMFLB73401E02_FLI
gacgtgtgtctgcagctttctctagacaagtgttcacaagagctccaaccaacttttcagcatcgatttgatggtgctgttaccataaacaggcatgctgtggcaggagcattagctgggacagcagtcagtgtttctttgcatccaattgatactgtgaaaacgataattcaggctaacagttatggacagagttcagtctaccatacactaaggcgcacccttattgagagagtaaaggtgttctggggttatacggaggacttgctagcaaacttgcttgttctgcaccaatttctgcaatttataccttaacttatgaaacagtaaagggggctcttctgcctgtttttccaaaggaataccattcaattgcgcattgtgctgctggtggctgctctagtattgcaacatcctttgtttttacacccagtgaatgcataaaacaacaaatgcaagaatgctttagtaggatgcctcaaaaagggtggcattgcttcattatatactggatggggtgctgtcctttgcagaaatatcccacattccatagtaaaggacattatcccttttctgaatttatagttctatgcttatgagagtctgaagcagtctctgttgaaatcagcacctgatagtgccaaactcaattctggccaaacgcttttatgtggaggttttgctgggtcaactgctgctctctgtacaacaccgtttgatgttatcaagacacgagtgcaattacaggcactcaaccctgtttgcaagtatgatggggtggttcatgcactaaaagaaatttttcggcatgaaggcttgtgtggtctttacaggggtttgactccaaggctggctatgtatatgtctcaaggtgctatattctttacgtcctatgagtttctcagtacattaatgtttcctgaacccgaacaagaggttcatgcgaggagcgtttgatcgtgaaatgagaagatggcacagcaaaatacagaactcggggatagtctgacatgtgatgtgaggggtttgaatccaattttgggtgttgtttacaaagttgtctgttaggaataggatagcattcatacatatttttcggtaatctcaggtctagctaggcgattgaaaattttgtagtatcagtagaggtgattggtaccccccttcggggaacctggttttgtattttagtttcgtatatatagagaaacattggccagttttggtatcctattgttctgtatccacatgtatctgcatacatggccaagtgaatctggattctggaattaaacagcatgggatgcaagcctttctatttaaaaaaagatcagttgcagagcgacttc

SEQ ID NO: 32493 - DNA, 2445 bp, Zea mays
  Clone ID: UC-ZMFLB73402B09_FLI
gtcgaatgctacttaggccccgtttcaatctcatgggataaagtttagcttcctgctaaactttagttatatgaattgaagtgctaaagtttagcttcaattaccaccattagctctcctgtttagattacaaatggctaaaagtagctaaaaaatagctgctaaagtttatctcgcgagattgaaacagggccttagtacgcattgtagtctaaattcactctataactggtatcagctattacatgttgcaaagtgttgatatatggtggttgaatgctacttagaatgttttgtagtctaaattcactatgcaactggtatcaactatattacataaaaataacgttatatgcttacattttgtttcctgcctacatattatataatcatattatatttaaatttgttttacatggctgggtacttacaccaaactcttaagacatatgtgctcacgcgcgctgggcgcgcgctaaacactagtatagagtagtagagattgaatggctgttcagggcagtgtgttgctacagttcctcgtttataccattactggtcttcctatctctgtcattgctggcactaatagcagatcatatctgcatgtacttttatagactgtatcaattaggctagattagaggacattaggaggatagctttgattctttcctttgcatgtacagtccttcgcataaatccagcctttgcatgtataagtacagcctacacaatagagaattcgttccacctaatcgcctatcttctttcactgaggtcctatcacttgacggaatgcaatcgtgttgggcaggtctggatgagatttcatcgaaacatttgtcaaattatgccatgggagcatcttaggctgttgcattgatttggctgatggctgtagttctgtattcaaatgttcccaatgagccacctttttaaatgtgttcagtgcctcttagaatatgcacagatgagtaacatactaccgtgctgtagtgctggactcgaactactataaatttgcctttctggttatctggtataagttaagattaaatgagccacaccagcagctcccaatctttatgaaatgaatgcaaagccaatggcaagcgaacctgcatggatccatgttttgtattgtggagtaaatcatatttgtttgtgcaatacatgttgtctgagagaggtcgcggaacaagggctgttcgggtgtgagtatccaaaaaataaatgaatttgttaggtttcaattacttcttttccctgcattttacttagttagactggtagcagcggtggcctgtatgttgtcctggacccgtagaataccagattaagaataaaaaacgtctgcagcggtatccagtacctcgtcctgtattatccaggggacggctccatcccgtagatatgggggacaagagagcgtccggcaagtcctctagctcccggctcctcctctcattcgcgtgattgggcatggacccgtaggacatagaggatacgccttacaggataccgttgcggataaaatttatttacgggaagaaatcttttagaggaatctttaaattagtatttaggggatgcaatatacaggctaccgttgctaccagtcttagggctagtttgagaacccttttttttcccaaaagattttcatttttcaaagaaaaattagttcatttttccttgagaaaataggaatcccttaaaaaaatagtgttttcaaactagcccttaatgttttttttcatgaacagaagctgcggccgtcagaaaagcttgacaggtttcttgagggtagaaacttatatgaaggtttggactgtcataccatttcgagtatatgccaggagtatgatttggacaagactgatgttctcaagtacagggatcttccgtaaccacatccagattgtttcattgaggcttatacggtaaaaattcttctgctagtgagatcaagattaagggtacaggagttgcatggacccactagaaattggtggccaaagtaccaaacgagttctttgaaacagcttcagtttttcttgttatgtaccaaatcggtctgccactagtgcaatgaccacagaaacaaaaccagggcaggttcccacttcccaccgtgtaaatagagatgcagtcgtcatttttctagctgtcatttttctagctgggttctagtctttggacgacaaatacaagagtagggttgagattgaccatccgtacgtgcttttcttttttttcatggctcccaatctatctttggttgtatttgaatcttgtgctggggtccaatgcgtaatcttctcgttttgtgagggattctaaagctttgatctctgaagtgacttttctgcacaaatgtatgattagctttacatctggactgatcactgatgaagctgccgattgatttctactggcatc

SEQ ID NO: 32494 - DNA, 1351 bp, Zea mays
  Clone ID: UC-ZMFLB73402E11_FLI
cttcttgcatatatgtacacaggggcaagcctagtgcagtggtgagagctgtctcacttagtcaccagtttgcggctcgaagtagcctctctgtatttgcggagagaaggcttgcttcagtttattctttccttagaccccactcatgtgagagcctctggcactgagtcaatccctttactttctgatgcttcctcaatttttaaagaccactttctatgtacgatgtgtattccaatgattgactatcatattgttgttgatgttggtttctcattcttgtgcgtttgatgtaatacagaatgatctgttaccttctatagaattggttacaaaaatgatagaggatgttgagcttctagaagaaaaggctaaagtggccaaacatgaattgtccgttgctgggacaggcattctggcaaaagttgaggagctcagagaaatgataacttatgcgaaggaagcaaatgatatgcatgctggtgaggttttaggcgagaaagctattttaaccacagaggcacgtgagcttctatcacgacatcagaggctttcggatgagaggaataaatatctggtgataattgaagagatacaccaaattcttgctgaaagattggttgctgcacaacaagaaattgcggcagctgagaaagaaaatgctgaaaaggaggctgctgctcaggcagtactcgatgaacaggaaaaaatgatgaattctatcgtagaagaatcaagaaagctgcagaaagaagctgaggagaacctgaagctgaaggaattcttggttgagcgcggtcaaattgttgatatgctgcaaggtgagatggctgtgacatgtgaggacgtttcgttgctcaagcgagtggtggatgagcgcctaccgttgagcaagttgcagcgctcagctatgtcgagcctctcttcttcactgcattcttctcatcacaagagctggacttcctcggataaagccattggatctccagataagcacacccttgctgaacctgcaagcccagtggggaaagatctggatggcaacgagtgcaccgtggaagtgtcagatggcaacgacagtggtgaaggcattttgaagcgcgtggattccaaggaggatggcgatggatgggagctttgctgaagatgttcaggaatagcggcgttgccagaggatgctgaagcataaactaacaataattgtgtataaacgcatactagcacggtgctaatctaatcgttttcacatgaatagggaagtctcgctggctcaccacagttgtacgtgagatgagtccaactggcaactgcagcttgatgtggtatatataaaagtgaaggtttcagctcc

SEQ ID NO: 32495 - DNA, 1092 bp, Zea mays
  Clone ID: UC-ZMFLB73402E12_FLI
gcttctgcttgctctgggggggaaggagagagagagagcgagagagagatctagtagagaggctagctaggtggtcctcgaacgaagatgttggcggtgttcagcgggcaggtggtggaggtgccggcggagctggtggcggcgggcagccggacgccgtcgcccaagacgaaggcgtcgcagctggtggggcgcttcctggccgcgtccgagccggccgtgtccgtgcagctcggcgaccacggccacctcgcctactcccacaccaaccaggcgctcctccgccccaggtcgttcgcggccaaggacgaggtgttctgcctgttcgagggggtgctggacaacctgggtcgtctgagccagcagcacgggctgtcaagcaagggcgccaacgaggtgctcctcgtcatcgaggcctacaagacgctgcgcgaccgcgcgccctacccggccagcttcatgctcgcccagctcaccggctcctacgccttcgtcctcttcgacaagtccaccaactccctgctagtcgcatctgaccccgagggcagggtgccgctcttctgggggatcaccgccgacggctgcgtcgccttctccgacgacatcgacatgctcaaaggctcatgcggcaagtcgctcgcgccgttcccgcaaggctgcttctactccaacgccctcggagggctcaagtgctacgagaaccccaagcacaaggtcaccgctgtccccgccgacgaagaagagatctgcggtgccactttcaaggtggtggaagggtctactgtcctgacggcgctgcactgatctatcatcatcaggcggaggcgatgcgatgatgatgcagaactttgtacatgcgttggtggatggtggtgtaacatagtggctgccaacaagtcatgctcatgcaaaccgatgaatctatctctgtatcatcgatctcggttgcttgctagtccagactccagacatggctatatatatatagctggtgctaataaataggagtataatcgtcatatcgatcggttgcgtgtggaatgccaatcatgtgtgtaatctgttggcaaataacaaacctctgttcctccc

SEQ ID NO: 32496 - DNA, 2190 bp, Zea mays
  Clone ID: UC-ZMFLB73403G01_FLI
gtcctcctccagatccatccgcctctcctcgaaaccgtctctctgtgcgtccggagtccggggagagggtggcggcggcggagatggagagcctggcgcagcgcgcggcgctgctgcgggagtcgctgcagaagagccagcaggtcaccgacgccgtcgtctccatactcggctccttcgacagccgcctcaccgcgctcgactccgccatgcgccccatccaggtgaggacgcacgccgttcggaccgcgcacgagaacatcgaccgcacgctgcgctccgcggatgtgatcctcacccagttcgacaggacccgagaggcagagcgtgaaatacagaagggaccgcatgagaaccttcaaggtttcctagatgcagttgatcgcttgagaagtattgagcgtttctttagttcaaatcggagttaccgtagtagcgatggggtgctcaaccacgtaaacgcgctcctttctaaggcccttgtcaggatggagggtgaattccagaatcaattatcccagcgcagcaaaccgatggagcctgatcgtctttttgattgtcttccaagtacacttcgaccatcgtctgaatctcagcccgaaggtgggaaaaacccatccgagaatcagcaaaacccagaggctgttgtatatagtcctcctgctcttattgagccaaagtttgttccactactctctaaattagcacaacagttggttcaagctggatgccaacagcaatgctcagaaatatatagtgaagctcgttcttcagctttagaatcaagtctgaagaacttgggcgttgaaaaacttagcaaagatgaagtgcagaaaatgccgtgggaaattttggagtctaaaatagggaattggattcatttcatgcgaattgctgttaaacttctttttgctggggagcgccaactttgcgaccaagtttttgagtgcagtcaatcgttgagggataagtgctttgctgcaataacaaagaacagtttggctacactactcagttttggagaggctattgctatgagtaaacgatcaccagagaaactctttgttctgttagacatgtacgagataatgtgcgagcttcaaacagagattgataccattttcgttggagaatcaggttcgcaaatgcgcgcctctgcactgagtttaacaaaatgcttagcacaaacagcacaaaagactttcagtgattttgaagaagctgttgaaaaggatgcaacaaagaatattcatactgatggaacagttcatcctttaacaagctatgtgatcaactatgttaagtttttgtttgactaccagtcaactctaaagcagcttttccaggagttcaaggaagatgggacaggttctgagctggcagctgtaacaatgaaaatcatgcaagccttacaaaataatttagaagcaaaagcaaaacaatacaaggatcctgcattgatgcacatatttttgatgaacaacattcactatattgtcaaatctgtccgcagatcagaagccaaagatttgttgggtgatgactggattcaaaggcaccgaaggattgtacaacaaaatgccaatcagtatagaaggattgcttgggcgaaggtgttgcaatgcctctctggtcaaggtttgacttcatcaggtggtagtggtcatgtaggaagtgatggtggcaatagcagtggagcttcaagaacagctgtgaaggagagattcaggtctttcaatgtgttgttcgaagagatctaccacaagcaatgtggctggtccgttccagacactgagctgcgcgagtcactaagactcgcggtcgctgaaatcctgttgcctgcctaccgatcattcataaaacgttttgggcctctcattgagaatagcaaagcacctgggaaatacgtgaagcacactcccgagcaactcgagctgctgctaggcaatttattcgaggggaaacaagaacgtgcttgatagtttggtaccgcccgcagcaaggatgtgctgctcttctatgtaaaatacaaaataataaaaataaaaaagatctggaggccctgttagcgttagcattgcttgtgttctccccaatccttgtttagccgcattattatttgtacagaagaatatatgtgtcagctgtgccttgtgttgatctgatagcaggcgtgttcctggtttcttt

SEQ ID NO: 32497 - DNA, 1436 bp, Zea mays
  Clone ID: UC-ZMFLB73404E09_FLI
acgcctaattctccttgcttataattacgtctttcaaagttctgtagagccagcagacatacatatacaatatatgatatatgcatgtatatacgtaatgttatttagtacctaaagggaggctccattaatctgggggcctggttgagggcactgctcgacccctgccagggccggcgctgctgatagggctcgggtgagtgcaaatgtcagcttttcttccacggtttctgcccactgatcaactctccaaaataatcgatggagcatgacagtgttggaaccaaggaaacatcgggttcaacaaacttctcaacaaccagagcaatccacctatttcctgaaaacaagtgaaattagccaacatttctccaacagtccaagtcacacgattagagaaaacaagattgaactttcacatgaactttaaatatcccattttataggaaggtacagtatgactcatcaaacaattcaaaatcacaaatattaattgctcatatatgaacaacaaaaactccatctcaaatcaaaaaggctaaaataggttacattttcctctgtacggatcgcacgattgacaatcagttcatgtatgatatggccatatccctcaaacaactctgcagttttattctaatcctatatattaatgttttaaggatgtaaacatgcatccataaaatacgtgttaatctctagttctccactggatgcagcatggtagctagccttgatagcttgactttatacaatccctatatgtaaggtcgttatgctcggtctctaggttggataactcagaacaaacgtctttaccaaatcttatcttcttatagccagatgcaccgtaggtgacaaaagaaacgaactcactgacaaaaaacatgattacttgtatagcacgaggttgccacttgtcgaagccagcttgatcaactcatttcattccataaaccaaacaaaaataaagagtgagatgataatggacaatttcattccataaactaaataccactaagcctacagatgcgagcaatatcttgcacgaagcagctcaaagcaggaattattaaggctataagttgcttacatcagcttgggggacttcaacctgacactattggaccacctgatcgtggaccctggcctccgcatggttggctgtaacaacaagctcaacgccgggtacgccgcaaataggtacacacacgtggggtgtgggcgcctacgtggttggtcactttcactaaaatggatccaattgttgaaaggatttgagacacaagtgcctgtaagcatccaagagccttgatagcctaaaaactctaacacttcgacaacatcaatgctgatgaacgggtgtgcccaaacatccagtataattggagaaataacatactcaattaaagttcattgttctccacctacatttt

SEQ ID NO: 32498 - DNA, 1593 bp, Zea mays
  Clone ID: UC-ZMFLB73407G03_FLI
cttccactcctcccagccgagctctccctctccacgcagctccctcgcggtgctccctccatagcgcccgagcgctctgtcctcggatcggagcttctctgcgtgtcgcagccaagcttccttccccatggcgcccggcgcccaagtccccagccgtgaccctgccgagctccgccccgactccacgtctcctggtcgggctctcgttctatgcctgatgccgctgttccctggtgctccctgctcggtccctgcccagcgcctgactacagctccagctcgcggcgtcccctctgcttagccaggattgtcgtgcctctgctccctggttttccctacgcgcgagctcgctggcgttgcccctgctccgcttggccgcgtccccctcagtccaccactctgctcggccatggaagacacgccgcaccctggttccagctcgcgatactccctgcacgccggagtcgcccagctcggccacctacctccctatgcgcgacctcctctagctccctgtttctccagagtgtcttcctctgttggctcgccggcttcctgctccctgctcacccagcgcacgcttctccttatgtgccgtgcctgcgtgctgctcgccccagctcccagccatggcgtcggccaaagctcctgcgcgttatgtgcccagctcccttttccgcgtatgcgcgcttagctcgctttcctgcgcgcccagcgttctgctcccgctcgtccctgcgcgccaagctccttgcgcggtccttccttgagctcggtcctgcgcttttcctttctctgtgctcgtgctcgccgtgccgtgagtcactggccagcagtccagctcgcttcagaatcaatctcgtcgtcgttccgcgcgtcagtaagaaatctcaagagttgggtgaagtcggaggctaacagcatggtattcaccatgtgcgcgacaggaagctcgagccaggatttatccgcattcgtacgagtattggatcgcgtttgatacttgtgagccgatttataatttttgtaagtttatttaatgattggattaactagaattattaatcgtaataatcctcgtatttagcgcaggcgtattgtggtagtattaaaaataagtaaagtacgatgggtttagtaatgcgaaaggtgtattaatttaggtgatatctgggcgaagtaacgacgtaaaggatagatttagtgttttatacaactacttgatgaattttgtcattgtcaattgcattaaataaataacataaagagatgtttgattaattgttgatatgtaaaatatgtaaggagtgaaataaaattaaaatagttccttgtgagccatgtagtataatttataaaacaaggaataaggttagcaattaatcaattagctggtgagttgtgtaggctaattgtatttaatgtgtatagtttgttgttcgtgatgtttgcgttaggttcgaggggcgtaattattgcgtgtagtcgtatattaataactagggattccgtatgaaattgtacaacgcctcgccgctaggtgtttaaattcgccatcacgtaacactatttaggtttgtaatatttaaaaat

SEQ ID NO: 32499 - DNA, 776 bp, Zea mays
  Clone ID: UC-ZMFLB73409B08_FLI
agcgccaacgggttcgagatccggcggtacacggacgccatgtggatcaccacggcgcccatcgaggacatctccttcgtcgccgccacgcgcaccggcttcctccagctgttcgactacatccagggcaagaacgcgtacaacgagacgatcgagatgacggcgccggtgctgacgcgggtgtcgcccagcgacgggcccttctgcgcctccgccttcgccgtgagcttctacgtgccggccaagaaccaggcggacccgccgccggccgagggcctgcgcgtggaccgctgggccggggccaggtacgcggccgtgcgccgcttcggaggcttcgtggcggacgccgacgtcggggagcaggcggcgcgcctcgaggccagcctccagggcacccggtgggccgccgccgtcaacgacgcgcgcagggccgacccggcctcgccttacaccgtcgcgcagtacaactcgcccttcgagttcaccggcagggtcaacgagatctggatgctcttcgacgccgccgacgcggacgacgacgccagtatgtgatgcgattccaagcgtgctctcggggcactgaggcgtttagggaaggacgcgcatgcacctgtgcagctgtgctacaatgaagtatttcgtgctcttgtgcgctagcttcgtttactttcgagttttcgagtaaggaataaggtgcctcttgttgcaataatgataaagctaatcctgcttgtaattacatttcgtggcatggccattccggcaacatgtccagt

SEQ ID NO: 32500 - DNA, 1029 bp, Zea mays
  Clone ID: UC-ZMFLB73410G06_FLI
accggctacagcgacgccccaaccgacgagcaactgctggcgtactctgagctgcccatacatggccgcgacatggcggaggtgttcgccgtgcgcatcccggccatcgccggaggagacccgccgccccgtggcatcatctctttctacggcggccactgctgcagcgatttcatttacagctggaactcactggaagaggaagaagacacctcgaagcaaacctgcgacagccagggtaacctcgtgctaactgggccatcaatggccacctcggcagaaagtccaattgccttcaccttctacctccatgatggcagcccgcaagccggagaagccgctgaggacgacgaggacatcgggaggataatctgcgactgcatcggcgacgacttctccaactacaacagggccatagtcgagactgtccaaacgggctatggcctcgctgaagtgatctatgccgtgctgaacaacggcgtccaaggccgggtcgctgtcaaacttgctcgcctgccggtgtccaaagccggagaagaagacgccaccgccattctcgggaggatcgttgctcgcagcaagctgttcgacgtcggctgcgtgctcttctacaaagagggtgacaatggagtgagcgtgcgaccgggggggctgattcagctggcgagggaagcgctcgccgtgccgctgcacatgccgctgacgattgagcttgacctgcatcgctgttccggcgatgaaattgttggaggggtccttgagttcaatcctgcgattgacggccagcacacggaacgacttgttggacaaaatggcgctgaattggaagtggcaatttcatggtcggagtacccttggtaatgcctattattattagccattaattcaagagtgcatttttatatgtatcaatgactaagggttttaaatcatgtttcatacaagacagttgcactagagcaagataacatttcgtggtgggaacgccaaataaataaaaatagagtgagtatcactttggttttttct

SEQ ID NO: 32501 - DNA, 1061 bp, Zea mays
  Clone ID: UC-ZMFLB73411B09_FLI
cgacactttcctcgcgttgcctcccttctggcggcggccatcgcctcccccgcatcggtcgtcgctcctcaccggacatgaaccaatcagagagctcaagtgttgctcggggaagagggaaaaacaaaaggatctggacttattatgaggatgaggagttaattaaagcactatatgagatatctttagatccaaagtggaaaagcgagggaggttttaagaatgggtattgttctgttctagaaaatgaactcaaagcaaggctactagggtgtggtctcagtgctattccacatattgagtctagagtgaggcattttaggaccaagtatggtgctattgaggtcatgcttgctaagagtggttttaattgggatgacaacagaaaaatggtgcaatgtgagaaacaacaatattaagcccattgtaaggataatcctgatgcaaagggactttatggtattgcatttccacattttgataccttggctgctatatatggcaaggacatagctactggagaaggggccgaggggcttggtgaggctgtaattaacatggagaaagaaatagctatgggagaagattgtccagtagtggaagaggatatggtttctatggatacaccacaatggtctatggataataggaactcagatcattcaacttcatcgagcagcaaaagaaggaagaaacacaaagataatatgtcaagtgacccattcttggatctagcaagtggaattcgtggtgatcttaacaaaacctcacaacactttggaaggatggcagaagtgatggagatggaagcaaaaaaggatcaaatgcaagagttacaagagaagtttgttgttgagttgactagacttggttttggtgaagctcaaaggaagtgacttgttaaattatcaatgaagaatgtcatgagcatttggtgaagagtgatcggcatataaactcctgaaagttgcttagatctacttgagcaagtagatatgtttaccggtgaaacatatgtttacctgaagaccaagaactctgcggtctataagttgcttgct

SEQ ID NO: 32502 - DNA, 1838 bp, Zea mays
  Clone ID: UC-ZMFLB73411E10_FLI
tccgcgccaaggtgccgatggcgacgtacgaggacctgcagccgtacatccgccgcattgccgacggcgaccgctcgcccatcctgtcggggcacccggtctccgagttcctcaccagctccggcacgtccgccggcgagcgcaagctcatgcccaccatcgaggacgagctcaaccgccgccagctgctgtacagcctccagatgcccgtaatgaacctgtacgtgcccgggatggacaaggggaaggctctccatttcctctttgtcaagtcggagacgaagacgccgggcggcctcgcggcgaggcccgtcctgacgagctactacaagagcaaccacttcaagaaccgcccgttcgacgcctacaacaactacaccagccccacggcggccatcctctgcgccgacgcgttccagagcatgtacgcgcagatgctgtgcgggctgtgccagcgccaggacgtgctgcgcgtcggcgcggtgttcgcgtcgggcctcctccgcgccattcgcttcctccagctcaactgggagcagctcgcggaggacatcgaagccggctcgctcaccccgcgcgtcaccgacccgtcggtgcgcgaggcggtcgccggcatcctccgcgctgaccccgagctcgcggcgctggtccgctccgagtgctccaagggcgactgggctggcatcatcacccgcatttggcccagcaccaagtacctggacgtcatcgtcaccggcgccatggcgcagtacatcccgacgctcaagtactacagcggcgggctcccgatggcgtgcaccatgtacgcgtcctccgagtgctacttcgggctgaacctccgccccatgtgcgacccctcggaggtgtcctacaccctgatgcccaacatgtgctacttcgagttcctgccgatggactccgcggcggcgtccggcggcgacgcgagccagctggtggacctcgcccgcgtggaggtcgggcgcgagtacgagctggtgatcaccacgtacgcggggctgaaccggtaccgcgtcggcgacgtgctccaggtgaccggcttccacaactccgcgccgcagttccggttcgtgcggcgcaagaacgtgctgctgtccatcgagtccgacaagacggacgaggccgagctgcagcgcgccgtggagcgcgcgtccgcgctgctccgcccgcacggcgccgccgtggtggagtacaccagccaggcctacaccaagagcatccctggccactacgtcatctactgggagctcctggccaagggccccgcggccggcgccgcggtgggcgaggggacgctggagaggtgctgcctggagatggaggaggcgctgaacacggtgtacaggcagagccgcgtggcggacgggtccatcgggccgctggagatccgggtggtgcggccgggcaccttcgaggagctcatggactacgccatctcccgcggcgcgtccatcaaccagtacaaggtgccccggtgcgtgacgttcccgcccatcatcgagctcctggactcacgagtcgtgtccagccacttcagccccgcgctgccgcactggacccccggccagcgctccgactccgactagacacgcgggccggcgagcggcgaggcgtgtccggccgggtccggcgcgcttaattagactgggaattcgttccttgcgtatcgcagacgtagaatatgcccgtgaaattaaaatatttgttaattttggaattttgggtactgtcagttagcggctttgagggtaacctgacaacctgtgatgtgatgagagttggagtcactactgaaggctgagctggtcagctgaagcaac

SEQ ID NO: 32503 - DNA, 727 bp, Zea mays
  Clone ID: UC-ZMFLB73412D01_FLI
ggctttgttaaagcaggagggagcagaagctgtatatgcttgttgtacacatgctgtattcagccctcccgcgattgaaaggctttctggaggcgtctttgaggaagttattgtgacaaactccatcctgctgccggaagacaaatgcttccctcagctgactgtgctttcgatggcgaatcttgtgggggagacaatttggcatgttcaccgcgatggctccgtcagcagcatcttccaatagcagaaacgagcgcgtagcatcgtcacctcgccttgcgttcgtgtgcttggtatagagaaggcacccagtgcctgtgctgcttgcgtattttcgtagggagtcaattttggcggcaaggtataataaggttgtattgcccgatgtacggggtgataaataaggtggttattgccagtgtacgtgggataataaggttgtatgctggtgtaggtgttctgcaggctgcagcgtgttactaattaagtgcatctcttgtcctattatgtattgctgaggtagttgttgtcgagttgaagtttcagtgtctcagatacatggggatagtgatgtacccagcactcggtcactagtgaagtcctggtcattggaaatatgggagcaccaatttctgttttaaggtcggcattgtagctcaagctgttaatactcaaaattgcctgattgtctatgagcaccctgcaatatttactggtgtgatgctgc

SEQ ID NO: 32504 - DNA, 1180 bp, Zea mays
  Clone ID: UC-ZMFLB73413C07_FLI
aatgaatgtgtccaggcggttactcccacgctccggacgaactggcgtatggagtcgacatgaggcacgtgaggtggggcggaatcctccagaggatcgctcttgcgtacctggtggttgcggttctagagatggtgacgaaagacggcgccaaggttcatcaggaccagccgccaggttcttcaggccgcttctcccgtgtattcagaatgtatctctcccagtggatcgtcgcgtgctgcattctggtggtctacctgtcccttgcctacggggtctacgttcctgactgggagttcagagtgcgaaacgctgacagcccagactacggcaaagttctaacggtgaggtgtggtacgaggggggcgttggaccctccctgcaacgccgtaggctacatcgaccgcagagtcctgggcatcaaccacatgtaccagaagccggcatggagaaggcacagggcctgcactgatgactccccacacgaggggcctttcagagaggatgccccagcgtggtgtgtcgcgccattcgagcctgaagggatactgagctcactgtctgctgtgctgagtacggtcgtcggtgttcactacgggcatgtgcttgtccacatgaagagccatacggacaggcttaggcagtgggttaccatgggcgtagctcttctcgttctcggaatcattctgcacttctcgcatgcgatcccgctcaacaagcagctctacacgttcagctacatctgcgtcactgccggcgccgctggggtcgtcttctcagagctctacttcttggtcgacgtcgtgagcctgcgctacgccttcgcgccgctgcggtgggtcggcatgaacgcgatgctggtgtacgtgatggccgcggaaggcgtcttcgagggcttcctcaacgggtggtactacgagagcaccaacaacactctggtttactgggtgaggaagcacgtgttcgtcaaggtgtggcactccaccagggtgggcatcctcctctacgtcctcttcgcgcagatcctcttctgggcgctcgtctccggcgtcctccaccgcgctcgcctctactggaagctctagcgagcgaacggtggcatagcatgcttttgtcttttgaactgcacatgatacacacgacacctcaaactcgaaccccaagttagtttgaagaactc

SEQ ID NO: 32505 - DNA, 1288 bp, Zea mays
  Clone ID: UC-ZMFLB73413H12_FLI
cgcgatctagctgctccgcccagatcgacgtccccttagccgctacgctgccccacgccacctcacccgctcccccgtaccgtcgccctctcggaaccctcgccattccgcgccgcgagaggtcttcctagccgctgcgggtctgcctgcaccgcgtcgcgtcgccactgcaccgacccgccacagccccactagcctgactccaccgccaccctagaggatggaggaccgtgagtggatgtacacgggccgcgttcgacgtaatgatgtcaccccagaatggattaggaagaccgatgctttcgtggaacgggcatatggcgaagctgctaaaggagctagcctagtcccttgtccgtgtagcaaatgtgacaaccggaaaagaaaaccaaagaaggtcatggtagaacatatttggaagaatggatttacgccggactatactcggtggatcttccatggtgaagcgcatcgcacgagagaggaggtggtgagacaacgcgtcgaggattacgatgctgatgccggggtaggagacatgttgaacgactatcacgaggcacagttcgccgaaggacgtacggaggacgagccagaggcgaccgcaaagacattctacgacatgtttgacgcggcacagaaaccccttcacggcaagacaaaggtttctcaactggatgccattgggcgtataatggcgttcaagtcgcagtatagcatgagtcgagacgcattcgatggtttgttgacagttattggcagcctgcttccggaggatcacgttctgccaaagagcatgtacgaggcacagaaactccattatacgcgagcaaggagcacgagcgcgagcccagccatacgacctcggcaggacacctcacagcatcgtatccagcaactccagactcagctagatgatgagaggaggcaacgtgaggagctagagaagaggatggcggagatgttcgcgtacatgcagagccttggcgccgcacagggtcatgctccaccacctccgttgttccctgcagctgaccctacagagttcactactcctggtcaatcggcggcgtcgaacaaccctcatgcttcgtccagcccttcgccgaaccagtccagatgcccacctcgttgatgatttgttttgtgatgatccagacttacctttatgagtgttggtgatgttagttaaactttatcttgtgagatacttggtgatgttagtgatgacgcagacttatatctgttttgtgatgatccttacttatatttgtgagactttgtgata

SEQ ID NO: 32506 - DNA, 986 bp, Zea mays
  Clone ID: UC-ZMFLB73414B02_FLI
cctcctgcagcgcccgtcgcctccctttccccttccctccctccctctccccgcgggccgccagaggcaatttcgccctcgattcgaccccgattcgtccgcccgcgaccgggattccctccgccaagcgcggatctgaacgctgcgctccgtgtcgccgctcgaatccgccatgaagggggccaaatccaagggcgccgccaaggccgatgccaagctggcggtgaagagcaagggggcggagaagcccgccaagggcaggaaagggaaggccggcaaggaccccaacaagcctaagagggctcccagcgctttcttcgtgttcatggaggaatttcgcaaggagttcaaggagaagaaccctaagaacaagtctgtcgctgcggtggggaaagctgctggcgacaggtggaaatccctgagcgagtcggacaaggctccctatgtagccaaggctaacaagctcaagctcgagtacaacaaggccatcgctgcctacaacaagggcgagagcactgcagctaagaaggctcctgccaaggaggaagaggaggaagatgaagaggagtctgacaagtccaagtcggaggtcaatgacgaggatgatgaagagggtagtgaggaggatgaagatgatgacgagtgatggagctcctcgagacaatggaccgtgcttcatccaacaatggagcggctacacaaggccccgtggcgatcacaaaaaaggagcctatatccatgtactagaattattcagtttcactccacatcgtgatgttttatttttacttttgtcgtgctataacggatagcgctcctcgttggcgccactggcgggtggttctgcctctggtctggtgtgtttgtgtgtggtcacacttgccagccagcagaggcgcctgcttgtacctagattactgtttccattgtcgtcatcatcggctaacattgtcataatgtcagtttgggtaatgttagattaagtg

SEQ ID NO: 32507 - DNA, 977 bp, Zea mays
  Clone ID: UC-ZMFLB73416A10_FLI
gatcaaggacgatgcggcggcgaacgaggcggcactggagctggtgcgcaaggacaagctgagggaggtgcgcgcgggccacgacggcacgtgggcggcgcacccggggctcatcccggcgatacgggaggtcttcgagggccacctcggcgggaggccgaaccagatcggcgacgccgcagggcacgagggtgccagcgtgaaggaggaggacctcatccagccgccgcggggcgcgcgcactgtggacggtctgcggctcaacgtccgcgtgggcgtgcagtacctcgcggcgtggctggccggctccggctccgtcccgctgtacaacctgatggaggacgcggctacggcggagatcagccgcgtccagaactggcagtggctgcgccacggagcggcgctggacgccggcggcgtggaggtgcgcgcgacgccagagctactcgcacgcgtcgtcgaggaggagatggcgagggtcgaggctgaggtcggccccgacaggttccgaaaggggcggtacgcggaggcgggcaggatcttcagccggcagtgcaccgcgccggagctggacgacttcctcacgctggacgcgtacaacctcatcgtggcgcaccatccaggtgcgtcaccgtgcaagctctgaatacatgcatgcctttgtggcagtggagtcagctttcaaaaataacacatcgctgtccaatgcagccatcgaaataaggacggatgaccaacaaacatgatagacatgaacagccttgtaaagcgcactgcatattctctgctctgggacttttagtcgtgcttatgatagtacagggtggtctatgtaataaactgagcttctgttgaactctcgggaaggacaactgcacaaccctgtatgagtgtaccgagactatcttttcaccctcagaactaccgctctacaacgtgtatctttctaattttataaatcaaacttatttaacttt

SEQ ID NO: 32508 - DNA, 1199 bp, Zea mays
  Clone ID: UC-ZMFLB73416B11_FLI
gccgttttttctgttcatagagcttgcccttgttctctgcttcatcactctgtactaccgccacttgcaatccaagaaaacgagccctctggagccgaccgaatggccagtagtcgggcacctccccggcttggtcgccaacatccaccgcttccacgactgggccaccggcgtcctcgccggcgtgggctgcaacttcgaagcccgcggaggccgcaccggcctgcggtacttcatcacctgcgacccctccaacgtgcgccacatcttcacgtccaacttcgccaactacccaaaaggcgaggagtacgccgcgatcttcgacgttctcggcggcggcatcttcaacgccgacggggagtcgtggcggcgccagcgggtgaaggcccagatgctcatgaccggccctcggtttcgagccttcacggcgcggtgcagtcgcgacaaggtggagaggagcctcctgccattcctcgcgcaccacgccgccgcggacgacgaggggaggccgacgccgtgcgacctgcacgacgtgttcctgaggctgacgttcgacatgacgtgcactctcgtcttcggcgtcgaccctgggtgcctggcgctcggcctgcccggggtccccttcgcgcgcgcgatggacgatgcgctggagacgctgttcctccggcacatcacccccacggcgtgctggaagctgatgagcgtgctgggagtagggcaggagaagaagatggccgcggctcggaggacgatcgactgcttcgtcgccaccaccgtcgcgaaacgcagggccgacaagctcagagaaggagaaggcgagggcgtctgcagctcgttcgacttgctgtcatccttcatctgccacgaggacgactcgagtgaaaatgacgacgacgacgacgtgttcttacgggacacgacggtgaacctcctgctcgccgggcgggacaccacgggcgcggcgctgtcgtggttcttctacctcgtctccaagaaccctcgcgtggagcagaaactactggacgaactggcgcccatcgtcgcttcacggcggagagccggcggtgctgctgcagacgcggccagcggcatggtgaccttcgacgcggacgagctcggcagcggcctggtgtatctgcacgccgccctgagcgaatgcttgaggctgtacccgtccgtgccgttcgagcacaaggtcg

SEQ ID NO: 32509 - DNA, 1179 bp, Zea mays
  Clone ID: UC-ZMFLB73416E09_FLI
cgacgcgggagggcgagcagcagcggcgcggcgacatcgcgaggccagggccagaagcaacagccgaggaggggcagcagaggcgaccgccgagagtcccggccaccatggacaccttcttcctatcgcacggctcgcccacgctctccatcgacgacagtatctcggcgcggcacttcttcaagtcgtgggtgccggcgaaggtcgcgggcgaccagcccccgcgcgccatcctcgtcgtctcgggacactgggagacggccacgccggcggtcaatatcatccgcggcagcaacgacaccatctacgacttctatggctttcccaagcccatgtaccagctcaagtacccggctccgggcgctccggacttggccctgcggaccgtagagctcctggagcaagccgggttcggccccgtgaagcaggaccacagccgcgggctcgaccacggcgcctgggtgccgctgatgctcatgtacccggacgccagcatccccgtgtgccagctctcggtgcagaccgaccgcgacggcacgtaccactacaacctcggcaaggcgctggcgcccctgcgggaggaaggcatcctcatcctcggctccggtagcgccacgcacaacctgcgcaagattagcccgtccgacgcgcccgtgccgcagtgggccgccgagttcgacacctggctcaaggactcgctcctcaacggaaggtacgaggacgtgaagcggtacgaggagaaggcgccgcacgcgagggtggcgcacccgtggccggaccacttctacccgctgcacgtcgcgctcggcgccgccggggacgccgcgaaggcggagcagatccaccagtgctggtccaacggcacgctctcctacgcgtcctaccggttcaccaccaacacctgacgcgctgctcgtggtgtcggtggaataccacccggccagctgctgaattcgcggggaagcatccatcgacgggtgtggcactggcagcattgcacatactgtatttctaataaacccccgtgtgcctgccgttccgttcgcggtagatatgcgtttgttgatgttttgcattgtttggtgcagcagcttaggctgattgattgcctgcatggtggtgccgggatctcgctggcctagctgaatcatgcattctatcgagaaacatttgtttgtt

SEQ ID NO: 32510 - DNA, 1815 bp, Zea mays
  Clone ID: UC-ZMFLB73417A06_FLI
gaggttatcagctgtaggcaaccttggcgcgatacatcggttgtcagagcatatgaggaaattttacaatgttgcgatgtcgagacgatttgcaatcactcagaagaaaaagagcataggcctgagaaggaaatgagtgccgtggctattgctgctgttgtttcttgttagttgttactgtggataatcaggatcttattcaaaggatcagaaggctgatgaagctattttggaagtgttagaccttcgatgaaaaatgaagtcagcaaggaatacttcttaaaaactgtaaggaatattgttggtgataaattgcttaagcaagctgcttcacaatatcaaatgcaggcataacgaagccctcagacaaacccaagcaactattctttatcaggtcaagtttctggtcagcagactgctcccagtggttctgtgacaggagatgaacagaagggatatccaggggcgcacaccatccgtatgagacaagctattgccagcactcgaccacctcaatttcggccttcctcgtctggccaaatacagagtaataccctttctttcctcatttgcaaacattttgaggcagttagtttttacatgataggtgacattgaggcgggactcttttgataaaagcgaaatggaattctatgaagctttgtacactcagagtgtcacacatttgatgcatatgtagatgctggaacactgatgaataactacgctcatatcttcgatcttctcacaaggttgagacaggctgtcgatcatccctatcttgtagcatattctaaaacagcaggacatcctgaaggaatgaagaatgaaggaaacgagtccatggagagccaatgtggtatatgtcataatttggctgaagatgttgtggttacctcttgtgatcatgcattctgcaagacttgtttgatagactactctgcagctttggggaatgtttcatgtccatcctgttcaatacctctcaccgtggacttaacagcacaaaattcagttggaaaagtaactcggagtgtcaagggtcgcaaatgttcaggaatattgagcagactaccaagccttgtggattttaagacgagtacaaaaattgatgccttgagggaggagataagaaacatgattgagcacgatggttctgccaaagggattgtcttcagccagttcacatcattcttggatttgattcagttttccttggagaggtccggcattaagtgtgtccagctgaatggagccatgaacatcaccgaaaagggaagagccatagacaccttcacccatgatgcagactgcagggtcttcctgatgagcttaaaagctggaggagtcgctaagaatctcactgtagcatctcatgtgttcctgatggacccttggtggaatccagcggtcgagaaccaagcgcaggatcgtatccaccgaattgggcagttcaagccaatcaagagcactaggtttgtgataaaggacacggttgaagagcgcatactgcaactgcaacagaagaaggagctggtgtttgaaggcaccgtgggggactcgtcgtatgccatgtcgaagcttacagaggcggacctcaagtttctattccagatctaaatgctgacgtagttaagcatgagtagggagggcaggctatgctaggactaggagcactgacttgttggaagttggaaccctgacgctgccatatcaccagtacggacggggtcggcggtgtgtagatcgactgctgttgtgcctgttagaactgatgtaccaattcttttaatcaaaaacagataaacttgtggc

SEQ ID NO: 32511 - DNA, 947 bp, Zea mays
  Clone ID: UC-ZMFLB73417F02_FLI
gtaggtactgcaaaggacttcatccaagcatcttcatcaaggccaaaacagtcacaacctgtgttgttgcaagacgcacccagtggcgttgaagacactcctaacaaagcctctaacttggtcatgccttccaccccgctcacaccacaaagttccgcaaccagtgtgcaagataagactttttgtgttggcagcagcactgtggttccaggtgctactcccgctataacaaaggaactgacatccacgcctaggaagaggacaaggtcttcgccatcaaagacagttacaaagaggttgttcaccgacgtagatggaggatgccgcggatagcgctgctgcccctagccctaccaaagatgcttagtcacagaggggcacaggtctcttgggctcacagttgtagctgttcgctcttttggatgatcgttgtctactgcttttgtatccaagctgctatgtacatatgctttcggaaggatatatgatacacgttcatgtccacacactcgatacaggttggcccagagcagacttaacaaggttactactagatcagtgttcgccatcgatgctatgcataggccacgctggatttctatgcttgttgacatgaacgtgcttcgctcccttcatgtttaagcctaagcagcttgatgtgcttgtgccaaagactttttaagaactacgcaacaaaccaacgcttacaacacgcttttgtatacaatgatcatctgcttgttgcaccgtacatgtatagtctatggagctgcagactgttagagttatgtaatgttgtactgatcaccgtttcgtaactgcatgtacactgtctttagagacagttgtggaacctgcgtccgcgccatatgtattatattatcgtattgtatccttcaatatgtttatgttcctacaatgtccaggtccctgtcatacttggagac

SEQ ID NO: 32512 - DNA, 1493 bp, Zea mays
  Clone ID: UC-ZMFLB73417G05_FLI
aagacaccgagcgcagacaggttggagttggacataacctctccctctcctcggcgcctcagccgggcatggcgtgcggcggcaagggcggcacggggtggtcctctctgccggcggacctgctgctcagcatattcgccctcctccctgccgacgctcaccgcgtccgtttccgcgccgtctgcgcggactggggcgccgccgccgccgcgtggcgcccgcgcccttggctcgtcggctcccgcaccgaccgctccggccagggcgccagcgaaatttcgtcattctggctcgcccccagcgtcgccctcctgcccttcgccgcgaacgtgccatcggggctggagtacctctcctcgtcccacggctacctcgcgctctcggacccgaggatcagccccaaggtcatcctcctcctcaaccccttgacaggcaggcgcgtccgcctcccgcccatcggcttcttcaagaagtggctcgacttgaccaccatcgtgctgtcgggcgaccccgccacggccaccgagtgggccgcggtggccgtcgggttcccgacgacctgcctcgcgtactacagctccgtcactggggcgtggacgcggctcgatttcagcgtgaccggctacgccgctgtcgagcactacagggggcggttctatgtggccttcaagtcctcgatctgcatctgcgaggtcgacggggacgcgcccgcggtcatcccactcgagcacgtcgacgcgaacggcgacgccgtcgtctcggacaacgacaagctccctggcgaagggaggcgcgtcgtcgagacgcacctggtggagtgtgaccgccagctgctcctcgtctcggtgcacgacgacgtcatgtacaactcggacgacgacatggcgggcgtggacgacgggggcatcaagatcggcagcgggttcgcgcgtgcggtggaggtgcacagggtggattggctcggggataggacggtgcggctggtgcgcgtggtggacctcggatggaacagtctgttcctggggcggaatcgcgcgttcgcgctctcgcgggcggagttcccctggtaccgcgctcgcgtcaatcgcatctacctcgtcgaccgtggccacccggacggggtcgtcagggtgttgggcatggaaagacagcgggggcgccacctggagatcttgaccatcaaacctgacgacggccggcgagaatcggccgggtgggcgcgccgtggatggttcttccccaactactagccactgtggtcattttgtctctatgggtgtttttttcatagccgtctaagggcttgttcggttattcccaaaacacatggattggatgggattggaaaaaaatgagaagaggtttgacttgtttgggtttcaaacccatccaatcccactcaatccacatggattgagagctaaccgaacaagccctaagcctggatagctaaaccgtggtttcggcaatgcaagttacacttgtttgattgc

SEQ ID NO: 32513 - DNA, 2059 bp, Zea mays
  Clone ID: UC-ZMFLB73418A10_FLI
aaaaactatcttgaagactcatgtataagcatgaatgattgccaatagaagaattcttcttttcagaattagaaactttaaattttgatgcggtcttgactctgtgctaccctacttggtgcaaaagcattttggttatgtactactccctccgttcttttttatttgtcgcgatctagttcaaaaatgaattagcgggcgacaaatattcgagaacggaggtagtatataatagctagaggccaaagtttgatggatctatttaatttgtgcaccatgtttactttttgtttgttgttggcttcagcgtgtactgtaattcctctatcttgtttgggaatctggggattttaagggaaaacagactccttaagtttaaattagtgttggtgaaacttgtaatcaagttttcaggatggagtaaccatgcatgccaatagtagtgaaatgatacaaatgtttcttcacttaaatgcactactacacaaacctgcaatgcgcaattaagaatgattgctatgatgcgagaattgttcttttacgaattcagaactttttaactccaagaagtttagccaagtactggtcttgtatggtaatgtcagtaagaacgagtgggatctaacatttctgtgcttatttgcaatgggagtagagttatacaataaatccctcgtttcatttttaactatagctagcaaaaatggtttatgttttttttgttaacgtgtaaaaattggtgtttatgagtcttcataaattcaaaaaaataagttgaaacatggatgctagattcaggtttgaacttgtttttgttgcaactaatcgagcattttggttatctacaatgtaattgactgaagctgaaccgctaaagcttgttggatctactttaatttctgcatttcctttattttctttctaattgtggttattactgggaactataattcctttacctttgctaatgggaccctagggtcttgtgcaaaaaggatttctcaattaaacaggtgcatgtgaaacttgcaatcaagtatccaggaagtgttaatagactagtggtaaatgaaagcctacaaaatttgtacagttatgcatgccatcggtaatgacatcatacaaatacgtttttgactgaaaatttactgctagacaaacccacggtgcacaatcaggaaatagtttgtcacttcaagttaatggtggctttttcatctgaatgctttggcctctagaatcactcttcgcgtatccataatcaccagtcactttcattaaaaggggtgattttctatctaattctgctatgcacctttttaagtaaaatgatattaggtgatcttttgttttggttatatcgatccaatttatcatcaatattaaatccacatgcctctaaaatagaggcaaacttttctatgtacaaagtgatcgatagtgttcttttcctataagtatatttatcctcttaagatgacatacagtctatatctgagctgaggctgctaggattttcttgtatgttttgtatggttttcattgttcaattgacttttcttctttttcaggtctgcatgtcgtggttattatgttcacaggttacttggtaggatttgctatgttcaaagctctgttcaacaataatgctgtactgaacgctgctggaggtatcttaggattagttggtggcatgctggttgagaccattctcttcatcatcagatcatcgagtaaagagttagcctctgttccaagatcaaagaaagctcagtagactcttgaaatgctatcatcagttagtggtgagagctataagtggccttagcttgtggaagtctatggagcattggtatgggtttgaaaatgcaattcatcgaatatatgcaattgacatccgatttgaatttgcatcatgaaggaatagggcagagggatttgatttcaatattattagctacccagaattttgtatctcgcccaatgattggctcgatgataattgaagaacatgtacctacggatatgtaaaaagtacatacaagaagatggtatgctt

SEQ ID NO: 32514 - DNA, 1318 bp, Zea mays
  Clone ID: UC-ZMFLB73418B03_FLI
tgcatgcccaagttacacatctcgcctcgcgtgatcaattgagggcctactagcttactactgctgccttagtttcctttttcatgaatacagttacggtgggaaggtcaaattctgttgtgtattcatgcatcagctgtgctccttaaggcttgcagaccttaatacccagtacgtgtttcgaatctcgtatgtttatttctgggaactgacctgtgtttatatatgtttggacagtacgaactgaaaaacaagagtaaagaatttccgtgagatgagacagaatggcgcggtgatgattcagtttggccatcagatgcctgattacgactccccggctacccagtcaaccagtgagacgagccatcaagaagcgtctggaatgagcgaagggagcctcaacgagcataataatgaccattcaggcaaccttgatgggtactcgaagagtgacgaaaacaagatgatgtcagcgttatccctgggcaatccggaaacagcttacgcacataatccgaagcctgaccgtactcagtccttcgccatatcatacccatatgccgatccatactacggtggcgcggtggcagcagcttatggcccgcatgctatcatgcaccctcagctggttggcatggttccgtcctctcgagtgccactgccgatcgagccagccgctgaagagcccatctatgtcaacgcgaagcagtaccacgctattctccggaggagacagctccgtgcaaagctagaggctgaaaacaagctcgtgaaaagccgcaagccgtacctccacgagtctcggcacctgcacgcgatgaagagagctcggggaacaggcgggcggttcctgaacacgaagcagcagccggagtcccccggcagcggcggctcctcggacgcgcaacgcgtgcccgcgaccgcgagcggcggcctgttcacgaagcatgagcacagcctgccgcccggcggtcgccaccactatcacgcgagagggggcggtgattagggagccccgacactggcaactcatccttggcttatcagcgattcgactcggctctcgctcgtctgaaactgaactctctgcaactactgtaactgtaactaaactgggtgtgcccggattggcggtcgttctgttctactactactagtaccttagtacctgctacgcgtcgttgggtctggactagagagccgtgctggttctttgatgaacttggctggacttgaggtgttgactagcgcgaaactgagttccatgtaaacttttgcttcaagaccgatgactggcggcataataagtagcagtaat

SEQ ID NO: 32515 - DNA, 712 bp, Zea mays
  Clone ID: UC-ZMFLB73418F08_FLI
gctgtggacgctgctagtggcggtggccctgtcggcggcgctggcctcgaaccgccccgtggcggcgacggcgacggcggcggcggaggcggcgaacgaggtgctccgcgcgcaccagctgccggggggcctgctgccggcggggatcacggcgttccggcacgacgccgccacgggggcgttcgaggcccggctggacgcgccctgcacggcgcgcttcgaggtcggcctccgctacaacgccaccgtctccggggtcatcagccccggccagatcgccgacatctccggcgtcgccgcgcaggacctcttcatgtggttccccgtccacgacatcaaggtcgacatcccctcctccggcgtcatctacttcaacgtcggcgtcgtcaagaagcacctcccgctcgccgtcttcgacgcgccgccggcctgcacgcccgacccgctcctgcagcggctggaggacgtgggcgagggcggattggccgtggtgggcgccgcggcgtcccggcgatgatgggtggaggagaacggaggagggttcgacggcgccggcgagccaggatcacgagcgcagttttgagaggagaacgggcgatcgccggccttcttcgatgcacatagatagcgtgggcatttccatctgttttcttttttctgcttcctactagtggctacactagtaaccaacctcgtctatcattgttcgttt

SEQ ID NO: 32516 - DNA, 991 bp, Zea mays
  Clone ID: UC-ZMFLB73418G05_FLI
ttcttccctcgcgccgccgccaccgcaagagtatctcaactccgcctcgagaccttcccccctcgctggtctcagccatggtgaaatattcgacggagccgaccaaccccaccaagtccgccaaggccatgggccgtgacctacgtgttcacttcaagaacacacgtgagacagcttttgcccttaggaagttgtcactcaccaaggccaaaagttaccttgaggatgtgatcgcccacaagcaggccatcccgttccgcaggtattgtggtggtgttgggcgtactgctcaggctaagtctcgccactcaaatggtcagggacgctggcctgccaagtctgctaaattcattctagaccttctcaagaatgcagagagcaatgctgaggtgaaaggacttgatgtggataccctctatgtgtcgcacattcaagttaatcaggctcagaagcagcgacgcaggacataccgtgctcatggacgcatcaacccttacatgtcctccccatgccacatagagctcatcttgtcggagaaggaagagccagtgaagaaagaggctgagtctcagatcgcaaccaggaaggcttagagaaggggctctatcttctgtgattggcttagtacaagttttggctgattgtttgttgtctcatactgtttacctgagtattgtttgcaagtgctttatcactgtccgaactgtgcatgcaattcactggtctagagaattgttcgtggattgtttcatatttgtgcgtatggctcatgtctgttgctttgctttaatctgtaccgaacattaagtgtagcattaacaatctgaagcgaacattaagagtagggctgtccttagcatatggtttgtggttgttgcatccttataactatctccgaacccatcctttcatcccatctatttctaactccattgtgaacagtgtaaaaagtaatgttttttgagtgactgtgtaacctaccggtcgccct

SEQ ID NO: 32517 - DNA, 904 bp, Zea mays
  Clone ID: UC-ZMFLLIB3205430F01_FLI
gcggaataatatccaccggcgacgggaacgggaggcggcgcggccggagattcgaagcgatggcgttcacgatgcgggcagtgaaggtgcctccgaactcggcctcgctggaggaggcccggcaccgcgtcttcgatttcttcaagcaggcatgccgctctatccccaccgtcatggagatctacaacctcgacgacgttgtcacgccctctcagctccgctcgaccatcgctaaggagatccgtaaaaaccagaacgtcaccaaccccaaggtgattgatatgcttctgttcaacgcgacggaggagctgaacaacatagtcgaacatgcaaagcagcgccaccatgtgattgggcagtatgtgatcggccaagagggcctggtgcatgagctggggtcgaaggatctagggaactctgacttcctgaagaaattctacacaagcaattacttctgatctgtgttgcagatttacaacatctggtatactccgggtggtgctctgaataagacgacactgaggacctatcaggaccgattgtttcgcgctggaggttttgatctatttggcccttgaatcctgtgttcaatgtgatactgctgtcagctgtttgtcttgtttactgttgtacttatcaaattgatgttttagtcgattcgagtctacaagattgaactttgttgctacagtgagtaccgaccagtggcctttttttttgttgagaaacagccctcaacctttagcagagaaagggactaaacatgtcttccaacataaaaactaagggcctgtttgtttttgtttgtttttgttttttgttaagcctgtttgtttaggtttaatttgtacagacttcaactgtttctacagtgttttttattgtgtccccaggatttgaagct

SEQ ID NO: 32518 - DNA, 1269 bp, Zea mays
  Clone ID: UC-ZMFLLIB3205430F11_FLI
cgattcaacacttcacgctcatcttcagtacgatcctcaaaccacaatcgatgcaaccctaaaattttaagcaaattattcgcctcgttcctcgcaaacctctcatctgctcgccgtttccctctcttctttgcgacggcgaaaatggtggagaacggcgtcgagcagcccctgttacagggcggcggccctcctaataacgccgggcacgcaaagccgcctccgggagctaggccgccaaggaggttccgacgctgcaggacggcgccttccaccgacgcggcgcaagaatctcccccgcggagccagcaggacccgagcctgcagcgcggcaccacccagctggcgccgcccaaggagcttctgcggggcgcgcggccgagcttcaggctcgtcggcgtcctcctgctggcgtacctcctggccgggaccgtagcgttctacctcgccccggcgaccgcaccgggagccgcgtggtggacgcgctctacttctccgtggtcaccatgacgaccgtcgggtacggcgacctcgtcccgtccagcgacgccgccaagctgctcgcctgcgccttcgccttcgccggcgtggccctcgtcggcaccttcctcagcaaggccgccgactacctcgtcgagaagcaggaggcgctgctcttccgcgcgctccacgcccgcaaccgcaaggcgctgcgcgtcgtggaggcaaacagggtccgctacaagctgtacaccgccgcggcgctcctggccgcggcgctcgcctccggcacggcgttcatggtcgaggtggaagggatgcgccccgtggacgccttctactgcgtgtgcgccacagtgaccacgctcgggtacggcgaccagagcttctcgtccgtggccgggcgcgcgttcgcggcggcctggatcacggtgagcacggtcgtggtggcgctcttcttcctgtacgctgcggagctgggcgcggagcggcgccagcgggcgctggcgcggtgggtgctcaggcgccgaaccacctgcacggacctcgaggcggcggacatggacggggaccaccgggtcggtgccgcggactttgtgctgtacaagctcaaggagctggggaagattagccaggaagagatcgcggagttcttggaggagttcgacgagctcgacgccgacaactccggcaccctctctccgcacgacctcatcgtggcacagcccggttagcgcggcaatcactggcagccagcaaggcagtaggcaggtggagtgagccagcgtc

SEQ ID NO: 32519 - DNA, 335 bp, Zea mays
  Clone ID: UC-ZMFLLIB3205431C12_FLI
gccgcgcaacataagggtcaggcggcgctgcggcgtcttgtggtgggcagggcgctgggcgcagggcagctgcgagccgccactgcaatccggcagcgtgtcggcgccgacaggagctcaccagcagcggcaggggcgctcggggccgcgcgtccggcggacggcaacaccagcgcagaaacgattagcgagacgcgagtccgaatttccctcattctgtaagttcaaattgaaacattcagtttgttagggacagcaacttgtgaatcgcttagcctgaattagagtttgtctccaaattactttagtcaaatatgcgttaagcaatttcaatt

SEQ ID NO: 32520 - DNA, 1011 bp, Zea mays
  Clone ID: UC-ZMFLLIB3205437F08_FLI
ggcaaaaggcaacaccgcccgcgacgaccacgatggcagcctcgctccaagtccaagccgcggccaccttgatgcaaccggccaagatcggcggccgggcgccgtccgcctcgctgccgtcgtcccgcccgtcgtcgcaactcgccagggcgttcggcgtcgacgccggcgccgccaggatcacgtgctccctccagtccgacgtcagggacgtcgccagcaagtgcgtcgacgccgccaagctcgccggcttcgcgctcgccacctcggcgctcctcgtctcgggcgcgagcgcggagggcacgcccaagaggctgacctacgacgagatccagagcaagacgtacctggaggtgaagggcacgggcacggcgaaccagtgcccgaccatcgacggcggcgtggactcgttcccgttcaagcccggcaagtaccagatgaagaagctgtgcctggagccgacgtccttcaccgtcaaggcggagggcatcgccaagaacgcgccgcccgagttccagaagaccaagctcatgacccgcctcacctacacgctggacgagatcgagggcccgctcgaggtcgcctccgacggcaccctcaagttcgaggagaaggacggcatcgactacgccgccgtcaccgtgcagctcccgggcggcgagcgcgtgcccttcctcttcaccgtcaagcagctcgtcgccaccggcaagccggacagcttcggcgggcccttcctcgtgcccagctaccgcggctcctccttcctcgaccccaagggccgcggcggctccaccggatacgacaacgccgtcgcgctccccgccggaggcagaggcgacgaggaggagctccagaaggagaacatcaagaacgccgcctcgtccacgcgcagctcgagtgattcgttttaactgttagaggcgtcggaccgtcatggagaacttttgagagaggaggaggaatcgtgtatgtaactattaatgcaaattcgggctgttggtttttaatttc

SEQ ID NO: 32521 - DNA, 1333 bp, Zea mays
  Clone ID: UC-ZMFLLIB3205439E05_FLI
cagatcttcgtgaagaccctgaccggcaagactatcaccctcgaggtggagtcttcagacaccatcgacaacgtcaaggccaagatccaggacaaggagggcattcccccagaccagcagcggctcatctttgctggaaagcagcttgaggacgggcgcacgcttgccgactacaacatccagaaggagagcaccctccacttggtgctgcgcctcaggggaggcatgcagatcttcgtgaagaccctgaccggcaagactatcaccctcgaggtggagtcttcagacaccatcgacaatgtcaaggccaagatccaggacaaggagggcatcccaccggaccagcagcgtttgatcttcgctggcaagcagctggaggatggccgcacccttgcggattacaacatccagaaggagagcaccctccacctggtgctccgtctcaggggtggtatgcagatctttgtgaagacactcactggcaagacaatcacccttgaggtggagtcttcggataccattgacaatgtcaaggccaagatccaggacaaggagggcatcccacccgaccagcagcgcctcatcttcgccggcaagcagctggaggatggccgcaccctggcggattacaacatccagaaggagagcactctccacctggtgctccgcctcaggggtggcatgcagatttttgtgaagacattgactggcaagaccatcaccttggaggtggagagctctgacaccattgacaatgtgaaggccaagatccaggacaaggagggcattcccccagaccagcagcgtctgatctttgcgggcaagcagctggaggatggccgcactctcgcggactacaacatccagaaggagagcacccttcaccttgttctccgcctcagaggtggtatgcagatctttgtaaagaccctgactggaaaaaccataaccctggaggttgagagctcggacaccatcgacaatgtgaaggcgaagatccaggacaaggagggcatccccccggaccagcagcgtctgatcttcgccggcaaacagctggaggatggccgcaccctagcagactacaacatccaaaaggagagcaccctccaccttgtgctccgtctccgtggtggtcagtaagtcatgggtcgtttaagctgccgatgtgcctgcgtcgtctggtgccctctctccatatggaggttgtcaaagtatctgctgttcgtgtcatgagtcgtgtcagtgttggtttaataatggaccggttgtgttgtgtgtgcgtactacccagaactatgacaaatcatgaataagtttgatgtttgaaatt

SEQ ID NO: 32522 - DNA, 1172 bp, Zea mays
  Clone ID: UC-ZMFLLIB3205440D08_FLI
cttaacagggagtcagaggaatctgacgaagaagagaactacttttccattgaattgacgccaagtttgtttacatctgctgtcgataatgcataccagtccatacatgaattttcaaagcctttgatcaacatgatgaaggctgcaggttgggatcttgatggggctgccaatgcgatcgaacctggtgtggtttacacaagaagggctcacaagaagtttgcttttgaatcctatatttgccaaagaatgttcagtgggttccaagaggagagcttttctatcaaggattctaacatcagtgtttccaatgaggctttcttccaccaattccttgcagtgcgagccatggatcctctggatgtcctgagccagaaccctgattcagtattcggaaagttctgtagaagtaagtaccttttgcttgtgcatcaaaaaatggaaggttctttcttcggcaacatggatcagaggaactacgtcatgagcggtggccatccaaggacacctttctaccaggcattcctaaagctagcaaagtccatatggttgctgcacaggttggcgtactccttcgacccaaaggcaaaggtgtttcaagtgaaaaaggggagtgaattttcggatatccacatggagagcgtcgtgaagaacatcatcctagaagaaggtgcggagaggccaaaagtcggcctgatggtgatgcctggtttcctgatcgggaccagcgtcatacagtcccgtgtgtacctttcagatgccaagtgtgctgactgactgaagattgtacaaggagcttgagggggtgcctttgctccttgggagagctaccagcagcataagtttatggtggactgttgtcttgtatgtaatgcgtgagacctgttgcttcaatgccgtgctacgtgattctgtccagtgggcttgtggtttccccatgttgcatttccatgtgttatacggctatgtaattctgctcagtgttttgcacacattatcagggtgattgattgatcgtgtaggctgcacttttcatctgaaatgtgtttgcccaatcaatcagatgattctgttggtgttccatgtcaagtgttgtagcttagtttctttgaacaaggtgtgtggaggattttgatggacaatgataaaactgatgacaatttagttgcttc

SEQ ID NO: 32523 - DNA, 822 bp, Zea mays
  Clone ID: UC-ZMFLLIB3205440E08_FLI
cagtaacacacaggctcctggagaagctcggctgccgggtcctttcggtcgcctccggtgtccaatgcacgagctccttcgccgccgagccgtccttccagctggtggttctggacctcgccttgcagaggacggacgggctcgaagtggcccgcgcgatcaggaagttcagtagcaatagctggctgccgctgatcgtcgccctagctgcgaggatcgatgacaaggtccgagacggatgccagaggtcggggataagcggcctgatccagaaaccggccacgttagctgcgctgggagatgagctgtatagggtccttcagaacagttgaaagtgccgcctgatggttctcattgctttcagaattctcaatagaccgctgtagcttggttagatccatacattcacaaaacatttgggggcaggcgaagggaaatgtataggaaaagctggaagaccgctgcttctcgcttggttcctcagtagtgaaggacgacggtgacaggaaggtacagaattttggagagatcatactggtagagcttagactcattcatttgtaaaaccctcggataatccaaggtttagattcttgcactagcactaaccacgatataaatagtttggacgaaatccatggatgggttcagtgaatgctggcatagtagatgcctaaagggggcaaggaaattttgttatcggttagacatgctgaaaagcaggccggatgagattgcggacaggaaggcagctgatacggccgatgctgaccttgtatcttgttgaagattaaatactatggtagtagtacttgcagtctt

SEQ ID NO: 32524 - DNA, 787 bp, Zea mays
  Clone ID: UC-ZMFLLIB3205448A07_FLI
gccaggacaaggagggcatcccacccgaccagcagcgcctcatcttcgccggcaagcagctggaggatggccgcaccctggcggattacaacatccagaaggagagcactctccacctggtgctccgcctcaggggtggcatgcagatttttgtgaagacattgactggcaagaccatcaccttggaggtggagagctctgacaccattgacaatgtgaaggccaagatccaggacaaggagggcattcccccagaccagcagcgtctgatctttgcgggcaagcagctggaggatggccgcactctcgcggactacaacatccagaaggagagcacccttcaccttgttctccgcctcagaggtggtatgcagatctttgtaaagaccctgactggaaaaaccataaccctggaggttgagagctcggacaccatcgacaatgtgaaggcgaagatccaggacaaggagggcatccccccggaccagcagcgtctgatcttcgccggcaaacagctggaggatggccgcaccctagcagactacaacatccaaaaggagagcaccctccaccttgtgctccgtctccgtggtggtcagtaagtcatgggtcgtttaagctgccgatgtgcctgcgtcgtctggtgccctctctccatatggaggttgtcaaagtatctgctgttcgtgtcatgagtcgtgtcagtgttggtttaataatggaccggttgtgttgtgtgtgcgtactacccagaactatgacaaatcatgaataagtttgatgtttg

SEQ ID NO: 32525 - DNA, 1244 bp, Zea mays
  Clone ID: UC-ZMFLLIB3205450C12_FLI
ggacaaggagggcattcccccagaccagcagcggctcatctttgctggaaagcagcttgaggacgggcgcacgcttgccgactacaacatccagaaggagagcaccctccacttggtgctgcgcctcaggggaggcatgcagatcttcgtgaagaccctgaccggcaagactatcaccctcgaggtggagtcttcagacaccatcgacaatgtcaaggccaagatccaggacaaggagggcatcccaccggaccagcagcgtttgatcttcgctggcaagcagctggaggatggccgcacccttgcggattacaacatccagaaggagagcaccctccacctggtgctccgtctcaggggtggtatgcagatctttgtgaagacactcactggcaagacaatcacccttgaggtggagtcttcggataccattgacaatgtcaaggccaagatccaggacaaggagggcatcccacccgaccagcagcgcctcatcttcgccggcaagcagctggaggatggccgcaccctggcggattacaacatccagaaggagagcactctccacctggtgctccgcctcaggggtggcatgcagatttttgtgaagacattgactggcaagaccatcaccttggaggtggagagctctgacaccattgacaatgtgaaggccaagatccaggacaaggagggcattcccccagaccagcagcgtctgatctttgcgggcaagcagctggaggatggccgcactctcgcggactacaacatccagaaggagagcacccttcaccttgttctccgcctcagaggtggtatgcagatctttgtaaagaccctgactggaaaaaccataaccctggaggttgagagctcggacaccatcgacaatgtgaaggcgaagatccaggacaaggagggcatccccccggaccagcagcgtctgatcttcgccggcaaacagctggaggatggccgcaccctagcagactacaacatccaaaaggagagcaccctccaccttgtgctccgtctccgtggtggtcagtaagtcatgggtcgtttaagctgccgatgtgcctgcgtcgtctggtgccctctctccatatggaggttgtcaaagtatctgctgttcgtgtcatgagtcgtgtcagtgttggtttaataatggaccggttgtgttgtgtgtgcgtactacccagaactatgacaaatcatgaataagtttgatgtttgaaatt

SEQ ID NO: 32526 - DNA, 578 bp, Zea mays
  Clone ID: UC-ZMFLLIB3205450F06_FLI
gtgcgctttgatctagctcttcttctcgaatccagcccgaggcctttttcttctgcggtttcatccgtacccatcctgcacacgaagcctagaatagccctcccctgctccgccacctcctcggatcccgaccaccccacccccaccccagacaacaggttgatggaggctaagatgggacgcttcttcgagtccgtgagcaatttcttcaccggaggcgaccacatcccctggtgcgaccgcgacctcatcgccgtgagcgctctgggaactttcccctctgtgttttctctccgttgccgtccgaatctttgcagatcatgaggttttgttgctgtaccccgccagttcggtggggactagggttaaatcatgtacttgcaaccgaagcattcgaatgttaagtatagcaggaagagggggataggaggagtcaggtggggatcatcgccagcagttgctgtattttgggggttcaagcgcgtgggtgcctttttcatgcaagcaaataattgtttctgtaatgtgtcctttctgatgatgccctattataatttcttggtaaagggggtggcacg

SEQ ID NO: 32527 - DNA, 1693 bp, Zea mays
  Clone ID: UC-ZMFLLIB3205453H01_FLI
ggccaagttcaggtacttaaggtgcttatgtgcaggtttctcagtcaaggggaaacttagttgcctctcgtcctgggtgagctgatatctcgatccataaatttgatcatcaacaagttgtcaaagatgaatatggaggaaagcctacaaagggctcttctccgagcacaggtcatcattgaggaggccatgggacggcacatcacaaatcaagtcattctcctgcagctgggcgtgctgagggacgccatgcaccgaggctattacgcacttgatgcattcaggtaccagcctcactatggagaagatggcaatccagctgttaggcgctttgtgcgcctatccaaggtaccctgtgcaaaggatctctatttctccggtccaactgtacagtttcaggaacaactacaagaggcacttgacaaattgagctccatgattgttgatatgaatgagttggtcatgttcttgatgagctaccctcgcctgtatcgccagccatacaacaagcatatccttctgggtaactgcatgtttggtcgccagatggaagcacaacttgtcattaattttcttttgcacacaaaacctcatagttctgaagaattgtacgtcctgccagttgttggtccacatagagtcggtaagagtacactaatcgctcatgtttgcaaggacgaaagagtccgtgattatttctcagaaatcttgtggctgcatgactctgattttacggatgatgagctaactttgagacagggatgtgcaatgaaacgacagctttttttgtcaaactttaagaaaggcaagagatttctagttgtgattgaactatatggcaatctctgtgaagatgcctggaataagttttaccgtgcttccagacagagctttcttagtggtagtaaaatcatagtcacaagctgttgagacaagattgtaaagtttggaacagcaccagctctaactctgaagcacctgtctcatgaggcctactggtatttcttcaagacacttacatttggaagcattgatcctgagatgcaccctaggcttgctcagctggccatggagatagccagactgcagattggttcaatcaatagtgcacatatcatctcttatttgttgagggacaattttgacatacacttctggtgtaaggtgctgagcttcacgagagcggtcacccaggcgcatatctccaaattcggcgtgcatccttttgatcttctaaacaaaaacgaacctgttcagcttggaagaatggcttcaccttctgaagatttcataatttgtcatcagtatcaccgctctccccacgaggaggttccagagataagattccaagatgcgttctatggaagcattaagaaaaatggaaaatttgaggtcctagtatggagatctcagatacccccctactacagctatgtccatgcttgtgagattcgagagcgaaaaaatacaggtgccaagaggaagcgttgtatgaaagatagaaccacatctagttaattttatcattttctggtttatgcaggaagataaataatttttattcacttctttggggtaggatgtcataagttacagcagagtcaattctgaagtgtgctacattttcatatctgtagtgtaagtgtctatctacataatgacacatgagttagaggcatatatttttcatggg

SEQ ID NO: 32528 - DNA, 707 bp, Zea mays
  Clone ID: UC-ZMFLLIB3205454G10_FLI
agttatcgagtggaacgaagcaagacaagagggaggccgagccgcctaggttagtcccgtccggtctcctgcgtccggcgacggactgcctggcgccggcgaatcgatgggctactggtggcaccgcgtcgtgctgccggtgcggcgggcgtggctcggcgtcgcgtcccgcttcggggttcgccaaaccgggctgtggaggctgcggcaggaggtgagcacgtgcgagtacgaggacgtgcacgtgatgtgggagatgctgagccgcaccacggcgccggcgccggcgcccgcgcccactaggcggcagcacagccggttccggccgcagccgcggccgtggggcgacaggttccgcctctgccgaggcttctagtagaccaaggccgccgccgccgccgccgccgcgcgtgtcagctccgctgctgttgctgcgggatagatatagcgcttccactttcttctgtctttttcggtttcttcttctctggtttccgctgcttgtattgtattgtatctagtatgtatcgtcgtccatctccatccctccggcgggctctgagatgtacctccattcctcctcgtgtacccgtctcgatccgcctgcagatgataccggggcatgtgaatgaacagagctggttccgatcaggttactgtgtgtccttgtttctaatataccacacctggttctccatctctgttgc

SEQ ID NO: 32529 - DNA, 595 bp, Zea mays
  Clone ID: UC-ZMFLLIB3205461E07_FLI
tgaatattcagttgagccaaaaaggcaggaagaaggaggaaccatgatcagttccaagaggcttgttcagatggcgaagaagtggcaggcaacggctgccatggctaggaggcggctcacggcgacgctggcgaaagaggccgacggttcgtgcggcacgtcgatgccggtggccgtcaggggccactgcgtcgtgtactcctccgacgggacgaggttcgaggtcccgctggcgtacctcggcacggcggtgttcggcgagctcctgagcatgtcgcgggaggagttcggatttaccggcgacgatggcggcaggatcacgctgccctgcgatgccgcggtgatggagtacgcgatgtgtttgctcaggcgagacgcctccgaagaggttgtgagggcgttcttgagctccatggtcagaccctgccaccacagcgtcggtggctcggtgccaccgatgggactcgggcgccaaccagccatctgtgtatagctagctatatgattagctccatgatgtacaatattattaggtgtatgtatgtagccggatggaatcacaggaaatcatacagaaggttattcgttttatatc

SEQ ID NO: 32530 - DNA, 1322 bp, Zea mays
  Clone ID: UC-ZMFLLIB3205461F05_FLI
agactgcactggctccttgtgcaaagccactgcttttctatttcccaagacagcttttgacttcctgacaaatgtggctgctagtttgtttggtattcatggttctccatctccaagctcagttttggtagatcctcgatatgaaattgtgaagatggcagaaatgcagccatgtgcagaagaaacgccaaaagaagaacagatagtgaagtttgtggcgcagattgacaagccaattctctcttcagaggatgccgtctcaaaaagattcgatgtagtcactgactgtttggatcatcattttgtgaaggaaaatggccatgaaagtgttacaagaggttggctgaagaaggtgcgactggaatggaacatcctgcaaaatgacctaccagatggtattcatgtgagagtttatgaggaaaggatggatcttctgagggcttgcatcgttggggcacctggaacaccttaccatgacaatctttttttttcttcgatattttctttcctcctgattaccctcatgaaccacctgtaagctcttccattccagtctctattgttcttgtagacaaaatcacgtgtttggagacggatttgatagcctaccaaccacgtcaccgtgcgtgcaggattaattattcagccttgcactgcaccactgtcaatctgtcaggccacgccacagcgtgattttgtctacatacagtacggttaatctctttttttctgattgatctctgtgatccagtgactggagcggcaagtgactcgcggcgggcggcggggactcgcggatggcgcccgcgaatcgcggcgttgggcgggcgggcgggcggcggttgtttgcggctgcgggatcctcagcggttgtgcgcgcgggagccacgcgagctggcggcggcggctgcgagatcctcggcggttgtgcgcgcgggagccacgggagcgaggggagagcgggcggttgtgcgcgcgggagccacgcgagctggcggcggttgtttgcggctgcgggatcctcggcggttgtgcgcgcgggagccacgggagtgaggggagagcgggggcagtctacatgtgagtcttaatagttgtagaagactttggaaagtagtggaatgtcacattctaaaaaaatagcctattctaatagtaagattctaattcctcaaaatgaaaagaaacaaacggggcctaagtgttttggtgattaagtatccaacacaaatgttttgaactctttatgtgttaaacaggcaaaaagtatgtttctagacttggtaaattgttttatgtactaacatggttatcaaagtgtt

SEQ ID NO: 32531 - DNA, 983 bp, Zea mays
  Clone ID: UC-ZMFLLIB3205464A01_FLI
tttgatcttcgctggcaagcagctggaggatggccgcacccttgcggattacaacatccagaaggagagcaccctccacctggtgctccgtctcaggggtggtatgcagatctttgtgaagacactcactggcaagacaatcacccttgaggtggagtcttcggataccattgacaatgtcaaggccaagatccaggacaaggagggcatcccacccgaccagcagcgcctcatcttcgccggcaagcagctggaggatggccgcaccctggcggattacaacatccagaaggagagcactctccacctggtgctccgcctcaggggtggcatgcagatttttgtgaagacattgactggcaagaccatcaccttggaggtggagagctctgacaccattgacaatgtgaaggccaagatccaggacaaggagggcattcccccagaccagcagcgtctgatctttgcgggcaagcagctggaggatggccgcactctcgcggactacaacatccagaaggagagcacccttcaccttgttctccgcctcagaggtggtatgcagatctttgtaaagaccctgactggaaaaaccataaccctggaggttgagagctcggacaccatcgacaatgtgaaggcgaagatccaggacaaggagggcatccccccggaccagcagcgtctgatcttcgccggcaaacagctggaggatggccgcaccctagcagactacaacatccaaaaggagagcaccctccaccttgtgctccgtctccgtggtggtcagtaagtcatgggtcgtttaagctgccgatgtgcctgcgtcgtctggtgccctctctccatatggaggttgtcaaagtatctgctgttcgtgtcatgagtcgtgtcagtgttggtttaataatggaccggttgtgttgtgtgtgcgtactacccagaactatgacaaatcatgaataagtttgatgtttgaaatt

SEQ ID NO: 32532 - DNA, 1216 bp, Zea mays
  Clone ID: UC-ZMFLLIB3205465A03_FLI
ttcagttgtgatgttattagcactcactttgtttcaaattctaagtcttctgttgttttttatagatatgtatctagatataaatatatgtttagacgaatcgcaatagtaaggtttgtagagaaaacagaacaacttacaatttaaaatggagcgagtagtcagtgccgggtccggaaatagtggcacagaatcagatatttgaacgttcctgattgttgtaaataaatcttttcaagatgttgcaaaaacagtatgttgttagtttaggcgaagtcatgtctgcagactgcagagtatccctaatatgtatctctagcttcctatctggaacgtgggctgaacgacctcatggtcatggcccttatagaaacctttggagtgacaaagtagagacataattttccacatggtttgttgtgttctgaagctgatctacaattaaaataacttgcttttacctagcagatgtgtgaccttcttaaatctaaggttggatcactcgagttccttcaaaagctcaatggtattcagaagtcagtagatcagaattgtgcagttgaacctgatacatcatgggatataataaagtcggatttgtgggaagatggtgacccagatgatggatatgttcttgttaagcaggaagatgtggttgatgggatcacttcctttatggctgcatgcttgttatcacttaaaagaaccaaggtagctattttcttcacttgatgggatcatcatggtgagcgaggagttcatgtctctgcatgttgtatgggaggtgcttttatatatttaatgtgtgaattccatgtttgtgtaggacctgcctcctgatcaacttcagaaagcacttaggaagatgttttcagctgaaaagaagaaaagtaaaatcagaaaggcttgggatggaactaaactcatttataatgttacttcatggggcgccactgctgttgggttctacaataatcgagcattacttacggtcgcaagtacaacatttcggacttcctgccgtgtgatatccaagttcctttgaatattgtgtagggtatgttagaactgcttgcgtctgcttttccgttcttcagctaataaaaaggtagcataaagtcggaatccatttacttaaatctgtcctgtttgccagcgacatcaagatttcgcagtcgagttcgactgctaattacgtattctcttcatttttttt

SEQ ID NO: 32533 - DNA, 1260 bp, Zea mays
  Clone ID: UC-ZMFLLIB3205467E03_FLI
cctgaacctgatacaccttgcctctcccccaccttgtttaccacgcttgtagataagacatgggtcaagcactcggcttgattcaagtggatcaatcgacagtagccatcaaggaaacttttgggaagtttgacgaggtcctagagcctggatgccacttcttgccatggtgcatagggaagcaaattgctgggtatctgtcactgcgtgtgcagcagcttgatgtccgctgcgaaacaaagacaaaggataatgtcttcgtcaatgttgtggcatctgtgcaatatcgtgcccttgccgataaggcatctgatgcattttacaggcttagtaacaccagggagcaaatccagtcatatgtttttgatgtcatcagggcaagtgttccgaagatgaacttggatgatgcctttgagcagaagaatgaaatcgccaaagctgtagaaaatgaacttgaaaaggcaatgtctatgtatggatacgagattgtgcagactctgattgttgatattgagcctgatgagcatgtgaagagagctatgaatgagatcaatgcagctgctaggctgaggttggctgccagcgagaaagctgaggcagagaagatactgcagatcaagagagccgaaggtgatgcagaatccaagtacttggcgggtctgggtatcgcaagacagcgccaggctatagtggatgggctcagagacagtgttcttgctttctctgagaatgtgcctgggacctctgcaaaggatgtcatggacatggttctggttacccagtacttcgacaccatgaaggagattggggcctcgtccaagtcctcgtcggttttcatccctcatggaccaggtgctgtcagagacatcgcagcgcagataagggatggtcagctccaggccagtctgctgtgagcacgttggaaaaggcatgcttttgacattcccatcagtaaagaagtacatatacatcatgaggagtaaaaaaaaaacttactagcgataatgtgagtacagcttgttcgttctatctatatggtgcatgtgattattattatggagattaatgttaaataggttcgcatgtattgtgccagaacaaggctaaggaccagtttgcgtaaaaaaatgtatgtttggaacttatctaagttttggagcctgaggaaacccctccatcctgtgcaaactattttgtggtaccctgcttctctgttatcgtgattcatgaatgagaatctcatgttcattttctgtgccc

SEQ ID NO: 32534 - DNA, 730 bp, Zea mays
  Clone ID: UC-ZMFLLIB3205468A05_FLI
ctggcttctcctccccctcttaccaagtcctcctcgggttagggttccttagggttttgtggaggggcgatggcggcggctgatgtggagtaccgttgcttcgtcggcgggcttgcctgggccaccagcaacgagtcgctggagaatgccttcgcctcctacggcgagatcctcgactccaaggtcatcaccgaccgggagacggggaggtctcgcggcttcggcttcgttaccttctcctccgagaactccatgctcgacgctatcgagaacatgaacggcaaggagctcgacggccgtaacatcaccgttaaccaggcccagtcccgtggcggtggcggtggcggcggtggctacggcggcggtcgcggcggcggcggctatggtggcgggcgccgtgacggcggttatggcggcggtggcggctacggcggtcggcgcgagggtggtggcggcggctacggaggcggtggcggctacggcggtcggcgcgagggtggtggtggcggctacggcggcggcggcggcggctggagggactgatgtgtgggcccatcctggcttcggccgagttatcttatctatctatagtatcgtgttaccgttcgcttctgtcaccgtgttagtgtccgttctacctttggattaggtgttggtacccctgttgttccctttgtttgctcccgctatgaaacgagacgagagaagaatgagcaaggtttttgttcgc

SEQ ID NO: 32535 - DNA, 1896 bp, Zea mays
  Clone ID: UC-ZMFLLIB3205468C03_FLI
gcgtggggaacgcacacaccgcccggtctccgatctccgatccccgatcccctcgtcgatccaagatgcagatcttcgtcaagactctcactggaaagactatcaccctcgaggtggagtcctctgacaccattgacaacgtcaaggccaagatccaggacaaggaaggcattcccccggaccagcagcggctcatcttcgctggcaagcagctcgaggacgggcgcacacttgccgactacaacatccagaaggagagcaccctccaccttgttctccgcctcaggggaggcatgcagatcttcgtcaagaccctcactggaaagactatcaccctcgaggtggagtcttctgacaccatcgacaacgtcaaggccaagatccaggacaaggagggcatccctccggaccagcagcggctcatttttgctggcaagcagctcgaggacgggcgcacgctggccgactacaacattcagaaggagagcaccctccacttggtgttgcgtctcaggggcggcatgcagatcttcgtgaagactctgactggcaagactatcacccttgaggtcgagtcttctgataccattgacaatgtcaaggccaagatccaggacaaggagggcatccctccggaccagcagcggctcatttttgccggcaagcagctcgaggacgggcgcacgcttgccgactacaacattcagaaggagagcaccctccacttggtgctgcgtctcaggggtggcatgcagatcttcgtgaagacacttactggcaagacgatcacccttgaggtggagtcctcggacaccatcgacaatgtcaaggccaagatccaggacaaggagggcattccaccggaccagcagcggctcatctttgctggcaagcagctggaggatggccgtacccttgcagattacaacatccagaaggagagcaccctccacttggtgctgcgtctcaggggtggcatgcagatcttcgtgaagactcttactggcaagacgatcacccttgaggtggagtcctcagacaccattgacaacgtcaaggccaagatccaggacaaggagggcattccaccggaccagcagcggctgatcttcgccggcaagcagctggaggatggtcgcaccttggctgactacaacatccagaaggagagcaccctccacttggtgctccgcctcaggggtggcatgcagatctttgtgaagacattgactggcaagaccatcaccttggaggtggagtcgtctgacacaatcgataatgtcaaagccaagatccaggacaaggagggcattccaccggaccagcagcgcctgatctttgctggcaagcagctggaggatggccgtaccctcgccgactacaacatccagaaggagagcaccctccacctggtgctccgcttgcgaggtggtatgcagatctttgtgaagaccttgactggcaagaccataaccctggaggttgagagctccgacaccatcgacaacgtgaaggcgaagatccaggacaaagagggcatccccccagaccagcagcgtctgatcttcgccggcaagcagctggaggatggccgcaccctagcagactacaacatccagaaggagagcactctccacctggtgctccgcctccgcggtggtcagtaagccatggttcatttaagctgctgctgtacctgggtatctgcgtcgtctggtgccctctggtgtacctctatatggatgtcgtcgtctaataaacatctgtggtttgtgtgtcatgaatcgtggttgtggcttcgttggtttaatggacctgttgtgtcctctgtgttgtacccaaaactcttctgcagcagtatggcttgaatccttatgaagtttgatatttgaactt

SEQ ID NO: 32536 - DNA, 750 bp, Zea mays
  Clone ID: UC-ZMFLLIB3205472D11_FLI
gaaaactggaatactgccaccaataatacaactagcacgcgactcagttcagtatcaagtactgtttcagtgtttattagtacaacccattgcttaattctcacccaaattaaaaaaaaagaagaccggcagccatgaagcagaatcttctgctgctcctttaactgcgatgatgagtgtgaagaggcatttacgtggccctggagcaatccctatagggaggccttccattcacccttctccaattgacctgaaagggaaggcttatgagttgctgcgagagaaggcttcaagcttcctccttgacgacttctacaggactccaggaggcattcagttcgaagggcctggttcagatgcaaagcccatcacgctgaccattgagaaccaggactacatgggtgacattgagatactgaaagagtaccttggcaaggttaggaccatggtgaagccagggtgctcccgggagatcctgaaggcggcgatcagttccatggtgtcggtgacggatgtgctgactgtgatgtcccaccccctcaacgccgagctgcccctctaccatttcaagtgagcgagggcatcagtctggttgttattcctagagtgtttttgaaacagcagaagattctgcttcatggctgccggtcttctttttttttaatttgggtgagaattaagcaatgggttgtaccaataatacaactagcacgcgactcagttcagtatcaagtactgtttcagtgttta

SEQ ID NO: 32537 - DNA, 1144 bp, Zea mays subsp. mexicana
  Clone ID: UC-ZMFLM017209A11_FLI
aggcgccctactacaaccacaagacgtgccacatgatccaggagcaccagaactgcctcaagtacggccgccccgacctgggcttcctcaagtggcggtggcggccctccggatgcgagctgccgcgcttcgacccgctgcagttcctgcagttcgcccgcgggaagtcgctcgccttcgtcggggactcgctggcgcggaaccacatgcagtcgctgctctgcctcctgtcccaggtggcgtatcccaaggacctgtcggcgaacccgtcggaccagaacaaggtgtaccactaccgggcgtacaacttcaccatcagcatgttctggtcgccgttcctggtgcgcgcccgggagcccgaccacgacggccccgcgcacacgggccactggagcctctacctggacgagcccgacgacaagtgggtgtcccagatgccccgcttcgactacgtgctggtgtcggcggcgaactggttctcccgcccctccctcttctacgagcggcggcgcctcgtcgggtgcagcttctgcagccgccagtacggcgtgcccgacctgacgctctactactcgcagcgccgcgcgtggcgcgtggcgctgcgcgccatcaacgacctggagcacctgcgcgggcgcgtcatcgtgcgcatgctctccccgatgtcgcacttcgagaacgggacctgggaccacggcggcgactgcaggcgcacgcagccgctgcgggcgaaccagaccgccatggagggccgcgacctgcacttctacaccgcgcagatggaggagttccgcgcggcggagaaggccgccgccgagaaggggcggcggctcatgctcatggacgccacggcggcgatgctcatgcggcccgacggccaccccagccgctacgggcactggcccaacgagaaggtgcagctctacaacgactgcatccactggtgcctcccgggacccatcgacatctggaacgacatgctcttccagatgctcctcgcctagcagcaagcagcaaagattaaaaaaaaaactcagcaattcggtcgccggtaaccgtgcacagattggccttcttttttttgccttgtttcgtttttttaaaaaaagaagaaaatggtgcaattttgacaagcaaggattcg

SEQ ID NO: 32538 - DNA, 1254 bp, Zea mays
  Clone ID: UC-ZMFLMO17001A09_FLI
ataaaccaagtggtggcaaagaacgatccaaatatgtcaaatcttgtccaagacaattttattcttagttgcattgatgttgcacttcttgtggttgcttttggatgtgttggcataaatcaccaaaaagggggagattgaaagggaaatgtgcccttgggcaatttctattatgttttggtgattaagggcctgtttggtttgatgactaacttgccacattttgcctaacttttctgcctaaggttagttcttcaattcgaacgactaaccttaggcaaagtgtggcacgtttcaccacgaaccaaacagcccctaagtgcccaacacacttaattaagttcttatgtgctaaatgaagagaaaagtgcaaatgaagacatgaggtatgtttctagacttagtacattgttttgagtactaacatatgttgtctaagtgctagaaacatgaacagaaagatttgcaaaagacttggcttggtgcagccaaagtccagctcggtctggcacaccggacagtgtccggtgcgccaggctagcttcctgtgaacagaccactctcgggaaaaatcgacggcgtacggctataattcaccggactgtccggtggtgcaccagactgtccggtgagccaacggtcgccagctcaacggtcggtcgcgcaatccgcgggcgacgtgtggcccgcaccaacggtaggcagggggcaccggactgtccggtgtgcaccagatagtgtctggtgcgccatctggcccggagatgcaacagtcgtctgcgccagaataggaaggagatcggcaccggaccgtctacagtgactgtccggtggcgcaccggactgtccggtgcgccacccgacagaaggcaaggatatcattccatgttggcctccaacggctcctagctgccttggggctataaaagggacccctaggcgtatggaggagctacccaagcattcaagaaacattctaagacttctagactccaacttcgtgcatttgattctttgagatagtgacttgagctccacttgagttgtgaactccgtgcgttgtgttttgagctcaagttgtgacttgtgtgcgtgatagtgctgtgatttgagtcttgtgtgtgttgctctcccctcccttactttcgtacatcttttgtgatcatcattgtaagggcgagaggctccaagttgtggagattcctcgtaaacgggagaaagacaaaaaaaggaaaaactgtggtattcaagttg

SEQ ID NO: 32539 - DNA, 3071 bp, Zea mays
  Clone ID: UC-ZMFLMO17001A10_FLI
ggtccaaatcatcgtctgtttcccctccccagtctccaccactccccctgccgccccaatcgtaaaccctagccgcgcctgagcgtgagacatccacgtcgcagccatgggcgccagccggaagctgcagggcgagatcgaccgcgtccttaagaaggtccaggagggcgtcgacgtcttcgacagcatctggaacaaggtctacgacaccgagaatgcgaaccagaaggagaagttcgaggcagacctcaagaaggagatcaagaagctacagcgctacagggaccagatcaagacgtggatccagtctagcgagatcaaggacaagaaggctctgatggatgcccgaaagcagattgaacgagagatggaacgatttaaagtatgtgagaaggaaacaaaaactaaggccttctcaaaagaagggttaggtcagcaaccaaaaacagatcccaaagaaaaggccaaagctgaaacaagagactggcttaataatgtggttagtgatttggaaagccagattgataacttcgaagcagagattgaaggactttcaattaaaaagggaaaacaaagaccgcctcgattggtacatttagagaagtctattacgagacataaagctcatataaagaaattggagtcaatcttgagacttttggataatgatgagttgagtcctgagcaagtcaatgatgttaaagattttcttgatgattatgttgaacgtaatcaggaagactttgatgaattcagtgatgttgaggacctctatagcacattgcctatggagaaggttgaagcacttgaagacatggtttcacttgctccttctagtcttgtcaagggtgttgcttctgttccgactactgcagtttcgagtacaaagagttcgattgcaacttcacttactcagcctacagtatcaacagctccttcacaaagtacatcacaagatcaaacagaggacacagcttcccaagaaagcaatagtgaatctgtgccacaaacaccacctccaaaaggtggaaattctggaccttcaataccagctgtgccaattgctgtcagtactggtagtgcagctatttctgtacttgcagaaacaattagttcccctgtgcgaccaattgttcccaccacagtggctacaatactttcttctgctattccacgaagtgctcctgagaatacatctacggttacctcaattcctgcaaacttatctatcaccttgaaggatgatgaaagcatgagttttcctccacgacgaccatctcctgctattactgaaattggaattggcaggggcatagctcgaggaacaactagtcaggcattaggtacagctcccataactattggtccagtcccaggaaatggatcggttagtgcacttcctggaataaatgacttgtccaaaagaaatatattgaacactgacgagaagattaacagtggtggtctttctcagcagttggttatgcctcttggtagtaaagttcaaccccagcaggttcccaggactaatgatgcaattagctctgaatctgctaacacaaatgaaagccctattctcggtggaagagtattttctcctccagttgtttctggggttcaatggagacctctaggtgctgctgcatttcaaaatcaaagtgaaattagtcattttcgtggaaggcctgagatttctgctgatcacagggagaagtacatacaaagactgcagcaagtacagcagcaaggtggcagccttctgaacgtttctcatataactggcataaatcagaagcaatttccaacacagcagccaaatccccttctacaacagtttaattcacagagttcctctatatcttcccaagtgaatcttggagttcaaggaacagatgctgggcatataaaaagtgaagaagaagaacaacttttggctgaagatggtgtggaatcttctgcaacaacaggagcaaataaacaaacaagtgaagatgacacaaagattccatattcgaatccttcagcacctgcagcagaaagcaatcagctgcctagggatactgatccatcacctgggcagcctttgcaacctggaatgtcatcatctggtgttggtgttatcggccgaagaagtgtatctgatcttggtgcaatcggagataaccttactggaacttctgctagttctggtcatgatcagctttataacctgcaaatgctagaagctgcattccacaagcttccacaaccaaaggactctgagcgtgctaaaacttacatcccgcggcaccctgcagttacccctgctagctatccccaagttcagccatcaattgtatctcatccctccttctgggaaagaattggtagcgacacattagctaccgacatgctattctttgcgttctattaccagcagaacacatatcaacaatacatggctgctagagaattgaagaagcaatcgtggagatttcaccggaggtacaatacctggttccagcggcatgtggagccacaggttacgactgatgagtatgagcggggatcatatgtatactttgatttccatgtcaccgaggatggctcaggatggtgccaaagaatcaagaatgacttcacattcgagtacaacttcttggaggatgagctatcagtacaaacaaactaaagtgggctgtaggtctaatcaaaccattctgtccattgtgaattttgtagttctcatgaggtgactgacttataatctggactcttgtaaaattctccagctgtaaactaatggtgaagttggagagcattccttgtaggttctgatgcaccgaacatgctgaaattagaatcgggttgtgccagtcaaatatatttgactccgctgtatattgtcgttctcatctgctttagcagcaacaattaagtcagcttagttctaaagctacagtggagttaaaacccccaacaaaagcacaaaataagtttcagggcataactgtttttcatttgttcatgtttaaggctaaggcacatgaataactgttttttattccttatttaaggctaaatttttagat

SEQ ID NO: 32540 - DNA, 1769 bp, Zea mays
  Clone ID: UC-ZMFLMO17001B01_FLI
tcagcagcaagccgcctcgtcgcctcgtcgggactatctctggtgagcgtgctggtgatcaggtaccttggaggcctggcttgcttggacgctccattgcttcgacttcgaagtcgtcgcgggtttggatcctgtgttgagggggtaacaccgtgtagctcaactgtcccctagcgccgccgcgcgaaactccctaccggtccattttgtttgtagccattaagctcttcggaggtggagatctgggctgtcgtttccaggaccctggccgcatcggctgtgatgggtcgaagcgccttggcggttcggttggcttcccttcttgcgtttggtttggtgctcgtctccgtcgaggccagcctcggggatgttgatccgcgctacagaacttgcgtgagggagtgtcaagctacagggattattggggagaacgtcatcagccattgtcagttcaaagagaactacacttctgttggagtctcttggtataaccaggagcaaatttacatccagtggaaggaactgaactgtaggacagactgtcgctatttttgcatgatgcagagagaaggggaacggcagtcacttggtctgagccctgttaaatatcatggaaagtggccgttcttacgtgtttctgtgttccaggaacccctttcaactgcactatctgctgtcaacctactgatgcacttcactggctggctttcatttttccttctagtgaattacaaattgcctcttagaccccagaccaagagaacttactatgaatacactagcctgtggcatatctatgcaatcttatcaatgaacgcatggttttggagctcaattttccatactcgagacattgagttgactgagaaactggactattcttcagctgtggccctgcttggctactcgttgatcctttcattgctaagggctttcaatgtcaaggatgaggctagcagggtgatgtttgcagcccctattttggcattcgttacaacacacatcttgtatcttaacttctacgagcttgactatggatggaacatgaaagtctgcgtggtgatggctgccgttcaacttctgacgtgggctgtttgggctggtgtaagccggcatccatcacggctgaaactctggacggttgtttttggaggagcactggtcatgcttcttgagctctacgacttccctccatacatggggtttgccgatgcccattcactgtggcatgcaagcaccattccgctcacctatctctggtggagcttcatcaaggacgatgccaaattccgcacgtcaacactcagcaagaaggcaaagtaggtaagcaaagcgccacattattagcaatttagcatagggtcagagaggatcagattccgattccgtggtctgcacgggggacattttgggggcacacgtgttgtcggacatcatggaacctcggtatatttgccctccccaaaaaagacattcatcttcatccactcaggtttttggcccacaaaactcagcatactctttagggcgcatgttctgcccttacgaattatctctttactgacctgaacgtgcatcctgtgattggatcggcattttatcattgtagtgttggtggggtttgggagattttgtcatcgccgaatcagttttgtgaaatcagacagaacaatgaacatcagcggtgtgtttcctattatgtgtggagttttgtaaattcctgaagcccattttgtatgagttctccaacgttacgaaaattcctgaac

SEQ ID NO: 32541 - DNA, 1696 bp, Zea mays
  Clone ID: UC-ZMFLMO17001B08_FLI
gcgagcatccgccgcgctcgacggccaccggcccaccagggcaccatggcgtccgccacgcgtgctctgggggcgctcctccacagggcctcgtctctgtcttcctccgctcccgctctccggggagcctcgctcctccgcggggacgggcctattggaagcgccggactgttccggaggcatgcggcgaggcggcggatttcgtcgttccagccgctctgcatgggaagacgctcctgcaaaatcgctggaaggaaggtgatgttctcttgccatgatgcacaatgtcacattaacgaagttcgggacggctggctgtgcatattctggttggcaaagccgtggaaatatcccgtgcaatcaatcatgttgtgcatgcgtgcaatcaagcaatcaaattcatccaatgaaaatccaatagtaactgctagtttacctttaactccttccgcgtgaaaccagcaaccttgtacttatttttacatttaaccccatttcatatgaaaccgttggatctagattggattcctggatgatttgattggatgatttgattgcatgcttgcaccaaatgtgtgattacagtggatatatccccggcaaagcctccatttggaataatagaaatggatgcaacaacaaatatcattgtgtttcgaattttcggttgtctcttgaggatctgagctagcttttgctgctaagtagctgttcgcttcggattaaagccgactgtttggactgctgcagctgtaatctatagagacaaaaacattgtagaaacagtagaagccggtacggattaaaaccaagcgaacaagctcggtccattagcgtaattgagtatggaaaaactgaaaacagaaagtagctttagtttcttgtttataaaatgtagttagctttaacgtctcaatatgtatcctcagagcaactccaacagccttactaaattgaacaaaatcagtaaaaaaaaagaaaagcctggttaaaaacgcatccaacaggctagctttctacctctcttctccatccggctcgtcatctactcccctcgctaggcatctttgccgagggcgtacggctcgccatttccttttatcgcgcccaactgccctcccgccgtcacggcaaattccagctcccgctcccgcgacattgcaccctcgccaccgcgaccagcccgtgcctccacattcatccgtcgccatgtacaaacctgtacggccccattcgttgaacaagtgaagaaactggattgtggaatgctcctctttctcagtgttcgccaggaaggatagacccggaggcgcatcgtacgggtggagatttggaccaatccactgtaggattgatgcaccggcgtttgcttcctcctacaagcttcgaaggcctaatgtcagcaaatctgtcccatgccaatcgaataaacagggatgaatcctacacagggaggcaatcctttggatttcaaaatgtagttgatctaattcatgcatatgctgccaaagctgttactgaacaactagaccaaaatgagaaccttgtatcagtcaatgcagatgtctgcaatttctgggaaaaggatgttatgccgatgcttttctgtaggagttgcagattttttttaaaaaaaaacttcagccgaaacaggatgttatatcgaaacattgaattagcagtggatcgtgttcag

SEQ ID NO: 32542 - DNA, 1174 bp, Zea mays
  Clone ID: UC-ZMFLMO17001C04_FLI
gcaaaagccaaaaggcatcaccgccgcgacgacgatggcagcctcgctccaagccgcggccaccctgatgcagccggccaagatcggcggccgggcgccctttgcctcgctgccgtcccgcccgtcgtcgcaactcgcctgcagggcgttcggcgtcgacgccggcgccgccaggatcacgtgctccctgcaggacgtcgccagcaggtgcgtcgacgccgcgaagctcgccggcttcgcgctcgccacctcggcgctcctcgtctcgggcgcgagcgcggagggcacgcccaagaggctgacctacgacgagatccagagcaaaacgtacatggaggtgaagggcacgggcacggcgaaccagtgcccgaccatcgacggcggcgtggagtcgttcccgttcaaggccggcaagtaccagatgaagaagctgtgcctggagccgacgtccttcaccgtcaaggcggagggcatcgccaagaacgccccgcccgagttccagaagaccaagctcatgacccgcctcacgtacacgctggacgagatcgagggcccgctcgaggtcggctccgacggcacgctcaagttcgaggagaaggacggcatcgactacgccgccgtcaccgtgcagctcccggggggcgagcgcgtgccgttcctcttcaccgtcaagcagctcgtcgccaccggcaagcccgagagcttcggcgggcccttcctcgtgcccagctaccgtggctcctccttcctcgaccccaagggccgcggcggctccaccggctacgacaacgccgtcgcgctccccgccgggggcagaggtgacgaggaggagctccagaaggagaacatcaagaacgccgcctcctccaccggcaacatcacgttgagcgtcaccaagagcaacccggagaccggcgaggtcatcggcgtcttcgagagcgtgcagccgtccgacaccgacctcggggccaaggcgcccaaggatgtcaagatccagggggtctggtacgctcagctcgagtgattcgagtgtctaactgctaggtgtccgaccgccgtcatggatcttgggaaggtgtatgtataccatggaaaactttggagagcagaggaggaatcgtgtatgtaatgtacttgttaatgcaaattcgggctgtcgcttttttactccgct

SEQ ID NO: 32543 - DNA, 2652 bp, Zea mays
  Clone ID: UC-ZMFLMO17001C05_FLI
aatgggcgaatttacccagcgtatatcctctagcttgtaagcttacccccatttgacattgtcttccaacattttcctagacttggcaacattccagttaaggttgagaccccaacaaaacatccagattcaacaaaatgaaatggagatatcaggggcatcatatttatgcattatcggtcatagggtactcagagaccacatctttcctacacaacctgcggtagaccgtagtgtaggtctctagcttgtattcggtgttgttcctctcctttgggtccaagaagatcttcttgatgaccagcaaatgctaaagcaactgagatccttctgtccttggactccacaactctgcataatcccaaagagggtggtgaccattgcacatcggtgtcttgtagcgttatcagactattgctcgtgtcagtaagtcgagcccaagttatctgcaagaaaaggtgaatgctctatgacaaggagactgacaggatggttcttcgagtgtatttcttccactttggtggcaccagtctgtggtttcaccagtcgctagttgcctgctacctcgagtaagctagaaagatccctttgtgttcactacaaccaagcaccgttcagcttagcacaaaataagaacagaagcataaaaaggaaataattataaaatcatttgacacacgaagctagaaggtgcgatgagccctatccctccatgcctgtaagtcgagcctaagttattgtagtagagggagcaggcaaggctatgctgtaagcatgtctatttgaggaatcattgttaaatgacaagagagatatcttgatggcaattgttaaatgacaaaatcattgtatagcctctgaaatagccaaacaggtgttgctattcaacatcctacaaatggaagaattttacaatttattttataagctttgccaatattagtggtgaaaggtgaaatttaagaacctgaaaagtcaaaagtatcacataattttgatagaggcgatgacaccaaagtaatagccagacataaaaatcttccatgaacagtccagtcgctgctgataaatcaattttgtagattagactcacataatcttattcaatgaaggagactggtttagtaaattctaactcagttctacatcattcgcacattaacatatcccttcacattgttgttcataaaacaattacaaaacaaggtaacagctaaagaagtcatcggttggaaaaaatgatctatggaaaagaatataatctacatgtgacatagtagagtgcacactcattaagctgctagcacattgtgagacatgaactgacaaaaagtagcatatgaccggtactacatacttacaaccctattggctattactcttgcaagtggatcttggttgcaggtgacaccagtccacaagttccccttaggcaagcaagaatccatgaggcaaaaacatcaccgtaacactaagctagtagctatggtgctcggcaactgttgtctaacaataggttcagattaacagcttcatcatttgcaaaggtctgccaatctcagtttttagactgaatcacaggttcacattcactgatttcagactcacatgttcatcatttgccatctttagcattttgcgaggttcagatttcatatttcaaactcataggtttaggctcaattcagatttcagattcacatgcttatatccacaaatttcaggctcaggttcattatttgccatcttcagcatttgcaaggttcacaaatagaggttcacaaaaccatattcaggtttgcaaagtatattagattgctcgtaggtgcaatgagaggaagtagagaaatagaatgtttgtcttataaaaatgtttgcattaacaaatttcaaagcacaaataatatatccaccagtagtaaattgctactaaattactaaaaccgtgaaacgaacaatcatgcaggcataaataactggatggacaaagaataggttgatgatatatataaatgtgtgtgtgtgtgtgtcttatcccttccatcaccattttctccttttaccctcaaataaagaaagaagtgaagtaacctcatgttcaacattccagcatttagaaatgcaggcatataaactgaccttgtgtatagcaggccccaatactcaatataatgatatccttgcaatcgtgtgcaggttgcgctacggaaattcaagtggaaggactgccatagtcctcctgacaccaatattgcttttatagtggacagaagaaacatcatcttcgtggtaggccgcaacggtcgcctctaccagtacaataggatcacagagctctggcacaggccctaacatttacctccttgtccccagggaaggccgtgcgtccatcgcctcacatatcgtgctccccagggacgcccgtgcggccatcaccgctgtccctggccggctccctgttcatggtgtccgagaacgggggacctggtggagtaccacttcagcccaaaggacagatgggagtgtctggagcactggacgccccactgggacatgagtatcgtcggcgccccgggctcgtgcttcgatggctcccagcaattcgtggccggctctaacggggcacatgtaccagcggcacatggaggggag

SEQ ID NO: 32544 - DNA, 2155 bp, Zea mays
  Clone ID: UC-ZMFLMO17001D09_FLI
ccaaaccttccaccataattcatattaggtcctcttgggggcagccttcctggagattgcagaatgcttgctgaagatcgcaaagcatcaagccgtgcatcagctgtgtccataccatttcctcgacggccaccagttgatccaccaacaagaaggcaagattgcgcttttgcacaaataaaacctgcatgttcaaggtgatgcctgtcatagataaacagcatccccttgtgtatgtgttccgaaaaatccgaaatggccgctagtggcctcggtctctccacctccttcctccccggccacaacaccctcctccggcgccggcgccggcggccggcgggccacgccgccgcgtcgttccggccggtgacggcggagctcggcggcgtcgcgacggagctgggccgccagctggtggaggcggtgggggtggggctcccctgcaccgtcatgcagtgcggcgacgtcatctaccgcagcacgctcccccggaacgacgggctcaccatcacggcccccggcgtcgcgctcgcgctagctaccgtgtcgtacctctggtccacgcccggcgtcgcgccggggttcttcgacatgttcgtcctcgccttcgccgaacgcctcttccgcccttccttccgcaaggatgacttggtatttgggaagaagcttggggagggcgcattcggggtcgtgtgtaaggcttcactggcgaaccccgaagcggcgaagaagcaaggggatttggtcgtgaagaaggcaacagagtatggtgcagtggagatttggatgaataccgtgtcaggagggcatgcgctagtagctgtgcggattttatttatggcttttgcgagaccaaagcaaaaggtaagggagctgaagaatattggcttatttggcgttttgaaggtgaggatacactttatgatctcatgcaaagcaaggaattcccttacaatgtggagacaaaaattcttggcggtatccaagacttgccaaagggaatagcgagagagaataagatcattcaaacggtgatgagacaactcttatttgcacttgacggacttcattcgacaggaattgttcacagagatataaaacctcaaaatgtgatattttcagagggatcacgaaccttcaaaattattgatcttggagcagcagctgacttacgggtaggaattaactatattcctaaagagttccttttggatccaaggtatgctgctccagaacaatatattatgagcacacaaaccccgtctgctccttctgttccagttgcaacaactttgtctccagtcctgtggcagctgaatcttcctgacagattcgacatatatagcttgggcctcatattcttacagatggcattcccttcactacgaactgatagcaacctcatacaatttaatcgccaactgaaaagatgtgattatgacttacaagcttggaggaatctggtggagccacgagcgagtgctgagctccggaggggctttgacatcatggatttagacggtggtatcggatgggaactcctcacctcgatggtccggtacaaagcacggcagaggaccagtgctaaggccgcattggcacacccgtacttcaaccgtgaagggctccttggcctctccgtcatgcaaaacgtacggctgcaactgttccgcgcaacccagaaggactacagtgaagcagcgcggtgggttatcggcctcatggcaaggtcaggaactgaagatgtgggaggctttacagaagcacagcttcaagagcttagggaaataaaaccaaagaaaagcagcacccagcggaacgcgcttgcctccgtgctgcgcctgcagaggaagatcatgagaacgatcaaggagagcatggacgagctcaacagccagcgcaaaagcatctggtggagccggtggatacccagggaggagtaggccggccgccggccgcaggcgcacatgtacatcgtccgcttctgtatgaaacgtcacccattagcattggtgatggtataatacactatcctacttactgctttgtacatgctgacgactggtgagtaaaattcatctgaaaaaaaatcggagtaacgcgatgtatagctgtaaatattttgcattgaagcatcatgatttttgagatcaaa

SEQ ID NO: 32545 - DNA, 1120 bp, Zea mays
  Clone ID: UC-ZMFLMO17001D10_FLI
cctggatcactcggtcatgaaaatgacgatgctgcgatctttgcttcatggggtattgattacctgaagtatgataactgctacaatttgggaattaagcctcagaaaagatatcctcctatgcgagatgctcttaattcaactgggcgccaaatattctactctttgtgtgaatggggacagtatgatccagccttatgggctggcaaagtgggcaatagttggcgtacaactgacgacataacggatacatggaaaagcatgacagacattgctgataagaacaacaagtgggcatcatatgctggacctggtggttggaatgacccagatatgctggaagtaggcaatggtggcatgaccttagcagagtatcgctcacattttagcatatgggctctcatgaaggcccctctattaattggctgtgatgtcagaaacatgacttctgaaacaatggaaatactgagcaacaaagaagtaattcaagtaaaccaagatcctcttggagttcaaggaagaaaaattttaggacaaggaaaatatggatgccgtgaggtgtgggctggtcccttgtctgggaatcggcttgttgttgctctgtggaaccgttgttcagatactgctaacgttacaatgaaactgccagcagtaggccttgatgggtatgctgcctattctgttagggatctgtggaagcacgaaactatatcggaaaatgtcgtaggaacttttggcgctcaagttgacgtgcatgacaccaatatgtacatcttttctcctgcaaccattgtcgcttcggtttgatcaggaccggtggatccaagatgacagcaccgctatgattcaaggatatgtcacgacaacaagggccttcgtttttcctgctgcattctgttccacccgagtgcagaagtccacttcgtgcagaactgtctcagtgatgtttgtatttctcacggaatagctctatttatctcaagattgagcaagctcgaggcttactcggtgtaccggcgttgtatccttggggcatccaagatcttgtacgatttgaaacagtctgaaccaatgatgtaaaacaagatagtgaaaatacaacttcacaaattgcagccgt

SEQ ID NO: 32546 - DNA, 897 bp, Zea mays
  Clone ID: UC-ZMFLMO17001D11_FLI
tcatcactcgtcccatgttccagagcatgctgagccaccgcggcgacagcgggtgccagggcgccttctacacctacgacgcgttcatcgaggccgccagcaagttccccggcttcggcaccaccggcgacgagcagacgcgcaggcgggagctcgccgccttcttcggccagacgtcccacgaaaccaccggtggatgggcgactgctcctggtggaccgtttgcctggggatactgccgggtgaaggaacagaacccgacggacccaccctactatggacgaggacccatacagctaactcatgagtacaactacaggctcgccgggcaagcgctgaacctgaacctggtgggcaacccggacctggtggcgagcgaccccgtggtagccttcaagacggccatctggttctggatgacgccgcagtcgcccaagccgtcgtgccacgccgtgatgaccggcgcctggacgccgtccgccaccgaccgcgccgccgggaggctccccggatatggcctcacctcgaacatcatcaacggcgggctagagtgcggcaagggccagtccaccgacggcgccaaggaccgggtcggctactacaagaggtactgcgatatgctccgggtggggtacggggacaacgtgccctgcaaggaccagaagccttacggaggatgaggacgtggacaacaataattatatggttgctgcaagccttcacgtgtttttgttgcctctctaccaactaagaataaatcaagctagcagcaaacaggggcaacctgctaccttcggcatgtgtctacttatcatatagtgtgtctatgtatggcacagtatctcatctctggatgcatgataacgaactaatcaacggttagcagcattcaccttt

SEQ ID NO: 32547 - DNA, 1732 bp, Zea mays
  Clone ID: UC-ZMFLMO17001E03_FLI
tacaaagcccgctactggtggatatgcgaggccatttttttgcaacaccccaagtgattcgtttcgaattagttagtttgttcttgtaacggatcaaagcactgatgttcctgcgctgcaatggctctttcgctagttaatctcttatattttgttgtcaaaactcgcctactcggttttagtcaaggatgcgatttctttcatccaaaatcttttgggtgctcatgtagaagttgaaaatcttcgtattttcactcctgtttgtctggattattcgctgtattttgacggcgttaatctggcttgttcgactattgacaatatcgttgcattcttgtttccgacagagttctcgaagcaaaacgatcggatgagattcttcaaggggagcaaggtggaggtattgcaggaggcagaggtgccatttggttcttggaggcctggtgagatcatctccggcaatggacacacctacctggtgagatatgatgaaagtcccgttgactctagcgtggctgttgaaaggatgccaaggaggttgattagacctagccctcctacggatgatcctgtacgctggagtttgggtagtattcttgaggcctttgacagctactcgtggaaggttgctgaggtggtgagagtgcttaaaaagaatcaatatctagtcaggctccttgggtcgtcgctggagttgagtgcacatgcatcagatcttcgattgaggaagctttggttagatgacagatggattgtgactcagaagtattccgcaagatgcttggatggtgcattcagaggtcaatctgaagatggaaatttagactgcaacttgagaaaggacagccatattcaacttgagaaccggaatgcttttgagggtgatacatctagaggcatgaagagaaaatcgtctgctatatcaacacatcctcattgcagcgtcatcagtaagagattgcaatgcagtgacgccactaagagattctggacactaaatagagatggaaggcacacaaagctggttgatagaggttttttccctttggctgaaaaggtagatgctgttgattccccatgcttaatgctgcgtgggaaatacatgcatgctagtcataaagggcatactagaacaactgaagaatttagtgacaccgagagtacctcatcttctgttggtagttctagtcctaatagtaccccccatagatcacagtattataatttggtcaaccaaagtggagatatctgtagtagaactgatggtgatgaagcttttacatccgaaagagaaacatcagaacatggtaacaatggatcgaggggagaaacccatttgctggaattacatgcttatcgtgcgacaatgttagccttgtatgcttgtgggtcaattagctgggagcaagaggctttgttgactaacctaaggttaacactgaacatctcaactgatgaacatctagctgaattgaggagtttggttacccatgctgttacttccagatagccttttcttgttaatttcctggggacatttcatatatttcaaattattgtaagttgggaaatctcattaaggggttgaggtgttggagtacttcatgtgtagaattatacttgtcaaaagagtcacttgggaaattttgtactgttgatatctcaagacttctgaatttttgggacagtcttgaagtattaatatttttcatactgaaacctttttttaatc

SEQ ID NO: 32548 - DNA, 1361 bp, Zea mays
  Clone ID: UC-ZMFLMO17001E11_FLI
ctccacttggtgctgcgcctcaggggaggcatgcagatcttcgtgaagaccctgaccggcaagactatcaccctcgaggtggagtcttcagacaccatcgacaacgtcaaggccaagatccaggacaaggagggcattcccccagaccagcagcggctcatctttgctggaaagcagcttgaggacgggcgcacgcttgccgactacaacatccagaaggagagcaccctccacttggtgctgcgcctcaggggaggcatgcagatcttcgtgaagaccctgaccggcaagactatcaccctcgaggtggagtcttcagacaccatcgacaatgtcaaggccaagatccaggacaaggagggcatcccaccggaccagcagcgtttgatcttcgctggcaagcagctggaggatggccgcacccttgcggattacaacatccagaaggagagcaccctccacctggtgctccgtctcaggggtggtatgcagatctttgtgaagacactcactggcaagacaatcacccttgaggtggagtcttcggataccattgacaatgtcaaggccaagatccaggacaaggagggcatcccacccgaccagcagcgcctcatcttcgccggcaagcagctggaggatggccgcaccctggcggattacaacatccagaaggagagcactctccacctggtgctccgcctcaggggtggcatgcagatttttgtgaagacattgactggcaagaccatcaccttggaggtggagagctctgacaccattgacaatgtgaaggccaagatccaggacaaggagggcattcccccagaccagcagcgtctgatctttgcgggcaagcagctggaggatggccgcactctcgcggactacaacatccagaaggagagcacccttcaccttgttctccgcctcagaggtggtatgcagatctttgtaaagaccctgactggaaaaaccataaccctggaggttgagagctcggacaccatcgacaatgtgaaggcgaagatccaggacaaggagggcatccccccggaccagcagcgtctgatcttcgccggcaaacagctggaggatggccgcaccctagcagactacaacatccaaaaggagagcaccctccaccttgtgctccgtctccgtggtggtcagtaagtcatgggtcgtttaagctgccgatgtgcctgcgtcgtctggtgccctctctccatatggaggttgtcaaagtatctgctgttcgtgtcatgagtcgtgtcagtgttggtttaataatggaccggttgtgttgtgtgtgcgtactacccagaactatgacaaatcatgaataagtttgatgtttg

SEQ ID NO: 32549 - DNA, 1623 bp, Zea mays
  Clone ID: UC-ZMFLMO17001G01_FLI
gtgcaggtcggccgcaatacgaccaacatggcaaagctgttattcttgtccatgaaccaaaaaagagcttttacaagaagttcctctacgaaccgtttcctgtggaaagtaatctgagggagcacttgcatgaccacataaatgcagaaattgtttctggcaccatcagcaacaaggaggaggcgattatttatctcacctggacttacctatatcgcagattggttgttaatccggcctattatggattggaggatactgaaacaaacacattgaattcttatctatcaaggttagtcgaaactacatttgaagatcttgaggacagtggatgcataaaagtggatgaccactctgtaaagtacttgattttggggaaaatagcttcacagtattacctgagctacctcactgtttcaatgtttgggtcaaatattggccccaacacaacgttggaagtctttctacacatactgtcagctgcatcagaatttgatgagcttcctgtacggcacaatgaggacaatttgaatcgaatactcagcggaaatgtcccgtatccagttgatcaacaccaccttgatgatccacatgttaaagccaacttactctttcaggcacatttctccagagcagaattgccaataagcgactatgtcactgacttgaaatcagttcttgatcagagcatacgcatcatacaggcaatgattgatgtatgcgcgaatagtggatggcttacgagtgcattgacttgcatgcatctcttgcagatgatcatacagggtctctggtttgagagagattatgaatccctctggatgttgccatccatgaatgatgatatattagaccatctcaagagtagaggagtctcaacagtcccctccttactagatctttcccgtgaagaattgcgtagggtacttcaaccattttctgcgtcagagttgtatcaggatctgcaacatttccctcatgttgatgtgaaagttaagcttcataatgaacaggagcgatccaaacctccaactttaaacatcaggttgcaattgaaaaattcgcgacggtcagcatcaagagcatttgcccctagatttcccaaggcaaaacaagaagcttggtggcttgtcctggggaatgctacaagttcagagctgtatggtctgaaaagaattagttttgcagatcgggtgattaatactcgcatggaattgccacagacgttcaatgtgcaggagacgaagctgatcttggtgtcggattgctacctaggttttgacttggagtattctcttgagcatctcaccaagggttgagtgctttattcagagctgtttgggctgtttcattttctatgggttcagcaaccagctcatcctagattgatcctgtaatcacgagacatgagttcattccatgaatttttgtttgtatgactacatccctcgtgttcatggttatattatatttaatagctatatatacgagtggataggtttataactttcatgaaatatcttttccgtaagcatagtagatgtttgagctctaaggttatgaccaacaaattgtgtatatggtcgtgcaaaatactattttataatataaactatattattt

SEQ ID NO: 32550 - DNA, 1079 bp, Zea mays
  Clone ID: UC-ZMFLMO17001G04_FLI
cgcaccagcgctgctggaccaccgcccgtctgacgcaaacccagccgtccagaaccgtcgtcgccgccgcagcccgtccttccaccacgctcgcgccgttgcgcgctcttagggttccgcagggtcgggatcgccggagatggactggagcgcggtgacggcggaggacctggtggacgcgctgcgggaggtggactggtccacgccgccgcggactgtctcggagttcttctcccggttcaccgtcccacgctcctattccaagtggaccagccgcctcaagtgcaacctctactactacaggacaaactatttcatcttgatcatgttcatccttgggatgggcttcctttggaagccagttgctatccttgctgcttttatgactggacttagcatcgcatttctcaatgatagttttgcagtcactttcaatgagaaagtcacaaggaccataagacagttttcaccacatttagctgcaaagatgaggccaccaataacacctgttcttcgtggtcgaccaaactcgaagagatcaattcatatttgtgggcgaccgcgcagggtgtttgtcatattcttttctgcagttagctgtatactctggttgacctcatgcagtcttctcacagtcctctgggcacttctgattgctctatttgcaactatgctccatgcaagcttcagaacaccaaatctgaaagcacgtctgaatacattcagacaggaattccgggctgtctggcggaattatagtgagctttaaggtctcatttgtttctctcatgttcattgtggtaaggaaaggtgtcttgtgcagaaacgtccatgctgtttgtgagttgcactaggagatctagttgaaggtgaaacgccattggacattactacatggattatgggaggtgggatttgggttgggttggctccgaatgcgatgttatgccttagcacgtgatcccccaagaacaataatttttctttcaggcttctccctaaccgaacattggagaggacagcatgtaaagaaatgtaaaaatgtaccggttctcgatcaaaacttgtgttgtttgtag

SEQ ID NO: 32551 - DNA, 3866 bp, Zea mays
  Clone ID: UC-ZMFLMO17002A08_FLI
ttgatgatggctctcattacatgtggatttttctgttgcgcttgaagtccgatatgtccccccatgctttctcatttctttgcctgggtgtccactcagttcggtagcacctgccaagccattcagtgtgataactggacagactttgacaacttttctcgtgccatcttcctcaatcgtggcgtccatattcagatgtcatgcccctacacttctccctagaacagcaaggctgagcgcatgattcgcactaccaacaacatcatacgcttcctgctcttacaagtctcgattcatgttcggttctaggctaaggctctctacattgccaactacctgcttaatcgtctgcctattgaggcgatctgtgctctcacccctcactttgccttatttggctcacttctacctatgaacatcttcacgtcttcggatgtgcttgctatcccaaccttttcaccactgctcataagcttgcccacggttcgacaagttgtgtctttcttgggtactcccatgatcacaaagggtactagtatgtcgatctttccaccaaccaccttttaatctctcatgttgtcttagacgaggcttcctttcttttctctgcttccccctccacctctgttcctaaattggattcccttttcgcgaattgtcgtgtggactcccctatacaaccccacttgttttttcctctgcaggctcattctccgccgcgccatcagcggcctccgcgtcgttgtaacgtcgtgcatagcctcgttgtcccccattacaccccttgtggccctgtcatcccctgtcgtgccacacacggccttgccatcccccactgcgcccctcgcgaccttgccatcccttgtcatgccatgtgcgtccttggcgtcctctaccgcgccttgcgcagcttcagcgtctcgattcactgatcctatgcatgtctatgagtgacatgcacagagcatgcacgacctcatatttgtctcctacgcgatgaggctacgattcgccgaccctgtccatgtctatcatctctgtgcgcaggattgtccatcgacccgctcttgcatcgagccgtcggtgtaccacactcctctcctttgttgagatccctgtcacatccatccgatggtgactcgccaaaccgtgcggtcctctggcctgttgatcgtcttgtcctttcgactgttgcctcatcgtcagtggtctcccttatgccactgttcgctcgtcgtgctcttgtagatcctcactagtgttgtgctatgtaggacaagcatgtggccctgcttgccaatcacacctaggacttggttcaccgtcccactcgctgcaacattgtcactggcaaatgggtgttcatccacaagcgccacgccgacagctccttcgattggtacaaggcttagtggatccttcgggggtttactcggcttcatgtcgttgactatgatgagaccttcagtcccgtggtgaagtcacgcattgtccgcacgattctgtctttgcctctctcacggtcttgacctgtccacccgctagacgtaaaagaacgcctttctctatggcactttgactgagacaatgtattgcagccagcggatcggttttatggatcctgctcatccgaacatggtctacaaacttcacaagtcgttgtatggtctgaagcaggcaccccgctttgcttccttggtctccctaggctttgttgaggcctagtcggacacgtcgctcttcatttattgttgttgtggtggcactgtatacctacttatgtatgttgacgacattgttctcatggtcttcggtcctgctatcttgcagcgaaccatctctgccttgcagcgggagtttgctatgaaggatctgggacaacttcattacttgtcattgccgttgagccccccaccctagccgcctcatgtttcttcaacaacgggcgtacactggggatctttctgattgagctagcatgacagttgcatgctttgctccaccccagtggatacacaggctaaggtctcctccgttgttggtgtccctgttagtgattccactgcatactggaccctcttcttgcgctatccagtatctcactttcaccaggctagatattgtttatgttggttagtagttgtgcctacatatgcatgatccctaggagtcacaccttaccgctgtgaagtggatcttttagtaccttcggggcacactcgactatggccttctctaatgctcctccgcatcagcacttgtctcctacactgatgttgactaggcgcgttgctcggacacgcgtcgctctacttctggctatttcttctttttgggcagtaaccttgtatcctggtcgttgaagtggtagcaggtcgtctcccgctcgagtgtcgaggccgagtatcgtgttgtggctaatggtgtggttgacacatgatggattcgatagtttcttctggagctttagtcctatctccagcaccaacctcgtctattgtgacaacgtcaacgtcgtttacctctccaccaaccctacccaacaccaacagacaaagcatgttgagatcgacctccacttcgtccgcgagtgtgttgccattgatgatgtttgtgtccatgtgcagacgacttctcagttcgtcgacatcttcaccaagggcctcccaacgtcgttgttcttggagttacgctccagtctcaacatctgtcgctaatagagtttcgactgtgggaggaggcgagggggtgttagagtgtattgttcctattgggcctaggccttgtatccatcccactatggggcttttatttgtacctacacctatgtcctgatattgtattccaactcttcctctccaatatcttgccttggcatgggcggatcctctcctatatcttgccttggcaggggcagagctatttgtactgctctgggtgcggctgcacctacacccaaaaaaataactttggcaagaatcaatttattactatatttgcagcgtgcatgtgccacaaagcaagcgcaccctctctgatttgctctagctccacccctatgccttgacctggatttcttgttagttcttagacagttatagtatgtgtatgtgtgctaatttaaccacagttctgtttcgatcaaatggaagactaaaaatctattatagaatatgctggcattgcaagaataacaaaggggctgaatatgaacttatccagcttatttgataaaaagttggtatgtactttcctgcaagtttatctggctagatatcttccttttgatgatacttgaaccttgaaatattagtagttccttcaagaaaggtcatagcaagggtttatctgaagcccagaagcatgaaaagtcgcttcctggctcttcaattgcatgtgatattgaagatgccggtgattgcaatgataaccttgtgaaagcaccttcatcaaacaacgtaacagccaactttaagaaaaagggtaagagaacactggagttggtgaatttgcagaatagctcagatttaactgatgttgtcacaaaagataacgttcgacagattagagcaaggaaggtgccagtgtaaacagctactcacatatgatcttggtatttatgtaatttccgtccgatgtaaataaatacttagttctgaaatcatttatacatgcatatccacttgagagtactgttataatggtaggaatcttggtcccggttcaccatgtaacattataatttaaatagggatgggcatgagcctcttaggctatttctagtagatcctctaccttgtatcctatttcaaatttttctgcaaacactgtcagtgtcatctacaattttgtgctccctattttcc

SEQ ID NO: 32552 - DNA, 677 bp, Zea mays
  Clone ID: UC-ZMFLMO17002C01_FLI
ttcaaatgacagcgaaagcagaaagggtactgttttagaagctgagctccaagtagatgataatctggtccaagaagatgaattcgttgttgccaaggaggacaagaagccagcggttgccacagatgcttctgttcaagtagattgggtgaagacagacgaagctaaccctcaaaagtccaagttgcatgaggaaatggaagttctagacgaacttcttggaaaagaaaacatggagaacagcggtattacgagtactgatgagaattatgctgaaaaagctggaggagatgatatcttgtttgaggatggcgttctgattgagaatgggttagccactgcttatgaacatgatttgctttggggttggaaggccctgcagcagctgctgatgagcctgggtttcaaaatggatacaacatgaaaaggcataatctattgccatatatctaatgttcgtatgtcgcaattcggatgcaatggtgttgctttccaggataatttgttttgacccctgaggagactgccttgtggatgttcacggaaaaggctttgcactctagaaagctgctggcattgtggtattgtatgtatataatatgttcgttttccaggcgtgctgtatcttagcaggaatgagaacctgttattataaataatcaaccatcagttttact

SEQ ID NO: 32553 - DNA, 1106 bp, Zea mays
  Clone ID: UC-ZMFLMO17002D03_FLI
tgacaccccgcggcgcgcctccgccgcacgcccccactctctcaccgccaccgccgagatggccgcctgctcccacctcgccgccgcgggtggctcttcccctgccgccgccgcagtggttcgttccccggcgcattcctcagccgccgccgccttcgcgcgcctccggtcgacgctgcgtttctcgagcgccggcctgtcggttaagggaagcagggcgactttcccgtgggtcgccgccgcggggccggccgcggcggcgccggtggccgacctggacggccgcccagccacggagaagcagcccatcattgtcatcgataactacgacagcttcacctacaacctctgccagtatatgggggagcttggattgaacttcgaagtataccgcaatgatgaactgaccatagaagatgtaaagaggaagaacccaagaggaatacttatttctccagggccaggtgaaccacaagattcaggaatatcattgcagactgttcttgaattaggcccaaccatcccaatttttggagtttgcatgggcctgcagtgcattggggaggcatttggaggaaagattatccgtgctccttctggagtgatgcatgggaaaagctctccagtttattacgacgaggaattaggaaaggccttattcaatggcttgccaaacccttttacagcggcgaggtaccacagcttggtcattgagaaagaaaccttcccacatgatgctttggaggctaccgcatggactgaagatggactcatcatggctgctcgccacaagaagtacaaacacatccagggtgtccagttccacccggagagcatcatcacccctgaaggcaagaaaatcatcctcaacttcatcagattcattgaggagctggagaagcagcgttcctaatctaggggaggtatatgggacgggtcgtttcatagatcaggcggaagcagagacataagccactgcgaagttccggcactggcagtggaagtttagctaggaatcaacgtttccctctcataattcgttgtgctcgtggtaacataatctgtgtggaccgaatgtcgaataaagtccaggcgtccagctgatc

SEQ ID NO: 32554 - DNA, 1082 bp, Zea mays
  Clone ID: UC-ZMFLMO17002E04_FLI
ccggcgggtgtcctttttgtcttcgagcagaagcagaaaatcgcgttggcgaagcaactgaagctgaggccacggcaggtggaggtgtggttccaaaacaggcgagcaaggacgaagctgaagcagacggaggtggactgcgagctgctgaagcgctgctgcgagtcgctgagcgaggagaaccggcggctgcagcgggagctacaggagctccgcgcgctcaagctcgccggcccgcacccacaggcgccgtcgtcgtcgcccgccgccgcgacgcagggcgtgccggtgccggtgccgccgccgttgtacgtgcagatgcagatgcagctcagcagctgccgatgctgccggccgccacgctgagcctctgcccgtcctgcgagcgcctgcgcggcgggcccgccgcgcccaaggccgagcccgacaggccccaggcagccaaccaccgtttcttcaaccccttcacccactccgccgcctgctgatgatcatgatgatgttgcttgcgcgcgcctgcgctgcgcaccagcaccagcacgcgcatctaccttggcggcttggcgtacgtgcgcgtgcatgatgcaagagcaagcaacacgcagcggcggcagcgaacagatagcggcaccgcccaccaccgcagatactagctaccacgtatacactccgacgatccatccacctcgcgatcgcgtacgtcacaagtaacatgtgatcctccgatcctctggctattttcttgatccggaggggttaaagttacttgtcagtgttcccatcagctaatcgatcgatcgatcgatccaccatagattcataggcttgataggaggaggtagtagtcaaaatagccggtccgtccatccatccatgtatatttttgcgcatgcatgctgtaattctgtccctctcgatcggtcggccgatctactggaaatttttttttgctgcagcatgaggatagacccatttgcaaatcaataacacaactaaaacgttacttggtggacttgtaggtagggtctatcctcttttttatgaggggctacaaacatcctaatttagagctgggttgcaac

SEQ ID NO: 32555 - DNA, 1801 bp, Zea mays
  Clone ID: UC-ZMFLMO17002H06_FLI
gtctaggcttcgattccgccctcctcgaacccgccttccttcccgtcgtcttctccgcagctccatcgtcctcgggctccggagaaggaagagccgctctggcaccaggtcttcgaacctcccctgccctcctccgcctcgtctccccccgtccccgtctcggtctgttgcaggtatgggtgttctcggtggagcacctcctgcaagctgcccagcgacccggcactgcgcagaatgggcccgaatctacttgaggtactgcttgtgcagccagaaggaaggtgctgccctggcacttgggctaatcagtgtcataagctggggcttcgccgaggtgccacagataatgacaaattacagacagaagtcaacagaaggactctctgtcgcttttcttatgacctggattgttggggatttgtttaaccttgttggctgcttcctcgaacctgctactctgccaactcagatgtacatggcactgctatataccatcacaactctaattcttaccgtacagacgatatactatagccacatctaccatcgtcttgaagcaaaaaaatccagggcagctagcaaggctcaaaagcatcaacgtgcggatgcatcattacgtgaaaggcttttgggtgccaaggacggtgtgttatccagaaacaacgggtcagatgctacagtccttattccaagctcacctattcctgttaatgtgaaattggtcgaccaataccatggaagcagccccaacaccgactactactacatgtcagcaagatctttgtccaggagtccagtgccaactgctggtacatggttgggcagtaatcgtcaatcgttaatgactcctccacaaacgaatgatcaaaggggatctttaattggtgaaatcgctccagcacattctgcaccatctactgttacaaaaaatgccctctcagtggcaccatggatgggtcttctattgggtacgtgtctcttgcacattttgattggaaacacacatagggagatgccaagtggaactgtcataccagttggaagaaggcttttagtgtttgtggagggtcatggaaattcatcgctcagccatggcaatggaagtgaaattggacgctatcttggttgggctatggcaataatttatatgggtgggcgccttccccagattttgttaaatatgcaaagaggccacgctgaggggctgaatccattaatgtttacctttgctttactgggaaattcaacatatgtaggaagcatacttgtaaatagcttggactggtcgaaagttgggccaaatctcccgtggctcgtagacgctggaggatgtgttttgctggattcttttatcattcttcagttcctttatttccattatcggaagcaaagggagctttcagatgagcacgacaaagcagataaagcctgacagaaatggtttcttcttcagtacaaagaactgaagctgaaatgagtgctcatacaactggctctgggtagcagcatcattcttacgtgaagagcaccactcatactcaggagtcggggacagatttggagcgtcatttcactggttgctgcttggggagggtagttctcacggcgtcatctcttgtggagaggcttgtgcacttaatttgtcttgtagtatcaaaacgtcttgtataatattatctctgttctcaaatatttgttacctgttagtttatttttgaaacgactgagggaatatttatttatatgagagattagatgttgactggtctgcttttgctttacattcattttttttccttcc

SEQ ID NO: 32556 - DNA, 509 bp, Zea mays
  Clone ID: UC-ZMFLMO17003B05_FLI
aggatcctcgccacgtggcgccctcggcccgtgaaggccgggtgcatgggggcaactttatgcctttcatgctggatggtggtgtgggactcggcaagaagccggccaacaacgctgacgctagtacctctgcccctcgcagctgcaaaaatatggagaagcctggtggctctgcgcagcgcagctggctgtgatgccagaagtccgtggcccgcccgcccttccccatctcggtgtgctctgctcgattcaagtatctcccctgccctctggtgtggtgtgaaactgaaatctattatgcgtggactgtcggtgtgtactggttggtcaggacatgtttggtagtgtggacgttgtgtttgtttgtgctttgttgcatcagtcaatcagtctggtccaacatacctggtagcaagagtagtgtgtgaatggcctgtaaaaggaacccattatcatgatgtatgtatatatctaaataataaaaggtggaaggctgcatcagtcggtgt

SEQ ID NO: 32557 - DNA, 441 bp, Zea mays
  Clone ID: UC-ZMFLMO17003C01_FLI
agtccaagaacctgggcgtgtagcccctgctttacatcagaaatcagacaagacgatttattcaagtaaattacaaattcggaactaggatgcacacagcattaaactacaaatgttatacacggtgatctgcacatgtatgcagatcgctacagagcataaagttcaaaacatgcacggaagctactatgctagtttgctactgcacatacaaggaaacgaatgtaagaaacagaaaccagttctaacgcagctctcttgactcggacctatcagcctgcctatcgtcatccctgccaccatgtctgccatcaggcctatcatggttcctttcattatccgaaggctgcctatcaaactgtcgaccatttctctcattgtgattctcatatcgcctctcgttgcctgaattctgcctatcgtaatgccgatcagtcctgg

SEQ ID NO: 32558 - DNA, 1026 bp, Zea mays
  Clone ID: UC-ZMFLMO17003C04_FLI
ggcgcagaggctggccccagcccagctgacgccgtcgagcgcgccgcctcccgggggcgcgatgcccaggaagcggttccgcaccaagttcaccgccgagcagaagcagcggatgcaggagctgtcagagcggctcgggtggcggctgcagaagcgcgacgaggccgtcgtggacgagtggtgccgcgacatgggcgtcggcaagggcgtcttcaaggtctggatgcacaacaacaagcacaacttcttgggcggacacagcgcccgccgcagcgtctctgcctcctcaggcgctgctgcgctcctccaaaccccatgcgccaacgccggcgctgctgcaccgtcattcaacccgtccaggctcacccctccccctcccgtcctcacatcgtccccgaccggcttcaacatcaacggcgccgcctcctcctcgccgcccaccgtcaccgccgaccacacggacaacgccaacggagcttcatcgccgcactccgcttaagctagagaggagagggaagcgagaatggagagacaaacatgcttaatttcagtggtcacttgtttttctttctatttagaccttccatctaagaaattagccccaacaaaacatgccgccatgcgccatgcctagaaatccaagcttcctcccctgtactttatgctcttgggatctgatgatgatgttgatgctgatttaggattagattatctcatctcatcccaaccacaaaaaaggtagcctccttggtggttcttgtcctctttgattgagcaaggcaagggagagggtttttttccttctaggctcctagtatcccatgctgtttgtgcttgtgacatgttgcgcaaaacggaagcagcctgccacctcccctctcatgtggccgtgagcactgttccgcccataaaaaacgactttgctctgtacttgcgattgctgttaggagtaggataatgactaagcccatgattagtagcggcattgttttttctattataatacttgcatgcatggtttggccc

SEQ ID NO: 32559 - DNA, 919 bp, Zea mays
  Clone ID: UC-ZMFLMO17003D03_FLI
ccggcaccgcgcgcgcgcgggaaagcgagaccacgaggccagacgacgcataaggttgaaccataacatagatctgcccaagcccttatcaagttgaggtgcacggacacctgcagacaggatagccgcaatacgcacatgcatgtggcctgggggacaggttgctcttatctatcggcaagctggagctggagatgctagctgctgttgctgcgtgcatgcgttgttcttctttagccgtgtcaggcatggacctgactagaaaccaaccgaattcctgagtttcttctctttttccccccttcgcgtacgtacctgcgttgcgctgcgcagggcatgtgacgcagccatctcgaacttaacgagagcgtcgtgcgccgacaccacttcgtgttcgtggctgtagactctctctgcgccggcctgtgcctgtttccacggccaccggtcactctcttcccgaggagctagctagctagggctgtcctgatccatttgcagagccgccatgccaggtccagttcaccgcgccgtccacttgcgtgaattgcttgctcgtataggcgcgcggaagtccggagagtacgtccggataataatctttcctctcggtttgttccttgccgacgatcgggtagagaagacaacttgacgcctaacaccatctcattgttaccgacgacatgaaacgtccacgtgacaaggcgacagatgagccatggcaatgagattgaagacggcaatgaagtgatcgagcatccatgtagagtgcttcccaaaaactttatttaccctctcctgatacaagatctctgggggcaatagttttggagacctgctctcttgtttgtcggtgcacgcgaatgattaggaagaagtatcatacgcacgacgctgtaggcaggaagggacgaaacta

SEQ ID NO: 32560 - DNA, 1191 bp, Zea mays
  Clone ID: UC-ZMFLMO17003D08_FLI
gcagtcctgtcctgtggaccgtatgacgtgtttatttatgggcggcgccttcgtctccactccccaccggaggaaggaagcgagaagaccagaaggtgagaagagagagagagagtgtgtgtgatcggtacaaggatcaccgctgtgcctgcgcgtgctgcttcaccgaatcgagtcagatcctgtccgaatccgagctaagggatggcaaccggtagtgaagcctcgaaggcagctgaggctgtggttgactggcataaacacgacagcaagaggatgctccatgcggtttaccgtgttggggatctggaccgcacaatcaagtactacacggaatgctttgggatgaaactgctgaggaaaagggatgttcctgatgagaagtacaccaatgccttccttggctttgggccagagaacaccaactttgcagttgaattgacatacaactatggcgttgacaagtatgacattggaacgggctttgggcatttcgcaattgctaatgatgatgtgtacaagttagctgagaatatcaaatccaagggtggtaagatcacccgcgaacctggtcctgtcaagggaggatccactgttattgccttcgcacaggatcctgatggctacatgtttgagcttatccagagggctgacacacctgagcctctttgccaggtcatgcttcgtgttggtgaccttgagcgttctatcaagttttatgagaaggccctagggatgaagctcctaaggaagaaggatgtacctgattacaagtataccattgccatgttgggctatgctgatgaggacaagacaactgttctggagctgacgtacaactatggagtcacagaatacagcaagggcaatgcatatgctcaggttgccattggcaccaatgatgtgtacaagagcgccgaggcggttgatctggcgaccaaagaactaggtggcaagattttgcggcagccagggcctctacctgggatcaacactaagatcgcctcttttgttgatccagatggctggaaagtggttctggttgacaacaccgacttcctcaaggaactccactgaaggctcgggatacccaggtgctgtgctaggatgtagtaatgcttgtctgtggtgtaataagatgtgggtggtttgtttctgccctgatgaacttataatactgaatgttgctac

SEQ ID NO: 32561 - DNA, 2179 bp, Zea mays
  Clone ID: UC-ZMFLMO17003E05_FLI
ctcccccactcttctacttcttgctgtcgtcgtcttctctcgactccccgtcccctcccgctgcctctcccacccgccgcttccggattccgccgcccgtgccctcgccaccaggaattccactcggagtaaggagtgttttcccccgctgcttgcttcgcttctccggtcccgggacccgcccccgctttcgcccgacttagattccacttctgtccgttcgctcgctcgctcgtttgctcttaccccccttgctttgctcgttcgttcgattggagctagccgctgcgtggattcctcggctcgccgtccggatctggcctcgctgagctgcagctgccgcgaatcccgactcgattcgcccgcgctcggatctcgccggactagcggggaccgaggcctctcgattcgcctcgggggcgagatggatcatgtggtcggaggcaagttcaagctcggcaagaagatcgggagcgggtcgttcggggagctcttcctagctgtgaacgtgcagaccggagaggaggtcgccgtcaagctggaaaatgtcaagacgaagcacccgcagcttcactacgagtccaagctatacatgcttctccaaggaggaactggcattccgcacctgaagtggttcggcgttgagggggagtataacgtgatggtgatcgatcttctcggccctagccttgaggacttgttcaactattgcagtagaaagttttctctcaagaccgtgctcatgcttgctgaccaaatgattaatcgggtcgagtacatgcatcaaaaggggtttctgcaccgtgatataaagcctgataattttcttatggggcttggtaggaaagccaatcaggtctatataatagactatggactcgcaaagaaatatagggatcttcaaactcataagcacatcccatacagagagaacaagaacctcactggaactgcacgatatgcgagtgtcaatacccaccttggcgttgagcaaagcaggagagatgatttagaatctcttggttacgttcttatgtacttccttaggggcagcctaccatggcaggggctgaaagcagggaccaagaagcagaaatatgacaaaatcagtgagaaaaagatgctcactcctgtggaggtactctgcaaatcgtatccatcagaatttatctcctatttccactactgtcgttcattgcggtttgaagacaagcctgattactcttacctgaagagactattccgcgatctctttattcgggaaggataccagtttgactatgtgttcgactggaccatcctgaagtatcctcagataggctccaacccgcggatgagggtgaaaggactagtggagctgctggaccctcaatggacaagattgagaaggccacaggagaagcagccggtagaaggaatcttagtggtcctgtgaaccagactgacagttatgcacaacgaccgcgtgagaccgtatctatgtcattaaaggaaattatgcatagcactgaccggtctggggaaaggaccatggagagaccacgtacatcctcgcgcacaggcagtgcatcccgtagagctgttgcatcaagcagcaggcaagcgtcatctgtggaaccaagtgagcagcagtatagccgggcaagcagattgttctctagcaacagtggcagtcgcccatctagcacccagagggtcaacccatcgccaggcgaggcaagggctacctccctctcacgggcggcagtcgcgagaggcgcccgcgacgagccactccaccgcagcctggagcttctgtccctcggtggcggcgggaaaaggaagtagtggcaaggaaagcgagcatctgagagcgggcggaagggaagaacgcttgtttgcgactctgtaaatgacaggattcgtcaacagtttccctggggcttcccatagtttccttggtgctccggtctgttgtaccattgcttcatagatagcaacgattccttgttaaacgtgtgctgtgttgcaggttgcgttagggccaagtcctagcctttgtgatggtgattacatttaggggtggtcaagattcacttatttatgtttcttcaccctttcctggactcggcgacttttttcatgtcgaactctgaattttcttattcaacagaagttgataaaaaaggacttcctgtgt

SEQ ID NO: 32562 - DNA, 1354 bp, Zea mays
  Clone ID: UC-ZMFLMO17003H12_FLI
gggggaacgactaaggtggctatcaagcgtggcaatcccttgtctgagcagggtgtgcatgagttccagactgagattgaaatgctgtccaagctccgccaccgtcatttggtgtcactgattgggtactgcgaggagaagaatgaaatgatcctggtctatgattacatggctcatggtactctccgcgagcacctgtacaagacccagaagccacctcttacctggaggcagcgtttggatatctgcattggtgcagctcgtgggcttcactaccttcacactggtgcaaagcacaccatcatccaccgggatgtgaagacaacaaacatccttctggatgagaaatgggttgccaaggtttcagattttggtctgtccaagactggcccatctatggaccatactcatgtgagcacagttgtcaaaggcagtttcggataccttgatcctgaatactttcgcaggcagcagctcacagagaagtctgatgtatactcttttggtgttgtgctgtttgaggtcctctgtgcacggcctgccttgaaccctactcttccaaaagaggaagttagcttggcggagtgggcgttgcactgccagaagaagggcgttcttgatcagattgttgacccctacctgaagggaaagatagctccacaatgcttcaagaagtttgctgagacagccgagaagtgtgtttctgatcagagtattgaccgcccttcgatgggcgatgtgctctggaacttggagtttgcccttcagatgcaggagagcgcggaagagagcggaagcctcggttgtgggatgtcggacgagggcactccccttgtgatggtcgggaagaaggatccaaatgacccgtcgatcgaatcgagcaccaccaccacaaccaccacttctttgagcatgggcgatcagagcgtcgcgagtatggactcggatgggctgacgcctagcgccgtcttctcacagatcatgaaccccaaggggcggtgaggtaaagctggtcccattcgttaccttgcattcattcagcatgtttttttcacgagttcgtgctgttaaggttctctctaattaaggaccggaagtccgagaattgtttcatactagatattctgccttgccctatacttcttccccagtattgcaacgactgtacatctgttggcttgtattgtaccgctgctattgacccaactagtattttactttatgagaaagtgatgtgcacgaactattgttatgagtggtcgtgtgacgtgctgttaggaaggagtctcgactctgaattcgacatgcacacttgataatcagttttcaatctgaatgggttgcgagagctgat

SEQ ID NO: 32563 - DNA, 1588 bp, Zea mays
  Clone ID: UC-ZMFLMO17004C12_FLI
aggcggcccttctccgcggaagccggcgggccgccgcctcccttacccctctcgccgtgctcctacgcaccgtcattccctagcattccccacgggcgaggtaaagaaacattctcccaccccctccagccccataggtgccaccgggatttctcttgcggttgcttggcccagatctgcggcgcattcggcgtttctgatctcgcgtgcacctcgtttccctcggcggtggatcagtggcggcttggtcgagatgggcgatgcggttgatgacatcatctgtgcaacggatgcggcggtcgccgtcgaggatgcggccagtgggaagcccgcaatgctctctagcttaggggggcagggtgaggaagagcatgaggagaaggacaatgaggacaagtcaggcgagagcgaggtgatcaacccgccagaagacgctggcggggaggccacatcacccctggaaggcaggaagcctcgcctttccaaggggaatcaaagccatggacctaatgctgtcaaatcaaagagtccaacgagtggagacgaaggtcagacaaggaaaaaggctcccaattcttctcttcctaaggcacccattgtccaggtgtcccatggtgacgctggtgtcggcagtaataaagatggcaagaatgagtctcgctcatcttccgtggatgcaacattgctggatgactccaaggagaaaaggaaaactcaaaagccattagcacagctcttttccatcaaaagcgacgaagaacagtcaaatggtgagagtgcaaagcctcgaaaagttggcagcattccatcatatggtttcaccttcaagtgtgatgagagatctgaaaaaagaagggagttctattcgaagcttgaggagaagattcatgcaagagagttagaaataagcaatttgcaagcgaaatcaaaggaaactgaagaagcagaactcaaaatgctgagaaagagtttgaatttcaaggcaacaccaatgccaagcttctataaggaaccaactcctgccaaggttgaattgaaaaagatccccccaacaagagccaaatcgccaaagtttggtcgttctaaaaacaagtccacaccagagactgaagaaaatgctaccgcggaccagcctgcccacctgagcctcgaggagaatgtttctcaaaacggtgtgaaaaaaccaaccccgttgaatccagcaaagaagccccagaggaagtcactccccagattgccatctgaagaaaccggtccgcttgttgccacctcaaggcagctaataaagagcgccaagctggatgcagttagtgctccggagacaggatcagctacaggacaggtacaagtacaaggaagtgagacggaaacagaatctggtcaggggccagttgaagctggggctaatcctgatgaacaagacgccagcgaacagagtgttgtttagtgaagatcacggtgaccaaaccagctgatttgtgatatgcatggtgtgcctcggctttgtataatattgtgcttgcctgctagagtaacctgtagcctgtattatgttatgtgatatatactactactactggtttatttt

SEQ ID NO: 32564 - DNA, 1450 bp, Zea mays
  Clone ID: UC-ZMFLMO17004D03_FLI
acctcaagctcctgcttttccattgctctgcgtctgcgtctgcgtctgcgtctgcactgcttcgcgtctccctccccccgcctccgcccccgccccggcaaaaaagcaaaacacggccatggaaggctacgaccgcgagttctaccagttcagcgaccagctgcgcctgcagacggccgccttctcgggcctctccctcggcgactccatctggtcccccgccggccggcgcaacaacagcaacgacgtcctcttcgccgcctccgcgtcgcccgccgacgccgccgccaagagcaacgccgtcgtcgggctcaagctcaacgacggagggcccggcctcatcggctccgggaagctggccttcggcggcggcgccggaggcggcggcaccaacaaggccgaccgctacaacaacaacaacctccccaacaccgacaacaagaccgtgtacaacaccagcaacagcttcatgggcaacggcagcagctacgccaagaacaacaacaacaacgccgacatgctggcgttcgacaagatggggagctacggctacaacggcggcggtaataccaacaacaacagcaacggcgtggaggtgaagagctacttcaacaagtccgccgggagggcggcgagcaacaacaacaacaacaacaacagccacgccggcggcggcaacaagaagggcggcgccggggagtacggcaggaagaagcacgccaagagcgagggcgcggcggcggcggcggccacggacaagcagcggttcaagacgctgccggcgtcggaggcgctgccgcggggccaggccatcggcgggtacatcttcgtctgcaacaacgacaccatggacgagaacctcaggagggagctgttcgggctgccgtccaggtacagggactctgtgcgtgctatccgcccgggactgcccctcttcctctacaactactccacgcaccagctccacggcatcttcgaggccgcgagcttcggcgggaccaacatcgacccgacggcgtgggaggacaagaagtgccccggcgagtcgcgcttccctgcgcaggtgcgggtggcaacgcggaagatctacgacccgctggaggaggacgccttccgccccatcctgcaccactacgacgggcccaagttccggctcgagctctccgtcaccgaggccctcgcgctcctcgacatcttcgccgacaaggacgacgcctgatcgatccccatcggatctgtcgtcgggccactcgaagctcggatgcatgaaggaacaaacaataataacggatggatgggcatgtatatcgtcatgcgcatgtcaatcccacgacgagacgagaagagacgggagtatccgcatcaccacggtggtcggtggagtagtatattaataattaatatagtatgtccacctttgtttgatactactaagggctatgtattgagg

SEQ ID NO: 32565 - DNA, 2761 bp, Zea mays
  Clone ID: UC-ZMFLMO17004D04_FLI
ctccctgtctgctttaggcatttaattctaccagaaaaatatgctccaccaactgaattgcttgatctgcagcctcttcctgttagtgcattgagaaatgcaagatatgagggcctctatagtgcttttaagcatttcaatcccatccagactcaagtattcactgtcttgtataacagcgatgacagcgtgttggtcgctgcaccaacaggcagtgggaagacgatatgtgcagagtttgctatactaaggaaccaccagaaggcattgtctggcgagagcaacatgcgggttgtttatatagctcccattgaagctctcgcaaaagaaagatacagggactgggagcggaaatttggagagtttgccaaggtagttgagctcactggtgaaacggcagctgatttgaagtttctggataaaggtgaaatcataatcagtactcctgaaaagtgggatgcattgtctcgccggtggaaacagcgaaagcacatccaacaggtcagcttattcatagttgatgaacttcatctacttggatctgataagggacatgttttggaagtcattgtatctaggatgaggcgtatttccagtcatattggcagtaacatacggatcgtagcactttcagcatcacttgctaatgctaaagatcttggtgaatggattggtgccacctctcatggccttttcaacttccctccagcagtgagacctgtgccactggaaattcacatccagggtgtggatatagcgaactttgaggcaaggatgcaagcaatgacaaagcctacctacactgccatcacacagcatgcaaagaacaataaacctgccctggtgtatgtaccgacaaggaagcatgcaaggttgactgcattggacttgtgtgcgtactctagtgttgagggtgctggaactccatttcttcttgggtcaggagatgagatggatactttcaccagaggtgttgaagaagagactcttaagaatacacttaaatgtggtgttggctatttgcatgagggtctaagtgagcttgatcaggaacttgtaacccagctgttccttggtgggaggatccaagtgtgtgttgcaagcagcacaatgtgttggggaagaccattgcctgctcatttggtcgttgtcatggggactcagtattatgatgggcgggagaatgctcacaccgactatccaattacagatctgcttcaaatgatgggtcatgccagtagaccacttcaagataactcagggaaatgtgttatattgtgtcatgcacctcgcaaagagtactacaagaagtttctttttgaggccttccctgtcgaaagcaatcttcaccatttcttgcatgatcacatgaatgctgaggtggtggttggtgttgtagagaataagcaagatgctgtggattatcttacttggacgttcatgtatcggcggctagctaagaatcctaacttctacaatcttcagggtgtaagtcacaggcatctttcagaccatctttctgagctagttgagactattctgaatgatcttgaatcgagcaagtgtgtggctatagaggaggacatgtacctgaagcccctcaaccttggccttattgcttcatactactatattagctacacaactattgagcgttttagttctatgctgacccagaagactaaggtgaaaggactcctagagattctagcatctgcctcagaatatgcagagcttccgggtcgtcctggtgaggaagaattcattgagaggcttgttcgtcaccagaggttctctatcgagaaacccaagtatggggatccacatgtgaaggccaatgctctgctgcaagcccatttttcaaggcacacagtggtcggaaatctggcagctgatcagcgcgagattctcctttctgctcataggttgctccaggcaatggttgatgttatatccagcaatggttggcttagtcttgctcttagtacaatggagctgagtcaaatggtgacacaaggcatgtgggatcgggattctgtgctgcttcaagttccacacttcacaaaagacttggctcggaggtgccaggaaaatgaagggaagcccatcgagagtatctttgatctagctgagatggctgtcgatgagatgcgggatctcttacaactatcgaactctcagctgcaagacatcattgaattcatcaagcggttccccaatgttgatatgacctatgaggtccgtgagggtgatgatataagcgctggtgacaatgtaacagtgcaggtaactctggagcgtgacatgactaacgtttcatctgaggttggtccagtccatgcgccaaggtttcccaagcctaaggaagaaggctggtggctggtgattggggacagctccacaaaccagttactggcaatcaaaagagtggcactccagaagagggcgagagtgaaacttgagttctctgctccggcagaggctgggagaaaggactacatgatttacttgatgtcagactcttacttgggctgcgatcaggagtatgaattcaccgttgatgtcaaggatgctggaggggattgatgatgaagactgtgacactatgtcgcatagaagtagaattgagtgtgtactgtaacgcgatattggaacattctgtgttgtaacctcgaacatgtggaagctgtaacaccaacgtatgtgttattgtactttgggcgttgctgtgttatcctattctagtattattgtaaggatt

SEQ ID NO: 32566 - DNA, 424 bp, Zea mays
  Clone ID: UC-ZMFLMO17004D11_FLI
cggcgccaaaggaggaggaggcgggggacgggctgtggcggaaggagatcatgatgggggagcggtgccagccgctggacttctccggggtcatctactacgacgcccaaggccgccgcctcgcgcaggcgccgccgccgcgctcgccgctgcgcagcccgctgccggcctccgtcaagctcgccgccaacgccgcgtactagctagggatgggactgggaggagtcctccgttttcttccctgctgctagtgctagctagtgacagtgtaaatggttttccttgccgcttgccgtctgcttctcctcctccttgacgttggtactacttacttgctattaataataggtttcccttgtcctttggcccccgtgtagcgaatttgcgattaaacgagggcatcccctacagtttcgagatgctt

SEQ ID NO: 32567 - DNA, 2497 bp, Zea mays
  Clone ID: UC-ZMFLMO17004E03_FLI
ggcatctcgcgccgcttcagtctcaagagcagatacgcaggtatggagccacgcactgagggagatacttccaggaacttgcgccaaggtcgattgctagagccgccaccggtacctgctgtgaggacttctccagaaggagtgcagaggcacacaggtcaggatgtgattgctagtagaagtcaaagtgcagcagcatctgagacgggctcttctttgccatgtgaagatggaaatgcaacggctgaaactattggcagcagcacccaccctgtgcacattggtgtgcaaaaccaagacattgaacaagagcaagttcatgagactggaaagagatacaagaggttgacatctgatgtatggaattactttaccaagaaaaaagagataatagaggagaatgggaagaagtgtgagcaaatttggggttattgcaacttcccaaattgtaagcggcgatatagagcagagggccgccaaggtacaactgcatttaagaatcatttgaggtccgcacacagcatagttcgaggccaacaacaacttaaatttgagaaggaccttggtaataacattacccatatccagcctttcatgtatgatcaagaagttagcgtgaagaaacttatcatggcaataattatgcatgattatcctttcaatatagtagagcatgaatatttcgttgatttcattaaatcacttcatcctagctttccaatcaagagttgtaatgctgttggtaaagaagtaatggatacatatttggaagagaaggagaaattatatgcacatttaaaaactgtgcattgtcgctttagtgtaaccatggatatgtggacatcatgctcgaataaatcatacatgtgtgttactgttcattggataaatgctgattggtgtattcagaagaggattattggtttcttcaatgtcaaaggacgacacactggtaaaaagttgtcagagacctttactgaagctatggttagatggaatcttgataagaagctattttccttgaccttggataatgctagtgcgaatgaaatggcagtcaaagatataatttcagatctaaaagatggccaggcttccttagtttgtgatggtctgttttttcatgtaagatgtgcatgtcatatactaaatttagttgctagagatggcctgaaagtaatttcgaaaacaattgacaagatcaaagctcttgtactagctgtgaagggatctccattgcagtggaaggaacttatgaagtgtgctagcgagtcagaattagatacaaagaggggcatctcacttgatgtttcagcaagatggaattcaacttatttaatgctgcgggatgccttgtactacaaggatgcttttgcaaggcttaagtcttcaaatcgtcatatgtatgtagaaatttatccatctccggatgagtgggacatggcactaaaaatctttcaatgcttgaaaaaagtttatagtctcgctgaaattctctctggcacttcatatccaacagcaaacttgttctatagaggtttttgtgacataaaagtattgctagatgactggtgttctagtgatgatgccaccgtcagtgaaatggcaattgccatgagtcaaaaaattgagaaatattgggaacattctaacttggctcttgctgtggcatgctttcttgatcctcgatacaagaaaaaagttgtagagtattacatgaagaaattccacggtgatgggtaccatgtggaacttgaaaaaattgttaatgtggtaagagggctctattgtttttattctagctctacacctgcaccagcaaagagtacatcaccggaaccagctaatagtgcatcagatattttaatggcaagtgtatctgatgaactggacagttttctgtatggtacaaatgaacctactctagttcagtccaatgagttggaaaagtacatggcagatccacttttgcgtcttggtggtccatttgatggtccatttgatattttagcgtggtggaagagcaagagggaagtgtatcctattctttcacaaattgttcgagatgtgatggccatacaagtatcaacggttgcatctgaatctgtttttaatgctgctggccgttttgttgatccttatcgtaatcgtcttgagccggagatggtagaggcattgatatgcaccaaagattggatagctgcagaaagaaaagattctaagattgttggttcaattgtgagtgaccttgaaattgagactttatctaccgtcatggctaacaaaataagagctgtggatgacaaggacatagaatggaaggaccaggagcatgatggtgagaacgaatatattgatagtgatcttgatgttatggatgaccacgatgaactttgagctatagctgtaggcttctagtttcagcttaatgtctactgcctttgagttactatgttatgtgtcttgggacttttataaactattatcgtgattgtgc

SEQ ID NO: 32568 - DNA, 2453 bp, Zea mays
  Clone ID: UC-ZMFLMO17004E07_FLI
aagaaaggggccacacacttgttgatgagataagaatcctcatggtgcatgggctattgcatttattgggctttgaccatgaagtcagcaaggtggctgaagaagagatggagaaggaagaagaacatattttaaatactcttgaatggagaggaaagggattaattaagagtgcttatgatattgctactgattcactcacagaggctgatagcaatatagagaaagtgatcctacaagagaaacatcaacataaactaagccatatcatctgtgatatagatggtactatcatggatcatgaaggtggcctgcatgaaaaatcaataggatctttgagagaggcaattgcaaaaggagtaaatgttatcatggttactggaaagagtcgggcttccactattagaaccttcaagcttcttgatttctacgaaaaaggtgattttatttcagagacttcgcctggtgtatttttgcagggttcacttatctatggaagggatggcaaaaaagttcatagagcagaattggatttagatgtctgcaaggaggcattgctgtactccttgaagcatagaattcctcttgttgcgtactgtgaggaacaatgtctaacattgtttgaacacccatttgttgaattgttgcacactgtacataatgaaaacaaggtaaaagtgatgcattcaattgaggaccttttggaatattcatctattcagaaattacttctttttgatagtaccaaagaggattcatctgttctaaggcagcatttttcagaactgagcagagggaaagcacatgttatcaaaatgcattcaaatacaattgatattgttcccctcaatgcttcaaaaagtggtggtttaagaattctacttgatcatcttggaataacaaaagattgcgatcttgattctattggagactataccagatggctaagcaataaatgattcaactgacatcattactgggtcgttcttaagaaaaaaatgtggaatcgtaggcgcgccaaaggaacaaaactattgctctgaaggttgcaaaaattgtatgtttgtagcaacatctcttttagttggcaattcatgtgtttttatatttcgaaaaggaatgggtggtgaatgacagcttagatattccttcagatcatttcgttgagatacatgggaagagaattaaatgggccacatccttgtgcaactggagcttaccatgtgacatttgcttttgtccaaagtcatctgcaacgccatttttaactctacatagattttttgtagttttgttttgtgtagcatagcattgataaatgttgctaaataaatgagttaatggtttctccacgttgatattattcatatgaaactaatgctgaagtataatttatgggtaggaattcaatggatgcattgtgatgacgataactgtattttctgccatgttgggctttgtttattatgactcaccgttactcattacatccatttgattgattgatctttttattgatcatgaaatgaagcacataagaaatcaggttgattgtagaaacaaatattgttcagatttttcatgcataaagcacacacgaagcacagctcgtcaatggaaagtggaggcttgtcaccctagtttcccctttgttacagatcaatatgtgttgcaactctcttgttctggtgggcatatgatttagtgctgatgttcaaattgctggtgttgctagttcctgacattactctagcaaatgaaccatttgagggcctctttgctatcatcttgttgcatggccttgatacaatgattgtccgttggttcatgtctaatcctactgaatagcttttgcttgctctcatcctcttactgtatgaaactttctttgcaaggtcttgaacacttgtagcatcagatatagacgtgaatgattgggccttcccttggtagtaattggacagccctttcctgtggaaatcgtgttaattgaacatgagttggaatgctttgcatctgaagtgaaatttatagaagtaatgttgactatccatcttttataatcatgacattgtgttatatatccactcagtcttttttcctttcagcaaatatacatatgaagttgaactctgctgcatacttatcatagatcttgtgcaaaagggaacctctactagttatcacagagcagtatcaagttttgttgagctgaaagtgaatttgcaagctttttataacaaataacagatcattccattgtatggtagggacagaagcttgctggtttaatagaagataatagtgcaaagaaatcgcaaaacttattgaagcatttgtaattttgaggctatatctttttctaccttcatcatgaatgtaaaagttacaaaactacattgtgaagccccattgtgatttatttgtagaaattggacagcttttatgacttt

SEQ ID NO: 32569 - DNA, 2054 bp, Zea mays
  Clone ID: UC-ZMFLMO17004E08_FLI
ccagctcacacgccaagtcccagtacaaagcctacggaatttcccccacctccaattcgagttgtccgcttccagtcagtcgccgccgccgccgtcgccgctgaaaccgaaacttgaaaaaccagctcgccgggggtccggccgatttcccccaaatttcgctgctgctgctgataggaggccgcggcgaccaccatgggcaactgctgcgccacgccgtcgacgacggaggagagcggcaagagccgccagaagaaaccgaagcagaagacgaacccctacaacgtggcgtacaaccgcggggcggcgccggcgccggcgcgcccgggcctggtggtgcttcgggacccgacggggcgggacctcggcgcgcagtacgagctgggcggcgagctgggccgcggcgagttcggcgtcacgtacctgtgcacggagtccgccacgggggcgcgctacgcgtgcaagtccatctccaagcgcaagctgcgcacgcccgtggacgtggaggacgtgcgccgggaggtggacatcatgcgccacatgccgccgcaccccaacatcgtcagcctccgcgccgcctacgaggacgaggacgccgtgcacctcgtcatggagctctgcgagggaggcgagctcttcgacaggatcgtcgcccggggccactacaccgagcgcgccgccgccgccgtcacgcgcaccatcgtcgaggtcgtccagatgtgccacaggcatggcgtcatgcaccgggatcttaaaccagagaactttttatatgcaaacaagaaggagagttcccctctgaaagcaatcgattttgggctgtcagtgttcttcaggcctggtgagcgatttactgaaatcgtaggcagtccatactacatggctccagaggttctaaagcgaaactatggccctgaagttgatgtttggagtgctggagtgatactttacatacttctctgtggtgtaccaccattttgggcagaaactgaacagggagtagcacaggcaattatacgatctgtggtagatttcaaaagagaaccatggcccagagtatctgagcctgctaaagatcttgtcaggcggatgctggacccaaatccattgacacggtttactgcagcacaagtacttgagcatccatggttacatgactctaaaaagatgccagacatttctcttggtgatactgtccgagcaagactgcaacaatttgctgcgatgaacaagttaaagaagaaagcattaagggtgattgccgagcatctgtcagtggaggaagtagctgacataaagcaaatgtttgacaagatggacgtgagcaagaatggcaagctaacattcgaggaattcaaggcgggccttcgtaaactggggaaccaaatgcctgattcagatcttcagataatgatggatgccgctgacatcgataaaaacgggaccctagattacgaggaattcgtcaccgtgtctgttcatgtgagaaaaataggcaacgatgagcacatccaaaaggccttcacatacttcgaccggaataagagcgggtacatagagatcgaagagcttagagaggcactggctgatgaactggagggaaccgatgaagacatcatcaatggcatcatccgagacgtggacacagataaggacgggaaaataagctacgacgagttcgcggcgatgatgaaggccggcactgactggaggaaggcatcacggcagtactcgaggcagcggttcagcaacctgagcctgaagcttcagaaggacgggtccctcggcgccgagacacggtaggcgggggccggccaccgcctaccgccacccgacggagaagtgatctgagtgttcgtcgagctgtagtcaggtgattcgattccacgcacgttccattttacacggtgaatcttcagtcgagcttgtagtttcttgggtttgtgattgtaaagatggtggttgtgcttgtgcccgtacgtactgtagatgcagcagcgtgtacctacacaatttacatttacagagaaaatgcatgctggagtagcacaagt

SEQ ID NO: 32570 - DNA, 1665 bp, Zea mays
  Clone ID: UC-ZMFLMO17004E11_FLI
ggcccagcggcgcgcggcgcctgtcgagcccaagggcctgacccacgatgagatgctgctgttgcccacggggccccgggagcgctcggccgaggagctggaccgctcccgcgggttccgctcctacggcggcggcagcggcttcggcggccccgggggagagcgccgcagcggcttcgacgacgaggaccgccgcgggccgggcagaagctcggatcttgatatgccctcccgcgccgacgaggctgacgactggggcgccaccagaagtttaccccggctcccacagactctggccgccgcgataggttcggcggcccttcccctctcggccgtgctgatgatattgacgactggtcgcgcggcaagaagccgctcccggcgcgctaccccagtctcgggtctggaggtggcttccgcgactctccagccttccgcgactcaccagctgcttctgattctgaccgttgggtccgtggcgccacccctttgccacacaacggcgagggggcgggggagaggccgcgcatcgtcctgaatcctcctaaacgtgatccgttagttgcctctaccccacctgctgaggtggcccgcaaccgaccaagcccgttcggggctgcaaggccccgggaggatgtgctggcggagaagggggtggactggaggaagtttgagaatgagattgagcacaagaccagccgtcctaccagttcgcactccagcaggccaaatagcgctcattcctcccgccctggtagccctgggtcgcaggtttcggcagttgggagtgaaggagcaccgagggcacggccaaaggttaacccatttggtgatgccaagccaagagaagtggtgctgcaggagaaagggaaggattggaggaagattgatattgagcttgaacatcgtgctataaataggccagagtctgatgaagaaagaaatttgaaagaagaaatcaaccttctgaaggtggatcttaaggaaatcgagagaaacatgagtaatggttctgaccagacatcggtagatgcaaaaggtttgtctgagaagatatctcagttggaaagccagcttgagcagctttcaagggagttggatgacaagattcgatttggacaaagaccacgttcgggtgcgggcagggttacagcacttgcaccaactagtttaggggaggaaccgcatgctacagtggtggacagaccgcgttctcgtggtggtatggagccaccaccaaggcaggaagaaagatggggatttcaaggaagcagagaaaggggctcttttggtgcaagcagaaattcggacaggccaatggcaaggcagagatggtgaaactgggacaacaagcatctcttagggatatttccggttcccagtcccttttttttgttctgaaaagatgggcaaaataagtcgttatttgtttgtcgtgtttgcttggtctagaagattgttgaggatggagataactccacatgaagttattggtttgtcaactctatgccgtaggatgttttgcgtttccctttttgccatctaccatgtcaaaacgatatcttagcaacctccgatactaactgttatgcttactggattccagttcagcatatgtcactagtcgattatttgtgcactgagcagtggaaaccttggatttgc

SEQ ID NO: 32571 - DNA, 1560 bp, Zea mays
  Clone ID: UC-ZMFLMO17004F07_FLI
gtcggttcgcccgcaccgtttcccaaaccctccggactcgaacccaacccacgcacccacatcgggagacgagccaggccgagctctggaagagtctccggaaggcccgcaccgtcgatggcggccgagggcagcggcgtccaagagacgttcgaggcgcgggtgaagcgcctgttcgggtcccgcctcttcgacgccgtcccggactcctccttcccgacggcctcctggtccgtggccgcgggcgacgtcgagcgccaccgttggtcgaagccgtcggaggcccgcgacgcggaggaggaggcagcgggggaggccggccgcggggacacgccctgcgtctccgcgttctacgacgccaacgggtgccttcgtggccggaggcgcaggtccaggcaggaggagttcgaggggaacctcgacgacctagatgaagacgaggaggaggacagcgagagggagaggaatgcggcagaacaggacgaggaggagggggttagagttaacatcggcctcgaccccactctggatcgggaggaagaggaggacaagtatgacagagaggcctttggcagagaggaggctgctgaccgtgtgtacatgcatgatataatggatgccggcataaacatgagcatcaacagtatagtccctgacctccttgatgattccattgaagaggtgtaccgttttaggaaggatcctcgtgcagatatgagggcagcatctgcaagactcagagaagatggttctactaaagattgtgattctcactgtcccactcaagccaaggatttccccagtgtagttcatacaaagaaagctgtggaggaagacaatgtaaaacctatactgaagaggaaggagtcacaagctgatttaaaaccaaggaaacgtgtcaggtttgatgctaatgttaaggatagtgagttagatacgtttgaacatgacgaagattctccaacggttcctcaatccatggatgtaatcactgaggtggagagcacatctactttgtctgcatctcctggggtccctgactatgtaaggaacccttcaaagtacacccgatacaatctggatgtaccagagtctaatgatggctcgaacaggacagctcttgctgacatgcatgatctgttagcgagatcatacccaaacatgatacattctgagacgcctgttgagattcctagctcagtcacattcatccctcgcaagaagtcagtggataccatggcagtggatgagggccccagagctattgattctaactcctctgcaattggaatggtagcaggcgcctcagatgaacctgatcaatgtgagatggatgaagatgacagtaaatcaccgtcaatgccacagatgcatacaaactcaaaggcgagctcccggcgttacaggtcaagcagaacagatgatgatgagtgaaattgaggatcccagggtacccaatctgatgtttgtttctaagaaaattttgagtttcagaataccttatgtaaatcaggatatatgtgtgttcttgtgatttgagctaattaactatgttgaact

SEQ ID NO: 32572 - DNA, 2366 bp, Zea mays
  Clone ID: UC-ZMFLMO17004G04_FLI
ttctgctaaggctgcatatgatgggttgttcatcggggctgtgcatttcggtcactatgaaagagttcggaaaacttgggccccctctaaatgccacttcttcctctggttatcggtgctaaataaatgctggacagcagataggttggcaaagagaggacttgatcatccggagaagtgtccgctttgtgaccaagagtctgaatctttggatcatattttggtttcttgtgtttttgcgagagaattctggttccggctgatgtgcattttcagactacaaaatctggctcctacacctagtacggtgtcttttacgggttggtgggagatgatagacaatggctctggagatatgattatgaagggtgtcaactcccttattgccttgggagcctggattatttggaatcatcggaatcgaattgtctttgatggaatctcccctagtgtttctgcagctcttcgtcaggcaagggaggaacaacagttgtgggaaatgatacatgatccgccggagactacttttaacaggcactcctatccaaaacagcctgcaagagctctggtctttgcttaacttcatcctgcccaatatttttaattcatcccagaattttgaggaatggtttaatgcaccatttgcatgtgatgtcagtcttaatgatgaggaacaactactaatcatacatcgtttgcatcaagttttgcgtccatttttgctgaggaggaagaaagatgaagtagagaaatatctccctgtgaaaacacaagtaattctcaagtgtgacatgtctgcttggcaaaaagcgtactacgaacaagtcacaagcagggaaaaggttgcgctaggatatgggatcagaaagaaggctctgcaaaatctgtcaatgcaacttaggaagtgttgcaatcatccctacctattcgtagagcattataacatgtaccagcgggaggaaatagttagagcatccggaaagtttgaattgcttgatcgtctacttccgaaattgcagagagctggtcacagggttttacttttctctcagatgacaaaattgcttgacattttagaagtatatttgcagatgtacaatttcaagtacatgaggcttgatggatccacaaagactgaagaacgtgggaggttactggcagattttaataagaagaattcagaatatttcatgtttctcctcagcacacgagccgggggtcttggattgaacttgcagactgcagacaccgtcattatctttgatagtgactggaaccctcagatggaccaacaagctgaggaccgtgcccatcgtatagggcaaaagaacgaagtacgtgtgtttgttcttgttagcgttggttcaattgaagaagagatattggatcgtgcgaaacagaagatgggtattgatgcaaaagtaatccaggctgggttgtttaacacgacctccacagcacaggacaggcgagcattgctgcaggagatactcaggagaggaacaagctcactgggaacggatatccccagtgaacgtgagataaaccgcttggctgctcgaaacgatgaagaattccggttgtttgagaagatggatgaagaaaggaggctaagggagaactacaaatctagacttatggatggaaatgaggtcccaaattgggtgtttgccaatgataatgaaaccttacgcaagaaaaccgtggcagatgaattccggaatataattgttggttcaaagagacgtagaaaggaggttgtctattcggactcttttggtgatcagtggatgaaatccgacgagggatttgaagagattgcaaagatgactccaagggtgaagcgaactgcttattcgcctgacattcaagttgagtacaatgaaaggaggaaaaggcccaagtctgtggaaaacagcgcagatggcgcaagcaacccaacacggacacccgacaaaggaagggctggagtttcatcatacagcaaggatgagaccgaagatgatggtgaagacgaagtcatcaccagtggcttacagaagggtaacagtttcacatggaagacccttggaagaaaaaggtcaagccacttaagttcgtcgtcggactcaaaagggcgaccaccattctaatgtcagttgccttgatgcttttgctcgatgaagcccttctaataatggagtacccctggaggctagcagcgctaccatttcgaaagtaccttgaacctataaacttcaggatggaggctgtagctagcaggactaccattttgaaagtacattgaagctataaacttcagaattagtaatttactctggacttgttgccatgaattcgtaactcaaacgaacttaaattgcgtt

SEQ ID NO: 32573 - DNA, 904 bp, Zea mays
  Clone ID: UC-ZMFLMO17005B08_FLI
cgagctgtcagagtcggtgaggggcgtgctgcgggggtacccgaggctgcggctgacgcacgggcggatggtgctggaggtgcggcccaccatcaagtgggacaagggcaaggccctggagttcctgctcgagtcgctcggcttcgcggactgcagcagcgtgctgcccgtgtacatcggcgacgaccgcaccgacgaggacgccttcaaggtcctgcggcgccgcggccaggaccagggcgtcggcatcctcgtgtccaagcaccccaaggagacgagcgcctcctactcgctccaagggcccgccgaggtgcgtccgtgacccacacccacccaccaaagcatccgtttcgatcccgtgtctacgtcctcgtctccctctctccgcggccccgcatagtgtggccttacctgacctggaccaccaccactaccggtggccggcggtggggttgcggacgtcatgtgttgcagccgccaattcgcctactccgccgccgcgttgctgacgttgcctagcttgtggatgtgcgcaggtgatggagttcttgctgcggctcgtcgagtggaagcgcctctccagggccaggctcaggctgcaatgagatgagatcatgagacgacgcaactgccgtacgtggacacgtacgacgatgcaacggattaagctaactgccaagtgccagataattatgttaagatcctgcctgctacgtggaatcctgaacgtggcactgtctctctactgtccccgtagtgatcaacatgcatgtacatcgttgtctcatacagtcctagctagttagtactaagcatgcctgttacatatatatagcttcatgtgaatgtgttgtactgatgtgtgatcttaaaagtatgctgatgaacggcgtgatattttttt

SEQ ID NO: 32574 - DNA, 1678 bp, Zea mays
  Clone ID: UC-ZMFLMO17005C01_FLI
ggggattaacaaagcatatcatgaggacttctttgacaactcgacacagcaggcagacacactttggctttagctaggccctgactccatggccagcgcttcaggtgctgatgcacttctgaatggtgtggagatattcaagctcagcaaggattccgacctttcttatgtgcttggtcatattgacacgggcaaccagatggattcttcaaaaggggggaagattaaaggcctatgggaagaacttggtattggctcagcatcttttgttgcggttacaagcgttgttctgttctcatggtgttacataagaaagaaacgaaaagctgtcaacaaggaggcccctcccggctggcatccgttggttctccacgaggctatgaaaagcaccacagacgcccgtgcagccagtaaatcgtcgtcggctcggaacgcctctcccattggtcataggatgggaagaaggttcggcattgcggagatcagggcagccacgaagaacttcgatgagtccttagtcattggaactggagggtttggaaaggtctacaaaggtgagattgacgagggcgctacagtggccatcaagcgcgctaacacattgtgtggccagggcctgaaagaattcgagacggagatcgagatgctttccaagcttcggcaccggcaccttgtggcgatgatcggctactgcgaagagcagaaggagatgattctggtctacgaatacatggcgaaggggacactgagaagccatctgtacgggagcagccttcctcctctgacatggaagcaacggatcgacgcgtgcattggcgcggcccgcggcctccactacctccacacaggagcggaccgaggcataatccaccgggacgtgaagaccaccaacattctgctggacgacagtttcgtcgccaagatagccgacttcgggctgtcaagaaccggaccaacgctggaccaaacccatgtcagcaccgcggtgaggggaagcttcggatacctagaccccgagtacttccggaggcagcagctgacgcagaagtccgacgtgtactcgttcggagtggtgctcttcgaagttgcctgcgcgaggccagtgatagaccccacgttgcccaaggaccagatcaacctggcggagtgggcgatgaggtggcagcggcagcgctcgctggaggcgatcctcgaccctcgcctggacggcgacttctcgcccgagtccctgaagaagttcggcgagatcgcggagaaatgcctcgccgacgacggcaggagcaggccgtccatgggcgaggtcctgtggcacctcgagtacgtgctgcagctccacgaagcttacaggcggaatgtggtggagtccgaatcgttcgggagcggcgagctggggttcgctgatatatcatcatccttcttcagccttccccacgtcatcagggagggggaggaggaacaccaccaccgctcgaagaagccgtcaagtatcagagaggaactagacacacattaccaaccccctcctccctcccaacagaaaaaagacacagaagtgtcaagagtttccttgacaactgtgtgatgcaatctgcatggccaccgttcatgcaccgctgcctgtgtgacctgtataaatggcactgatataattatagtgatgtctttgaggttttgatgt

SEQ ID NO: 32575 - DNA, 1794 bp, Zea mays
  Clone ID: UC-ZMFLMO17005D02_FLI
ccgcttctagcgccccgatacgcggcgccggcgcaggcgtgcagccatggcgatgagctggatccgatcggttgttaggagggccctcatcgctccgaagccgcggggctcccgccagtttactgtcaccgccgccggcggcggcgcgacgcagaccgaaagggtggcggcggagatggtccgctacgccctcggcggcgccgtgcaccggagctcgccagaggaggcgatgcggatactggagcaaggcgcctcgaacctgcagggaggaggcgagggcagtgccgaagctgttgggttgctcatgctcgctatgtccacgctgctttaccggagtggaagacgtcaagacgcagtggaaaagctcaaagcaacccaacaagttgccccttctgcagtttttagagttgcagcgtgggaagcactaatgggattacacatggaggcagggcaggtttggtactagaagctcatttagtctccagtgtcattatgtgaagttttatggtattttgaatacaggagatgtcatacttgatttccccaaatgattcagttgatctgtcaatcaaatatgatagcaaatggtctgatcaggaccatcttaaatttcgggttaatgctgtcagaggacttgttacacttctgaatggagaaacagaatcaggtttttttttaatgtcatgaatattgtcgttagatcaaactacaaaatttggcttacatttgctctttatcagctgcccagctgttcgatggttggtgcagagacttttctagaggcgaaaaccaaacagaaaatgctgccgtttcatacggtgaatatttgcattgtgttggggattttcaaatggcagcacaagtgtatgagaaaattctcgaggcattttgcatggatgatatgtctggaaaccttttagcagctggaaacatggttcccgaggaggcttctcttggggccacttgctcatatggccagcttttatctcactctgggaagtttgctgaggcagaggattatctcacaagagctctacagaaggctgaagaacaatttggtgcaaaccacccaaaggtcggcattatattgacctgtgtagctagaatgtacaaactaaaggcaaaatctgaaggttctacttcaattatggtccaggaggggctgtacaggaaggccctagaagtattgaaagcccctgctattaattctgagggtaaaaacaacgatctcctatcaatgataaggttcctcttgatatgttgatattatttttattctgtaggtaccagcaaacaggttgactggagagatatcatctccctcgctagaggtgagtacgcggagctgttattaattcagtctaataggaaggcggaaggtgaacggatgaagcagtgggcagaagatgcttggaggaaccgtaggctaacgctagcacaagctctagagttttcagaaccttcaaagccgactgtcgttgttgacacccgaatcggcagggtcgtgtagcttcagtcaacaatctcgtgagatgcacaaatgaagcaatccgtggatgcacctcgtgtcgtgtatattttcgaaagtgttgctccttgcgggctgcatccggtttgatccgttcaagtcccagcacactcgcctgcttgtttttcatatcacctttttgaatagggggacattcgaggatcacaaagcttgtgcatgtgatcactttaaacatttaatagcatatgtatatgttattgtacacagaataacaccacttaaagcatctttacattttgattgct

SEQ ID NO: 32576 - DNA, 2059 bp, Zea mays
  Clone ID: UC-ZMFLMO17005D07_FLI
ctttgatgaccacaaatggaagaactttactattgaccacctgatgttagggcaacatctgttctcatctactggaataggctgaatcaagacggatgcaagatgcaaaaatcaatctgaccctgaactgttgcttcatatgtaagtggctataagcctaaaacatacaaatgcatatctgcatattggcttttttctatgcttgagaaatggattccagtctgaggtaagacgcctgagatcatcacctttttttcaacatggctttttggtaattgttttgctaatcttctattacaattttggtacatgtctaatttaacaattctgtattgtaatagtccttagtccttataatatttgatgtttagagaattgtattttgctgtttcatttcggctagcttttgttgcctgtcttttcttagaaatatatgagtttgtgtgggtgttaaaacacttaaagctgatgagaccaagatgccgtcaaaacctgagaaggctcgggtccctatgaatggttttcgcaaaaggggctgataacaaaccacctcaagccaacactctcacggtgcaactggtcagccggacacgccaaagaagcggtctgctgggccagcccgggtttgagttgcggcatcaacttcttaagtgaaaaattcagggggacgtctctcccatctctcgagaaaaaaaagaaaaaaacaaaccacctcaaagtttctgtcatgaaaactgaagattttttctatcattactttgcgcttatctaatccttgtcttatcaatgctgctgtcttttactggttccaggtcaatttaaagtatgaagattatacaatcacaaagggtcaggaagaaaagtgatcgaaaacttcatcaaatttatgctgctgaacttgcaaatatagattttgcatatgatggtggctggtgacagtgttgccagagtacccagaggtttacaacatagtaaacaagctgagggtggagtcagtggttggctggttgctgttgaaggtgtgatccagccacgcccggtggatgccatcaatgcagatatgaggaccgggactatagaggttgtggcacatcatgttctagtgctgaactcagtaactcggtcactgccgtttccagttacaatttctgatactgtaaaagagaagtttccagaagaaattagattgaggtttagagtgttgggacttgtgtcgtccacaaatgcagtcaaacttgcggttgcgccataatgttgttaaactcatacgccgctacttggaggatgaacatgaatttgtcgaggttacatgttcaaaggtaggttgagactcctgttttctccaagtctacacctgaaggtgctcgggagtcgggactatcttgtaccatcgagagttcaggtgcgacttcagctatcggctcgctattcacagtttatatgatctggactgcgctcattatgatagcaatcatgctttcagttctcaactctcatagatcgtgttattaggcagaggagaaatttggctaccttttagaatgcttcgacatgggtgctcctccacatggaggcattgcttatggattggatcggttggtgatgcttttggcgggtgagagctcgatccgagatgtgattgctttctccaagaccacgactgctcagtgtgcactcaccgaagcaccatcagctgtcgaaccacagcaactgaaggatctcgccttccccaaacggccaaacctacttcgtgagacgctgttcaagtgtttatgacaaaaattccgtgctctcaaggacagctatagtttgcttcttctagtttttgagtgtattggcctattctatttttgcatagtatagaatgcgcagtttttggaccgtgataaatttatagaagatgcttaacatgccaaagttctggaagagtattgttttaataggggtgcttatgtgtttgtgcttgtacttgtgcacaaacttaggccttgttcggttaatcctgttacctatggattggatgtaattggaaaaaattaagaatgagtttgacttagtc

SEQ ID NO: 32577 - DNA, 1335 bp, Zea mays
  Clone ID: UC-ZMFLMO17005D09_FLI
aacaccaagtacgctgatggtgatagcttgaaaatgtctcatgataattttactcagcagagccactcaaatgagacagcttgcctagcaaacgctcaggatcattcaacagatactgttgttgtagacggtcggtttacaagggcatgggtggatactgatacaatctgcattgatggtgtcaaggatcctctagccattgagaggtggcaggcacaggcgatggaggctgataaagaattctacagtcggatacgcatacctgatgaagatgattcaagtagtcagaagcacacatgccgtagttctgcttcacagggtgccgatagcaaacctgcatctgagcggcaatcaagaggtgtggagcatataaaacagggtctcgtgaactttatagcctcgctgctgatgccattatatagaggaaaaaagatcgaccgagaggggtacaaaacaatcatgcgcaaatctgttaacaagatcattgatacatgctcagaaggagagaaatcaatgactactcttgagtttcttgatgataaaaggaaaattaagattgaatcctttgtgggcaaaatggttgacaagcatttgcatgttgttagcaagtcggccaaaccttaagattcatatgtgtagtgaggtgttctctgcaaagggatctactctcttttaaaacacctatgaatcagtgattgttgatccaagtgaactaaaatctcacttcagaagccagcatgactcatcagtgttgccgcaagatcaacaagaacacatattacccagactatatgcgtggtccagaagagcattgaccagatcaataccatgtaattctgtacttatataggcatcatttccatcttcgtagctatagctcagtcaaaggtttagacctctgtgcactcgacaagcatgttgggcatgcagtaagcttggatgccaagttaagtttctgtggcttgatgaagtggcgtatgaagatccgggattcagtgtggtctcatatgcaatgagggtttttatgtctttcatggcggtagttcagtctagcctagcggattaatcctgttcattgttcagagttaactttaccaaagtagatcctcctctctctttgttgtacagttttgcagtttctaacaagcgtttaacttatagaaaggctggagtttggcagagatttgcagcccgttgtatatccttggctgcttataatgagcctcattgatgattctcgaatgcggaatgattgccccgaagttcctcagttgatttctctccatacgttataattgtatgatatgattgattttcattcgactcttccagctg

SEQ ID NO: 32578 - DNA, 932 bp, Zea mays
  Clone ID: UC-ZMFLMO17005E04_FLI
aaatcgcgaacaaatattttaaagcggatagataactcgtgcacgcaagagcttggccactccattttaccactccttgtctcactctccgccacaacgtcagccgccccgcgccgagcagacctcctccactagccgccgggccgcacaccaaacgctcctgggaatgccgacgccgacgatggtcaggccttttccgctcttcttcttcatcgtcgtcgtcttgctggtccggtcgccggcgggtgcggcggccgacggcggcgggaacgcgacgacggattcctgcccgctagatctgggctacgtgcggacattcccatgggaccctttgccgtgcgcggggggcgcgcccaacgtgacagcctgctgccagacgctgctctccctgttcggcatcggcctcgccgagcgcctccgcggcacgggccacttccgcctcccgtccgcggcggcctctacggcctgcatcgagagcttcacggacctcatctccgccgcgccggcgagcctctcgggttcctccttggtggcggaatgcttcccggacccgagccagtttgccatcacctcgtcctactgcgccggcgtctccaccgctacggagttcgtggccgccgtcgggaacgactccgcccaggccctcaactcctcctgcggccccgacctcgcctcgccggcgacctgcgcgctctgttacagcgccggcgtcgccgccaccgcgcatctcaccagcgccgcggccaacgatagcaagtcgggctcctgcttctacctcactgtcctgtacgccgctggcatctccaactccgccggccccacctacccacccaccgccgcctgcgctcttggacttggcctcttgtcccctgcccccacgccgtcgaagtccagccacgccgccgtctacgccgccaccatcccaatcgcac

SEQ ID NO: 32579 - DNA, 728 bp, Zea mays
  Clone ID: UC-ZMFLMO17005E05_FLI
gtcggcgtcggcgtcgtccacggacggcagcgggcagtcgtcgccggcgccggcgcagctgctggaggagtggcgggaggcctgcgccaacgcgttcgaggccatggacaaggagctcaagctccaggccaacgtggactgcaacttcagcggcaccaccgccgtgtgcgccatcaagcaggggaaggacctcatcgtcgccaacctcggcgactccagggccgtgctggcgaccatgtcggacacgggctacctcaaggccgtgcagctcaccaccgaccagaagcccaacgtgccccaggaggctgagcgtatcaagcgctgcaacggccgcgtgttcgcgctcaaggacgagccgtcggtgctgcgcgtgtggcttcccgacgaggactgcccgggcctcgccatggcgcgctctctgggcgactaccgcctcaagcgccacggcgtggtgtcggagccggaggtgacgcaccgccgcgtcgcgccgggggacctgttcatcatcctggccacggacggcgtgtgggacgtgctcagcaacgaggaggtcgtgtccatcgtctgcgccacgccgcggaagcagcacgcgtccaaggccgtcgccgaggccgcggcgcagcgctggcggaccaggtacccgacgtcccgcgtcgacgactgctccgccgtctgcctcttcctgcgggaccaggactgggccagcagcgtcgccgcggccagggcca

SEQ ID NO: 32580 - DNA, 1356 bp, Zea mays
  Clone ID: UC-ZMFLMO17005G07_FLI
ctcgcgccgtacatcctgcctcctcccgcgcgcgcgcgcgcgtgcacgctagctagctgccggtcgcctcgccaccatggtgttcgacgcgagcggcagcaggtcggcggcggcggcgtcggggaaccctctccgcgtgatcctgacgcgcgggttcgcgcggcaggtgctcgcggggcggtggttgacggtgttcgcgagcctgctcatcatggcgtcctccggcgcgacgtacatcttcgggagctactccggcacgctcaagtcgtcgctcgggtacgaccagcgcacgctcaacaccgtgtccttcttcaaggacctcggcgccaacctgggcgtcttctcggggctcatcaacgaggtgaccccgccgtgggtggtgctggccatgggcgccgccatgaacctgtccgggtacctcatggtgtacctggccgtgtccgggcgcaccgcgccgccgccgctgtggctcgtgtgcctctacttcttcgtgggcgccaactcgcagtcgttcgccaacaccggcgcgctcgtgacctgcgtcaagaacttccccgacagccgcggggtggtgctcggcatcctcaagggcttcgtcggcctcagcggcgccgtgtacacgcagctgtacctggccctgtacggcggcgacgacgccgagtcgctgatcctcctcgtcgcctggctccccgcggcggtgtccgtcgtgttcgtccacaccatccggtacatgccgtacccgcgccgccgtggcggcgggcaggagacgagcagctccgactccgaccccttcttctgcttcctctacctctccatcgcgctggcgtgcttcctcctcgtcatgatcgtggtgcagaagcaggtgcccttctcccgcgccgcgtacggcttggccgccacgccgctgctcatcctcctcctcatgcccctcggcgtcgtcgtcaagcaggagtacaagatctaccgggagcgccagctcgacgccgccgacccgccgccgccgaccatcgtctccgcgtcggcaacggacgccatcaagaaaacagagcagcagccggcgtcgtcgtcgttctgtgggtgcgtgaggaccatgttccgtccgccggctcgtggggaggactacacgatcctgcaggcgctggtgagcgtggacatgctggtgctgttcgtggcgacaatctgcggcgtgggcgggacgctgacggcgatcgacaacatggggcagatcggcgagtcgctgggctaccccgccaggagcgtcaacacgttcgtgtccctgatcagcatctggaactacgcggggcgcgtgacggcgggctacgcctcggaggcggcgctggcccggtaccgcgtgcc

SEQ ID NO: 32581 - DNA, 1461 bp, Zea mays
  Clone ID: UC-ZMFLMO17005H06_FLI
gaaagaatctgctgatcttacgtgtctcgcatatagacaccgtacttactcaaaggtaattgagtttgttcagtttaaagaccgcttgcatcactccatgcaatatctttctgcaaaatcagattctgttatgctacatctcaagcagaaggcggactctcttgatgaagtggagtctattctagaaagtgttagccatggcacaaagctggttgagctatctaatgaggatagcatggtggacttaaccttcaacgaagatcttgatgcacggccttggtggacgccaacaagcagcgttaattttctttcagaaccatttgatgaaagttcaacacctgcaagctatagggacaaaatgtgcaagcacaaatctaaagagaaggacggttcgaagctgaaagatgtagagagaaaatctcttgttcctcgacttgtttatctttccacacatggttgtgcgtcttttctcagggagagtgaatcaaatggtgcttcctctgatgtaactgcttctgtggagatgaaaactttgcttgataaatatgctaggagtattggttactcttttgatgatgctctaagttttgttctgggtatctcacatggcaagaaggctgtcaaggatttggctcctgatatagtcagctggatgaactttgctgtgtttatcaatgcttggaacttgtgttctaatgtgtcagtgatacctggaactgacaaaagcagcccaaactcctggtggatcgtggataacctcgtcaaaacttgcatagatgagcaggtggctgataccaatcaaattctgacatctccaggaagcaatattccacttctagcgtggatggtgacagagcccatttcctggcaccttcttgtaatccaatcctgtatgagatctatggctccacaagggaagaagaagaagaaagggccatctgagcgaccaaacacaccccacctgcaggcaatccggagctccgttcagtgcatggctgacactctcgagagagtccagaaatgtctgtcagaacagatgaagccagaagagcaagctctagacatgctggtgtcacatttgcaaggaaccggtgccgaaggccctggacagatcgcccgtatcttggacgagagcgcagcagctgccagctccgaaatcggtggccggatcgcccattctctagagccgtggagccgcgcctgcgtgatgagaagaatagttggggctgagaatgagacgatagccgagttgatgaagatatgcacctcgaagctcaagctccttgcgtccgcatcagcttccctgtccttagtgttgcactaggctgggaaattttgatcgtgagatttttttatcctcatccccgactgctgtcgtgccttcctcttgcccccttgatgttgtaaaccaaactaatgtgcgctggtgtttgttgtttcgatgcaattttggtttgagtg

SEQ ID NO: 32582 - DNA, 4341 bp, Zea mays
  Clone ID: UC-ZMFLMO17006A07_FLI
ctgagagcccgcgattgctcccaaacccagaaactgaagactgttgcagccgcgactcctgaatcccgacaactccagcgcctccgctggtccccactgcttcggccatggcggtgcgagccacggtctcccgcttcccggccacgccggaggcgctggagtcgtgcgccgtcaagtggggcgtcgccgtgacgcccttcgccgccgcggacgagcacggccaacccccgaccaccggcgccggcggggaccgcgtcccacgctgcgagcactgctgggcgtacttgagcagccactgcgatctggagcgctggggctggacctgcgcgctctgtggcacgctcaacggattcgacgacgaggccgagcgacggttccagcgtcccgacgtgtgccccgagctcaagtcctctttcgtagacctcgaaatcctagtggatgaggcagagggcggaggagacggtgtgcaggcgctgcctgtctatgtggccgcagtggatctcgcatgttctgaagagttcctggaactcgtcaagagtgcgcttcttgcggccctagaagctcttgttccgggctccctatttgggcttatgacattcagccacaagattgggttgtatgatgtccaaggcccgattccactcgtgaagaatgtttttattcctccggacttagaagaagatggtctgcctgttgcccttgaagatgccatgcccctactttgttttttggctccagttgacacatgcaaggatcaaattgctgctgtcctggagacactgcgacctacatcttcatgggagagaggggttgcttctgggcaggaagaggatactgttttgcttggcggacgtggttttgggacagccatgtctgctttaattgagtacctaagttcagaatatggttctacttttgctttaggtaggtgaacacactttccatatctcatgagatatctggtgccattcaggcaattagcttcataactcgtaagatgctgtatctttgcaaacaacctagtaaccagtatctctatgcgtaattttttaatgttccttgtcatatggagagcagctcgggtatttgcttttctgtctggtgctcctgattatggagctggtgtgctagataccaggagatatggggagcaatatgctagtaaaggggtagacgctgatcttgcgttgctccctgaacagatacctttctacagagacctagcagctgttgctgttcagtcaggagtatgcatagacatatttgctgtaactgatgaatacactgatttggcttcactgaagtttttaagtatcgaaagtggtggatctttatttctttatgcaagtacagatgattcaacagttccccaagacatgtatgcttgcttgaatgaatattttatgtgctctattcagaaaattataacagccaaatttcctaataagtatgaatggtcttttcttcctttcctgcaactcccactgacagataccgattgctaagtcgaccctatgcatttggttgtgttctaaggctgagaacatcttcagattttgagccgggcaattcttatgggcatttcttccctgaccctcaatatgaaaatgtgcaacacatcatctgctgtgattcatttgccacttatgcatatgactttgagtttgcccataacgacggtttctccaggtatattatttaacttgaccctgtaatcagttacttgttactaaatgctgtatttgttaaaggaatcccttaaaaggaagataatgccagaatcaggattttctcgctgctcttaatctagtttgcgctagtgcgctactaatgaagccacatgcacaagcagttcgaagaagcaaatttcatggttcaaatgtgcagtttagctgtttacccgtagaaaaccttcacaaggaatagcaactcttttaaaaaagcagccctagttttccacaaatgtatatatatgaagtcatgtgttggggaaaagatcctcgggcacctgggcccaccggtcagaagagagcattcgaaaaagacctccggactaccagggactaccggtcagtagaagggtaagggaaccgtctactctggaaagcgctcgccccggataaacctcgagccagcgagcccagggtcgggtgaacagaatggaagccactcaagtggattcctcgcctggcccaagactgacccgccataagtggccgaccacattaactatgcctaacacagagtcgcagtagagaaccggtctgcctcccactcatgacctgcaagcccctcggtctgcagcacactcatgacctacgagcccctcgaactgcggcacactcatgacctattgagactaggcttgagtgcgcagactatctatagggcccacaacacgacgagccacgccgagacccaggctacaaaggccaggggtcggcgtggcgcaaaggcagtaatgatggcgtcagggctttgcgttgccaacgccgtccgtcataatgagcacgagctgagacgaccgagtgactaaggcacattcggacaaaaaccgaacacagcgtagtggctcctcgaggaagccaccggcgatcgacccccacctcggcctataaaaggaggaggtcggtcacgaacgtgggtctcagggggagaactctgagagaactctaggacaacaaaccagaggaaggacactcggcggaagataatgacacacgctcgacgagacctaaagacttggaggccagagccaaggcttagtgtaggactccggttccatagtctttaggtccacccacgcataagagacttgggagctctccttccctctctcgctcgcttgtaacccatactacgagtattgagcaacaaaggtgctggtatcgtgagccgtcgaagactggatgtagggacgttttgcctgaaccagtaaaaactttgcgcccaccgagcacaccgtccagagcccagaacgcgcacatagaaattcaattgttgaaaatcggaggttcgaaacaccgacaatatggtaaccttgttttctggatcctattaattgatgagattgtgtcatacttgttaatggtggttaactaccgtgatttatatttacaggcacacagatcctgctgttgtacagattgcttttcagtacagcgtgattgaacctgtcaaggaaacatcaggcaatggatcacaaccatctgcaagttacaagttctgtctgaagagacggttgagaataagaacattgcagtaccgtccaactaataatatcagcgaaatttatgacagtgtagatccagaggttgtcctgcatatccttgttcataaggttattttagaatccttggataaaggggttagagaaggcaggcatcaagtgcatgcttggctatccctccttgcagcccggtataatcaggccctgagttctgatgtgcgaccgctgtcgagcatagacattgacttctcacagtgcccacagcttcaaacgatacctcagcttgtttttgcattgttgagaagtcctcttcttcgcttgcatgaggaaggcgtgcacccagattacaggatatatctacaatgccttttcagtgcactggagccatcatctgtagctaaagccatatatccggttttaatctcgtattcctcgcctgacaagcaagcattcccacggcacactctgagccatgctgctctaatcatgagcgagagcccaatatttcttctcgacacatttaccaaccttattgtttactattcctcaactgctgatccttcagttccttttcctccaccccatgactgccttttgagaaaaacaataaatggactgaagcaggacagatgtataacccccaagcttacattcatccatggagggaaagatgattcaacattgtttgagagctatctcattgaagagcaagatgttgatggatcgggcttaacaactggttcaggttttgtagccttccgtgagagcgtgaggaacgttgcaggagagatcatacaggaagaaattggaagttagttccagctcgattacctttttggttctgctgcagagggtatcgactaggatgttttagccttaattaatgccgtagcagttaactgaaacgtagatagccaaaatggagagacaattcaatgaataataaacggaggccacttgatgtatagttgcttctgtcaacaactgctttaggcttgactaggcagagcagcctttctggtacagcggcactgtctgtctctatgctaaaacagacgagttttactacacaataatacaccgtcggaacctggcagactgaaatttgagag

SEQ ID NO: 32583 - DNA, 2090 bp, Zea mays
  Clone ID: UC-ZMFLMO17006B02_FLI
aataaaaaggggggaagagcattttcccttttttttgctcccctcccccctcgcttctcccgaatttgatgcttaaaccctcgccgggaggaggaggactccacgcgcgagcccgcccgcgccacctaccgccgcgcccggatccccgccatggccgccgcgccgcaccgggcccaggtccccgctgatagcatgactccgctgcagacggggcctgtacttgagaataacccctccaagagtgcaaacgccaaggaccagagaatgtgactacaggcaatgcacggggcgctagctccttgagaccgccaaacggcccaccagagaaggctagctctgtgggaaaagctggagagcaaccttatctctaccagcaaaatgtgtatgcaccgcagccacaaccactctatcctggaggatacatgaacccttcaggacaatgggaggaatatccccattatgtgaatatggaggggctccattccgtatctcctggaatctacaatgacaaccagtccctcatgctatctgctggatatgcaaacaacccccaaatgatgtatggagcatattctcctgtttccactgctggagatggccaacaatacttccctgtgcactattccttctcaaatccttactatcaaccaccagcttctcctagcatgggatattcaaactccgcaactggaatgtcccaaggagaccctatgctgcaacaagagtatttccttcctgatggccttctatattcacccacaccagggtatcatcaaccattcagctcatttgacagagcactgacacagccaaataatgctcctgggttgtttggtcaagggagtctaccactggcttctggaatgcatcatggatcgatgtatggtcctggatcctacaagggacgccagtatggtagcaaatttggtggcactactccaagttggagttctgctggccgcagatttggtactttcgacttgagtggcaatcaacaaagggggagcatgtcatttggtagtcataatggctctctggagtttatgaatgagcaaaaccgtgggccacgtgctacaaaaccaaagatacaagacacagagaactcaggagatgagaaaagcgagaaaactgttcttctaattgatagtgaactgtacaatcgctctgattttatcactgagtacaaggatgccaaattctttgtaataaagtcctacaccgaggaccatgtacataggagcattaagtataatgtttgggctagcacagccagcggaaacaggaagctggattctgcttaccgtgcggccagagagaaagaagagcattgccctattttcttgtttttctcggttaatggaagtggccaattctgtggcgtggctgagatgattggacctgtcgatttcgacagaagtgttaattactggcagcaggataagtggagcggccagttcccagtgaagtggcacataattaaggatgtaccgaacaaccttctgcggcacatcattcttgagaacaatgacaataagcctgtcacaaatagcagggacacccaggaggtgaagctggaacagggcctccagatgctaacaatcttcaagagccatgaggctgagacaacaattgtggaagatttcgacttctatgagcagcgggagaaagccttgcaggagaacagacgtcaacagcatgctgccagcaccgatactcagaaactggtggataccaaggctcaagatcctgtggccgacatatcagatgcatttgccaaggccgtccagttgaagaatactgagaacagtgggacaacccccaaaactgagggtgcttcagctgaaaagggatccgctgccaccgccaaggttgaaggaagtgcaaacctgaacacaggccctgtggaggaaagcagttgattcgtttcccttctatctgcaaatttggagcagcagatgaatagcatggtgcgatgtgaaggtcagaaaggggaaggtgtgttgaatatggtcgtgcccccgtcagttgtacaacatcataggctttcttttatggccatttaggttataaaatttcaatatcatagttcc

SEQ ID NO: 32584 - DNA, 1544 bp, Zea mays
  Clone ID: UC-ZMFLMO17006D06_FLI
agaaaagaagaaaaagaagatcaaggaggtttctcatgagtggtcattggtcaacaagcagaagcccatatggatgaggaagccagaagaaatcacaaaagaagaatatgctgccttctataagagcttgacaaatgactgggaggagcatctggctgtgaagcacttctctgtggagggtcaactggagttcaaggctgttctctttgttcctaagagggccccctttgatctctttgacaccaagaagaagcaaaacaacatcaagctctatgtgcgcagggtgttcatcatggacaactgcgaagagctgatccctgagtggctgagcttcgttaagggtattgttgactctgaggaccttcccctcaatatctctcgtgagactcttcagcagaacaagatcctgaaggtgatcaggaagaaccttgtgaagaagtgtgttgagctcttctttgagattgctgagaacaaggaggactacaacaagttttacgaggctttctccaagaacctcaagcttggcatccacgaggactcgcagaacaggaccaagatcgccgagcttctgagataccactccaccaagagtggtgatgagctgaccagcctcaaggactacgtgaccaggatgaaggagggacagaatgacatatactatatcactggtgagagcaagaaggcagtggagaactcccccttccttgagaagctgaagaagaggggctatgaggttctgtacatggttgatgccattgacgagtatgctgttggtcagctcaaggagtttgagggcaagaagcttgtctctgccaccaaggagggtctgaagcttgatgagactgaggacgagaagaagaggaaggaggagctgaaggagaagtttgaggggctgtgcaaggtcatcaaggaggttctgggtgacaaagttgagaaggtggtggtgtctgatcgcgttgtggactcaccgtgctgccttgtgactggcgagtatggctggaccgccaacatggagaggatcatgaaggcacaggccctgagggactcgagcatggcgggctacatgtcgagcaaaaagacaatggagatcaacccagagaaccctatcatggatgagctccgcaagcgtgccgaggctgacaagaatgacaagtcagtcaaggatctcgtgatgctgctgttcgagactgctctcctgacctccggcttcagcctggatgaccccaacaccttcggcaaccggatccaccgcatgctcaaactcggtctgagcatcgatgaggacgagcctgttgaggcagaggctgagatgcctcagcttgaggacgacgctggtgaaagcaagatggaggaggtcgactaagtgtcgcatcgcatgcttgccgtttatcttatccctagctaagctacctgtgatagcttaattttcactattgttcgaggtttttggcacgttatcggttgtcctgctggccaggctataagtctggtttatctgttatgtttaccctttttaacagtttgtcgttattattcgtaatggt

SEQ ID NO: 32585 - DNA, 2442 bp, Zea mays
  Clone ID: UC-ZMFLMO17006E01_FLI
ggccacgaccccggcgcttgggcgtcgtcgggctgttggtggagaaggcgaggtactgtccacgagatgaacagtagccgcgatgaacactaatgggatatgggaagcacgggcaagataattgcctgcttgctcctttctttaaccaaaggggtacaatatataggctgtcatagcagcccctaacgaactaaccaactctatctacgagtttcaaactaatgcttatgcatctgaacaaactaattgatacttatgcatctaaacaaactaattgatacttatgcatctaaacaaactaagaactaactgatgcttatccatctaaacaaactacctgattttttagggcttttgggcgctgccagtcataacaccccccccccccccaaaaaaaaaattataatcacgcaacacattctctgcactagatatctgggtggtggtgaaaatactttacccatgtgccttaaaaagattctcattggtctttttatattttataaactttggttattcctatggttattttttgcctttcaatggttattattagttttctgcagacactgcatatcacatgttgaagatttggtttgtattttcagtgttaagatatggttagggaatattgaagggttaaatcaatgtgcaattggagaagaagtgccatttgtgttagttgctgaggttgccgctaatttatcagctccagtgtcgtcaatctcattgggcatacctgcccggtctcaacatgaggttagtttggcaattggaagagtatccgggttactagaaatatggatatggaatgcatctaccaacaaaattgagagttccagtgcatggcatgcacatgatcaagtggtttacgatgggctatcgatggcaattgtttattcagctgcagtcaggacaattctacacgttgttggatatctcacgaaaaccaccttgaagaattttttttgcattcagaattttcagagctaagggagtcagaagatgtaagagtagtagacacttaaatgttagttattcttgatgtccaattattttcctccatatggttgggttttcaatatgcatgcagctatcaaaagtttctgatcgatgctatggtcttacgctatcacctggagaagagataattgctgtggtccgcagtttggatctgaaccttttgaaccagatgtatcaagtcaggacacaaaaggcggtggtcgagttcatttggatcggtggccaatttgttggtattccactggacgggagtatcgatatttgcagtccgcagtctgcggacttatcctcaagtaaccttatgtggtggggatccaacatcttgtggtcgctgaagaaatacgaaaatgtcgaaaagaggcttgtgttgtgggacgttgtagctgcgctgcaagagctgaagaaaaccgcgcccgcctttctggagactctagtgcacagttgggcctcagctttatttgcgggcgactcacagtgtgtttctatcactgcccagtcatcacgctcgatgcatgacatgatgccccatgtcagctcgcggaagctgcacttactgaacataatctgcagaaaagtgatgctcggcaatcatgcgcggcatggtcctggtgctggaaacaacagtaatgatggaacaactgatttctggagcactcttttggtagcgagtgaaacggagctgcgagagaggctggtgggtttcacctttgccgcggtcgtgaaacggacagcgtgtctgttcaacggcacctccaccgcaaattgctggttccctgtcggcgtcgcccagatggattcttgggtatccatgaactacgaaaaggtgcacggtcagctgcagtcgatcagatcgaagatcaaagagctaggaagcaggatcgacggatactccgacgtagaaagctgcccctactgctcttcgccggtccgtttcgagtcgcctgacgtggccatctgcggagaaaggcacacgctgtcgcggtgcaggacatccatgaccctgtgctccgtcgcgcagccagtgtggcactgctcgtgctgcgggggcacggtcgacaagctgctgccggagtcgttcttcaccatgcctttggacgccgtccgtgacgacaaaggatcgctcgatctgtcggcagcctccgccccgctttgccccttctgcggcgtcctgctgcagaggtcgatgccggcgttcctgctctccacctcgccggtatagtcttcggatgcccccaggtgttacatgcagtagcaatgcaatgggaatatcgtagtggagccaactaccaagtttgttgtagctgatgctgtatggctgcagagtggcagtgccgtcattggggctcgaaatgtttgtgataggttttgtgacttctttctgcttagcccctctaatatatctcgagatacctatttttt

SEQ ID NO: 32586 - DNA, 2546 bp, Zea mays
  Clone ID: UC-ZMFLMO17006F05_FLI
cttcctcttcctttcccatcctttccacccatccacaccgccaccaccgcctacctccaccaccagtccatctcctccgcagcgtctaaagccctatccggatatccccactcgccgaagcccggacacatggccagcttcggcgtcgacacccgcccggccgccgcggcctccggcggcggcgtgggcgtggcggggacgagggagggcgcgctctcgtttctctcccgcgggctgcgggaggaccttcgtctcatccgcgcgcgggccggggagctcgagaccttcctcagcgcgccggtgccggaacccgagctgttcgcgcgcctccgtcgcgcctactcctcctcggcgtcctcttcgcggacgcggctcgacctgtccgccatcgggaaggcgttcgaggccgacgcgtggaggggcgccaggactgccaggtggaggtgggaggcggagacggaggcggaggagtgggagccagtcaggatggtcaaggcgcacctcagcgagctcgagcggaggaggctggcccagtcgcccagcgacatgctgcacaagctcaagcttagcttgaaatcactgacctttgcgcctgaagcgtctgaggatgttctgccactggatttaggggaacttcttgcttattttgtaaagcaatctgtaccactattcgaccaacttggtataaaaagagatgtatgtgacaagttggtggagtctctgtgcagcaagcgcaaggaccaccctgcatatagttttttgtcagcaactgaatcatcttcatcgaaaaatgacaatgttgggaatgaactcgacctaagaatagctagcgccctacagagtacaggacaccattatgaaggtggattttggagtgatggccataagtctgacatatctggcaagagacatgttgccatagtcaccactgccagtcttccctggatgactggaacggctgtgaatcctttgtttcgagctgcatacttggctaaatcttgcaagcaagatgtaactttggtagtgccctggctttgtaagtcggatcaggaacttgtgtaccccaacagcatgacttttagttcaccagaagagcaagaaacatatatgaggaattggctggaagaaagagttggtttcaagacagacttcaaaatatcattttatcctggaaagtttcaaaaggaaaggagaagcataattcctgctggggacacttcacagttcataccatcaaaggaagctgatattgcaatcttggaagagcccgagcacctcaactggtatcatcacgggaaacgatggacagataaattcaatcatgtgatcggtgtagtgcatacaaattatttggagtacatcaagagggagaagaatggtgctattcaggcctttttcgttaagcacattaataacctggtcgccagagcttattgccataagatcttgcggctgtcaggtgccactcaagatcttcccaagtcgacgatctgcaatgtgcatggtgtgaaccccaagtttctggaggttggagagaggatagcagcagagcgggagtctggccagcaatccttctctaaaggagcttattttctggggaagatggtgtgggccaagggttacagagagttaatagatttgttcgcgaagcacaacagtgatttggaaggcttcaagctggacatctatggaaacggtgaggattcacacgaggtgcaatcggctgccaggaagctgaatctgaacctcaactttcataagggccgggaccatgcggatgattctcttcatgggtacaaggttttcataaacccaagcatcagcgacgtcctctgcaccgcgaccgcggaggcgctagcgatgggcaagttcgtggtgtgcgccgaccacccgtccaacgacttcttccggtcgttccccaactgcctgacatacaagacctccgaggacttcgtcgccagagtgaaggaagccatggcgcgcgacccgcagcccctgaccccggagcagcggtacaacctgtcgtgggatgccgccacccagcggttcatggagcactccgagctcgacaaggtcctgaatggcgacagcaacagcgaatgcggcggctccgtcggcaccgaaaccggcaagagcgtgggcacaatgatgaggagatctgcctcggcgccgaacatgtcggacgtcgtggacggcagcctggcgttcgtgcactattgcttcaccggcagtgagctcttgaggctgtccacgggcgccgtccctggaacccgggactacaacaagcaacatagcctggacctccacctcccgccgccccaggtacagaacccggtctacggctggtaattactagatatataggtatagcttgcagtctgtagcactagctttttcatttccgcgtgtgtttgtttgccaaagtcgagccttgttcattattacctacaaacaacaactacgactgtaaggatgacaacgctgcgtcgtgattttgtaagactagtgttagatagagaggcgagcatttcttcgatcagaaaatt

SEQ ID NO: 32587 - DNA, 2015 bp, Zea mays
  Clone ID: UC-ZMFLMO17006G10_FLI
gggttccaaacagcactgcccttgcttctaccgttccccaagtgcgctccctctctcgccatccatctcgtgcacgactgggcaaccgttgccgctgtcgaggtgcccaggtcttcatcggtccctcgtcagttcttctccggcccttcgccgccgacaagctccgccaggttgctgtgttaagtccaagcttatcacatggattcaacacaagattttcaacccaggacattttctataaagttgtggccaccaagtgaaagcacacggctcatgcttgttgagaggatgacaaagactatgtccacagagtccattttctctcgcaaatatggtcttttgggcaagcaagaggctcatgagaatgcaaaaaggattgaagaactttgctttgcatcggctgatgagcatttcaaaaatgagccagatggtgatgggagttctgctgtccagctatatgcaaaggaatcaagcaagatgatgttggaagttctgagaaaaggcccaaggactactgcagaattggaggcacctgtagatgatacatctcttgtgtctgctgatgcacctcgtgtgcttgctgatactgtactggatatatctggtggggagcgtgcttttattgaggcagatgaagcaaaggaactgcttagtccacttaccaaaccagggaattcatataaaagaatttgctttagcaacaggagctttggtattggtgctgctaatgttgctggtccaattcttgagtcagttaagaatcagctcacagaggttgacatctcagattttgtggcaggaaggcctgaggatgaagcccttgatgtgatgcgcatattctccaaagcattagagggttctgtcctgagatatctgaacatctctgacaatgctttgggtgagaagggtgtcagggcattcagtgagctcctgaaatcacaggaatccctcgaagaactatatgtgatgaatgatggcatatcagaggaagctgcgaaagctctatctgagcttattcctgcaactgagaagcttaaggttctccacttccacaacaacatgacgggagatgaaggtgctatgtatattgctgagatggttaagcgttctccgaatgtagagagtttcaggtgctcagcaacaaggataggatctgatggtggagtcgcattgtctgaggcattagggacatgcactcgcctgaagaaacttgatctcagggacaacttgtttggtgttgatgcagggttagctctcagcaaaacccttccaaagcttcctgatcttgttgagctttatctcagtgatctcaatctagaaaacaagggtactatagcaattgccaaagccctcgaacagtcagcaccacagttggaggtccttgaaattgctggaaatgaaataaatgccaaagcagccccagatttggccaagtgcctagcggcaatgcagtcactcaagaagctgactttggctgaaaatgaactgaaggatgatggtgccgtgataatcgcaaaatcattggaagatggccacatagatctcaaggagcttgatgttagcgtgaacatgctgcagagggttggagctcggtgctttgcgcgggcagtcgctaataaaccggcttttgagctgctgaacatcaatggaaatttcatctctggtgaagggatcgatgaggtggaggaaatcttgaaggctggtaagaaacccctgaaagtgctgggcccactagatgagaatgagcctgatggagagcctgatgatgacgatgaagaggttgaggataatgaggacgagctgaattcgaagctgcagagtgtgaaggttgagcaggatgattgaccgagttggtatcgagatataagcctgtcgcagggtcttgataactgagttatctacaatgctgttgatctttggttttgtagtcggtttttgttatgaaaaaccagaaccagctatcttgtgacttgtgcaatctgattatagattagaactgctcttatttattcgtt

SEQ ID NO: 32588 - DNA, 1973 bp, Zea mays
  Clone ID: UC-ZMFLMO17006H12_FLI
gtcctcgctcatagcaggcgccaggcggcagtgactcatcactactagtgatcagaccagtgagctagcgactgtaccatgcagcagctgtaggagagcctggtggtaggtaggataggagtagcgccagccgccaagtgcgcgtccgggctggctgcttcgacgagcaggagggagccgcaccgccgggctcccgcaatgtcgcctcctccgcccccgccgctgctgcgcaacgagctgtcgcgcaggacggcggtgctgggcctgcgcctgtgggtgctggtgggcatcgccgtcggggccgccttcgtgctgctcctcgtgctcatctccctccacctcgccgcggcgcggcggaggcggcccaggaagggcgtcgcgcacgcgccggcgggggcgccgccgctgtccccgtccaccatcccgcccgtgtccaaggagatccaggaggtggccgtccacgtcggctcgctccgccactacctggagacggggcacgcgttcctcaaggacggcggcgacggcgacggcgacggcgagtccgtggcgcacgggtcgcagcgcgtccacatcgaggccggcaagggccagcgcatggtcgcggcggcttccgacgcgctgtcggcggccgtgggccccgaggtgtcgcacctcggctggggccactggtacacgctgcgggagctggaggaggccaccgccgcgttcgctcccgagcacgtcgtcggcgagggcgggtacggcatcgtctaccgcggcgtcctcgccgacggctaccaggtcgccgtgaagaacctcctcaacaacaggggacaagccgagcgggagttcagggtggaggtggaggccatcggccgcgtccggcacaagaatctggtccggctactgggctactgcgccgagggcgcccaacggatacttgtgtacgagtacgtggacaacggcaacctcgagcagtggctgcacggcgacgtcggggcagtgagcccgctcacctgggacgtccggatgaacatcgtgctcggcatggccaaagggatcacgtacctgcacgaggggctggaacccaaggtggtgcacagggacatcaagtcgagcaacatcctgctggacaggaggtggaacccgaaggtctcggacttcggcctcgccaagctcctgggggcggacagcaactacgtcaccaccagagtgatgggaacgtttggctacgtggccccagagtacgctagcaccggcatgctgaacgagaggagcgacgtgtacagcttcgggatcctgatcatggagatcatctccggccgaagccccgtcgactacgccaggcctgccggagaggtaaaccttgtagagtggctcaagaacaaggtgaccaacagggactacgaggccatcgtggacccgaagctgccggagaagccgtcctccaaggcgctcaagaaggcgctcctggtcgcgctgaggtgcgtggatcccgactcgcagaaacggcccaagatggggcacgtaatccacatgctcgaagtcgacgacttcccgtatcgagaggatcgtcgaactcttcggccgggcaacggcagccccctggagaaggcgaggaatccggcggcggggtcatgcgacggcagcagctgctacgggggcgacacgaccaccgcgagcacgccgtccagactagtgcaggacatgtagtagtgatgtgtttgtagccagctgctgctggccttctgagctctgcctgcgggctgcggggcaacatggagatggacatgctgcaactctgctccgtcgttaattaaaggttcccttcctaggtgttgattttggactcaacagtgacttgacgtaagttttgccgcccgatggccaactgtttgtatagggaactgctgctcttcatctcaggccctaagtttgactgttctttgattcgcgtcatgatgtaaaaataaaagcgtgcgtctgtattggtc

SEQ ID NO: 32589 - DNA, 1703 bp, Zea mays
  Clone ID: UC-ZMFLMO17007D03_FLI
gtcatagccagatagccttctaagttctaaacttattttcctgttactttacctatggagattcgttcctagttcattgcacattggttatcgtgacaaatgggggcgtcgctagcaggtctctcttctctggataaccacaccaccaatcatgagggaatcaccttcaacacagggggggccatctacatcttctgcggttgatgatagttactcagctgacggtgttgaagattcacaactattcctctccgtgccagctttaaaccaagctgcatcgtatcttgcccagacagcttcattcctcacccaatgcctccctgtacctggttttgtgggtctatctgaggagggccaagagttattaacactgccacctgcatcggcttcaggcagactttctgttcagacttcttcagtagagccttccggtaccaattcatcccttggtcagtcagattgtggtggaaacccctctcaagaaaacgctggacagatggtgccttcgcatgtttttcagaatggagcttcactgttccaaggccttgttgaacgtgctcggaaaacggtccgtggttcagcagatgatattggctggctccagcgagatcaaagcttacctacaactgaggatgggacagccagattcttagagattttggattctgtgagaaaaaatgagcacaagctatctgattcattggtttacttgttggttccaggtctgtttagtaaccacggacctctttactttgtcaaaacaaaggcatatttctccaagatgggtctggcttgccatattgccaaaattcatagtgagtcttcagtgagtaaaaatgcacgagagataaaggaatacatagaagaaatatactggggatccaggaaacgtgtgctcctccttggtcacagcaagggtggtgttgatgcggctgcagccctctccctctactggccacaactcaaagacaaagtcgcaggtttagcattagcccaaagtccatatggaggaagccccgttgcttcagatatcctgcgagaggggcagcttggtgactatgtcaggctgcgtaagatcatggagatcttggtatccaaggtccttaagggtgatctgcaggctctagaagatctgacttatgaaaggcggaaagaattcctgcgacggcacccgttacctcaggatgttcctatcgtttcgttccacacggaggcaagcatcactcccagtgtgctcacagcgctctctcacgttgcacacctggagctcccgattgctggcgatggcaattccactaggatcccagttgtgatgccactttcagccgcgatggcagcatgctcgcagttgctggtggcgaggtatggcgagaagagtgatggtctcgtgacgaggaaagatgctgaggttcctggttcagtggcggtccggccggagcggaagctagaccacgcgtggatggtgtattcgtcgctgaaagaagagtctggggatcaggcggacacgtcgcaggtatgcgaagccctgctgactctacttgtcgaggttgcacaaaagaggaggcatgagatggcaatgaaagacgagtgaaagtagcttttggtgttggctggcgatagtgggatgtatcctcctgtaatcgtagactggcctgttgctggctgtacagagttgtgctgctcaaagtgctttgggacctgtt

SEQ ID NO: 32590 - DNA, 2043 bp, Zea mays
  Clone ID: UC-ZMFLMO17007E01_FLI
ctcttccccaccatgctagcactcacccacacctctccttcctatcgggcggcccagcccctcgccgatggcgatcactcaccacctcaaacactctgcggcttcgcttggcggccactaaggacgacgcggtcgcctccctcgtcggaaggctcgagcacgacgtggcgaacgcccagtaccgcgacgacgttctggaagaagaagacgaagagcagcgggaggaggaagaagaggagcagcagttccttgacgacgacaacgctcggcgccgcggcgcggggaagcatcgggacgagctgcgcagtcggtggcgcgagatccacgggtgcgacgactgggcggggctcctggaccccatggacccgctgctgcggtcggagctgatccggtacggcgagctggcgcaggcctgctacgacgccttcgactacgacccgtcgtcccgctactgcggcagctgcaagtactcgcggcgcgacttgttcgagcggctgggcatggcggacgcggcgcgcggctacgtggtgtcccggtacctgttcgcgacgtccaacatccggttccccaacttgttcccgcagtcccgggcgggcgccaggatctggagccagagcgcgagctggatcgggtacgtggccgtgtccacggacgaggagagcgcgcggctggggcggcgcgacatcgccatcgcgtggcgcggcacggtgacgcggctggaatgggtgtcggacctcatggacttcctccggcccgtggcggaggagggcatcccgtgcccggaccgggaggtgaaggtgctggccgggttcgtggacctgtacacggaccgggaccccagctgccggttctgcaagtactcggcgcgcgagcaggtcctgacggaggtccgccggctggtgggccgctacacggcggcgggggaggacgtgagcgtgacggtgaccgggcacagcctcggcagcgcgctggccatgctgagcgcctacgacatcgcggagaccggcgcgaacatggaggccgcgcccgtgtgcgtgttctcgttcgggggcccgcgggtgggcaacacggcgttcaagcggcgcttcgaggaggagctcggggtgagggcgctgcgggtggtgaacgtgcacgacaacgtgacgcggatgccggggatcctgctgaacgagggggcgcccgaggtggtgcggcgcgtggcggaaggcctgctgcgtgtgccctggtgctacgcccacgtcggcgtggagctgccgctcgaccacaagcgctcgccgttcctcaaggacacgctggaccccgcgtgctaccacgacctggaggcgcacctccacctcatcgacgggtaccacggacgcggtgagcggttcgtgctggcgagcgggcgcgacccggcgctggtgaacaaggcgtgcgacttcctcaaggaccaccacggcgtgcccccgtgctggcgccaggacgagaacaagggcatggtccgcgcccgcgacggccgatgggtccagcccgaccgccacggctggcacctggacgaccacgaccacgaccacggtgaccaccgtcaccaccaccaccaccaccaccacgacggtcaccaccaccgtcatcacaagaagcacagcaccgagggcgcccggcaccaccaccgtcacggtcacggccaggacatgcagtctcatgcataggccaaagcatgaactatatatagctctgaccgttcccgtcccgcgggacaccagttgtccgcgtgttgatgccgtgccgcacggagatgcaaacctagccgtggagaggagctgaaatattgggatcttatctctcgatcgatggtcatgtgcgatgtgagcgtgtattattattattatattggtgttatcctgattgtacagtgaatcaacacatggctttactggctacggagctcattgcaatttggtaggctcgtgtatcgaaaccatcgctttctctagtttccaagtacaatgcaaatacaaacccgctggatccaatggacgggtttgtctattgtcatttaactat

SEQ ID NO: 32591 - DNA, 1145 bp, Zea mays
  Clone ID: UC-ZMFLMO17007E03_FLI
tccgtaacaccgcctaatcaagcaaagagtctacttcggacggctcggcgaatggagattatcacacgggccgccttgtgctgaatccagaggcagcgagacaccggatcccgtccgcccccggaccaagaatcccaacctcacagcgatggcagcatcccgcagcgaggaacgtgatcagaatcagccagtggtgcttgtgacggggtgctcggagggcggcatcggccacgcgatggcgcgcgccttcgctgcggccgggtgcgccgtcgtggccacggcgcggtcacgcggttccatgcgcggtctcgacggcgacccgcggttcctgctgctggagctcgacgtgcgctccgacgagagcgcgcgcgccgccgtggcgggtgcgctgcgggagcacggccgcatcgacgtgctcgtcaacaacgctggggttcacctcgtcgcaccactcgccgaggtgcccatggagtccttccaccaggttttcgacaccaatgtctatggtgcaatgaggttgattcaagctgttattcctcacatgatggaaagaaggaaaggaacaattgtgaatgttggaagtattaccgctctggcacctggaccatgggctggtgtgtattcagcatccaaagctgctcttcatgcattgagtgactcgttaagggttgaactaagaagcttcggcataaacgtgatgactgtcgccccaggagggacgaggtcgaatcttgggaattcttctgcagccaagtatgatcagatgcacgagtggaagtactacaagaaatacgaggaagggctccgagccaggactggcatttcccagggccccaggtccactccagcagaagagcttgcaaaggcggtggttgcatcggttctaaggaagaaccctccagcttggttcgcttacggccagtactctgccattctgtcgattttgtattatgcaccgctatggtttagagattacctctataagtttgtcatgaaatgttagtccctggaagaataatggctgtatggagtatggaccaaagagagagctggacaggcccagttcaattcatttcattgtactgacagcctgttacgtcgtactcctatattgtactatagaactatgctctgtacctgctggc

SEQ ID NO: 32592 - DNA, 903 bp, Zea mays
  Clone ID: UC-ZMFLMO17007E11_FLI
gccgcgtcgggggctcgttccagatccccgcgggctccctcaccgtcttcttcgtcggctccatcctgctcaccgtgcccgtctacgaccgcctcgtggtgcccgtcgcgcgccgcgtcagcggcaacccgcacggcctcaccccgctgcagcggatcgccgtcggcctcgcgctctccgtcgtcgccatggcgggcgccgcgctcacggaggtccgccgcctccgcgtcgcgcgcgagtcctccgagtccgcctccggaggcgtcgtgcccatgtccgtgttctggctcatcccgcagttcttcctcgtgggggcgggcgaggcgttcacgtacatcggccagctcgacttcttcctgcgcgagtgccccaaggggatgaagaccatgagcacggggctgttcctcagcaccctgtcgctgggattcttcgtcagctccgcgctcgtcgccgccgtgcacagggtcacgggcgaccgccacccctggatcgccaacgacctcaacaagggccgcctcgacaacttctactggctgctcgccgccgtctgcctcgccaacctactagtctacctcgtcgccgcccgctggtacaagtacaaggcgggccgccccggcgccgacggcagcgtcaacggcgtcgagatggccgacgagcccacgctccactgatccatccatgttcgatcgatcgacgaggcacgcgacggacgaccctaaattgaaccctatacaccgagcttaattatatatccgtccgatcgtcgtcggtcagattcattgctagctccgcgtgttgtaccatcgtgtcagtcagtgtatacgagtgtgtatcttttgtatccaagtacagcacgcgcgcgtgcgtaagcgtgtagttataaaaattaataacatgtttctt

SEQ ID NO: 32593 - DNA, 1858 bp, Zea mays
  Clone ID: UC-ZMFLMO17007F12_FLI
ctcctccctcttcagctgttgccaccgcccttccctcccttcctctccgcgtcgctcgccgtcccatctttggcctggacacctggcctgcccccccttcgcggacgcgccgggtcgccggccgaatccgccctcccgccgctgccaacgtcgatctgcgaccgcccgcccgccaagggagattcaaaggtaggacgagggggggtcgagttcttgtcggtttcattcctggccgccgacttcacatgtcaacaaccccaaggagcagaagccagggtagtaggaccactaggccgtggatcttgtcagggatggactttgctggttccagacggaagcctaatctcacgggaaaaattgccgtggctgctgccctcacggtcatgtgcataatcgtgttgaaacagtcccctagtttcagcggtaccagcgtgttctctcgccatgaaactggggtgacccatgtgttagtaacagggggtgctgggtatattggctcacatgctactcttcgtctccttagtgacaagtaccgagttaccattgtggataacctatccagagggaacatgggagctgttagagttcttcaacggctatttccagaacccggaaggcttcaatttatttatgctgatttaggcgatgccaaagctgtgaacaaaatattctcggagaacgcatttgatgctgttatgcactttgctgctgttgcttatgttggtgagagcacaatggagccactcaggtactaccacaacataacgtcaaacacattgacagttcttgaggcgatggcagcacataatgtaaatactctgatttactcgagtacgtgtgcaacctatggtgaacctgatacaatgccaattgtagaaacaactcctcagaatcctatcaatccatatggtaaggcaaagaagatggcggaggacatcatcttagattttacaaaatcaaaaaagcaatcaaatatggctgtcatgatcttaagatacttcaacgtgattggatcagacccagagggacggctaggagaagctccaaggccagagctacgcgagcatggacggatatccggtgcttgctttgatgcagctttgggaatcattccagggctaaaggttcgtggaaccgattactccactgcagatggaacttgcgttagagactacatcgatgtcacagatcttgtagatgctcacgtaaaagctcttggtaaagctcagccaggcaaagttggaatctacaatgtcggaacaggccaaggtagatcagtgactgagtttgtagaagcttgcaagaaggcaacaggagcttctatcaaggtcgaatatcttgcacgtagacccggagattatgccgaagtatacagcgacccgtcgaaaatccacatggaactcaactggacagcccagtacactgatcttggccaaagcctcgcccaggcgtggaaatggcagaaagcgcacccgaacggatatggaccagcctgattcagagttcaaagattgagagagactcgtcacgcagatccaaagggtccatgtgcagtcatgtagccttcagacagttggttcttcatcaccatagaaagatagcaaagagcaacagaagagtcctgattcttttattgcagcgctcgaagaaggaaaaaatatcacagagaaccccctacctgctccttgattagtttcaaatatatatatataggtcctcgttgacattttaatataatttgatgtgtgctgaggcgctatataataacacaaacgaaattttgttgtagacagggtagatcgatctcgtgtatcaacttttgtggtggtagaatgaaaggatataaataagttgatgt

SEQ ID NO: 32594 - DNA, 1835 bp, Zea mays
  Clone ID: UC-ZMFLMO17007H12_FLI
gagtgtggcttcaagccaactataatatcttatggttgccttattaatctgtatgttaaggttgggaaggttcccaaagccatagctattagcaaagaaatggaatcacatggcatcaaacataataacaaaacttactctatgctgatcaatggatttatccatttgcatgactttgcaaatgcttttagcattttcgaggacatgataaaatcaggtttgcagcctgatcgtgccatatacaatttgctggtagaagcattttgtaagatgggaaatatggatcgagctattcgcatattcgaaagaatgcagaaggaacgaatgcaaccatcaaatagaacattcagacctatcatagaaggatttgcagttgctggagatatgaaaagggctttcgatacccttgacctaatgcggcgaagcggttgtgctcctactgtaatgacttacaatgctctcattcatgggctagttagaaagcaccaggttgaaaaggccgtttctgtacttgacaagatgtctattgctggcattgcaccaaatgagcatacatacacgatcattatgagaggttatgctgctagtggagatattgggaaggcttttgagtatttcaccaaaatcaaagagagtggcctaaagcttgatgtgtacatttacgaaacattgttgagagcatgttgcaaatcaggaagaatgcaaagtgccttagcagttacacgagagatgagctttcagaagataccgaggaatacatttatatataatattttgattgatggttgggctcggagaggagatgtctgggaggcagcagatttgttgaaacaaatgaaagaggatggaatccctcctaacatccatacatttacttcctacataaatgcatgctgcaaagcaggagacatgcagagagcggaaaatgtgattcaagaaatggcagatgttggattgaaaccaaatgtcaagacgtttaccacgttgattaaaggttgggctagagtgtcactgccagatagagcgttgaaatgctttgaggagatgaaatcagctgggcttaagcctgatgaagctgcttaccattgcttggtgacctcacttctctcaagggaaactgtgatggagggaagcacttacaccggaatcttcagtgtctgtagggaaatgtttgagaatgatttgactgttgacctgcgcactgctgttcactggtcaaaatggcttcacaagatcgagaggacaggaggtgcactaacagaagcacttcagcgaatatttccacctgattggaattcgtcagaaaatttggaggcttcgaattctgcaagtgatggagattctgagtcttgcagtgacgcagagtttagtgataatgatgaggatcacgacgttgatgacttgtgacataatatcaagacagttttaacctttctccaattcctcactactgcttcaatgacagttaaactatcaaggctacttgcttgtggcctgccaagaggaaggtttggaatcttattgtgattttaagcgtgagccgtctgccctctgtggtgttttaagagtcacggactgtcagtaacagtactgctggggctgaagacaaaggctgtcaatgcaacagacgaagttccagttatatctgttgttgtacagatcagtgactcgtagtacaggtaggtaaatattctctatattcttgagaaatcgacaagttcatttctcatcattattcattgctctatttctagtgcaacctaactaagttaaatctacttttctgtaatcggagaaatgcaagtgaaattatggttttactttgtttatttccc

SEQ ID NO: 32595 - DNA, 4313 bp, Zea mays
  Clone ID: UC-ZMFLMO17008A11_FLI
aacacagcaaacataggttcagtagaaaagtacaaacacacaagtgaactctaggttctagggtagattaatgttggggacttgttctcaaatgctatgaattaagaacaaggcaacacagaaagaagttaatggttaatgcccttcgtcctccgaagcattatttcccttaggatataacgatcttcggacaaaggtcatgaaggacataccttcatcatcacaatttacattgatgaaaggagaagtatatgaaacatgagaaattacatgaataatcatataacattatttatatgtccttattatataattatggatgaataagaacaacattgaattacatttataccttcggcttgacagaaggaaaaagtacaagtgtgacgcatgagcgagtacaagtcagcgtgaacagtacgggcgtactgttcatctatttataggcacagggcacaacctgtgtgagattacattcatacccttcatgtttactattgacttaataacaatctatcgaggactagatagccttttcctccttaagtcggttcctttttctgctgctgagccgaagctcccttgcgcgcagcttcggcgttggttcaaccttcgttccgactttgctttccatattgtgtacagcttcatcccgagtctgaaggttcctgtacatatattacgcttgggaaacattgttaatcatgtttttgaggaccttcggaatacgaaggcccccaacagtagcccctcgcagtattaatttgttataacaacgaattcagactgcgatgtgaacgaaggccttaagccgaaggtccaaaaaaacaccttccctttgctagaatagcaacaatcaatgtcagttggggccctccaagttgcagcgtgctaggcgtataaatatgaactcacaccggcaacatttgatacgctgtttctgtcatttgcattattttctcaaacttttagctcttgcttgctagcgctcgctagattttcaagattttttagctttagttaaaagacgcgatttcaccatgtctgggaaaaaatgactgagaaggtgaagctgactgaggagacgaagctgtttgaggagaagaaggttgcagatccttatattgctagatttattgagtccatggcaaaaacaaacacagagaagattactaaagagatactggaaggtttatctgaagatactggtgacagcgataactatgatgtggaaagtggggatgaagattctgaagatcggccctggcgaccaagccatgctgtcttcggaaagtcgaccattaaacagagtcatcttgagaacatgagaggaagatactttcgagacatgtctatcgtgagggctggcggagacaagaacatccctgctcctgaggaaaacgaagttgttatataccaaagcttttttaaagctggacttcggtttcctttgagcaagtttgtagttgaagtgctgaagatctaccagatcttccttcatcagatcacccctgaagctataatgaggatggggatttttgtctgggctataaggagtcaggggctagagccaagcgcgaagtgattctgcagtatgcacgagctcttatatgagacgaaggctactggcaaagaacagtaccacaacaacttcggttgttatggatttattgcttgccccaacgcaagccacccagtgccaacatttcggaagagatggcccggagcttggatggaagagtggttttatgtgaagaatgatttaaaggcaatggaagacattaaagaaatcatccagcgccctatctggtcccgcttcggcctccgaaggtcgaaagtggaaattgatgacgctgtcgaagcgtgtcagagggctttcaacactgtttgctccttcattggcacaagagatttgattcaagaacatatagccttcagggtatggccgcttgtggaaaactgggaaataccgaaggagaccactgccgactctagtgagggtggtctgatccgactgaagtataccttcagatttggggagaagtttgaagagccgaacgatgactggctgaagtgtattgaagctactagcgacgagctacttggggtatactccaaggccgaggataatgctttatctgcagcttttggggtcggaagaagaaaagattgaacagggtatttgatgctattggcttcgtataccctgattatggcctcccactgcgagggcaaggaaaaaagagaaaagttgctgcttcggtcattatagctgagccgaagggcaagaagataaaggttctaactcaccggtcgtgttacattgaaccgaccgtgatacctgaatttggcaaagggacctcttcagctgccgaagcaaaagaaactgttccaattgtgcagagcactgaagagccgactatggtgccgatgatgcctacagttgagtcagccaaagctaaagatgataaggccgaagggccacagattgaagaaataatgaaaatatcagaaagtctgagcccttcaatagaggcaaagctgccgaaggtgcaaaaggcttctaccgtgactcccaggaggagaaggatggcgaacatgctagatgttgtgctagagactacaaaggccttgagccctgctcctaaaaagaaaattgctgaagctgccaaagtgcaagccgaagtcgaaactggacaagtagaagtcgaagctacgaaaactcgggccgaagccgaagctaccaaaactcaggctgaagctgaagctgggccttcagcgcccgcctcggcaaagcctaccacgcctaaggaagagatgacagaacaaattgctcctaaaaagatcgagacttctgctcccgaagctttgattgaagatattgactacatcattcgacacgcttcggggaagaagctatccgaagaagaaattctggaagccaggcactatgcgcgaaagttgaaatatccgaaaggaaccttggtttttaacggaagcaatgaagatgatttcttatgttgtctcccggacaacaaagaaatatctgtttgtcgggagataggcagaagcatgggattcacaaagctggaagatggcctttcaattttgtcgaaggatgatcttgccgacagcctagcctacaacagtataaaggtataaaggttaactttgaatttgagaatgaagtatttatttgtcatactcaattccttcctcctcttgcagggcctaattcttagtaatgcccttagggcgtagaagaatattgaagacgaaggctatacaatggctctgaataaccttcgttcagacgtgatcgaattgagaaacgaaggtcttgaaaaagataaaatcttaatttcattggtaaacaatgtgaaggaagacgaagctagtttcaaagcttaggccgaagcccaaaagactgaaattgaagaccttcggaaacagctggccgaagctaaggaaaactgcgcactcacgcaagctaatcaagaaattagcgaatattggaaaaatcatctggagaaaaatgttgaagaacttcgcgcatctagggaaaggtgctttgaaaaatccttggattgtgtgaagaaaataaaaggtagcttcgccaaagtgggtgcctattctgctaaagaaaacatcatacgaggcaaccccgaaggcgttgttgagtggataagtggagaagctgagaccttcaaagaaattttaagtgatcgcggggatgtttgcgcgttttccggtgcgcggggaatttcagccatcttggagaaggctggatgcgaccatatcaaaaccttggcctagaccaaagctgccttctccatagatgatacgaaggatccttcagtcgaagcaaccatgatgggcggaaaattctataatgatgtctaggtgaatggtggccgagagatggcccatgaaattataaagaaaagtgaaaaagacacccaagatgcccgaacagaagcaagacgagctgaggaagctgccgagcgtgaaaagcgtatagctgaactatctctgccgccggagccgttcgatcccctagctgatccaaaaatgaaggaagcgctggagatcataaacatggttgaatctattgttgacgaagtcgttaacaaattgctgaacgaagttgcagagaaagttcttaaagaggaatagattgtgttgtaataaaaattttgaaaagtttaatgtatataacagatgaaggaagattaggtttctattgtaacaaaactatgatatttgatgtgtgtaactttgaatcaaatatgtaaattattgcattttatttc

SEQ ID NO: 32596 - DNA, 1431 bp, Zea mays
  Clone ID: UC-ZMFLMO17008C02_FLI
ccctcatccaagtgctacttttcgatagcgtgctacttacaccataaatacaagtcaaccaagtcgaagacttacacaaagaatggagaatcttgtacgataacatatggttctgggcaaatcgctggcttcttcagtgaggacaatgtgttggttggcaaccttgttgtgcaaaatcagaaatttattgagacaactcgagaaaccagccctactttcatcattgggaagtttgatggaattcttggtctcggatttcctgaaatttctgtaggaggagcccctccaatttggcagagcatgaaacagcagaaactggtcgcaaaggatgtcttctctttctggcttaatcgtgaccctgatgcatctgctggaggcgagcttgtctttggtggtgttgacccaaaacactacaaaggggaccatacatatgttcccgttacacgcaaaggctactggcagtttgacatgggagatcttattattggtggccactcaactggtttctgtgctggtggctgtgctgctattgtggactcagggacttcattgcttgctggtccaactaccatagtggctcaagtcaatcatgcaattggggctgagggaatcatcagtacagaatgcaaagaagtggtgggcgagtatggagagatgatccttgagttgctcatatcgcagacaagcccacagaaagtgtgcactcagattggtctctgtgtatttgatggtgcccattctgtcagcaatccaattgaatctgttgttgagaaacagaagcgtggttctgatcttttctgtactgcttgtgagatggctgttgtctggatacagaatcagctccgtgaaaacaagacaaaagaactcattttgaattatgctaatcagctctgtgagcgtctccctagccccaatggcgagtcaactgttgattgccatcagatctcaaagatgccaaatcttgcattcaccatagcaaacaagactttcaccttaacaccagagcagtacatagtgaagctggagcaagcaggacaaactatctgcatcagtgggtttatggcatttgacgtaccgcctcctcgtggtcctctctggatacttggtgatgtttttatgggtgcctaccacactgtttttgacttcggcgagaacaggattggatttgccaaatctgcatgaggactggagttctgcgctttagtagcatgtccagtttgttatcccggtattgtacatatatatgttgccaactggtgtaatctgcagtgtttaatagtatatattcatgcagaaatctagaagattgtggcatgatatgtgtttgcaaatggagctatgctatgtatggagctccaggacctagagttttatgtaaagggagacgatgaggattagggcttttaacctattctcatcacgttattgtcc

SEQ ID NO: 32597 - DNA, 3927 bp, Zea mays
  Clone ID: UC-ZMFLMO17008D09_FLI
ccaggtgggccatacagacccgttggcccccctggtagtttccctgtcgaaccatttggttattatggtcagttcccacccaactctgaagttgcagcaaggcagggcccagggcatggtggatatcaggctaaaaatggagatgtgtatcatcctacgcctcctaattcctatattatgaatcagcctgttattccagtcagaccagtttatcagggtccagtgccgtatgatgggtattatggccctcgagcacatttcaataatgccaatgttagagatcctcattttgttggaggtcctggaatattaaatcaattccctaatcagaatgacaggtttcaccctggacatcctcaaaacagaccaggcagacatgaaacagttccaagggagcagctggaatctgataaaatacatgtgtttcatcgaggaaaccctgggagtttgcatgataattctgatcgtctaggaggttcccgtgaatttgaaaggaatgcgcagccagcatcgccacttcttccacatcctgatggaaaccggactgatgtgaacatgaggacagatacaagggacacctttagtgaaagtgaaagaaccagggtacttacaaaatcggtgcctaatcagagaggttcggttggtacagaacatttgtctgtttatgacaatgcacattcccatcacagagaaactggtgatggcactctgcgcaagaaattcaaggaggatggttcagctgcactgcatcctgtaattaagaagaatgcagctttaatagagaaaattgagagtttgaacaacaaagccagaaatgttgatgcacgtaatctcccagaatcagcttcgtccaaggaattcaagaagcatcaaaaaagcactgatgttccatctaatgatgtcatgggtatggcatgcaaatctgacccggcagtttctgtttcctgtgtttctcctgcggtgcagagactaccaaatgtgcccatcaagggtacaattcttggtctggcacatccacagttaactgaatttagcaaagctgaaaagcttggtgattcaattagcgatcatgtacataggaaaagtgattcttcaagaaacagttaccatggtccttctaaagataggccagctaataaattcggaagtcatggacggggagaaagttctacaactagttcattaccagtagctgatctgaggaataatatcgatcatggccaacaacctgagattgcttcgcagctgcaacctgcgattgtacctgatgatatgccagcttcactcgattatgagtctcagcgtgcaaaaatgaaggagttggctgcagaacgtgcaaaaaaagttgaaagctgaggaagaggaacggataaagaaccaaaaagcaaaagcgctcgcaaagttggaagaattgaacaggcgatcatcagtacttcagaagaaatcaaatgatataaaagtagaaacttatgatgcacatgataagcaacatgctggacttgatgtgactgctaaacttgacacttcaactgaaccacatgatgttattgcgcctgataggcttactgatcttctgcctcctaatgatcccaatcatactatggttcatatacaggcccagtctacagcacaatcacatgcatcagatggtggcaaagaccctgatgctcatgcaacctcatctttggtcaagaacactcacagcaacatggagcctgttgtgcagaagagtatctcgcagttgcatgacatcactgtggtaaaggccaagcaagggtacaggaaaagacatgtgtcagaggagaaaatttctgatgagaaggcaagtgcttcaataaccactagaaatattaagaaaaatgttgatgttctcatcgacacagtgacggctgttgttgcaccacatgatgatccacctactcagaacaagaagggaacccggcatttgagaagtaagaaaaagttagatgatgctccagttacttctaaacatccacctgtggtgttgaatgagccgaatacagtgaaagtctctaccgagccaaagacacatactggtggtgttatcatcagcagctctattgttcctactgaaggtactattgtaactgttggaagtataactgttggtggaatttcacttaaacctatgaatcaggagcgggttaaatcaccagatggaacaaataatactgaaagtagccaaccaagacctcagcaaacgagaaaatctggaaagcatcagcatgttcttcggcctgttgagaagccacaggggaatgatggtgtcttgtgtgcaccagttaagccaccagtgccgaatgagcactctgatggagccatgccgactgcagcagtagctgacctcactaaaccagtagggaaagccataaatgatggggagaatgtgacaagaacaaagagggctgaaatggaaagatgttcctaagcctatgtccaaagaactgcaacaacaaaatccaagtgatgataaggaagcagttgataaacccagtggtgctaaatcacatcctgcagccgaacccaagaaaactagcaaagcacatgggggcaaatctaatccttcttggcgcaagaggaatccagatgaatcagctttggtggcaccaaattctgttgagcaagcagacgtctcttatgaatcaaaggaggttcagaacttcacctatcagaagcagcctgttgaacttggcaagcaagatacacagttaaaattcaatgtagatgctgctgctgaaaatagctcagctccagttcaaacagttccgctatctgtcggtggcgcaaaacaacatagtgcagctaacagacaaaggcgacagcatgttaaggctcaaagaaatgaagcaagtggctactcaaatgagagcaaaggtagagagggcaagaatgatgttgtctatcaatcagcaacaccggtcatggattcgaactcatccaatcacaggaatgtgccaagatctgatgtgaaaaacagcggcgtagtttcacactctagagcctggaagccgaaaaccaattcccatcctcaggacagctcagacggcaagattgctgttgacgggcaagtggattcccatggtggtaggcttgagatgaatacgtccaaagatacaattacccatctagtgaccagtagtgaaccgacgaaaaggagtgatgacaaagaggtctcacacagcaaacatgagaacctggcacgggaagatggtaaccagaagggtgagactgaacaggagcaggctaatcctacactacgtcgccaaggccagcccaatgcaaggtaccacaggggaggtgggtcacacaggggaagggggggttatgacactgggaggccaaaccatgtcacaaatgtggagaggcggaagggtggcagccatcttgaataccagccagtcggaccccaaaacaaagctgcagacttccaacagagcctgagcatggaagaacgaaccgaggggcctcctgcttctggacaagcgttcaggcagcgtggacacaacagggggctacgcccagcaggccgctttgtccagcgaaaccctgcttctacgcctaccactaattctcaccaaaatgaataatcttccgcggctgccacatccactgagcttcaggaactcgcgcttgttggtggcgtttcacaacagataggtttggatgcgcttgggtgcgcggcaggtgtccttctacgactaaactctactggtggtgagcattaggatcctgtaatgataatagtctttgtcccaagggcacctggaccctcacgtgtgattgtgggaatttgcctttgttggatgcaatgttggaacgtgtactaacagagttgttgtgtttgagaacttgatttaaatgttagcctttgatgctaatgagaacagaaagtgttggtttttgccc

SEQ ID NO: 32598 - DNA, 1603 bp, Zea mays
  Clone ID: UC-ZMFLMO17008E12_FLI
cgccccaaccccaacccagtcgagtccccctccgctctctctgcagttctgcactctgcagctgccggccatggcgcgcgccccgagctcgtggacgccgtccctcgccatggtgctcctcgtcgtggccgccgccgccgtggccgtgtcgtcggaggcggccagggtgcccgccgccgtcggcaactggacgggggaggagctgcgcggggccgcggcgaggcggggcggccggcgctcccggcgccgcgcgttcgagaacggcctcggccggacgccgcagatggggtggaatagctggaaccacttcggctgcgggatcaacgagaacctcatcaagcagacagctgatgcgctggtcaacaccggtctggcgaagctgggctacgagtatgttaacatagatgattgctgggcggagtctgacagggactaccagggaagcttcgttgcaaacagacaaaccttcccctctggcatcaaggcgctcgcggactacgtgcacgccaaggggctcaagcttggcatctacagcgatgctgggacacggacgtgtagccagaaaatgccagggtcacttgaccacgaggagcaggacgtgaagacattctcgtcctggggtatcgattatctgaaatacgacaactgcaacgacgccggcaggagcgtcatggagaggtatacgaagatgagcaacgctatgaagacgtatgggaagggcatcttcttctcgctgtgcgaatgggggaggcaaaaccctgctacctgggcaggcggcatggggaacagctggagaacgaccgatgatatcgccgacaactggggcagcatgacgtctcgtgcagaccagaacgacaggtgggcttcctacgccggacctggcgggtggaacgatcctgacatgcttgaggtgggcaacggcggcatgtccgaggcggagtaccgctctcacttcagcatctgggcactcgccaaggctccgcttctgatcgggtgcgacgtgcgggcgatgagccagcagacgatgggcatactcagcaactcggaagtcatcgccgtgaaccaagatagccaaggtgcgcagggaaagaaagtgcagtccagcaatggcttggaggtttgggctgggccgctcagcaacaacaggaaggccgtggttctctggaaccggcagggataccaggcaaccatcaccgcacagtggtcgagcatcgggctcgcttcttccactgctgtcactgctcgcgatctatgggcgcactcgtcgttctcggctcaaggccagctatcagcttcggtgccacctcacgactgcaagatgtatgtcttgacgccgaactagctcagaagacaagagcggattgttccatggcgcgtgggatgcaaccattcggtcaggattcagggaagaagagtatgcagtgcaggcaaggatttcaagagaaggaaattcgatatcatttggttatacaggatatgagtgcgaatggaggaataatttatactaatactatggaagtgtatctaaggcgccgtcaaaatgccggtgcctgtgttactggatgtttgtaacgagagttgcagcaataaaattggcttgccc

SEQ ID NO: 32599 - DNA, 1584 bp, Zea mays
  Clone ID: UC-ZMFLMO17008F02_FLI
gtcggatctgagacgagacgagtcccctcgcctcacccaaccggaacgaacaagttaccatctcatcccaaccccgcctcgaccggatctcgtcggactcggatccgcccgaccaccccgcgccgccgcagatcaaagaagatggcagctctcgacaccttcctcttcacctcggagtctgtgaacgagggacaccctgacaagctctgcgaccaggtctcagatgccgttcttgacgcttgccttgctgaggaccctgacagcaaggttgcttgtgagacctgcaccaagaccaacatggtcatggtctttggtgagatcaccaccaaggccaatgtcgactacgagaagattgtcagggagacctgccgcaacattggttttgtgtcaaacgatgtcgggcttgacgccgaccactgcaaggtgctcgtgaacattgagcagcagtcccctgatattgctcagggtgtgcatggccacttcaccaagcgtcccgaggagattggagctggtgaccagggacacatgttcgggtatgcgaccgatgagacccctgagttgatgcccctcagccatgtccttgccaccaagctaggtgctcgtctcactgaggtccgcaagaacggaacctgcccctggctcaggcctgatgggaagacccaggtgacagtcgagtaccgcaatgagggtggtgccatggtccccatccgtgtccacaccgtcctcatttccacccagcacgacgagacagtgaccaatgatgagatcgctgctgacctgaaggagcatgtcatcaagcctgtcatccctgagcagtaccttgacgagaagaccatcttccaccttaacccatccggccgctttgtcattggtggacctcacggcgatgctggtctcactggccgcaagatcatcattgacacctacggtggctggggagcccatggtggtggcgctttctccggcaaggacccaaccaaggttgaccgcagcggagcctatgtcgcgaggcaggctgccaagagcatcgtcgccagcggccttgctcgccgcgccatcgtccaggtgtcttacgccatcggcgtgcccgagcctctctccgtgttcgtcgacacgtacggcaccggcgcgatccccgacaaggagatcctcaagattgtcaaggagaacttcgatttcaggcctggcatgatcatcatcaaccttgacctcaagaaaggcggcaacgggcgctacctcaagacggcggcctatggccactttggaagggacgaccctgacttcacctgggaggtggtgaagccactcaagtcggagaaaccttctgcctaaggcggcctttttttcagtaagaagcttttggtggtctgctgtgcttaatcatgcttttatatggcttctacatgttgtggttctttcttgatctgcaccgcgcttatcgtttgtgttgtactgccctaataagtggtgcttatgaggactgtttctggttttgctgcttatgttgtaatgctttgaaacaatgaaagaagctacaggccacagctattttgagaagtaatggaacctcgtgccgttttgatt

SEQ ID NO: 32600 - DNA, 2297 bp, Zea mays
  Clone ID: UC-ZMFLMO17008F05_FLI
acggcggaggctggggctgcggcgcgccgccagccgccgccgctaggaccttgagcgcggctgccggctgcgctcgcgcgggcatgcgccgtgcggacggtacctgagcgcaacgacggatgggcagcgacggcggatgcagactgctagccgcgtccgccgtcgaacgccgccgctcgtccgctccttcgctcggccagaagggaggaagacagaagggatactaggggttctactccggcggtaggtggggcagctgccccaccgtgccgcatggggagctccgcctctgctggcggatgaaatgatcctgcggccttctcttctggccgtcgcccgccctctcagcaccgtagccgtcgcggcggccgtccgccgcggggacctcgccggcgcggaggaagccttcgcgtcgacgcagctcaagaccacgaccacctacaactgccttctcgcgggatacgcgaaggcgtccggtctcgtccgcctcgcggacgcacgccgcttgttcgacagtatcccgcacccggacaccgtctcctacaacacgctcctgtcctgccacttcgcctgcggcgatattgatggcgcgcggagagtcttctccacgatgcccgtcaaggatgtcacgtcgtggaacactatggtctccgggctctccaagaacggggccagcgaggaggccgcagccatgtttcgggtcatgccggtgaggaatgctgtttcctggaatgcaatggttgccgcgctcgcgtgctctggagacatgggtgcagcagaggacttgtttaggaatgcgccggagaagacggatgccattctgtggactgcaatggtgtcagggtacatggacaccggcaatgtccagaaggccatggaattcttcggggcaatgcctgtgaggaacttggtttcatggaatgctgttgttgctggttatgtaaaaaactcacgcgcagatgatgctttgagggtgttcaagaccatggttgaggacgctattgtgcagccaaatgcgtcaacgttaagtagcgtgcttcttggatgcagtaacctgtctgcacttggatttgggaggcaggtacatcagtggtgcatgaagttgcctcttagcaggaatgtgactgtgggcacatctcttctcagcatgtactgcaaatgcggcgatttgaatgatgcctgcaaggtgtttgatgagatgagtacaaaggatatagttgcatggaacgccatgatttctggctacgcccaacatgggggtggaatgcaagctatcaagttatttgaaaaaatgaaggatgaaggagtggtgccagactggattactctgttggcagtattgacagcttgtatccacactggattgtgtgattttggaatccaatgctttgaaacaatgcaggaagcatataacattgaacctcagattgatcattactcatgtatggtggatcttctctgccgagctggtctgcttgaaagagctgtcaacatgatccattcaatgccctttgagccacatccttctgcctatggcaccttgctgactgcttgtagagtttataagaatttggagtttgctgagtttgctgctagaaagctgattgaacaggatccacagaatgcaggtgcctatgtacagctggcaaatatttatgcggtggcaaataagtgggctgatgtctctagagtaaggagatggatgaaggataatgcggtagtgaaaacacctgggtatagctggatggaaataaagggtgtaaggcatgagttcagatctaatgacaggctgcatcctcagcttggtttgattcatgacaagttggaccgcttgcagatgctgatgaaagcaatgggctacgttcctgatcttgattttgcactgcatgatgtcgaggacagtctgaagtcacaaatgctgatgaggcacagcgaaaagcttgctatcgctttcggtctaattagcacttcccctgggatgaccttgaggatcttcaagaacctcaggatctgtggagattgtcataatgtagccaagcttatatccaaaattgaggatcgagaaataatactaagggataccacacggttccaccattttagaggcgggcattgctcatgcggggattactggtgaaggaaagaatctcgataacagtttcagacacactcgcaacgtagtacttgcaacactatataatcccatcgacaggaataaaatgtgtggtaattttttgttaacttaataagtggctaggtctgcagagagttagccagagaaactgatcatttgcttg

SEQ ID NO: 32601 - DNA, 1060 bp, Zea mays
  Clone ID: UC-ZMFLMO17008G03_FLI
agcgaccctgttttctcgttctggtttaaccgacatgctgatgaaggagaaggtggtgaaattgtgtttggtggaatggattctagccactacaagggtgatcacacgtttgtcccagtcactcggaagggatactggcagttcaacatgggtgatgtcctggttgatggaaagtccactgggttttgtgctggtggctgtgcagccatcgcagattctggaacttccttgcttgctggccccacagccataattactgaaatcaatgaaaaaattggtgctgctggtgtagtcagccaggagtgcaagactgttgtttctcaatatggacagcagatcctagatcttttgctagctgagacacaaccagcgaagatctgttctcaggttggtctgtgcacttttgatggcactcatggtgtcagcgctggaattcggagcgtagtggatgatgaagctgggaaatcaaatggtggtctcaagagtgatccaatgtgcaatgcctgtgagatggctgtggtatggatgcagaaccaacttgcccagaacaagacacaggagctcatcctgaactacattaatcagctttgcgagcgtcttccgagtccaatgggagaatcagccgtggactgtggcagtcttgcgtccatgcctgacattgcgttcaccattggaggcaataagttcaagctgaaaccagagcagtacattctgaaggttggtgaaggacaggctgcccagtgcatcagcggattcacagctatggatatcccaccaccccgtggccctctctggatcttgggtgatgttttcatgggagtctaccacaccgtcttcgactatggcaagctgagggttggcttcgcagagtcggcctagggatatggtttggcagcaacccgtccagaggcaaacgcgtaatttgtgtgtttatgcggccggcgatgtgtgtatatatgctactacatgtttagtgatgctttccgagacctgagacaacgcccgtctgttttaacgtggcgcaagaataattctggttctgcatgtattctccgtacac

SEQ ID NO: 32602 - DNA, 2053 bp, Zea mays
  Clone ID: UC-ZMFLMO17009A10_FLI
tagacgccgcccgaagccacaaaggaggcggcgggacgagggtatggtctcctccatcgcctccctccctgcacggagcattccagacaccgtccgaagccacgaagaggccaacacgaggagggtatgatcttctccattgcctccctccctgtgtggtatgaactatcctcttccatcgcccagataagaagttcttctgcattaagattacttccttgccttcttcgtgcacacacacggccgcatggcgtgccagtgggatgcagtcagcgaacggcgcgcgggcgtgaggcagtcgtgtgctgtgcgcgagaatgggaggggttgcaggaagccgggacgggagccatacgctggggcgcttgagccggattgctccagcttggacgcctcctctggatagctgatggactcgcttccctaactcaagagttgccatgtgtcttcaagccgccctgatgagagaacccacaaggagatccaggccaagaatgacaacgtcgggacggacatggggctaaccttctagagcattgagaccataggcagagaggtccagatcaagaacgacaacatcaagacggtcatggcgccaccttttagagcgttgacaccatagttggagaggtttagtgctaggcgagatggggtgacatgagcagggctacagctgcgttggggctgctttattctttatttctttaatcttctatagtttcgtgacttaatttatttattcccattaaagatagaggataaaaaaacctagaacattaagatatcttttctccaccaaaaactcattttaagttatagaacagtatacatcgtatcgagatttcaatggtccacagggatgttttacagttctggtttgcgtagtgcacagatgtttattaatcagggtatattacctatgcattatgcataaatggatcatctctatgttgtggctgggctgattacgctagggcagaattattgcatagactgcaggaaattctgcatctagatgcttctgttaatttaaaggttccaaaacgaggagaaaacaatccaatattacagtatatatactattggatgctgccttgaaaaaatgttgaaaaaaacatacaagtgttacggtaaagaactgtggaactcctaatttcttttgtcgggatttggatgcatcttctgttttggacaaagtattaagtctcttggaagacaaacttctgaactttattgtccttggtgcttgttggaagggatctctggttttggtgagtttatctatgtattggttctcaaagcatgtttgaatttgcatcaaacctctaccacaaatatcgacattttatacttatctgaggtggtaaattcagttttcttctctcattgactgatgtcgatttcgactgtttatattacgttttaatcataataaggtttacaaactgatattgcaatatagttattagttacttagattgtccttacaagcattttcatgtgtcaatagccataattaggaaaaaatatggttcagagatacatctcacaattcatgctgctgaatttaggtgctcatatgctccatcttgatattctgtcactatttatcatcattcttttatttttgttctaccctacagattaaggtttacatattttacagcactatgccttgaaaaccttgatcatgcgccgtcggccacgctggaaccccgacagtcgccgcgacgacccatcaatcacgaagccatggaggcagaggtcgctgcgcctgactgagctactgatgccagcactcatggctcctcatagttcctaattgaccttttctgttctgtcagtaagctagtagttggtagacatacatgcttattttctgtcatgttcgttcgtaatgtttgtattaccatattgtattttttttattttgccggactgaagtttgaactgttgcagccaacagccgtacatgttatggaattctcccatacgcaactgagataaacacacaataaaaagcaaagattagagaggtcattgatgcattcct

SEQ ID NO: 32603 - DNA, 842 bp, Zea mays
  Clone ID: UC-ZMFLMO17009C07_FLI
acacaccacatttaactattacttgcagttgcagctaagcggctggtacatgagcacacattaactggatcccccacacaagcacactgctaagaactacccggactcggacctcaaacacacacacaagccctaacgtgacgaacacacggccagacatgctgcacacttgcacagacagcgctacagcgaaacgaactctacacgtacgatataaattattgttacgtgccatacccacgtaccacgcgcaacacacgcatgcatctactagaccaggcacctcccgcagcccagggccagctcaaggcgtgacgccgccagcgccagcgcccccgccgccgtagccgccgaagggggtgccgccgccagcgaagccgccaaacgggataccgccgccaccgccgccgaggggcccgaacccgccgacgccgcccagcgggccgacgcctccgacgccgcccccgacgccgcccagcgggcccgtgacgccgctgaagacgcccccgccgttgttgccgaagccgccgccgtacccgccgcccacggccgggaagcccgggaggtcgcccatgcctcccacgcccacgaagaggttcttcttgtccgccacgccggcgacgcccgagccagagtcgtcgttcttggtgccggccgcggccgggagcgacgcggtgctgccggtggacgtcgaggaggcgcccggcataggcacggccctggccgccgccgccgtcgccgcggcgtgcagcaccagcgcgacgcagagcactacgaagccgatgctgcccctgatggccattgtatcagtgatctttctctgcgcgttttcgctgatgttg

SEQ ID NO: 32604 - DNA, 2412 bp, Zea mays
  Clone ID: UC-ZMFLMO17009C11_FLI
gctctgtagaagagaggggaggaaggaccgaggaccaaccggagccccactcggccgccgcctctcacctccaccgactgcctgcgtcccaccgctcctgctgccgcccgttgctctcgccattgaagccctcgccgcctccgcccgcttgcccgccctcccgtcggctgccttccggatgagaagcggcgcaacctgggcggtggaagcgtggtcggactgagccttcgtgggggttagcgccgagaaggatcctggagattaagcgcatgggttccttggaggcccggtacaggccgaccggggcagctgaggacacagctaagagaaggacccagaaaagcaaaagtttcaaagaggttgagaaatttgatgtttttgtgctggagaaaagttctggttgcaaattccggtcgttgcaacttttgctcttcgctatcatgtctgctgcgtttctaacactcctatacacaccatctgtgtatgaacatcagttgcagtcaagttctcggcttgtcaatgggtggatatgggataagaggagttctgatccccgatatgtatcttctgccagcattcaatgggaggatgtatataaaagtatccaaaatctgaatgttggcgaacaaaagctcagtgttggactcttgaattttaacaggactgagtttggtgcttggacacatatgctcccagaaagtgatttttcagtcataaggctagagcatgccaatgaaagcatcacctggcaaactctgtatcctgaatggatagatgaggaggaagaaacagagataccatcttgcccttcgcttccagatcctagtttttcaagagcgacacattttgatgttgttgctgttaagcttccctgtactcgtgtggctggttggtcgagagatgttgcaaggctgcatctgcagttgtcagcagcaaaattagcagcagccacagcaagaggcaatagaggaattcatgtgctgtttctgactgattgcttcccaattccaaacctcttctcttgcaaggacctagtgaaacgtgaaggcaatgcttggatgtacaaacctgacgtgaaggctctaaaggagaagctcaggctgcctgttggttcctgtgagcttgctgttccactcaacgcaaaagcacgactctacacggtagacagacgcagagaagcatatgctacaatactgcattcagcaagtgaatatgtttgcggtgcgataacagcagctcaaagcattcgtcaagcaggatcaacaagagaccttgttattcttgttgatgacaccataagtgactaccaccgcaaggggctggaatctgctgggtggaaggttagaataatacagaggatccggaatcccaaagcggaacgtgatgcctacaacgaatggaactacagcaaattccggctgtggcagcttacagattacgacaaggttattttcattgatgctgatctgctcatcctgaggaacattgatttcttgtttgccatgccagaaatcaccgcaactgggaacaatgccacactcttcaactctggggtgatggtcattgaaccttcaaactgcacgttccagttactgatggagcacatcaacgagataacatcttacaacggtggtgaccaagggtacctgaacgagatattcacatggtggcaccggattccaaagcacatgaatttcttgaagcatttctgggagggtgatgaggacgaagtgaaggccaagaagactcggctgttcggcgccaacccaccgatcctctacgttctccactacttggggcggaagccatggctgtgcttccgggactacgattgcaactggaacgtcgagatcttgcgggaattcgcgagtgacgttgcgcatgcccgctggtggaaggtgcacaacaagatgccgaagaagcttcagagctattgcctcctgaggtcaaggctgaaggctgggctggagtgggagcggcggcaggccgagaaggcgaacttcaccgacgggcattggaaacggaacataaccgatccgaggctgaagacttgcttcgagaagttctgcttctgggagagcatgctatggcactggggcgagaacaagaacaactcgacgcagagcagcgcggtgccggcaacacctgccgcgacgagcctgtcgagctcgtgaggcctgttgtgtagatacagctttgttgagagtagtagtataccagatacgaaacttctgaagctcctccatacatacatagcaacagctctgtaaaggtagctatgtaggccttttcccccccgaatgactatactcttgctcgccgtcacggctgcagcgccccctcctgctgcttcctgatggctgacaattcttttggtttttgccaataattcatcagtataggctgtttttc

SEQ ID NO: 32605 - DNA, 697 bp, Zea mays
  Clone ID: UC-ZMFLMO17009D06_FLI
gctcagctctctcttatcttcaagacatgtccacccatctctcttcacggaaatccatcctcccccgccccgcccctccccacgccacccccggccgatctagacggggacgggccggttgaataattccatgtgtacgctggtgatgagccgacgagacatggccctccttgccgtcttccacagctttcttgaactgcatgccgccggctggtggatgctgcgcgcgcttgaattccggtcgatcccaagaggcgcagttcaataaagctgtgggaaactgcagagagaggccaccagccgatccgatcgatcggatcgcggcaccagatctcgaccaccgccggaactgggcgggcgcgaagcagatgatgcggcgattaattaaccggcgtagcagcggctggggatctacctgcatcacgtcgatccacccgcggtagatcgatgggaccgtcacaacaaggacaaggtacggattaggtttcttgtactggtaggaatggatggtggttacttatgaatgcatgtgttgaattccgtacatgagagagagagagagagagagtgatggtgcgtagggctggttaatttcgtcgtctcagcttctttcccgtgcaatttaacctcaacctatgtgcatactacaagaaaagggttgttgttaattaccagtgtctgaaattgtggcttttct

SEQ ID NO: 32606 - DNA, 1857 bp, Zea mays
  Clone ID: UC-ZMFLMO17009D12_FLI
gttcaggaggaatttacagagtctctagggtttatcattcagaaaaccgaagacggctgcataagtaaatacagcatcacaaaatatgaagatccatcagacacattctgcgtgacttataatgcttccaataagatggcaaactgtagttgcaagtactttgaattctccggtattctgtgccgccatattcttggagtatacataatagttgatccacgaacacttccaactgaatattttatgaaacgttggacaaggaaggcaagagatgatgatgctttgttagaagataataacaacaatactcatgatgaggatgcttctcagtccaccacaagccgctacaataccctatgtgctgatgccatcagatgtgctgagaaaggagctggatcggaggcagtatataaggcagcaaaagatatcttacagaaggcatatgaagagattattgcttatgaaagaaatactggccagggatctcaaagggatgttataaacatcaacgaggatgtcacgattgatgatgcaatgaatgataaatctatgccagattctggacgaaaggtgactaatctactaggccaatttgttaattccacttggtctccggtctaatccacgtttttgtcatctctttggagatgaaaatgtgatttagcagcattagcagctgtcatgatcgtcatgcaatatctattttggattgggtagcagcgaacaactcaacaacacttggacatttcaacatgaaatgatctccatgagaagaatgtccgcctgacttcagtagaccaggacaatttagtttgaagatgctggatcatttctgtgatgattaagtctttgtcacttcaataagcgtcctgtatggtgttgcctgtagccctgtatggccgaagctactaaaggtaattagggtttgataaagttaaagcaaccgagtcccaaacttttgatcttgattcgtgcaaacggggacgatgcaacacattttcaaggtattctggacctttatgaagcatgctctgggcaggtcatcaacaaagacaagtcttctgttcactaaaaatacgagaagtgaggcgaagatggcggtcatgcaagctctaaatttaacacaagggactttcaatgacagatatctgggcttaccagttcgctttgggcagtccaggacaaaaacttcttagtacttaaatgataatgtgacaacgtattcaaggttggaaagaaaagctgctgtcaaaagccggtaaagaagtgctgattaaggccgtagcacaaggaattccaacatacgctatgggatgctttgacttaaggaagacttgtctgctcaaatcagcaatgccatattcagatattggagtcaacaggacaagggaaacaaagtgcattgggtgaattgggctaaaatgaaaatgctaaagagttgtgaacttgtgatggaatggattttagagatatctatgcttttaatatggtgttagctttctaaacagggatggatattagctcaaaatccagattcctcgtgtgcaatacttctaaaagctaaacattttcattcgacagatatcttacatgctaagccaagtgagggtatgtcttatacttggaggagcattctgaagggaatggatcttctcaagaagggggatggccaatggtttcctagaggcctgctgcgaggaccgtgcactccaaggggaccaaacatgttaacttttgtcaatgatctgacagacccggttactggacaatgggataaggatttaattgaataaactttttggacggaagatttattaagttgcatgtaccagttcaatccaaaagttgttaatgggg

SEQ ID NO: 32607 - DNA, 5268 bp, Zea mays
  Clone ID: UC-ZMFLMO17009E05_FLI
ctcgtctcccaccagccgtcacctccggcttgcccggatgtgctttgcggagggggcaacccgcgcgcctcggtgggctccaactccgccgctgtcctcgaagctactccgcggcctctcctgcgctccaccagagggccggtcgcacccaccgctcggagggggtacccgcgccttccgatgcccgcgcgtgccggctcctgccctacttccgccgcggtggaatccgacgcctcctcgtgctgcttttcgtctgatacgtcgtccacgtccactgacttccctgaggccgatggggcgctcgggatggccccagccgcgtcgtgcgagtgcccgacgctgctgggcccagcgtcctgccgcgggggacgcctctcgtcagagctccgctcgttggtgccggagtcgggcgggtcctcgcgggcgtccaacccactatgctaccgctcgctcaactcggcactgtcgatctcgatggcgatggccgggaaaccgactcccgcagggaggccaccacaaccgcaagggccgaagacaactaatctgaagaaggcggcgaccgtagggggcaggaaggccgtggggaagcaagaagacgtgcatcagctgcggctgatgggcaattcgtacctccagtacaggttgctcaacgcccgggctgaggctgcaggcaaggccaaggcagttgctgctgagaaatccctctacgggctagaggagaagattgccagcctcagcgtgtctgttgccgagaagagggtagaggtgcaatggatgcgaagggagaatagattgagttcagtagtaaatgcgcagggatcactcgaattttgttaactgtatccggtatgctcctgatggtagtaagtttatcactgtgagttctgataagaagggtttgatatatgatggtaaaactggagaaaaaataggagagctttccactgaaggcggacacacaaggagcatatatgctgttagctggaatcctgacagtaaacaggttctaacagtttctgctgataaatctgcgaaagtatgggatatctttgaagatgcaagtgggaaattgaatcgaactttggtttgccctggtgtaggaggtgtggatgatatgcttgttggttgtctctggcagaatgatcatctcgtgacagtctctcttggtgggacatttaatgtgttctctgcaagcaacccagaccaagaaccagttacatttgcaggacatttgaagactgttagttctttggtcttctttcgtcaaagtagcccaagaactatactatctactagctatgatggtgtcatcatgaggtggatattgggtgttagatttggtgggagactgatgcgcaaaaacaacactcaaataaaatgctttgctgcagtagaagaagagcttgttacctcaggttatgataataaggtaagaaaaatcaacaggttgcccatacttgttgttgtcttcatatctagggcactggcctcccatgtagactgcagtttttgtcaaaaatgatttttttgaataagtaggcattatatccttcaagattttttatatggaaatcctaaattgtgagcatattgatttttactctatttcttaaatgtaaagttgtaaacttgaatcacctagaaggaaccgtgttaagaagaaataagcaactatgtcttttcttctggaaagataaaaggtgtttatctttgaaagctagaaaggtagctttctattatgtcacatcagtctaaaccagaatttaatcattatttataatgcacgtgcaatgagataataccaaaacaccttataatttggaatagagacttaacattttgttggctgggacattgggctatattttgcagcctcctcacttggcacagataacttcatttgttttccagagactgtattaatactttgcaggaataaacattgtgtcttgttatccattgcaatatacaacacttaagcccttggctgatagagtgattgtaaagattaactcttccgaggagaagacaactggtggaattttgcttccaacgactgctcagtctagacctcagggtggcaaggtagttgctattggaaaaggaatgataattggggacaataaagatgatgtcaacatttaggttcatttgcagaacaagatcatgtgcatgggacaacaacagggtgcactctacatcttggagaaaaatcttatttatacagtggtcaatggtatccatgtcagagtggtgctgggaagtacattagagtcatccgtcgatgtgcttgcatgctccagcaaaagtgttactgacatggtgaggatattccacaagttaataatcccaaccatactatacctgtcttcaagtttgatgttcgaggaaagcattatcaggccagactgtgtaaaatatctcataccgcataggttcctccaaacacagcagctgcctctgaagagaatgaagcaaattcttttgtcattgcctgcagaaagcatgtatggttatgagcatacatggagtgccattgaaagcaataaaaggatcatcttacaatcaggatcagatcatgccagagaattgctatcagatgatgatttccatgaagttcttcaccgtagatactatgatctacagcacctcgcaactgaacttgctgtcaaccctgacaatcagcagcaacatgaaatcatccccgaaacagatgtggttgatccttccatattaggcattgcaaaaggtgttgagatggttctacaaagattgaagagagtggaacaaggaataagggacctcaaggaggaaatcgcaagcttgaggtactatgagtatcaccttttgactgaactccacaggaaaatggactacatgatgaattacaacacccagttggaggagaggaaagtgccacagatgttttatcttgttagcctggacaaccggtccaaacagctggtcacaagaatactgcctgggatgcggtccttacgggtgcacatgctatgtgaattccgtagagagatgcatgtagtggaagatcagcttggctgtgacctgattcaagtggacaaccagacggtgaaatccttgctaccttacatgagtaagttcatgaagctgctaacctttgctctgaagatcggcgcgcatttcattgttgggatgggagagatgatacctgacctgagcagggaggtgtgcgcctgctggactcctcggccttgtacgacacaactgcatctgccatgtccgtgggggctctggtattctcagtacataccaaatagcatgcatacatcaaggaaaaatgtcgaacaacaactcagaagataaattcaagaactggttgcttcaacaagagtctgtccatgagaatggcatgcaacattacttgcccttcgattgagataggtggctacggtgatgctttgttgaacctgatatacgcatctccatcaagccagttcgaagagctcagtttagaatgtgagctagatgctacatgtaatcattctagagtgaatgattctcaagttcacggctcacctatacctgagagtaatggaagattatcgacagctgctcagactaaaacgatgtccacagtctcagaagatgtaattctcattggctcatctttcagataccaaagtagccttggtaacaacaataagagggttgggctttttgatatgggtgatggaagtagtgagcctgctgctgaggacaacaatcaaatgcatcaggttcttctacatgccaccattcaatggcagatgttcaatgtactatccactagagcattggtgagatgaccatcgagggtgacgatgtacatgaattcttcatttttctcttacatattattgaattatatacttgagtcttgacactgagaatgcatcagttacatggtaatttggttttcttcttggtttatgtatccttaacttttcttcttatattgtgtctctaaatctattttagattttagaaatgaatgtacgcatatcttaatgagtgaagtggtactatcatggcttgttgtaattataacgatgattttagttgaacctctacacttttggataaacattagatctttaggctaactgtgattgcagtcagaggtttaaaatggatcaatagtatatttgtgtaaacaaaaaaggatattgttcatggggttatttcatcagacactaaaccaaaaccattttgtcttgtgaattgtacttctgtagggggcacgttcattgacattagagttaactgatgtctggtctggtatcaaggaagagatgtttttaactatgtttacactaatcaagttaatgaatttggtacatgtcataacatctaagcctttgtaagtttgaatattcacttgtgacttaatcaactacttatagcttttattaggctgtatattgctcagtcctgtaagtttggcgttacacattgcacatttgctttaaaccaatggcttttctatcaataagaaaaactaggaaaatgtagttgtgattatgataattttgagcgaccatacttgggataaagtttgaatgttttctcttttcttaccaaagttctaacatagctttttcacatttcttccatggtatacagtttgctgcaggaatccacaaactgagtcttttcttcggcttctggaactcccatatctgtcggactcatctaaatctgaggatatgtctcttgtgattggttaatatcatttctgtttatatttatgaatttcatttcgtatatatgtaaagagaactactaaactagctagcctaagttttgttagtctcattggtttcctctgtagagagtttatactatgacttgtgcttgtagaatttttataatttatggtttctcaacttttgatatatagtgtttggtagaaatgaaatgagtcaagctcttttccaggaaacacacttgatggtgaagatatggagctaccagatgaagatgaggatgctttagaagatgacgagtgaaggacaacactgttgaacaagtaccattgcacctatcatgtttgctgcagggtttgcgatagattacattgtctttgttggttgcagtattccattgtttgttgggactcgtttcacttatgttttataccgtcactgtagtcttatgctgtaagctttgtacttggtgcttaagacttgcaacaatcgatacttcatggttgtggggttcatgatacttaagggctttgcgtcttatctc

SEQ ID NO: 32608 - DNA, 1804 bp, Zea mays
  Clone ID: UC-ZMFLMO17009E12_FLI
cccgcccccgccgagaagcggaagcagcgggggcgacgagccctctaatgccaccccgtgggcgagccccgactggctcacgtctctctcgcgcgcggtcggccggagcggcggcgacgactcggggatccccgtcgcgtccgccaagctcgatgatgtgcgggacctcctcggcggcgcgctcttcctgccgctcttcaagtggttccgcgaggaagggcccgtgtaccgccttgccgcggggccacaggactttgtcatcgtcagcgaccccgccgtcgccaggcacgtgttgcgtgggtacggctcacgctacgctaagggactagtcgctgaagtctccgagttcctcttcggctccggcttcgccatcgcagaaggcgacttatggacggtgagacgcagagctgttgtgccttccctgcacaaaagatttctgtccattatcgtggacaaggtattttgtaaatgtgctgagagactaatagacaaacttgagccatatgctttgagtggggaacctgtcaatatggaagcgaggttttctcagttgacattggatgtgattggtttatcattgttcaactacaattttgattccctcacaacagatagtcctgtcattgatgctgtttatactgcactcaaagaagcagagcttcgttctacagatcttttgccatactggaaggttggtttcttgtgcaagataatcccaagacagataaaagcagagaatgcggttacgattataaggaacactgttgaagagctgattatgaagtgtaaagaaatagtggaagctgaaaatgaacagattgagggtgaggaatatgtaaacgaaggggatcctagcattctacgcttcctacttgctagccgagatgaggtaagcagtgtacaattacgtgatgatctcttgtcaatgttagttgctggtcatgaaacaacaggctctgtactgacgtggacaatctatcttctcagtaaggatccgactgcactgaggagagctcaagatgaagtagatcgtgttctacaaggtagactacccaaatatgaggatgtaaaggagctgaagtacttgatgcgctgtataaatgagtctatgcggctgtatccacaccctcctgtacatttcttgtgctagtgacatgcaactttataattggttttgttgactcatggactaattactgataggtgctgttacggcgtgcaatagttgatgatgttcttcctggaaactataaggttaaggctggtcaagatattatgatatctgtgtacaatatacataggtccccggaggtctgggatagagcagatgagttcattccagagaggtttgatttagagggacctgttccaaatgagtcaaacacagatttcaggtttattccattcagtgggggtcctcggaaatgtgttggagatcaatttgctctcctagaagcaatagtggcacttgcagttgtgttgcagaagatggatatgcagcttgtgccagatcaaaagattaacatgactactggagctacaattcatacaaccagtggactatatatgaatgtaagcctgcgtaaagttcagcaagaagctgagttagcgctgagcgaatcgaaatagatggaaacgacttcagacaagaatagagcacctgaactggctacaaatatgtttctccagtttctcgttgaaagctctactgtactatactagatgtcaatgcgtcggcatacagattacagattcgcttctcttgaaacatgaaaggatccttcgctggctgattcgtttggct

SEQ ID NO: 32609 - DNA, 1169 bp, Zea mays
  Clone ID: UC-ZMFLMO17009F04_FLI
ctgaggtgactggcgtctcttgtcgcgagccgccagaagcttcggcccctgacgcgtgggggccccgtccgcccccgcccccgtccccacgttgccggccatggcggggcagccaccgccgtccgggggctccgaggacgacttcctcgagcacttcttcgccttcccctccgcggcctccgccggcgctgccgggggccacgcgggcgccggtgttggcggggaccaccccttccccctcgccctcagcctcgacgccgccgccgaggccaagccggaccgtgaccccgtgcagctcgccggcctcttcccgccggtgttcgctggcgccggcggcgtgcaccagccgcacctccgcggcccaccgcctccgcagatgttccaggcgcagccgaagccgggcgagggaggcatggcgccgcagccgccagccccgcggcccaaggtgcgcgcgcggcgggggcaggccaccgatccccacagtattgcggagaggctaaggagggagagaattgcagaaaggatgagggcattgcaggaattggtccccaacacaaacaagacggatagggcagctatgctagatgagatccttgattatgtgaagtttcttaggcttcaagtaaaggttctgagtatgagcagactgggtggtgctggcgcagttgcgcagctggttgctgatattccactctcagtcaagggcgaggcaggcgacggcgggggcgcgcagcagcagcagcagcacgtatgggagaagtggtcgacggacggcacggagaagcaggtggcgaagctgatggaggaggacatcggggcggcgatgcagttcctccagtccaaggcgctgtgcatgatgccggtctcgctcgcgatggcgatctacgacacccagcaccccctggacggccacggccacggccactcgctcaagcccgagcccaacgcgtcatcctagtacagtaacatcgtcgttagcgtgccttccaattccaacccaccccccttctccctaaaaagtactgttaggcgccgatattatccggaagaaaaagagaagtgtatgatataccgagcgtgcgtttcctgtgtgctgacccgtgggataggaaaggaccgaaaattgttggtatatgatgatgtagcctcctgtttgcctgttctgtttc

SEQ ID NO: 32610 - DNA, 718 bp, Zea mays
  Clone ID: UC-ZMFLMO17009H10_FLI
atttaaactgctgtcctttttacaatggactttaataaaggtcttacattttaggataaagagtcacggggtaacaaatgtgagatgaatgctggtcagttatctgttgttatcctcttcttcatgcccagtctgtgtgccccccctggggctggctctgtggccgtggatagcaaatgcgcctctgcgagtccagagcaccagcgtcctatcgtgcttcccagtattcaagaacgctgtgggaagaagcaagcaagcaagcagcaaccacatggaggtggagtcggctctgcgatgccatgccacccagctccacgtgcatcaggtacaagaatctgggggatatttgcctatccgcgaccagcctttgcctgagaggcaggggaccatggctgcctgcctgatgagcacgaggcacgagcagcagcagccgccggccggccagcggccaggcttttgacgcactggatgcaggctggccaaaggactgacaccagctcgatcagctgaccggcatccatccgcccgccacgccagatcccatgcttgtttgataacaacagctcatgcatactgtgaaaaacaaaaggaggagcacagactcgaatccgagtaaaattcagcagtgtgaagccatagcagcctgtgaggttctcatcaagctagctggacctctgtcagcaaaacccagagctggaatctcccacctcgctctgct

SEQ ID NO: 32611 - DNA, 688 bp, Zea mays
  Clone ID: UC-ZMFLMO17010A04_FLI
tggtgggatggccgcccgtgcggaactaccggaagaacaccctcgccgcgagcgcctccaggagcaaggcgccggcggcggaggacgccgcgtctgcggcccggcccatgtacgtgaaggtgagcatggatggcgcgccctacctcaggaaggtggacatcaagatgtactccagctacgaggacctctccgtggcgctccagaagatgttcagctgcttcatcgctggtcaaagtggcctgcataaatcatcgagcaaagacaggctgactaatggctcgaaggtggatgccctcaaagaccaggagtatgtacttacatatgaggataaggatgcagactggatgcttgtcggtgatcttccctgggattattttacctctatctgccggaagctcaaaatcatgaggggctctgatgctgttggaatagctccaagaaccatagagcagacaggtcagaacaaataagcttggtctttgcctgcacccacgcaagaaatctgagctagctggaaggccatgttgaaggcttaaatagttgctcggaattatcaaaagtcgtcaaatgttagtgtagtttccacgtgttcttgagacgtgtgtatttgtatgtctgtgatgtgatccgtcagatctgttcttgtgcccttcaaaggccaaatcagggagctctctgcttcctgtgt

SEQ ID NO: 32612 - DNA, 1025 bp, Zea mays
  Clone ID: UC-ZMFLMO17010A06_FLI
ctctggcattcacccttttttttctgtggccatgtcgtgcacgtacgtgcagtcgatccccaggacggtgctcctggacacgaagacgggcagcaacctgctgcagtggccggtggtggaggtggagaacctccggatgagcggcaagagctacgacggcgtcgcgctggaccgcggatccgtcgtgcccctcgacgtcggcaaggcgacacagctggacatcgaggccgtgttcgaggtggacgcggagggcgtgcgcgtggcggaggaggccgacgtgacgttcaactgcagcaccagcgcaggcgcggcgagccggggcctgctcggcccgttcggcctgctcgtgctggcggacgaggacttgtccgagcgcaccgccgtgtacttctacctcgtcaaggccacggacggcagcctcaaaactttcttctgccaagacgagctcaggtcatccaaggcaaacgatctggttaagcgagtatacggaagcttggtccctgtgctagatggggagaatctctcggtcagaatactggttgaccactccatcgtggagagctttgcccagggcggacggacgtgcatcacgtcgcgcgtgtacccgacgcgggccatcaacgactccgcccgcgtgttcctcttcaacaatgccacgggtgtccacgtcaaggcgaaatccgtcaagatctggcagctcaactccgcctacatccgcccatacccagcaagttctctatgagcaaagtgaccgtaaccgacaaataggcagcagtattattgcatgcttgttaattacatgcatgggctcatttgtagaatagtgattgattaatttattcgttggctcttgtttgtatatcggtcatctatctagagtattacttgagcgatttaattgtgcgtgtgatgctcagatcaagtagcggttgaaaatgagcttgaaaaccggcattgtgaaatggtttcaattttttttgacagttttcgaaaaggttccaatatggtttgaacgtgagtttgtg

SEQ ID NO: 32613 - DNA, 2004 bp, Zea mays
  Clone ID: UC-ZMFLMO17010B02_FLI
gctgttcgcatcgttgacttactgaacactggcagtgactatattgccgaggtagaaacgctacagacataccaaatgcagacagacagtgaaagaaatgaagtcaaggacatgtcaaatagacttgaagcatgtgaactttcgactgctctaagtaagaactcatctgatgcaatgtatccaattgttagcaaggaatctttgctgcaagaaatgttcttcagtgcaaagacaacatcagggcgcctacatttggctaaggagttattgaagcttcctacagatgttcttaaatcatttgctgggtctaaagaaggactaagtacgctaaacttttggatacttgattcacttgggaaaaatgctactcaactactgcggcactgtgtgcgtttgcttgtgcttgtttccactgatctggtagctgtacgtttatcaggaattgggaagactgtaaaggaaaaggtttgtgtgcacacaagccgagatattcgtgctatagctcggcagttggtcagtgtgtggattgaagtttttcgtagagaaaaggatagcaacggcggactcaaattgctgcgtcgaatgccatcaattgaatcgagtaagaccaagagtaaggatctgcaatcaggaaagcctaccttacgtgtgccaaatggaactttggacaacaataaagtagtgtcccagcgccagcgtacaagattcgcaagtagtcaatcaccaccaaagataaacaagaagtatgataacaaggaaatgaaattggaaactgtgacagctgctatgtctgatggcaagttgctttcccaaaagcaacaacatggtattgaatctaaggtggaggaatgtggcattcctatgtctgaggaagaagctgctgcattcgctgctgctgaggctgctcgagctgctgctatagcagctgcacaggcatatgcatctgtagaggcagagataagtgtgcctcgtgagcttccaaagataccgtcgttccaatcttttgtgatgcgtgatcaccatttggacgaatctgatgcaagaaaaagaacattgaaggatgattttgggagacttgagtgcatatcagaaaatgattccaagaatggcgaagttaaggatttgcctgaaaacaccaagtacgctgatggtgatagcttgaaaatgtctcatgataattttactcagcagagccactcaaatgagacagcttgcctagcaaacgctcaggatcattcaacagatactgttgttgtagacggtcggtttacaagggcatgggtggatactgatacaatctgcattgatggtgtcaaggatcctctagccattgagaggtggcaggcacaggcgatggaggctgataaagaattctacagtcggatacgcatacctgatgaagatgattcaagtagtcagaagcacacatgccgtagttctgcttcacagggtgccgatagcaaacctgcatctgagcggcaatcaagaggtgtggagcatataaaacagggtctcgtgaactttatagcctcgctgctgatgccattatatagaggaaaaaagatcgaccgagaggggtacaaaacaatcatgcgcaaatctgttaacaagatcattgatacatgctcagaaggagagaaatcaatgactactcttgagtttcttgatgataaaaggaaaattaagattgaatcctttgtgggcaaaatggttgacaagcatttgcatgttgttagcaagtcggccaaaccttaagattcatatgtgtagtgaggtgttctctgcaaagggatctactctcttttaaaacacctatgaatcagtgattgttgatccaagtgaactaaaatctcacttcagaagccagcatgactcatcagtgttgccgcaagatcaacaagaacacatattacccagactatatgcgtggtccagaagagcattgaccagatcaataccatgtaattctgtacttatataggcatcatttccatcttcgtagct

SEQ ID NO: 32614 - DNA, 806 bp, Zea mays
  Clone ID: UC-ZMFLMO17010C02_FLI
gacgaagatgaccgggatggagtaccttctgagcgaagtgatggagccgcacctatttgtgatccggaagcagaagcgggagagccccgagaaatcaagccccatgctcgcctactacatccttgacggctccatctaccaggcgccacagctctgcaacgtcttcgcctcacgcataagtagggctatgcatcatatatcaaaagcctttaccatagcatgttcaaagttggagaagattggaaacgtggaaaccgagcctgatgcagtagcctctgaatcaaagacccaaaaggaagcaatcgacctgaaggaactcaaacgaattgatcatatcctgtcatccttgaaacggaagataggggctgctcctcccccacccccttatcccgagggctatgtcccaccatcagcagaacaagagaaagcgccggatgatgtggcagcatcagaggcaccgcctcaacttgaccctatcattgatcaaggtccttcgaaaagaccaagattccaatgaaagatttgtagcttaaacctgctgactcgacaacttcctgtatgcttttaagttgcagacgtggactttataaatccattgttgccggttggttatttacaggccaaagacagaactaacctcgtgtcatgatatttcgttctctgagttactagcttgaatcttgtagattggccagcgccatttgctccgggcttgtaatcttgtagataggccagtgtcatttgatctggtctatctactgagctgttataacttatgaggtggttatagtattaccttggtgcag

SEQ ID NO: 32615 - DNA, 1400 bp, Zea mays
  Clone ID: UC-ZMFLMO17010C09_FLI
gctaagtttagcggtaatagctcaaaagtcaaaggaaatgcccgccagacagtcaataacgacagtaatagtggagctcgatcaatgagaggccgacaaaaggatgcaccagataaagaggataataagccgaacaaagatgacattcagaagcgcaaggtaatgatggaagctgaagcaagagaagaaggtgaaatttctgaatcagaggcagagacaaagtatcgtctggacaaagaggagaagtggctcgaatggtgctctgaagttttaaatgaggaacaggaaactttgaagcgcctggacaggctgcagaatacaagtgtaaacctcccaaaggaaaaggttctttcaagaatccgcaagtatctcctgataattggggacaaaattggtgaagttgtccggcaacacagtgaatcttataggcaatcccgtaagtgtagccgcacctcccgcatgaccatgaggttatggaattatgttgccaccttttcaaacatgtctggggagcaattgcatgatctctatttgaaacttagtcaagaccaactggaaggtggagttggcccatctcatggtgccaatttcacatccattccttccagcaagggaggtaactcaaatcaacttcatcctacaagaaaccataggccaaccaggtctctccagtacaattctgagtctttgcacaataatgagagctctggaagttctgaagcctggaagcgtcgacggagagcagaccctgataatcagtttgacacccagcctttgtatcaacctccaattatgacaaatggaaataggttgcaggaatctagtagttctgcaggaattcttggttggggtccagttgaaatgagacggtatggtaatgaaaggccaaagcgtggtgttcatcctagtcattttcctactgggcatggacctttgttgtagctgaaggaattagatgactcgaacaaccttgtccactttggcataactgttcccagtgaatttcagcttccatatagttacaaatggtggaactctgtcggaattgaaattctttttttccataacaagaaggaataaaaagcaagacctgacctggagcgcagtttgaatactgtccctcaaaggtaatgccaggactccagaggcgacgcagggatttgttaacagctacactgaatatccttctgacaacatcacagtaaaacgaatacatggtggcttgtcaactgccaagaggattaatcgaggaaattttgtcgattcagttttgtgatccaatagaaaagttgggggtcattaggaaaaagttcatctcaacaatgatctatagttcactctatacatgtattatgttttacattgcaatataatgaaatatggttcagttattcccactc

SEQ ID NO: 32616 - DNA, 1816 bp, Zea mays
  Clone ID: UC-ZMFLMO17010E07_FLI
gttttctctgtccctcacccgccgccgcagaacgctgatggcccagcgctggcgctcgagggcgcggtgggactcagacctggacgaagatggttccccgccttttcggaagccgcgcaggggcgggagcgacgaggtggggaacgaggacctcagcctggagatcatcgcgcgcgcgcagcggaagcggcgttgggcgtcctgcggtggagtcaccgggttcgccaacctgctctcagtgtcctccggcgacgatgaggacgccgtggtggagctcgctgaggcggatgagccccggaggaatcagaagaagaggcagcactggaagcaaaggaaaaggcaacggaaggaggcgaccgctgctgctgcggctgccgtggacgaggaagagaaggaggttggtaccacccaggaggagcaaattgggacagcagaatcggtgctaactgaagatggggctgatgtccctacatctcacagtatgtttctgcggaagctccttgattcgagcttgagacctctagctttgattgcatgcactgaccagttcggccaaaagcttaagttgatcgggagaggtgggcagttcacttatacttgaacacttgacattgtgttacttctacttgtgaccagcgcataccaagatactttgatcctggggaaacattgttggagacttgctttaattgtagcgaggaaggacatgtagctgcaaactgcccaatgggaaagcggaagaagccttgctttgtttgtgggttgttcgggcacaatgcaaagcagtgcaaccagggtcaagactgtttcatctgcaaaaaaggagggcatatggcgaaggattgccctgataagcacaagaggaatgatcatcaatccacattctgtataaaatgtggagaaacaggtcatgatatgtttggatgtgccaatgattacccatcagatgatatcgagcaaataagatgctacgcgtgtaatcagaagggccatctatgttgttccgacttctttgacaattctctggaacaagttagctgttataactgtgcccaatctggccattctggtctgggatgtgctaagcaacgcagggaagctagtgctgtcacaaccccaaccttatgcttcaaatgtggcgaggaaggtcacttcgcacgcggctgcacgaagaatgccaagtccgatgggccaaaaggctggtcgtcaccacacagtcagaggaagggaagatggaaaaacgatggcaagtcaccatcacacatccggaggaaggaaaaatggaagaaagattccagtgctagatcagctcctcatgatgcctgtacaacaagcaaaagcaatagcccctctttcgaggaaagaatgggcgcatctaatcataaatcgaaatggaggggtggttggactggtgatgacgatctaccatcgaagaagtacaaacccaatggatggggttcaccagctactcccaagaggtcttacacgaatcaccagtacttgtctggtggtggtgactacttcactccccagtcctcacgaaggcacaaccatggtaccgcgtcacccggtgctaggaaacacaggttctcgtcgtcaatattcgccgccagcaacacccatgtccggttcaaaagaagctagccggatgcacgtgtctgtttttgttgcttgtttagccattgataacagttatctcctggggttgaactctagctgctggttcatgcccttagataggtgtcttgtctgagattacatatttacatatgtaagcgcggttgaaactgattatttctactgtgaacaaagcttt

SEQ ID NO: 32617 - DNA, 2563 bp, Zea mays
  Clone ID: UC-ZMFLMO17010E08_FLI
tttcgcaccagcgccggcacaggcaacgcagcaccgcaccgagccgagccacttagcgagcgagggaacagcctccacggcgaggagagaatggggagaggagggatcggaggcgcggcggccatggccatggccatggagaccgccgatcctgcccgtgcattcgtgaaggacgtcaagcgaatcattatcaaggtgggcacggctgttgtcactggcatgaatggccgattggccatggggaggctcggttctctctgtgaacaggtgaagcaactgaattttcaagggtatgaggtgattctggtaacctcaggagctgttggtgttgggaggcagaggctccaataccgtaaacttatccatagcagcttcgcagatctgcaaaatcctcagatgaactttgatggaaaggcctgtgctgctgttggtcaaagtgtcctgatggcgatctatgacacattatttagccaacttgatgtaacgtcatctcaacttcttgtgacggatcgtgatttcaaggatccaagttttggggaccagctccgtgagactgttttttcactgttagatcttaaagtagtacccttatttaatgagaatgatgccatcagtacccggagacagccatatgaggattcatctggtatattctgggataatgacagtctagcagctctgttggcagcagaacttaatgctgatcttcttatcatgcttagtgatgtggaaggactctatagtggtccaccaagcgatcctcagtcaaagattatccacacatatgtcaatgaaaagcatgggaagctaattagttttggagagaagtctagtgttggaagaggtggcatgcaagctaaagtgtctgctgctgctaatgctgcatcaaaaggtgtacctgttgtcattgcaagtgggtttgcaacggatagcatcattacagttctcaaaggcgaaaagatcggtacacttttccacaacgaagcaaatttgtgggcatgttccaaggaagctacagcccgagagatggcagttgcggcaagagactgttcgaggcgtctacagaagttgtcatcagaggaacgcaaacagattttgctagatattgctgatgctctggaagcaaatgaggatgcaattaggtctgaaaatgatgccgatgttgaggcagcacaagttgctggttatgaaaagtcgttggttgctaggatgaccctaaagccaggaaagataacaaatcttgcaagatccattcgtaaaactgctgacatggaggaccctatttcccatacattgaaaagaacagaggttgctaaagatctggtttttgagaaagcatattgcccattgggtgttcttctcattatttttgagtctcgtcctgatgcattggtccagattgcatctctagcgatccgaagtggtaatggtctccttttgaaaggagggaaagaagttatgagatcaaatgcaatattacacaaggtcataactggagttattcccgatactgttggcaaaaagctcataggccttgtgactagcaaagaggaaattgctgatctactagcgcttgatgatgtaattgatcttgtcattccgagaggtagtaagtctctagtttcccaaatcaaagcaacaactaagattccagttttaggtcatgctgatggtatctgccatgtttacattgacaaatcagccgacatggatatggcaaaacggatagtattggatgctaagattgattatccagcagcatgtaatgcaatggaaacactacttgttcataaagatcttaacaagagtgagggacttgatgatctattagtggaacttgaaaaggaaggagtagttatttatggtggacctgttgcacatgacaagttgaaagtaccaaaggtagactcatttcgtcatgagtatagctcaatggcatgcacagtcgaatttgttgatgatgtgcagtcagctatcgatcacataaatcgttatggaagtgcacacacagactgcatcatcacaactgatagaagtgctgcagaggcctttctgcagcaagttgatagtgccgctgtgtttcataatgcaagcacaaggttttgtgatgggacgcgttttgggctaggtgctgaggttggcataagtacagagcgcatacatgcccgcggacctgttggagttgatggacttctaactactcgctgcattttgcgcggtagtggacaagtggtgaatggtgacaagggagtggtttacacccacaaggatcttcctttgcaatgaggcaaataacctccgttgtggtcgtaacgaatggctggactccccttttaagtacccttttcttttattccatgctacaaagtttggtgtcgtaacaagcagaatgcctatttagtaggcattgatgtaatcagaccattttgtcgtggtgttccttgtcgtataaaacatccgagacatctgtattagaggcgcggtagctagttgatacgcgattgttctggatgaaatttggatctgttccaatgcaatgataatgcatgtgtgatgaggtcct

SEQ ID NO: 32618 - DNA, 776 bp, Zea mays
  Clone ID: UC-ZMFLMO17010F02_FLI
cgaccaccacgcgcccaccgcgcccgtcccggccgccgcgcgcccgcagaagcagcacgccccgcgcccgtgccaccagtcggcccccgtcgccgtgccggcctggcccaaggcgatgacggcggcggacaggcgccgccgcgaagcggagctgcaggccgcggacgacgaggacgacgacggcgagcccgtggtgccgccgcacgagatggccgcgcggcgcgctgcggcggcggcgtcggtcatggaaggcgccggacgcacactcaagggacgcgacctccggcgcgtgcgcaacgccgtgtggcgcaccaccggcttcctcgacctgtgaaaaggacgttccttgcctttggaggtttcgtttcgttcgttcgctggccacgtcactccattccacttgagctgcctgcctcggacggggaccttggccgctgggcagcttcttcttgcgtagcgtagtgctgtgccagctgctaggcactgaaaaaaggtgggggtttccttactaggtttggagtactactaggggcgttatatattgagctaaatttgctggggaagtagccgcaggggcttcggtattttcatgtaagagaactgctgtgatcagtctgcaactagtatgttttaagatgtctgcaactctttggcaaagaattttctctggagatgatgcagcatgccactgctaaacctgtggtctagtgtgcagaacagatgtggtgtgttcatagcttttgtattccactgtggctaatagagtgccttttttt

SEQ ID NO: 32619 - DNA, 1363 bp, Zea mays
  Clone ID: UC-ZMFLMO17010F10_FLI
tgttcaagacgtcaggtgttggtatttgggttgcaattgagtgattgggaaacctgattggacagaagcattgttggtcaaccaatgggaagcaatgaccctagcacaccctccaaggcttcaaaggcatcaaaacaagtacttgaaacagtggatcaacctccagctaccacatccagtggaacagtttcagtttaccctgaatggcccagctttcaggcataccaagcaattccaccacatgggttcttcccccctaccgttgctgcaaatccacaggcccattcatacatgtggggagctcagcccatggtaccaccttatgggactccaccaccaccttatgtgatgtatccacctggagcagtatatgcccatccctctacacctcctactatgcatccgtttagtcattaccctatgccaacaaatggacatgctgaaactcctggaaccgcgccaagtgctccagaaatgaatgggaaaagtgagcctggcagaacatctgctccatctgccaatgggattacctcgcacagtgagagtggaagtgagagtgagagtgaaggaagtgatgccaattatgaaaatgattcacattcaaaggacaatgatggaaaggaagatggcaattctcagaatagcatatcttattcagcatcacaaggagtgttaaaccaaaccatggcgatgcttccaatacaaccgggcgcaatggttggaggagtttctagctccacagctaacttgaatattggagtgcactactgggaagctccaggttctgcagctgtctctgcaacgcatggcaaagcaccagctggttcagctcggggagaccaatgggatgaaagggaactcaagaagcaaaaacggaagcagtctaatagagaatcggcacgcagatcccggctgcgcaagcaggctgagtgtgaggagcttgggcaacgtgctgaaactctgaggtcggaaaactcgtctctcagggccgagcttgaacggatcagaaaggagtacgaacagctactttcgcagaacgcttcactcaaggaaaagctggggggcagcagtgacccgattcctgatatgaatgaacagaacgacggcaacggcagcgacaagaagcaatctgattccgatgcccagcctgggagcgagtcttgacccgtttagctcaggatccttgggaatgcacattgctatttattttctcgaacatggttgaacagaacataggagaaaaagaattgtttatgtaactcttaccccttgactgcctaatgtctctgacggcatgtatataatgtatgccctcactgctgaactagtactagtaattgaggaattgcagatattgacagct

SEQ ID NO: 32620 - DNA, 1138 bp, Zea mays
  Clone ID: UC-ZMFLMO17010G02_FLI
ggttcgcttctgcctgcgtgctctgctggagagctagatggcgatgccgtccgggtggaggggtatcctgggcttccactacggcatcgtgcaggcgccgttgggccccgacatctccggccccgagctcgtcgccgccgtggcgaacgccggcgccatcggcctcctccgcctccccgactggccggcgccggatcacgtcagagaactgatccggaagaccaggagcctcacgtccaagccgttcggggcggccatcgtgctggccttcccgcacgaggagaatctcagggtcgtcctggaggagaagctcgacgtgctgcaggtctactggggggacttccccaaccaccgggtccaagaggcgcatcgcgccggggttaaggtcttgcatcaggtcggcagccttgaggaggcagctaaagctaaagaagccggtgtagatgggatcattgttcagggacgtgaggcagggggtcatgtaattggtcaggaaggactgtttccactgttgccacgagtagtagatcttgtttcagactcgagcattccagttattgccgctggcggaattgtagatggacgtggctatgttgccgcattggcactcggtgcccaaggtgtttgtttaggaactaggtttgttgctaccgaggaaagctttgcacatcctatttataagcaaaagctaatcgagatgagtcacacagactacacaaatatattcggacgtgctagatggcctgatgctccacagcgggtcctggaaacacccttctatgatgagtggaagaataatttcccagaccaggaaacagaggaagatcaacccatcataggccactctatcatccatggtgtgcacaaggatattcgtcggtttgccggtactgttccaaacgcgacggcaacaggagatatcgacatcatggccatgtattcgggtcagggtgttgggctaatcacggagatcataccagctgctcaagttgtcaaaagtctggtcgctgaagcgaaggaagtcatcagagaaaagctttctggttaccaatagaatccttcctgaactgcaaactagaagtatctgtgtgtgagtagtcaccaatcagaataatcggaagcaccaaggtttaggttt

SEQ ID NO: 32621 - DNA, 3333 bp, Zea mays
  Clone ID: UC-ZMFLMO17010G10_FLI
ccgggtatagggtttttagcgccgcctcccacctccaggtccccctctcttccgcggttccgccatcgcgtcgcgaacggcggccagaaaaaagaaaaagaaaaaaaaaaacagctcgccgcaccaatctcccctaccatatcgatcgaccctgcaaggtttaatccaacagaattccaccggaaatttggtgaagtgctaatcgcttgcggcttgcctgcccggtctcgtggctttgtgctgctcccgctgtggtgaggaaccctaggatggcgggggtttcgatggcggcggcgcctgagggggtgctgcaccgccggattgagtttcatcttgcacggagaccgcatggctctgtggcggtgggcggcggcgggttccggatggagacgctgaacccggacgccgctggtaaggtggggcccggggaggcggtcgggagcagcgagggggatgcgaggaggccggagaagggagacagtggcgggatcgatccggagctcagcgtcgcaaggatctacctcgggagaattggtgctggattggaaaatcttgggaatacctgctatctcaactcagttctgcaatgcttgacgtacacggagccgttcgctgcctatttgcagagcgggaagcacacgtcctcatgtcgcacatccggattttgtgcattatgtgctcttcagatacatgtcaagactgctctagaatcaactggaaaaacagtgacaccatttcgtattgtcaagaacttgcgctgcatttctcgcactttccgaaattcaagacaagaagatgcacacgagttaatggttaatttgcttgaatccatgcataaatgctgtttaccttctggggtatcgactgagtctcaaagtgcttatgacaaaagcttagttcacaaaatatttggtggccgccttagaagtcaggtcaaatgcacacgttgcttacattgctccaataaatttgatcctttcttggatctcagtcttgagattgccaaggccacgactttggtgcgggcacttgaaaattttaccgaggatgagctactagacgagggtcaaaaggaatacgagtgtgaacgctgcaggcagaaagttgtagcaaagaaacgacttacaattgataaagcccccaatgtcttgacaattcatctgaagcgcttcagccctttcaatcctcgtgagaagattgacaaaaaagtggacttccaatcaattcttgatttgaaaccatttgttagtgactctaaaggaacagattttaaatacagcctttatggtgtcctagtccatacaggttggagcactcaatcaggccattactattgctacgttcgtacatccagcgggatgtggcacaatcttgatgataaagaggtgcgccaagttcgtgaagcagacgtattgaagcagaaggcttatatgttattttatgtacgtaacagtattgggaagtcggtggtgtgcaaagataataatgctgctaatttgctcaagaagaaaacctctgaaaaaatctcaagtttgaatggtattgcacaaaccaatgtaagagcacaaaatttgaatggtgtgtctccatttggtgataagacgcacggcacaatcattggctactctacaatttccagcaagactaaaacaatccactgttcaaagaatgaggtcaaagctgaagatgctccagcctctcaaaacaatgctctaccttccacacaagcccccatagctcgaaatgatgttggtatcttgccaactaaaccaatgcagtttgctgtaaaaaatgaggagaaaacctcatcccaccaacctgcgccatttacaaatacttgtggtgaacaaacagttgttgggaggcccttgcaggaaatggaacctaaggctggtgcaggggaaaatacttctgttgtctctgctgttgctaatgatgccgctacattgtccaaggcagacaaactaacttctcagcctcaaacagctccatcttccaagccaactgccaatgtaaaggacacagttactgagtttgctacactgtctttatcaaagaaggattctgttgtttcaaatggtgctgtgcttagcattggatgtctcacatccggtgagaaagcaatgaacttatcagaatctgtggatcaagctaatgaaatcacaaaggcacttcctacgagtcagaacaatactgcaccagtaattgctcaagcagattgtggagtagagatcagctctggtgtcatcatgcacgttgctgtgtctgcttcatgcaatggaactacagagaaaaaggtgaattcgaagtcaaagaagtttgtgaggtatcctgttgtgaacatgtggttagggtccagacatctaaagccagggaagaaagcgaaccgcaagagaagtaaaatgataagacgtgttgtagcctgcaaggacgcggcaaatttatcttgtttgagtgagcagctgacgtcaacatcgtccactgcatgctctgaaaccgtagaatgtacctccagccatcagaaacggtcacatgctagtgcaaggtccaaagatgacgcccagtcctcgcaaaacaagcagaaggtcgacggagctcgtgtcggtgctggcacaagtgcaccttcttgcagtgccggcgttccaaagtctgatccgaactcttccacagatgctaaggttgtagcgacccagcctgccagtattcgcgcaacggacctgatggaagctaccgttccgcgctgggatgacgtagacgtgccaaatataaaggtcgctgagccgcagtccaaacgcaagagcggtggctacatcttagatgagtgggacgaggagtacgaccgagggaagacgaagaaggtgcggagatcaaagcaagactttggcgggccaaacccgttccaggaggaggcggactacgtatcgcagcggaggacgaagcagaaatcctaccgaggcaagtcttggaacaagcgggcctaacacggtagtagagggggagttgagagaatacgcgagagagaatccctggacgcacatgctgtttgttgttacgttttagcacccattggtgagggagatttacgtttaaaaaccatatccgtcgtcggtacggtagtccccattagttgtcgacgatatgacgttttgggcagttttcgtagaacatttgaaacatttgttctgtttagttgagttggggggaacaaaattggcgagactattttgctgcattctgctctgttgtttagttactgatgaagaataaaacgatggtggtgatcagttttatgattcagtgcttgccaatgcgatctttatccttttgggaagt

SEQ ID NO: 32622 - DNA, 686 bp, Zea mays
  Clone ID: UC-ZMFLMO17010H03_FLI
agggctattcaggtttttctcatgatcaaacatcaatttaccatcagaatgataaaagattgtattctcaagtcaatttgcttccggagattacaccagaaaaactaggaaaatgttgctatcgaatctgcccgtaacagaacattgaccaaaactgagactgatcggggcaaaaatacatttgtaaagggtcaaaaacaccataaactcttgctttaatctgccagctatagtatcttacaaaaggagaaaaggaagtatcttctacattctagacagagaagcggtggggatggtggtgcgttgcctataacatcagggaaaccacaaaagatacagcttggaactcctcgtctcaacctcagcaaagaaaacaaaaatgtcctcaaaataagccgcccgatgcgttagggagtagaccaccaagatccaattgacacctaaattgtcttaagtagcttctgaagaactgcatgaaaaactactcatgtggtgaatgtttgccctcaaagtatgatctcaggcgtttaatgagattttccatcagtgactccggaacttttgacctaaatattgttgcagaatctgacactagctgctttctcattgcatcaaaatcttgagtaacgtctgaacttagaactcgacgcctcttttgcgagcgcataaaattatagacatcatcc

SEQ ID NO: 32623 - DNA, 623 bp, Zea mays
  Clone ID: UC-ZMFLMO170112A10_FLI
ctccggtgctttggcccctcggagttttccgttgccgtgaccatcttcggcgggcgtggccatgccgggacatggggaaaggcactaggtgcagaggtctatgactgcaacaacatggtggagcaggagctgcctggaggcgggctcctcgtataccagagcttctgcgctgctgaagacgctgttgctacctcgcccaaatctgttttccactgctttgacggcgagaacgtggagagtgctcctcctcctatgaagaaggactacaaactagctaatcttctctgctgggaggaggaagcggatgccatggaggagaaggcgggagtgcttgatgagtaagacgggcttctggtgtcgatttgcttctgagttgtttattttatatcgtcgcaatttcgtggttgtcgtttggttattctgtgaagcagccaagccaggctattgttatgaaaatttgtcgtctgtaagcatgtgaacttccgatgttgccacatgctggatcagtctgaataagtaagtatgcagctctaggtggtcagctgcgtctaccacaatgagcatgtacgtatggagaaatatctgtgaacccattttgtttatgaataagatttgtttttttt

SEQ ID NO: 32624 - DNA, 1477 bp, Zea mays
  Clone ID: UC-ZMFLMO170112B05_FLI
gttggtttcgtggagaccctagagaatgatcttttggagcttcgaggcaagggtattgatgcacagattgcttctggtggtggaaggatgtatgttaccatggaccgttatgagaatgactgggatgtggttaaacgtggctgggatgctcaggtgctcggagaagcaccctacaaattcaaaagtgcacttgaggctgtgaaaacactgagagcacagcccaatgctaatgaccaatacttgcccccatttgtgatagttgatgacagcggcaaagctgttgggcctgtattagatggtgatgcagttgtcactatcaacttccgggctgatcgcatggttatgcttgctaaagcactagagtatgcagattttaacaattttgaccgtgtacgtgtccccaaaattcgatatgctgggatgcttcagtatgatggtgagttgaagcttccaagtcgctaccttgtttccccaccagagatagatagaacatctggggagtacttggtgaagaatggcatccgcacctttgcttgcagtgagacagtgaaatttggccatgtcacatttttctggaatggtaaccgctcgggatactttgatgaaactaaggaagagtatgtagaagttcctagtgacagtggtattacattcaatgttgcacccaagatgaaggcgcttcaaattgctgagaaagctagggacgctctcctaagtggaaagtttgaccaggtacgtgtcaacctgccaaatggtgacatggttggtcacactggggatattgaggctaccgttgttgcttgcaaggcagctgatgaagctgttaagatcattctgaatgctgtcgagcaagttggtggtatttaccttgttactgccgatcatggcaatgctgaggatatggtgaaaaggaacaaatctggcaagccgttgctcgacaagaatggtggtatccagattctaacctcgcatacccttcagccggtgccggttgccattggaggccctggtcttcaccccggagtgaaattccggaacgacattcaaatccctgggctcgccaatgtagccgcaactgtgatgaacctccatggatttgaggcccctgctgactacgagcaaaccctaattgaagtggctgacaactaaatactggccagctatgtccaattttggttctatagttttgagaagggatatggccatgccattcaataatttctgtttgcaagcacgttgctcaaactcaccaaaacattgagaaacgccttttgacttgcatttagatgctctatttataccgttgacaatcgtctcttctggcttttagcagtttgatggctatctttacttagctatataatgtatctgagactgcaaactttgtgtcagtcaaactgctcgaggttatatgctgtttgtgtgggtcatcacgtgtgattaccttcgcacgcattgacgcatgaattgtgttcac

SEQ ID NO: 32625 - DNA, 1732 bp, Zea mays
  Clone ID: UC-ZMFLMO170112C05_FLI
ctgactattgtaggggcatccaaagtgctgtagctgagattattccgggagtccgtcatagaatgtgtttgtttcagataatgaggaaggccgcagaacgtttaggtgggctgtcagagtacagagctatcaacaaggcgatgcataaggctgtgtatgattctttaaccattgatgagtttgaagaagaatggaatactttaattacatatagtgggcttcagagcaatgactggttaagatcactttatgaatgtcgatcttcatgggttcctgtttttattaaagatacattttgggcaggaatgtctactacacaaagaaatgaaacaatcactcctttttttgatggatatgttgatttgaaaactaccttgaaacaatttcttgtcaagtatgagatggctttgcagagtaaatatgagaaggaggcccaagcagattttgagacgtttcataagcaacgcccaccggtatcaaaattctatatggaagagcagctctcaaaagtatacacacataatatgttcaagaagttccaagatgagattgaagccataatgtactgccatgtatctttaattagtgttgatgggcctgtctctacattcaatgtcaaggagtgcattttctttgaagatggtaaaaggactatgagtaaaatttttgcagtgacatacaaagcggacgaaaagaatattagttgtatatgtggaggtttccaattcagtggcatactgtgtaggcatagtctctcaatgctcaagtttcaactggttcgtgaaatcccacaacattatattcttgataggtggaagaaggattttcgacagttgcatgtgatgagacgccctccaagcgatcttgttcctaacaatcgcatggatcgatatgactatttatcaataagatgtttgcaacttgttgactctgcagtcctatcagataagtatcgccttgctttgaggttggtaagggagacagagaaatttctgctaaatagcaacacacatgatgatacacaaccaaggatcaagtctcgtgttcctaaagtaaataaaccaaatattgtgactggccaaaccatggtgggtacagctactggaaatggaaatgatggtctcaaaggaccagaggctacagcagtcacgcaagtaccacaatcccaaaagggaggagcagaaaaaggaatagttcctactggctacattggagtaccagctaatctccaacaatttgtaggcaatcaaacagcatttcggccaagcattgtgtacatggtaccgagtggtgttgatccacatgcttttggaaatgttatgatgccagtgatgtaccagcagatgttccaggtgcctccgaagccaaatgagaccgtgcaggatacttcagccaatggaaaaagtaagcgacctcgcggtcagaagctcacagagacatcccaacaggcaaatggaaccccagcatctgcatctggctagggtggactactaacattttgaacaggatttctgtacatacgttgacttcgttgacttcatgccgtgagaaattttacatatggacgctggcactaacaattacctcaatgttgtccaaggtatctggcccaggactggaaattgtctctcgcacactttctttttgtgtgtggctgatttctgcaagacaggttccacctaatgtacaagtccccctgtcctttttatgatatgtaaatgaatgttcttgg

SEQ ID NO: 32626 - DNA, 1220 bp, Zea mays
  Clone ID: UC-ZMFLMO170112C06_FLI
aaacccgcccttacagtcttatccatcgcggcctcgccgtccagcagctagctacgacctagctctgggcctctggccctgtgcctcgcccgagctgcagctccactccggtgcaccatggccgtcctgacgaaggtgcttctccgtctcttcttcaccactggcggcctcatcgtcttcctgttgtgtcccgcgtcctgccttgctcgtcctcctcattccagcagcaactccaactactactgcgactggtgccctcgccgttccaccgcctcccccgacctcgacgcgtcgttgctgcgttcttgtggaactagtagagacggcgacgacggtggcttcggctgcgggtacggggctgcggagcagctggacggaggtggagctccccacgtcgctgccgcgggcgccgactccttcagcgctggcgctggctgcggcgcctgctaccagttgaggtgcagagaccggagggtgtgcggcgacggcggcgtcaaggtcgtcgtggtagccggcttggccaaccggacggggttcgtgctcaccagggaggccttcgctgcgatgatggccaggccgcgcgtgtcgtccaatgaccaactgctgcccggcttgggtggcaatgttgttgaggtcgacttcaggaggataccttgcgagtacaagaacagaaacctgtcggtacgcatcgacgaggaagggagccggcacccggcgcacctggccatcaccttcctgtaccagggcgggcagacggacatcgcggccgtcgagctctcgcacgcgcacgcgcagccgccgtcgtggcggcccatggcgcccgtgggcaggcgcggcatcgtgacgtggcgcacctcaagcgcgccggcggggccgctgcagctccgcctcgtcgtcacggccggcgtcggcggcaagtggctgcgggccggcggggacgtgctgccggcggactggcggcctgggcaggtgcacgacacggggctccgggtccgcgacgtcgccctgagctcctgcgcccgctcctgccgcggcgccgctacagccggcgccagcgaggagctcaggtagtagagtagattagatgtaggcatggcatacaatggcattgggctggaggcgagcgagattagcttgctgcttgagtgcccatgaaggatgctcgtgctcgtccattgaggaaaattaaaagcaaaccagcagagagctgatctctgatg

SEQ ID NO: 32627 - DNA, 885 bp, Zea mays
  Clone ID: UC-ZMFLMO170112D06_FLI
ggccctattgatggccaacccaatggtagtcacaaagaattagctgtcacatgggttcataaatgcttccagggaatattgactaatgaaacaaggtgtctgagatgtgaaactgtgactgatagagatgaaacattttttgacctgagcctggacatcgaacagaatagttcactcaccagctgtcttaagaacttcagctcaacagagactttgaatgcagaggacaagttcttctgtgacaaatgctgcagtttgcaggaagcacaaaaaaggatgaaaataaaaaaaccaccaaacattctagtaattcatctcaagaggttcaagtatattgagcagcttcagcgctacaaaaaactatcatacagagtggttttcccactggagcttaaacttcttaatacagttgataattcggacttggaatactcccttttcgctgtggtagttcatgttggaagtgggccaaaccatggccactatatcagtttggttaagagccacaatcattggttattctttgatgacgagaacgttgagatgactgatgagtccatggtacaggcattttttggctcaccgcaggagttcagtggtaacactgataatggctacatactcttctatgaaagccttgctgaaagaagttgatgtccttctcataccatgtgattagttatacactttcctttcccttccatttctgctggggatatatagaatattcagtgaaaaccagaataagctgaatgagaggccttcagcttcagttggtatggtacgatcaacacttggcaataaaacaagttacctggaggggctataggctgactagtttgtagttcctactttatctgtttttatgcatatacaggttatatc

SEQ ID NO: 32628 - DNA, 508 bp, Zea mays
  Clone ID: UC-ZMFLMO170112D07_FLI
ccgactaatccgactccctagctcccacactaccaccatcccaccatctttaaaaagcccccaccactacatcctgcgctgcaaacgcctcgcctctcctcgcctctgttcagctcacggtggaagaggaggcgacaggccgacagcacacgagagggagctagcactagcagaagcgcgcgaaggagctcaagcagccacacgccgaccagcaccaccgcgcgatggcgtgcatcaacatgtacaacccagacggcgcggcggggttcggcggcggcccgcagcagccggccgcgctgggcccgcgcatctccttctccagcgacttcgccgtggagccgacgccggtgcagaaccgggcgacgagcctgcggtgccaggaggaggacctcaacttcgagttctccgtgggcagccaccccatgatggccgccgaccagctcttctccaagggcaggatccttcccctcaaggacaacggcggcggcagtgtctgcttcgctgccgc

SEQ ID NO: 32629 - DNA, 1056 bp, Zea mays
  Clone ID: UC-ZMFLMO170112E07_FLI
cagacatggcagaggatcttcaaatccctgcaggttttgatctcaaggtttacaccaagtcagatattaatgggttgcttggtgcctcatccataaacttatctggccactcatgccgttactttgggtatcttgtctcacgcaagaagtatgtgatttcaattgatgacaattgcctcccagcgaaggacactgctgggtcgactgttgatgttgttgcacagcacatggccaatctgaaaacacctgctacacctttctttttcaacacactctatgatccatacaggaaaggtgctgactttgtccgtggttacccattcagcctgcgtgagggggttgagtgcatgctctcgtgtggtttgtggcttcataatgctgactacgacccgatgactcatgttgtgaagagaaatcaacggaacacaacatatgtggatgctgtgatgacggttccgcttggtgccatgctgcctgtgagcgggataaatgttgcattcaaccgcgatgtgctggggcctgctatgttcccaggcctgcgtctacgaaacgaagggaagcacagatgggatacccttgaagacatatggaatggcttatgtgctaaagtagtctgcgacagcttgggatatggtgtgaagaccggactgccttatgtgatgagaagtgatgcagaagcaggtaaagctctggagagcttgaaagagtgggaaggggtaaaagtcatggatgatgttctcccattcttccagtcgctcaagctatcgaggactgcagttactgttgacgattgtgttaaggagcttgctggaatcgtccgtgagaaactaggacctaagaatgcaatcttcaccaaagcagccgatgccatggtggaatggaacaatctctggaaagtgcatggtgctcagaatgcatagtttgggaatttgcatgtttcctacagagcatctaatagttgtttggagtgcgcgttttacagttctaaattttccctgtggaactcatgaagctgaaataaacaacagtcctttatgccgtgaatttggcatgaat

SEQ ID NO: 32630 - DNA, 1721 bp, Zea mays
  Clone ID: UC-ZMFLMO170112H06_FLI
gtttgagagctactgcaagatcagcaccagatgttaaaccagaggagtttgcggtgttggtgagagatatccctagaccgtctccagatgaaactataaaggactctgtagactcatattttcgagcccttcacccaaatactttctacagatcaatggttgtgacagatcacacaaaggctgataagatataccaagagatcgaaggtcacaagcagaaaattgctcgcgccgaagtcgtatatgcaaactcgaaaactgaaagtaatactgagggcacaaggcctactcataggactggattccttggtcttattggtacaaaggttgacaccattgaatactgtagtgagcagattaaggaattactgcccaaactggaggctgaacagaagactacccttcatgagaaacagcagcgggctgccattgtcgtcttcaatagtaggtctgccgcagctttcgcatctcagactctccatgctcaagtgtatgataaatggacagttatggaagctcctgaaccacgccagataatatggtccaaccttccaaggaaactatatgataggcaaatcagacaatgtgtggtttattgcattgtctttctcatagttgtgttctatatagttcctctcactgctatcgctgctgttacaaccctggaaaacctggaggcgaagctgcccttcctgaagccagtggtggagcaaccagcaatcaagacggtcttggaggcctaccttccccagattgcactcattgtgttcctcgcgttgctacctactcttcttatgtttctctcgaaacaagaggggatcccttcgcagggccatgcagtcagggcggcatcgggaaaatatttctatttcatcgttttcaacgtcttcctttgctatacgcttggaagcacattgttcaaatctttgacgaccattatcaatcaccctgctgagattgtgaatatgcttgccaagagcctgcctggaagcgcaacgttcttcctcacgtttgttgcgctgaagttcttggttggctatggccttgagctctctcgcctggttcctctcatcattttccacctgaaaaggaagtacctatgcaagacggaggaagaagtgagagcggcatgggctccagtggatctgggatataacaccagggtaccaaatgacatgctcatcgcaacagttgttctgtgctactcagtcattgcgcctttgattattccgttcggtgttgcatactttgccctcggttggcttatagcaagaaatcagatcctgagagtttacgttcctagctacgagagctacggacgaatgtggccacacatgcacacgaggatcatcgcggctctgatggtttaccagaccaccatgatcggcttcatctccctgaagaagttcgcctacgcgtccgttctcgtgcccctgcttccagccagcataatcttcgcctacgtctgccacatgcgcttctacccggcgttcgccaagactcccctggaggtggtggtgcggcacgacctgaaggagactccgaacatggaggccatctacaccgcgtacataccgccgtgcttgaagcctgataagctcgaagatctggacgcgttcgaggacgcccagtcgcgcgccacctccagagtcccgtctatttagctgtgcacatcgtcgacttccgcggaagacttgaagaaattctgttcacttgtcatt

SEQ ID NO: 32631 - DNA, 1118 bp, Zea mays
  Clone ID: UC-ZMFLMO170113F10_FLI
ggcaaggtccttgacaacgggcggctgctgacgctgtcgctggaccgcacgtccggctccgggttccagtcccggcacgagtacctgttcggcaagatcgacatgcagctgcggctggtgccgggcaactccgccggcaccgtcaccgcctactacctgtcgtcgcagggcggcgcgcacgacgagatcgacttcgagttcctgggcaacgtgtccggcgagccctacacgctgcacaccaacgtgttcacgcgggggcaggggcagcgggagcagcagttccgcctctggttcgaccccaccgccgacttccacacctactccatcctctggaaccccaagcacgtcatcttcatggtggacgacatgcccatcagggacttccgcaacctggagagcaagggggtggcgttccccaagagccagccgatgcggctctactccagcctgtggaacgcggacgactgggcgacgcagggcgggcgcgtcaagacggactggtcccacgcccccttctccgcctcctaccgcgggttcaaggccgacgcttgcgtcgccgtcgcgggcggccggacccgctgcggcgccaccgtcggcaccgagggcaccggcgcccccgcctccgccgccggcgccggggactggtacaaccaggagctggacctcaccctgcagcagcggatgcgctgggtgcagcgcaagtacatgatctacaactactgcaccgaccccaagcgctaccagcagggcctccccgccgagtgctccatgcagtagcgcccggttattcctcgcccgtccaacaatggcgcgcgcgcgcgtgtgtgtgcatgtggtccgctctactgctaccgctacgacgatcggtgtcgatcaccggatcaaggcaagacgaaaggcatcgaaacatggtagataaataaaggacttgacgatttgtaacgcagtagctggtgcgtgcgtggtgtggtggtaagaaattcttctgctgcctgtgttcttgtagcctcctcgtcctcgcccaccctgttggtacgtgtacggtgtacgtagtctgccgccgcgcgctgttcgtgttcgtcgtgtctcgtgtctgtattatactcgtcctccccatc

SEQ ID NO: 32632 - DNA, 1132 bp, Zea mays
  Clone ID: UC-ZMFLMO170114A12_FLI
tcatctctgtggaaagggttcatcagtacatggacataccaagtgaagcagcagagattattgaagaaaatcgaccagcaccagactggccccaagttggcagggtggaccttaaagatttgaagattagatacagacaagatgctcctcttgtattacatggaatcacctgcagtttccacggtggagataagatcggtatagttgggcgaacaggaagtggaaagacaactttaattggtgcactgtttcgtcttgttgagccaactggagggaaaataattatagactctatagacatcaccacaataggcttacatgacctgcgttcacgtttgggtatcattccgcaagatccgacactctttcaaggaaccataagatataatctagaccctcttgggcaattctctgatcaacaaatatgggaggttctaggcaaatgtcagcttcttgaagctgtccaggagaaggagcagggattggactcacttgttgtggaagatggttcgaactggagcatgggtcaaaggcagctcttttgtttgggacgtgcacttctaagaagatgccgtatcttagttcttgatgaggccacggcatctatagacaacgctactgatgctatccttcagaagacgatcaggacagagtttagagattgcactgtcatcactgtcgcacaccgtatacccaccgttatggactgcgatatggtacttgcaatgagtgacgggaaagtagtggagtacgacaagcctacaaagctcgtggaaaccgaaggatctctcttccgtgatcttgtcaaggagtactggtcatacacatcgaattgaaatatctaggagaaactgtgacaatcacatgttcactcgttgcagtctcttaaaaaagagataacaggagcctgttctcacacacatccgatgaactattctatctcaagtccgaagtagaggtgtcaggcattgtcgggaagtgcttttgttaactagttgaacagggggaaacctgtcgtcccttaataaaaaggaaacctccagcgtttttttgctccgatattgagcgaataaaccgaaatatctagtggaaggcgcatcaagtatgcatccttgatactgcatgttcacag

SEQ ID NO: 32633 - DNA, 1645 bp, Zea mays
  Clone ID: UC-ZMFLMO170114B09_FLI
gacaaggctgtatccactgacgaagaagagggcgaaaccagcagtgccgttgggcgccaactacaggctcatagatatccctgtcagcaactgtctcaacagtaacgtctccaagatatatgtgctaacacagttcaactctgcttcgctcaaccgccacctctcgagggcctatggaaacaacattgccgggtacaagaatgagggattcgttgaggtccttgcagcacaacagagtccagagaatcccaactggtttcagggtactgcagatgccgtgcgtcaatatatgtggctatttgaggagcataatatcatggagttccttattctggctggagatcatctgtaccgtatggattaccaaaagttcattcaagctcatagagaaacagatgctgatataacagttgcagccctgccaatggatgaacaacgtgcaactgcatttggtcttatgaaaattgatgatgaagggaggatagttgagtttgcagaaaaaccaaaaggagagaagctgagatcaatgatggtagacaccactatattgggccttgatcctgaaagggccaaagaactgccttatattgccagtatgggaatctatgtttttagcaaagatgtgatgcttcgtcttctcagagaaaattttcctgcagcaaatgactttggaagtgaggttattcctggcgcaacagaaattggattaagggtgcaagcttacttatatgatggttactgggaagatattggtactattgaagcattttataatgcaaacttgggaataaccaagaagcctgtaccggattttagcttctatgatcgttctgctccaatttatacgcaacctagatatttgcctccttcgaaggttcttgatgctgatgtgacagacagtgttattggagaagggtgtgttattaaacattgcacaatcaatcattccgtagttggactccgttcctgcatttctgaaggtgcagttatagaggactctttgctaatgggtgcagactattacgagactgagaatgataagaatgtcctttctgagactggtggcattcccattggtattgggaaaaattcacatatcagaaaagcaataattgacaaaaatgctcgcattggagaaaatgtgaagataatcaattttgataatgtccaagaagcagtaagggagacagaaggatattttatcaaaagtggaattgtcacggtgattaaagatgctttaattcctagtggaacaatcatataaagtcagccaacaccatgtatataaggttgggttgcatcatatggtgatcgccaatgcgcatcaagttctctcatcccttgcgagaccatgcttatttccattgcaaaatcatcaagctctgcatcaacttgttgtggataataatgaaataataaatggtgccattccatggcaacatttttctgtcactagtatgaggcactgttctaaatgtactgttgagtggaatttgaatatgtatgcttttgcaatcgcacacctaaataccttgtgcttatactcgttacctaaatatgctcactgtcatcttagattgttgtaaaatgtcatgcataacatgatttttgttagattgttgtaaagcttacataagtttcttct

SEQ ID NO: 32634 - DNA, 1572 bp, Zea mays
  Clone ID: UC-ZMFLMO170114C05_FLI
ataatagcaaatttgcatgtttttattccaaacatatgtgaagagcaagaaagggatctttttcttcagaactttcaaaagtacttggcgtatgggagtcctaaactatcagcagatctgccagcttctagtgattttaaggccactaaagtctgtagaaacttaggatttttgtctgattatgctaaaacattggttcctaatttgttaaatggggaagacttggtgttattaagtgattttgctgataagctacaatcttggtgtaaatcacaagttgcagtaaaggttgtacaaaatgatattccaccagaaagcatggatgccatgcgctcggtgcagcagctcttgccaacacggacaagcactccagcctccaaaatgaataaccttccaaaggatgcacagaacatggaagtgtctacaccagtacccccaataaatccggaaggaaatgatgaggacgagactccaaagaacactgtctctagaaatggtggtttcctgcagaatgcagttggccaagacctagtccatcttggcgttgcaagaacagcaagtggtggccctttggctgtcgcttccggtgttagcactggacaccagcacaacagaatggatcttgatccagcatccagcagcgtggataatttcaaaacaccagaacttacaaaagaaaacggtctcgaggaggatgggaaaggagagagtagtatgtatgatgagaggcaacctaagagaaggaagcgtacccttatgaataatgagcaaatagatgaattagagaaggctctagtagatgagcctgagatgcacaaaaaccctgttctattgcagagttggtcagagaagttaagtctgcagggcccagagatcacagcatcacaacttaaaaactggttgaacaaccggaaagctaagcttgctcgcattgcaaaagaaagggcggagaatgctgataaaccatctactccccatcccggcgagtcttcagaaagtgccggggaggacaactatctaccccctgcaggtgtgatgactgttctatccaaaggtggtagcctgttgagcccggacagcactgagcaaacgtcgcaggcagagctatccccgaacacgacgatgatggttcgtccattcacgagatccttctcgctggagcccggccgcctagtttcattagtcgacagcgatgggaaggaggttggcaggggcaagatcttccaagagccagggaagagcccaacggagagctgcgtttgcgtggttgatgtcactgagctcaggaccgagaagtggagggagctcccccacccttcggaggcatttgggtggacgttccaggaggcggaggcgaggaatggtggcatcatcagggtctcttgggacgccgtcaggttattccctgtagcgtagcaaggccgattgtataacaagatgagtagagggaaactgtggtctaagtaacattatgttaaaagctgttgttaactgtgttgtattcatgaactaattgttttgagcaattcaggtggttactgattttacatttttaaaaaaaaaattaaaaag

SEQ ID NO: 32635 - DNA, 2822 bp, Zea mays
  Clone ID: UC-ZMFLMO170114E05_FLI
cgaaaaaaggcctcgtaatggccttcgacatttgacattaagcaaggtcaccacgacgatacaaaacaaatcggagttccacaacttactatgatgtacactctatacagagcatgtcgccccaaattacaaactattcaagcctagtggtctaaattacacactatacggcagctcaaagcttcaggaaaaaaaacgtacagctccaatactgtacgtggcaaaaggaaaaagaaacaccaaagaatcaatacacatgcacaataaagcttaactgttcaaatctctgaatttaagggcatttggctgttggtatggagaaggttgcattcatctttgtggccatggcagacgtcgccaggaactcaacaatgcggatctgtcaagaagcagcaggaggccaaggaacgtagtcgacaaaccaaaggtgtacttggctgtagagcttctgtttctccaaaatagtattgagagcacccactgcagaaaagatatttagttttctcaaggatgaatcatagcaatgttgtgggcgtggaaatttatactacaagaaatatcaaatacaacttcatgcgttgacataattgaaacagtgatagcacaaaacacaatatattgtactatatttgcagtgtcattttatcgattttcagtactcaatactccctccacagaaaataagacgcacatgtttttagaaaagtcaacgttttaaattttgaccaacaatttagcaaaaaaacatatattttagtgtatacatgttatatatttgaattcgtattcaaaaatactttaatatgatgcttaatttgcatttgttgatatcatattttaaaagaaattaatggtcaaagtttaacttcaaagacttattcaaaaaaaatatgccttattttttgggacatagggtactacgcaagcaacatgccttgacatgttgaagaaaaagctaactcgaacaggtggttgactaaaaattagctcaaatggctctcgacaatttactctgcatattagggaacaatggcaaatgagctcctctacccaaagttctataaaaagtgtaataaccattgaaaacatcaatataaatatagcacaatatgagaatataagtttctagtaattccattatggtctgtattaatggatatttactgaattacacattaagcatatgaggtagagcaacataaatatttgctcgtgccgttactgccgtacacacaactcaagcatcattttgtaaacatcaatgtgggcgcgtattaaattcaattgaaaaaaaatataaatgcgataccaccaatagatatggatacttacaagaatattaaaaatcttacgagtaacattgtctaataactcaaacatcaactgcagcgatggatcttaacttaattgcacaacacagacagggggtacaataatatgatgagttacttatgcgccgaaacaactaaagaaaaagtttgtaaatttaatgttgatgctttaacagatctgacctagaaaagtacaactgaggatgatgatcaaaatgcaactattgaaaagatgctaatctcacatacttgccggtgtacatataccaaggaattcaaaagagcaacacatttctgccatgataagtacttacatacttttccaagaaccaaaatcacgtaaaacttaaatatcagttttcctctcaatattttgatttctgaagcactttgagttttaccgaagtacttcactgtgcaagttcagcctacaaatttaaccaaaaatgacaaaagcactgcaataatatcaaaaggtggaacatgtagtccactcccccatcactgaagctgagaaacaaaaactaaaaatctaattttgtgtaatcttgccagttgccactatactgtataacacttgagttcacctgaccctaaaaaactatttcctccaagccacagcaagagatcaccgaactatgcggctatttcaggacactgcaatgtaaggatctaattacttctcttgtccagaaaagacttgccaacatttcatttttaccaaagacagcaggaaaacctttctatcaggtgaatccctgcaatgtgactgaatactccaaatgtgcccaaataggacctttaactaacaaaatcgatgatatttaaacagaaaagagttcgatgacaatgaccaatggggttagcaagatgtgtaccttgcatatcctgatcactgagaaactgctcgcaggcactagcgctttcttcacaatggctctctgctcagcaaccatctcccagcagagccgccgcgccatctccctggccatcaccagctgtgccctctccgcccgcagagcgaagatctccctccgcagggccgccctgtccgcctccagcgcctcgacccttgcatacagcccccccgagttgccgtcccccacgtactgtgcaaccacagacgtagctggcttcgttgtactcgcgcaggtaacatccaccgtatactcgaattccttctccacgggggacgacggctcctccgcgtcgtcggcgtcggcgtcggcatcctcctcgtcctccccgcggtcattgccaacgaccatggctttcacctccatgccactgcccgagtcgcgaacgttccgctccacctgcagcgcggccatgccgatctgctccacgtcttcggcgcccacctcctcgtacgagtacgactcgtcatcgtcgtcgtcggtgaaggagtccgggtcgatgccgtgggactggaggcgggagtggtaggaggcggcgaggtcggagagcgaggcgagctcctcctggacctcg

SEQ ID NO: 32636 - DNA, 2054 bp, Zea mays
  Clone ID: UC-ZMFLMO170114E06_FLI
ccgtgggacatttggccatgtatatgctggttttaacagtgacaaaggtgaaatgtgtgcgatgaaggaggttactcttttctcagatgatcctaaatcaaaagaaagtgcaaaacagctgtgccaggaaatatcacttctgagccgactgcagcacccaaacattgtgcgatactatggatctgaaactgttgatgataagctttacatatacctggagtatgtttctggtggatctatacataagcttctccaagagtatggtcagtttggtgaacaggccattcgcagttatactaaacaaatacttttgggcctagcttttttgcatgcaaagaatacagtacacagagacatcaaaggtgcaaacatattggtagaccctaatggccgtgtaaaacttgcggactttgggatggcaaaacatatcaatgggcagcagtgccctttctcatttaagggtagcccatactggatggctcctgaggttataaaaaatgctagtggatgtaaccttgcagttgatatatggagtttaggatgcacagtcctagagatggctacttcaaaaccaccatggagccaatatgaagggattgccgcaatgtttaagataggaaacagtaaggagcttccgccaataccggatcacctctcagaagagggtaaagacttcataagacagtgcttacaacgtgatccatccagccgtccaacagcagtggatcttttgcagcatccatttgtaggaaatgcaccaccacttgaaaaatcatctgcctctcatccactggaacagttgacgactatatcatgcagaacaaattggaaggtggttgagcatgccagaaatatgtcctcgcttggtttggaaggccgataccaatcaattttgcagagaagagctgccaaattttctttgccaaatagtgatatccgtatacagagtaatatatcttgtcccgtatctccatgtggaagtcctcttctaagatcaaggtctccacaacatcaaaatggtagaatgtcaccttctccaatttctagccccagaactacttcgggtgcttcaactcctctgacaggtggtagtggagctgttcctttaaaccacctgaggcaaccagcttacagaaacgagggcttcacagtcacatcaagaggttttgatgaccacatacctagcaggcttgtcgatccagtacatggacgttttattcgggtgcagcaactttctgcgggtcgtcaggagagggtggtctctgaagctgacattctgagctctcaatttggaaagatgagacatgcaaacgtgtgggatccgcatgatagaccgttgccttctgagagatcctctcagcagtgttttggggatcatgcgaagctaaaaccttcgctggacttgaggtctggccctctgcaccctgggcgcaaccatggccattgattctctaagcaaaagttaatggagtcgtgtctatgtgatagctagtggtcctaagctggttcactgaaacctttaattgtatcatagaagaagacatgttcgttaattatttcagttgctgacagttggcagtggataaagattctccaatgtcaatcccatattcccattactctaaaaaagatgagacatgccctaccaggaagaggggatgttgtatactagactgtccagataccgaagggaccccaaagcagtgactcttgaacctgtatactcttttactctcgtcgtgccgacaacaatttagttctcgttttcttatgggtttggaaggccattgtacagagggggggaactctcaacaagaaaaatccagattagaaggcacaggagaaagcaagtgagccattcaccaaccttttttcccttttttttttcttttcaagtcttagcagatacatatatgccggctgctcgctgtaaagtgctgattcagctgtggctgtgataccggttcaatccgttgaacgtgtccgttactctctgggaaaaatcatgtgaagagtctaatcgttaatcgaattaactggtgcagttcgaaacg

SEQ ID NO: 32637 - DNA, 2301 bp, Zea mays
  Clone ID: UC-ZMFLMO170114G01_FLI
ggccagatcaactccgaggccgaggtcatccccgagatcgacatctgcaagtgcgagccgtgggacctcccaggtaagtctctgatccggtccgacgatcctgagtggttcttcttggcgcccaaggaccgcaagtaccccaacggtagcaggtcgaacagggccaccgtggccgggtactggaaggctactggcccggacaggaacatcaagtccaagggcgacaagagcaaacagtttaccatcggcaagaagaagacccttgtcttccaccgtggacgcgccccgaagggcgagcgcacagggtggattatgcacgagtaccgcaccaccgagcctcagttcgagtctggcaagcagggtggttatgttctttatcgcctcttctggaaaccagaggagaaaactgagcgctccagcccaaaggaaatggatagaagtggcaactcgcctactactattcgttcttcacgtgacaaccaagaggcgaatgaggaagctaatacaccattaaataaaaaatctctagaatctgctctgcatgatccgattgagctgcccaattctgctgaaacccctgctgggccaaggaaaatgtgcctggcggacagaaatgataatttggtggctactgcaccggttgtttcccatatacctttccagggacatgctgctggtgtagctaaggttgatccttcagctgctgcttcagcccacttcgttaatccccagaatggaaatgacgactgcaacaattttatgtctgatttcacccccattctaccgcatgaaaatgcattcttcactggtacacagcaaggagcttttggttttgatggaaatggcatcatgaatcatcctgatgccctggatgctttcttgaaccaaacacttgttgatactgatgaacattcatcgacaacatcaaaagttcagtatgattctgacattccaacagaatttgcgaaccattggaatatgcaggatgagcatcaagactggtgggaaaagttagattttgagccatatgaaccaactttgcttccttatgacaccactgacctagacgtactctcagtagactctggcgccgattccttcaatgacctcttcaatgtgactggcattactcttaggcctcaacagttggactccactgtgcaaccagactgtgtgttccctgatcagggcactgcactaaggaggctgaagctacaggttgttgagtgtggggagagcataactaaagatgagagtgaagatgaagtatcatgtgttgaaagtccaaactattttgatgaatctgtcgagttcgctgcagagaagggtgtggcttcttatggggatggggctgactcaactgggattgttattagaagccgttaccctgccccaagttcaagctcagagagttcattcactcaacagggaactgctatgcgaaggctacggttgcagttgggccttaacgaaggcacatgtcctagtagtggtgattcatcaagctgcatcgtagatgaatcagaaagtcagcagaaagcagagattgaagaggatgcaagcacgaacctagctggaagtgttgataatctacctggcaatagccatgatgatgagcaaaaggacatccctgaacatggagttaaatctgtcctgaggctgcggaaaacttctgcggaaagtctgaaggatgtgaagcaggaggattgtctggagccagacgggagagcaccgatgcagagggtaggcttccaatcatccatcatctggctggttctttcggtggctgtgctgctgcttctctattgtggcgtatggatgagtatgatatgtatcctggtgcggtgttttgcgcacatgggttcctggcatcaacctgatgtgtgaacttctgtcataacatgcgtttgacagcagtaagacatcccgacatatgccaatgcagctaaaaataaaaaaaagaggtagcaagtgaagagggagaaaaaagagatgtgttattgtaggtcttagtacatcctagtcttgccaatgcagctcaaaagaaaaaagaggtagcaagtgaggagggagaaaaaaaaagaggtgttattgtaggtgttactaatgttgtagctgttgtgcagttgtaaatcccccttcggcagctggttttatttcctgatgtaatgtaagcaagagcaaggtcctgtcagatgcgtgcgctgaaagtctgaacctccgataatatctgatgcttcttgtagatagctgtttcagaattttcggttaatgaacccagttactgcttgcttgttgatc

SEQ ID NO: 32638 - DNA, 979 bp, Zea mays
  Clone ID: UC-ZMFLMO170114G08_FLI
tttccccttccctccctccctctccccgcgggccgccagaggcaatttcgccctcgattcgaccccgattcgtccgcccgcgaccgggattccctccgccaagcgcggatctgaacgctgcgctccgtgtcgccgctcgaatccgccatgaagggggccaaatccaagggcgccgccaaggccgatgccaagctggcggtgaagagcaagggggcggagaagcccgccaagggcaggaaagggaaggccggcaaggaccccaacaagcctaagagggctcccagcgctttcttcgtgttcatggaggaatttcgcaaggagttcaaggagaagaaccctaagaacaagtctgtcgctgcggtggggaaagctgctggcgacaggtggaaatccctgagcgagtcggacaaggctccctatgtagccaaggctaacaagctcaagctcgagtacaacaaggccatcgctgcctacaacaagggcgagagcactgcagctaagaaggctcctgccaaggaggaagaggaggaagatgaagaggagtctgacaagtccaagtcggaggtcaatgacgaggatgatgaagagggtagtgaggaggatgaagatgatgacgagtgatggagctcctcgagacaatggaccgtgcttcatccaacaatggagcggctacacaaggccccgtggcgatcacaaaaaaggagcctatatccatgtactagaattattcagtttcactccacatcgtgatgttttatttttacttttgtcgtgctataacggatagcgctcctcgttggcgccactggcgggtggttctgcctctggtctggtgtgtttgtgtgtggtcacacttgccagccagcagaggcgcctgcttgtacctagattactgtttccattgtcgtcatcatcggctaacattgtcataatgtcagtttgggtaatgttagattaagtaattattgtgttctgtatt

SEQ ID NO: 32639 - DNA, 1666 bp, Zea mays
  Clone ID: UC-ZMFLMO170114H08_FLI
ttctgatcagcgaacatgggaacccgcggcgtcgccctgctgctcctcgcggcggtgctgctcctccaggcgctcctcctcgcgtcgtcggagggcctggtgcgggtcgcgctgaagaagctgcccgtcgaccagaacggccgcgtcgccgcgcgcctctccgccgaggagaggcagcgcctcctcctccgcggcgccaacgccctgggctcaggcggcgacgacgactccgacgtcatcgcgctcaagaactacatgaacgcgcagtactttggggagatcggcgtcggctcgccgcagcagaagttcaccgtcatcttcgacaccggcagctccaacctctgggtgccgtcctccaagtgctacttctcgatcgcttgctacttccactcgcgctacaagtcagggcagtcaagcacttacaagaagaacggaaaacctgctgccattcgttatggaactggttccattgctggttttttcagtgaggatagcgttacattaggtgatctggttgtgaaggatcaggaatttattgaagctacaaaggagccagggcttaccttcatggttgcaaaatttgatggcattcttgggctaggctttcaagaaatctctgttgggaatgcaacaccagtgtggtataacatggtgaaacaaggtctcatcagcgaccctgttttctcgttctggtttaaccgacatgctgatgaaggagaaggtggtgaaattgtgtttggtggaatggattctagccactacaagggtgatcacacgtttgtcccagtcactcggaagggatactggcagttcaacatgggtgatgtcctggttgatggaaagtccactgggttttgtgctggtggctgtgcagccatcgcagattctggaacttccttgcttgctggccccacagccataattactgaaatcaatgaaaaaattggtgctgctggtgtagtcagccaggagtgcaagactgttgtttctcaatatggacagcagatcctagatcttttgctagctgagacacaaccagcgaagatctgttctcaggttggtctgtgcacttttgatggcactcatggtgtcagcgctggaattcggagcgtagtggatgatgaagctgggaaatcaaatggtggtctcaagagtgatccaatgtgcaatgcctgtgagatggctgtggtatggatgcagaaccaacttgcccagaacaagacacaggagctcatcctgaactacattaatcagctttgcgagcgtcttccgagtccaatgggagaatcagccgtggactgtggcagtcttgcgtccatgcctgacattgcgttcaccattggaggcaataagttcaagctgaaaccagagcagtacattctgaaggttggtgaaggacaggctgcccagtgcatcagcggattcacagctatggatatcccaccaccccgtggccctctctggatcttgggtgatgttttcatgggagtctaccacaccgtcttcgactatggcaagctgagggttggcttcgcagagtcggcctagggatatggtttggcagcaacccgtccagaggcaaacgcgtaatttgtgtgtttatgcggccggcgatgtgtgtatatatgctactacatgtttagtgatgctttccgagacctgagac

SEQ ID NO: 32640 - DNA, 1455 bp, Zea mays
  Clone ID: UC-ZMFLMO17011A04_FLI
ctcggcacggctgcaaagcgtaagcacggttggcctgtgacgagttttgtcctgccatggatccgcgacgcgcctgctgggagtgggaagagctcgacggacaacgtgacgaggccaccactgctgcccgtgcacgacgacaggcccgcggcggggtgctcctgctccgcgctcaggtccgtgctcgccaacaggttcgtggccgtcgcgtcgggcccgctggcgtgcgcacttctggtctgcgcgacggcggggggcctcggcgggcaccccgcggcgcgcaacaacatgctcggggtgctgacgtgggtggatcacggacgccgtggacgctcggcgtcgcgtccctggcgcccctgttcctctttccagcgttcggcatatcctcgacgtcatctccttcgtcctcgggagcttcatcctcgcgctcgccatcgagcagtacaggtacagcatccaccgccgccttgccctcaacgtacgtgcgccgcgctcgcgcgtccgaacaaacctgctgctcctcggcgtctgcggcacgaccgtgttcatcagcatgtggatccacaacaacacgccgtgcaccgtgatgatggtccagtattcaggctttgtttttggcccaacggagactaacaggccgaaaggcccagatgacgttttttttccatatcatcgagatgccgcagacggccgccactccgtcttgtgttacacattccacgcaatggcgtcctctcctctggcaccaaccaggacctgctcggccctagtgcccaagctgccccgccgcccctcgctcccatccccgtgtaggtctccccgtcgcagtgcgcggtggccgcgcttggcgtcagtcagagcgactccgggcagcagctggaccgcggcagcgacggaggagcagaaggagcggaagaggtgcctgagatgcggcggctcttaccgagacgaggagaaccacccgaccgcctgcgccttccatggccacgtcacaggcgagaaggggctgttctccctgtcgccgccgcaccagggcatcgacggcgagtggagcgacaagagcgggatcatcgtgtaccgctggaacgacgaggggagccggcccaacacaggccgcgctaactggaagaggcgctggagctgctgccaggagcgcgaggaggacgcgccgccgtgccagcgcgggtggcacgtctcctacgacgacggctacaccctcttctaggtctccctctacccgtggccgtggcccgtggggagcagcaggagatataaggtgccaagctacgtccatgtttattactcggagtagtacacagaagatatatgttggttgcctcaacgaaagcaagggcagcaccgcagcagcatcaaaacctggaggaccactttgaagcttgagatgcagtggttgtaaatgaaaatcacgtaataaaaatacagaattcaggaaat

SEQ ID NO: 32641 - DNA, 1944 bp, Zea mays
  Clone ID: UC-ZMFLMO17011B01_FLI
tcaaatgaagacacctggaaaatatttccaccttcctggcatgtcgactatctgctgtgtatccagttctgtaagattacaagggcccagcttgttgatatccttaataatctcaaagaaaaaccagatgttgcaactttgttattggcgttccagagaaccattgaatttgaggaagaattggcagagaaattcagtggtggaactacaaatgctagaaataaagagacaacaagtgatgatgaagatgagggtgggggacacaataaaattgtttcggacatacgaaagaaatatgagaagaaattggctgcacccagtgacgaggacaaagataagcagaaagatttgtcagttcctggtgctgggttcaactttcatgggatcatatcttcttgttttgaaccatatatgactgtatacattgaacttgaggagaaatctttagtggatcaattagaaaaacttgtccaggaagaaagatgggaaatcgaggaaggaagtcagacgaacattctatcaagcagcatgcaggttttcttggtgattagaaaaagcttaaagaggtgcagcgcattaacaaagaaccaaacattgttcaacttatttcaggtatttcaaagaatactcaaggcctatgcggctaagttatatgccagattaccaaaaggtggaactggtattgttgcagctgccactggcactgatggacagatcaggacctcagacagggacgagagaatgatatgctacattgtcaacactgctgaatattgtcatcagacatcaggtgagctagctgagaatgttgctaagatgattaaccctcagtttgctgacaaggtggacatgtctgaagttcaggatgaattctcagccgtgatcacaaaagcactaatgactcttgttcacggacttgaaaccaaatttgatgctgaaatggttgcaatgactcgcgttccatgggctacccttgaaagcgttggtgatcaatcagaatatgtgaatggtatcagctctattctgtcaagcagtattcctgtgcttggtaccctgctttcacctacctacttccagtatttcctggacaaacttgcagcatctcttgggcctcggttttatctcaacatatacaagtgcaaacatatatcagaaactggtgcacagcagatgcttttggacacccaagcagtaaagactattctcctagacatcccagctcttggaaaacagagtacaggtgcagctagctactcgaaatttgtcagccgagaaatgggtaaagccgaagctctacttaaggtcattttgtcgccagttgattctgtcgctaacacataccgtgccctccttcccgaaggcacgcctcttgagtttcagcggatacttgacctcaagggcttgaagaaagcagatcaacaagctatcctggaggacttcaacaaacacgcccctgcaccagcccccgccatcaaacaccctgccgttgctccgacggtggcgacaccagttgccacagcatctgtccagattgtgccctcggtggcaactccagctgtttcgattacaccaagcatggcctccttgaagggagcactggcgaaccaagaggacgtcctcgcccgagctgccgcccttgggcgcggagcagccaccacgggcttcaagaggttccttgcattgacagaggccgccaaagatcgcaaggatgggccgttccgcaagctcttcaacgcctaaaatgtcgctcaccgttgtgttcatagtttgtgcccctcgtgcagtgaacatagatataggaaattctataacaaccattttgacagattatcctatcccatcctgcggagaacgattagctcagttgtagcatagagattttgagacagtttgagctattagataagttttcccccctggtttgtgcatgcaaacccaagattc

SEQ ID NO: 32642 - DNA, 1468 bp, Zea mays
  Clone ID: UC-ZMFLMO17011B05_FLI
gttccgcgccgccggttcgtgccaaaaccctactccctacaaaatgcagcggcgcctaagctgaaatcggtgaatcgtgcgccgcggcgaagagagaactcgaactcggcaggacttgtgcggaataggaggggagcggccgagcggtggtcagagagggagatagagatcatcaggtttgccatgtcctccagggctggcggcggcaagccgttgtggtctgcctccaccatcgtcgccaaagtcgcgagtgggtaccacatcctcaggatcgatggctactccaggaccatggagacccccacaggagagtccatcgcgtccctcccgttctcggtgggcggccgttgctggcgcattcgctactaccccaacggcgacaagttggagaataaagaatacatctcgctttatcttaatctccacgacagaagcgtcgaggcagagaaggcgcagttaatgttccgtttcgtcggtgacgtagcggagcagccgttgattctgggaagactgcataccttcgaaaagcaaggttgggggtacgccaagttcatcaaaaggaaagatttggaagagtcgaagcatctcgtggacgattctttttccatcagatgcgatgtggccgtgcgcttcaacgatgtccgcgtggagaaggcgccggaagccgctgctgcagcagctatgatttccgtgcaaccatctgacctgcaccagcacctcggcagtctcctgctgacccagaagggcgccgatgtggtgtttgacgtcgccggtgagacgttcgcagcgcaccggtgcgtgctcgcagcccgctctcctgtcttcactgcagagctctttggtgcgatgaaagagggccacaccggaggcgtggtgcgcatagaggacatggaacctcgggcgttcaaggcattgctctacttcctttacaccgatttactattcccaaagacaatggcaacgacgatgaatcaatctgaagacggagacgtaggcggcgacgatgaagacgttctgtgtcagcacctactggtcgctgcagacaaatacaacttggagaggctgaaatcgctatgtgaaaagaagctgtctgagtgcatccatgtgggcacggtagcaatcatcctgacgctagctgagcaacaccgctgccctggactgaagaaggtgtgcctccattttctcagatctcctgcaaatttgagggcagtcgcctccagcgacgcctttaagcatctgagcagcagctgcccctctgttatggtggagttggttgccatgcttggcaactcagcgtagaccttcatctaagcagcaaactgcacttggtgatttttttctggatcgacttgtattatcaagcggtcttggaaaaatgctactagttcatagtttccacttccagtagctatgcatcctaagtttcaaggtagattctgaagtagttgaatccgttggcgcttttggt

SEQ ID NO: 32643 - DNA, 2196 bp, Zea mays
  Clone ID: UC-ZMFLMO17011C10_FLI
ggggatgaatcactagaggggaaagttctccgcttgaagcaacaatatacattgtgttcagcctcactacaggacatcattgctcgttttgagagtagagctggcgagtctctcaactgggaggacttcccctccaaagttgcagtgcagatgaatgacactcatccaacactatgcattcctgagttaatgagaatactgatggatgttaagggattaagctggagtgaggcatggagtattacagaaagaaccgtggcatacactaaccatacagtgcttcctgaagctctagagaagtggagcttggacataatgcagaaacttttacctcgacatgttgagataatagaaacaattgatgaagaggtattagatgtgcagaaagtgcttatgcaaattttcttcttgctctatgagttgacgtacacttttctctatacttgattgaaacagctgataaacaacatagtctcaaagtatggaaccacagatactgaactgttgaaaaagaagctgaaagagatgaggattctggataatgttgaccttccagcttccatttcccaactatttgttaaacccaaagacaaaaaggaatctcctgctaaatcaaagcaaaagttacttgttaaatctttggagactattgttgaggttgaggagaaaactgagttggaagaggaggcagaggttctatctgagatagaggaggaaaaacttgaatctgaagaagtagaggcagaagaagagagttctgaggatgagttagatccatttgtaaagtctgatcctaagttaccaagagttgtccgaatggcaaacctctgtgttgttggtgggcattcagtaaatggtgtagctgaaattcacagtgaaattgtgaaacaagatgtgttcaacagcttctatgagatgtggccaactaaatttcagaataaaacaaatggagtaactcccaggcgttggatccggttttgtaatcctgcattaagtgcattaatttcaaagtggattggttctgatgactgggtgcttaatacagacaaactggcagaactgaagaagtttgctgataatgaagatctgcattcagagtggcgtgctgctaagaaggctaacaaaatgaaggttgtttctcttataagggagaagacaggatatattgtcagtccagatgcaatgtttgatgtgcaggtgaaaaggatacatgaatataagcggcagctgctaaatatccttggaattgtctaccgctacaagaagatgaaagaaatgagcacagaagaaagagcaaagagctttgttccaagggtatgcatattcggtgggaaagcatttgccacatatatacaggcaaaaaggatcgttaaatttattacagatgtggcagctaccgtgaaccatgattcagacattggagatttgttgaaggtcgtatttgttccagactataatgttagtgttgccgaggcgctaattcctgccagtgaattgtcacagcatatcagtactgctggaatggaagctagtgggaccagtaacatgaagtttgcaatgaacggttgcattcttattggaactttagatggtgcaaatgtggaaatcagagaggaggttggagaggaaaactttttcctttttggtgcagaggcacatgaaattgctggtttgcggaaagaaagagccgagggaaagtttgtgcctgacccaagatttgaggaggttaaggaatttgtccgcagtggtgtctttgggacttacagctatgatgaattgatgggttctttggaaggaaatgaaggttacggacgtgcagattatttccttgttggcaaggacttccccagctatattgaatgccaagaaaaagttgatgaggcgtaccgagatcagaagttatggacaaggatgtctatcctcaacacggctggctcatccaagttcagcagcgataggacgattcatgagtacgccaaggatatctgggatatcagccctgccatccttccctagaccagccccttagcaggaagcgctggtcacctcagttttgtgcagacaaaatctaggcttcgataaatgatgggactatgcatggtattttggcagcactgttcagtaccttgccttttaaatctggtttttggtgtgtgtaagctaataaatgtcgaggcaggattgtaggaacaccat

SEQ ID NO: 32644 - DNA, 1202 bp, Zea mays
  Clone ID: UC-ZMFLMO17011D03_FLI
accaagcccccgactccccgaggccccgacctgcgcacccacgggatccctacctatccggccgtcacccctccccctgcccctcccgagttggattgttcgcggaattggcggaggggcagccggatatgtcgtcgtcggttgggggcggcagcgcgggcggcggcggagtggacatggtcagcctgctggagaaggccaaggatttggaccagctaaagaaggaacaggacgaaatcgttgccgatatcaacaagattcacaagaagctcctcgcatccccagagatggttgataaaccagttgacaccattttgctcaagcttcgtggtttatatgcacgtgcaaaggagctctctgagaatgaaatcagtgcctcaaatgctttgattggattattagatggtttgttgcaatctggagcttcaactgcacaaaagaaaaagatagaagttggtgagcagaaaaagaagaggatcaagtctgatacagattctgcacgattttctgctgcatctatgaggaatcaacttgaccaagctgcaagccttaaaggagagcaggttgctgctagggtaaaatcagatgacgaaaaagatgagtggtttgtcgtgaaggtcatacatttcgataaggaaacaaaagagtatgaagtacttgatgaagaaccaggtgatgacgaagagagcactcaaaagaagtacaagttgcctatgtcttacattattccatttccgaagaaaggggatccttcgagtgccccggattttgggcagggtcgacaagttttagctgtttatcctggcacaacagcattatacagagctaccgtagcttctcatcgtaagaggaagtctgatgattatattctggagttcgatgacgatgaggaggacggtgctctgccgcagagagccgtgccgttctacagggtggttgccctgccggagggccacaggcagtagtgacatttgacgcagttctgcattcctagtgtaacatatagcgcaaggtagggtgtcttcagtgtgacaatgtggtggtcatatctacgcgaaacgagagagaaaacaaggacgtgcatgtagcacttacatgtggggtccttgtataaaagacgatgacgtttttttttcaatctgctagagcacgtctatgtaattgcaatccagttttaatctcttatattatactttagagag

SEQ ID NO: 32645 - DNA, 2902 bp, Zea mays
  Clone ID: UC-ZMFLMO17011F01_FLI
atctctctatttccccctcgcccagctcagatccgaagcctgaaggaaatcgcgccaacaggccctagccccagatgcgcgccgccgcttgctgcctgcgctgctgctactgcttctaggggtcttgcggcgatgctgggcgtcgagcccgagagcggaggcgccgcgtcctcctccgccgcagagaattttgacgctggccagtacgccttcttcgggaaggagccactcgaggggttcgagctcgggggtttggaggaagccggcagtgatggcaatggcggtggattcagcgggccagatgaggggctgtaccggctaaactcggttggagacgagattgacgatcagagtaacttgtctgacattgatgatcttgcaagcaccttcgctaagttgaaccgaagcattagtggaatccggaatcctggtgttattggggacaggagatccatttcaagaggaagttctttaactcttgactggcctgaggatgtggagttttaaaactgggtagatcaagatgtatttgaaaatgaggaattccaggaaagtaaaagatggtggtcatccaattcttcagtgcagcaaggggattccaactccagaccactaagtcgaacatcttcctaccctcagcagccactgcagcaccggtcaagtgaacctatcgttttaccaaagacttcttcatttacctcatttccaccacctgttgctggtggtggtagagccccttaccctgctcaaggccttacacgtcatgggagcattccatcaattggcgctgggctccaaatgggttctccgagcatgtcactttctgcttctccatatcatatggtcggaccatctcatgggctgccatacacgggaggcatgccttatggtgctcttaacctgcctgtaaacaattcagtgcagaatgattggtcgaatcatgttaaccctttcactggggagcatcttaatctactgcccaatttattgcacaaacaattatcacttcctaatagcccaatgtcgtcactcctattttctcagcatcagcagagattggcacaggtccaatcatcccatcagaattacctcaatataatgccacacgtcctatatccccatcactccgcagagattacaagcaggtttggttctgttggcagttcccattcatcaagagacaagagatcaaggtcggggaagggaaaacataacattcgattctctcaactaccatctgatactggtagccagaatggtgacagcggaggtataaagtttagatccaagtacatgtcatctgaagagatcgaatcaatcttaagaatgcagcattctgcaagccacagcagcgatccttatattgttgattactatcatcaagcttgtatggcaaaaaggggtgccacttctaagcaaaagaccaatttctccccaacatcaatgaaagatgtaccatccaagtctcgatccagcagtgatcagcacacatatcttcaggttgatgctcttggaagagtatctttttcttccatacggaggcctcggtctcttcttgaagtcgaccatccttcatctgctgatggctctcatgatcagaagtccactgtgaggcccctggagaaagaaccaatgcttgcagcaagagtcactgttgaagacgccctttgccttgttcttgaggttgatgacactgaccgtctgttgcagtctagccagtcacaggacaacattttcgaactgaaacgaagacggcaagtcctcctggaaggtctagctgcatcattgcagtttgttgatcctctcggacccagcaaatctggtcattcatctgggtcagccctgaaggacgatgttatttttctgcgcattgtttctctgcccaaaggacgtaagtttttagcacgttaccttcggcttcttgtccctggcagcgagttgacccggatagtatgcatggctatttttcgccatttgaggttcttgtttgggggtttgccatcagactctagtgcagcagaaactacagttgctcttgcgaagactgtttcatcttgtgtgcatcacatggaacttggtgctcttagtgcctgccttgctgctgttgtttgttcgtctgaacagccacctctgcgccctcttggtagctctgctggtgatggggcttctcttgttattaaatcagtactggaccgagcaactgagttactgactgatcgccatgctgcagccagctacactgtgccaaaccgtgctctctggcaggcatcatttgatgctttctttgggcttctaacaaaatactgtgtcagtaagtttgaaagtatccaacagatgtttgtcacacagacaccgagctcaggaatcggacctgaggcttccaaagctactagtaaggagatgcctgttgagctacttcgtgcaagccttcctcatacaaacgagcagcagcgccagcggcttcttgattttgctcagagatccatgccagtaacaggtttcaatccctcaggtgctagaggtgggcacatcacttcagaatctgttcctggatgatgtaactgaaggagacacacaagggcaaagagtcaatgcttttaaacattgatgagatggtcttcagctgataattgttgtatctgaagacatgcatgccccattataagttgtgagcgagcttggagaagttccgattgctcaggaaagtagccttcacttcaggttgtgacgtaagtttaggtttcagagtaatcgaatagaccagtgaaatgttccttatgtgggtcatttaatatagtacccacctgatgatatcataatactggaacaggaaatgtaccccttcacatttctactagagtcgatgttcttcgtaggccattgtggactggtttgcacattt

SEQ ID NO: 32646 - DNA, 1420 bp, Zea mays
  Clone ID: UC-ZMFLMO17011F04_FLI
gttccagagctatacacactgtcttccttggtctggtgaccgcacccatagattctcttacctcaccatggccaagtcatctggagcagttgtgcatctggggccatgccaccgtggtctggcgctacggacagcctccacgccggccgagcgactcacgctttctccggccgtcttcacgcgagcaccaaagtcttggtgagtccctggtgctccctgtgtctcaaatttaaactctactatatggtggccacgagttcgggctcgctagcctaaggctgtctccaatagtggagtctcaaacaggagacccatacgccgtatgcgtcttaatgggtctgctgaaatggggaaccaaattgttggttctccaacagaccatctaaaatgggcctccatcaaccgttttagcaagaaaaggcgggaagcaatcatcccaatcttcagttcccgcttcttgctgcccagaaccaagacctcccgcttcctgttgcccacgtcgccggtcagcctgctcggccactcgtccagcagagctggaaggcatcttcattttctcccattcgcttcaaggcaagtttcattttcttctctccctgacaggaatcctattccttttttcgtttttacagtccgtaggtaaatattgcccccaagctgcttcttttcttcgtttttacaccatggtgaaactatttctatttactaccaatttgagttcgattcttggtgtgaatctgctgcaactattgcctgattgaccaaactactcaaattaatctgattttttcatgcagccatggcctttaactactaccgaagcacttggtgtgggtctgctgcagctaataagaacaatgaagaaattgaagcatgtgctgttttggttgcaacattgaggaagaagcggcgttggggagggtctgttgttggccataagatgaaaaatcgcgaccgtattggtggcgacattcaactgaataatgactactttattgagaggtcgttgttcaaccctgagcaattccgcagaaggttccgtatgcaacaatcccttttcttggagattgaagataaattggcagctgcaaataagttctttagacaaaaaagaaatgcagctggtgtgttgggattctccagtagacaaaagtgtactgtggctttgcggatgttggcttatggaggtccagcagattttctagatgaaggtctgcgtatgggagaaagcacagtccttcaaactatcaaggagtttgctaaaacagtccttcaaacatttttctgcttagcttgtttcttccctcctctggatggcagtagtgattcctcagacgtcaaatgaaattgggaagacctagctgatgtatccccttcatccatgttgtactgcacacacacaacagcagtagtaatttgt

SEQ ID NO: 32647 - DNA, 1542 bp, Zea mays
  Clone ID: UC-ZMFLMO17011F11_FLI
ctcttctcttctcttctctccgatgcgagcgagatgagagagagaaacagagctccccgaggtgtgtataaatgccaggtcggcgcgttaattctttctagttctactccccgctccccattcacgcactctcactctacctctctccctccctcgccggcgccgcgcgtgctcccgcgggatgctgcgtgcggcgcggtacctgctggggtcgccgggcgcgagcgggttcgggtccaggtcgacggcggaggaggtgaccccggacctgggcgcgacgacggccatcatcacgggcgccacgtccgggatcggcgccgagacggcgcgcgtgctggcgaagcgcggcgcgcgcgtggtgatcccggcgcggagcgccaaggcggcggaggacgtgcgcgcgcgcatcgtggccgagtgccccgccgccgccgtcctcgtgctcccgctcgacctcagctcgctcgcgtccgtgcgcgccttcgccgacaggttcctcgcgctcggcctcccactccacctcctcataaacaacgccggcaagttctcgcacgggcagctggcgctctcggaggacggcgtggagatgaccttcgccaccaactacctgggccacttcctgctgacgaagctgctggcggggcggatggcggagacggcggcggccacgggcgtgcagggacgcatcgtgaacgtgtcgtccagcgtgcacggctggttcgccggcgactgggccgagtacctgcacctcgtcacccgccgcaagataccctacgacgcgacgcaggcgtacgcggtgtccaagctcgccaacgtgctgcacacccgggagctcgccgcgcgcctgcaggaaatgggcgccaacgtgacggcgaactgcgtccacccgggcatcgtcaggacgcgccttaaccgcgaccgcgacggcgtcctcaccgatctggtgttcctgctgctgtccaagctgctgaaaacgatccctcaggctgcggcgaccacgtgctacgtggcggcccacccgagagtggccggcgtgtccggccgctacttcgccgactgcaacgaggcgctgccgtcgccggccgccaccgaccgccacgaggccgcgcgcctctggcgggtctccgaggccatcatcgacggctgcaccaacagccaaccccagcgggactgcaccacttctcctctactacgattactgccggcccagacgcagtcacagtcgccgacaggagcttcttcgtcgcctcgtcgtcgagcctgctgagctgatccggccgtccagttccagttccagtatatccgtcccttttgttctcgtccatgcgagatgcgtgtacaatagctagacattatatgtatatccgatcgattatccccggccgtcctagcagcattataaatacagcatatactccttgtcccatatataacaggcactagcatgcagtagccaacgtagtgcagtagtagttctgtgtttgtgtgtgtctcaagtctggactctctctctgaacattgaagctgtactgtaccattatt

SEQ ID NO: 32648 - DNA, 2011 bp, Zea mays
  Clone ID: UC-ZMFLMO17011G05_FLI
cgcccgtgccgtaccgtccctatcacaccggatcgccactcgctcccccccaccccactccgccccacctccgcgcctcagatccatccccaaccggcaaccctagcgccgggttcctcctcctcggatccgcccgccgccgcgcggactccattgccagaggtgatcgagggggagagatagagcttgggtggtcggattagggagagagggaggggaggatgtccagacggtcgttgaacccgagccggcgggtggcggacgggggtctgccgacagtcggaggcctgttccaccccaagtcacgctcgcctcccgtgcttactattgccctagtcgtcctgggtgtcattcttctcgtcgcctacttcaacagcggctcaggtgtaactgttacaagcagagagtctgtgaccaggtctgaaggtacaacttttttttctccctattgtctcgttttgggttgcaaatcacccgctgatgttatttctttagtcatccaaaattctgtattctcctttaaacttgctctttactgtgtcgttaaaattgcaggttcaaatattttttgttctcctgattacaaggttgcacttattgtagtttgcaattgagatgcttaattagttttacttcaatatattgtatccatggctatgtttttgttatcttagcattgttgagtagtgcagttaccccaaaatcttacagacacattctgtatgctaattcttaggagcaatatcctatggttacaatgcatttatattattctgcctccatttttactgcaatagtgtcctatttcctttgtaactgatttgatgtttggtattcttcagtaagatatgaaatatcttgcagtgcatccaatactagtaactggtgaccagcaatcaacctcatgataaatagcaaacactgaaacgaactctgctgtgccactatgatttggttccctgattcttggtaactcaaaacatatttatttttctccttattcccatatgatcaggaggaccagtagctaattttctacattaggtacatgattatttagtttctttagttatgttcacatttttctttcccaacatgttgatgggggaagttttgttctcttaatctcagactttccatctacatctgcatccaggttcttgcacatcagaagttatgcgggtgcttccatatcttaaaaaggcatatggaaatgccatgcaaaaggttctccatgtaggccctgatagttgtacagtagtttctaatttgttgaaagaaggaaaggttgaagcttggggagtggagccttatgatttggaagatactgacagtacttgcaaaagcctcgtgcgcaagggctttgtccgtatgtctgatattaagttcccccttccgtaccgtccagattcttttaatcttgttgtggtgtcagatgctttagattatctgaccccaaggtatctgaacaaaacacttccagatttagcaagggtttccacagatggccttgttatttttgctggcaacccaggtcagcagaaagctaaggtctcagaactaccaaaatttggaagaccggcaaagttgcggagttcttcatggtggacacggtactttgtccagaccggcttgacagagaacgaagggccgctgaagaaattcgaagatgctacatccaagaacaaatacaaaccaggttgtcagatcttccacctaagttcgccaaggtgatgcgcatccatagcaccttgaattgttgtcacaccccctgccctcctccggttggcttgctcattgttcgtgtggaggaaatcgtcgcaaaaaaagccatcaggaataggttagcttatgtagagaggctccgacacttgttgctagaaattcactctggaaattaaattgtgtcccccaatgattgcaaactggagccccgctgggatatatatgtaagaactttcacgctgttgtaccgctgtgctatccatgtattgtcaggtgttccccgagc

SEQ ID NO: 32649 - DNA, 1585 bp, Zea mays
  Clone ID: UC-ZMFLMO17011H08_FLI
agccggccggggcggctgtggggcacctggcactcagcaagtcctcggatcatgacaacatgagccaggggagctcggtttgcaatgctgaccgtgctggcactggcagcatgcactccggtgaggatgggagctcaggacctcggaggaaacccaactctcctgcggcgttcgtgtcagcttcgcccttggttggccttccggagttctcgcatcttggttggggtcactggtttactcagcgtgaccttgaacttgctaccaaccgcttctctaaggagaatgtgctcggggagggtggttatggagttgtgtaccgtggacgtctggtgaatggaactgaagtcgcaataaaaaagatctttaacaacatggggcaggcagaaaaagaattcagagtggaagttgaggctattggccatgtccgacataagaatttggttcggctgttgggatattgtgttgagggcgtaaacaggatgctagtatatgagttcgtgaacaatggtaatttagagcagtggcttcatggagctatgcatcagcgtggtgtttttagctgggaaaatcgcatgaaggttgtaacaggcactgcaaaagcgcttgcttaccttcatgaagctattgagccaaaagttgtacatcgagatataaaatcaagcaacatattgattgatgatgaatttaatggcaaagtatctgactttggattggctaaacttttgggatcagacaaaagccacattactactagagtgatgggaacatttggatatgttgcacctgaatatgctaatactggaatgttaaatgaaaagagtgacgtttacagttttggcgttctcttgttagaaactgtgacaggaaggaatcctgttgactacagccgatcttccaatgaggtcaatcttgttgaatggcttaaaacaatggtggccaatcggagggcagaggaagtggctgatccaagcttagaggctagacccagtatccgggctctcaagcgggctcttttggtggcactgaggtgtgttgatcctgactctgaaaagagacctaagatgggccaggttgttaggatgcttgagtcagaagaagtaccataccgggaggatcggagaaatcgtagaagtcgcactggaagcatggatattgagtccattgcagagggttccaactctgcggagtttggaaagaaggtagaaaggactggaagctctatatctgacagatctcaaccatgaggcctggaaatctaagctatatcaggaactgtctcagaaacgatgttaatcaccaaggtgattgctgtcctgataggggatgctggtaggtgacagaggcaaggcaggcccaggtattactgcctaagtattaggctttagttttcaggtgcagtagaagcattcttggatgaggaacctcctggtctcctcttatttgtataggtatatgttggtgcctgaggaattcctcttggtttgggtgtttaacatttgttcggttcttttatttcttgcattgttgccttcttaaatcagtttcacttctccctgatgaaatgctgaacatgaggttgtggact

SEQ ID NO: 32650 - DNA, 584 bp, Zea mays
  Clone ID: UC-ZMFLMO17012A02_FLI
tcgacggcggaggcctcttccatgaaactgagcaccatgcggtccagccccagtgaccccgcggcgtccgcatcgtcggtcgcgggcggcaacggcggcggcggcggcggcagcttctcgtccttgtccctgtccttcccatccgcggcgaacttctccgatgaagacacccgcccgagcagcctccggagcctcgacaccctcggcgtcggcgcaggctgctgcgtcgtcggcggcggcggcggcttcccttccatggcggcgccgtggtggtggtgaccggtcttgagctggaacggcatcgatcgcatgagggatgaggcgcagcgactgcctacatccacaaaatctcgctcgcacaagtaaccaacccagagccaaccgcaccaacacaccaccggcctaaaccaaccaccagtcccagcgtgctactgcccgtacgccgggcgttcgccggaggcgacggccattctcggtgaacggctgctgaggggaacactctctctctctctctctctttctttctgctttttccccttccccactcctctttttcacagtctatacacgcaacgcgaggggcg

SEQ ID NO: 32651 - DNA, 1597 bp, Zea mays
  Clone ID: UC-ZMFLMO17012A04_FLI
gggggcgtccaccccaaaacaatcatgactcgtctctgtccccttcacctcctcctcatcgctgccgcggcggcgtctgccagcggtgccgacgaggcgcacgtctccgtcgcggtcgcggagaagggcctggccttcgcgaaggacgtgcttatcagcgaggccgtgcggtcgctgacccctcttcgcctccccggggtggagaaggccgtccgcgtgcccttccttggcggcatccgcgttgccgcctccaacatcacgctattccacctagacgtcggggacaactccactatcttccccggggactcgggccttctcgtcgtcacctccggcatcaccgccaacatcagtatgcattggagctactgctatgattcgtggttgtttcccatagagatcaccgacagcggaacggcctcaatcctggttcaaggaatggaagttgggataaccatggttataaagaacaagaatgggagtttggctctgtctgtttcacagtgtggttgttatgtgaaggacctagtgatatccctggatggtggagcatcttggttttatcaagggtttataaatgcttttgaagatcatattaaagctgcagttgagaaggcagtacctgaaaatatcattgaaggcgctgggaaactagactcctttctgcaaggtctccccaggaccatcagtttggacgacgtcgcggccttcaacttgactttcattaatgatccacactatggcaattcttcaattgagttcgatatcaatgggttgattacttcagcagttgctgagacagccaatctgcagaagcatccacaactttctttggcttgtggtggtgcatcaaaaatgcttttgctctcacttgatgaagatgtattcaattcagcactagaagttcattttaaggctggttcaatgcattgggttgttgacaaagtccctgatcaatctctactgaacacagctaattggaaatttatcattcctcgtttatactggaattacccaaatgacgatatgctgctaaatatctcaatggcctcatccccggtgataagggttacatcagaaaaaattgaagctaccattaatggagacatgataattgatgttgtagataacaaggagatagttccagttgcatgcatctcagtgattgtcagtgcttcaggtgttgtggatgcatcaggcaataaagtatatggtagagttggattagataatttctcccttgcgttgaagtggagtaaaattggcaacttccatatgtctttgattcagggagtgattcgtgttctcctgaacacagtatgcatgccgtatttgaactcacggcttgggaatggattgatcttgcccatggtccatggtttcacacttcaagacgtctacgttttaacctctgctgagcagctgacgctttgttcggatgtcaccttcaacgcaagcagcttggcgagtttattatgatacagggaagtgcgtgtctggcgtatttcatttagcgttgaagtacaacactcgcacatatgtgtacattatattgtacatactacacaacatctcgttataaatattgtttacattc

SEQ ID NO: 32652 - DNA, 2887 bp, Zea mays
  Clone ID: UC-ZMFLMO17012A05_FLI
agatgaggtatctttctctggtgcaagccatcctgccaatatgtacacacaagaagaccttcccaaacaagtttctcgtacccttaatcagggttctaatgttatgagcctggatttccaccccgttcaacaaaccattcttttagttggaacaaatgttggtgacattgcggtgtgggaagttggttcacgggaaaggatagctcacaagactttcaaagtttgggatattggttcctgtaccttgcctttgcaggcttcgctgatgaaagatgctgcagtatctgtcaatagatgtctgtggagccctgatggaactattctaggtgttgctttctcgaagcatattgttcagacatatacttttgtacctaatggagatttacggcagcaagcagagattgacgcacacatcggtggggttaatgatatagccttctctcaccctaataaaactctatctatcatcacatgtggtgatgataaactcatcaaggtgtgggatgctcaaacaggacagaagcagtacacatttgaaggccatgaagctcctgtgtattctgtatgccctcactacaaggagtccattcagtttatcttctctactgccattgatggaaaaatcaaggcatggttgtatgattgcttgggctcaagagttgactatgatgctcctggacattggtgtactaccatggcttacagtgctgatgggacaagattattctcttgtggtactagtaaagaaggtgattcacacttggttgagtggaatgaaactgaaggggcaattaagagaacatacaatggcttcaggaaacgttcactcggtgttgttcagtttgacacaactaggaatcgcttcttggctgctggagatgaatttcttgttaaattctgggatatggataacaataacatactaacaacaacagactgtgacggtggactgccagcaagccctcgtttgagattcaatagagaaggttcattacttgcagttaccacaagtgataatggaataaaaatacttgccaacactgatggacaacgcttgcttaggatgcttgagagtagagcatttgagggctctagaggacctcctcaacaaataaacaccaagcctccaattgtcgcccttggtcctgtttcaaatgtcagcagtcctatagcagtaaatgccgagcgacctgatcggatcttgcctgcagtgtcgacaagtggcttggcacctatggatgctagcagaactccagatgttaagccaagaataacagatgaatccgaaaaggtcaaaacctggaagttggctgacattgttgataatggacatcttcgagccctgcatttgacagacacagacactaatccaagcaaaattgtccgtttgttatatacaaataatggggttgcactcttggctcttggctccaatgctgttcataagttgtggaaatggcaacggagcgacagaaatcctagcggcaagtctactgcatctgttgcacctcacctgtggcaacctgcaaatgggattctgatgacaaatgacacgaatgatggcaacccagaagaagcaaccgcctgcattgcattgtcaaaaaatgactcctatgttatgtctgcatctggtggcaaagtctcgttgttcaatatgatgacattcaaggtcatgactactttcatggcacctccacctgctgcaactttccttgcattccacccacaagataataatatcatcgccattggaatggaggactctaccatccaaatctacaatgtccgcattgatgatgtcaaaagtaagctcaagggacatcagaagaagattacggggctggccttttctcaatcaatgaacgtgctagtatcatcaggtgctgatgctcagctatgtgtgtggagtattgatggctgggaaaaaaagaaatcaagatatatccaacccccagcaaaccgacctggcactttggttggtgacacaagggtgcagtttcacaatgaccaaacacatcttttggtcgtccatgagagccagttgggaatctatgatgggaatcttgactgtttgcgcttgtggtctccaagagatgcactcccagctccgatatcgagtgcgatatactcgtgcgacggtctcttggtttacgctgggttctgcgatggtgctatcggagtcttcgaagcagaatctcttaggctgcgctgccggattgctccttccgcttacattccaccttcaatactagcctgtgctggacgggtctacccgttggtagtcgctgcacaccccatggagcctaaccagatcgcgatcggcatgagcgacggcaaggtccatgtggtggagccattagacggggacccgaagtggggatcggcacctccacaggacaatggagcgcacccgcacccgcatccagcgatatcagcggcaccgtcgaccgccaccaaccaggcatctgatcagccaacaaggtgactctggcctgcagcactggaggagattcgttagcgcagagactggtaggacctgtaggagatagggagaaaaggtaaacgattagatgacgagaggatgatgctatatttatcaagtccgcagcgccctgcctctcttgtgacggcccgcgacacaagtgtggtgattgacagtgacatcgctcactctaagttaggttttggttcttccctggcccccggaaatcatcacctggcgccgccacattcgaatggagatggatctgctggcatcatcttgcttcctcttttgtaaagcttttcctgctgagtttagtggtaccttagattgtcgtccatttctgccctgttctccgggcagctatttgtagtgtaaaaatatggtggcgtgctggatggtgtt

SEQ ID NO: 32653 - DNA, 2009 bp, Zea mays
  Clone ID: UC-ZMFLMO17012A12_FLI
tggaaatccatcccttcaaccttgtggactgtcaacgctctccagtcctttagtgaatgctcgagcactaagtgaggcagacaataatccaccagctgataatacagcccctgatgacaatggtaacggtggcggattcagcaaaatagagattgcctccataacttcagcatcagcaattgttgcagttctcttggctctggtcatcctttatatttacacacgaaaatgtgcatcaagaccatcaaggcgttctctaagaagggaagtaactgtttttgttgatattggtgctcccttgacatatgaggctgttttacgtgccagtggaagcttcaatgcaagtaattgcatcggaagtggtggcttcggagcaacgtacaaagctgaggtagcaccaggaaaattggtggcaataaagagacttgctattggaaggttccaaggcattcagcaattccaagcagaggtcaaaacacttgggaggtgtcgccattccaatcttgtaacactcataggataccatctcagcgattcagagatgtttctaatatataattttctgcctggtggcaatttagaaagattcatacaagaaaggactaagagaccaattgattggagaatgcttcataaaattgctctagatgttgcgcgtgcacttgcatatcttcatgacaattgtgtcccccgcatcttacacagggatgtcaaaccaagtaacatcttgcttgataatgattacactgcctacctttctgattttggattagcaaggctgcttggaaattcagaaacacatgcaaccactggtgtggcaggtacttttggatatgtagctccagagtatgcgatgacatgccgcgtttctgataaggcggatgtgtatagctatggagttgtacttcttgaactcatttcagacaaaaaggcactggatccttctttctctccttacgggaatggattcaacatagttgcctgggcttgcatgcttctacaaaagggtcgagctcgtgaattctttatagaagggctgtgggatgtggccccacatgacgaccttgttgagattctacacctgggcatcaagtgtacggttgattctctttcttctaggcccacaatgaagcaagttgttcggcgacttaaggaactcagaccaccgtcttactaggaatagcaagcagagactggcttgcttctgcataatgagaccaagactgctggctgtttgggtgactgcaacagccagtaatgttccaaataaactggtggcaactggcaagcaattcaaatgtcatttctcaagggatcctcaagcaggacattcatggtatttaatcatttggtcgtcatggtcactgtatggaacgccgatatcgcttcaatgccactgcaagcaagcatcaaggatgcctgaggaagttcttctatgcctgccaaatctgatgactggattaggctctgttcgtttagtccagattggaggccggaaccattccaactcatcaagctaatacaaatttgcgaactattccaatccggaaccaatccagtaaagcattcaggaagaaccgaacgggcacttaggcattaccgacccagttaacaggatgcattatataccttgctaagcaattattacggcgtaacggagatcgaccaccttgactcattggaacgtagccatatatctggcagttctagcatatatctgatcaaagcaaagccatatatctggcagttctggggtgatccgtccgtggaaaaggcttggccactgacctgcgcgaggacaaagcagtagaaacatatcagccaatcaaagcaaagccatatgaattcatgttaaacatgtccatacatatagcagtgaaaagtatcaaatcactgatttcctttcttggcctttgtaactgtatatactgctttcgtggcctttgtaattgttcatacttcttccgggcattcattatgcaggcatgccgttgccgtgccattctgtt

SEQ ID NO: 32654 - DNA, 721 bp, Zea mays
  Clone ID: UC-ZMFLMO17012B02_FLI
tgccgacagaggcacgagcgcctccctcgtcttcgttccgtctctccccacagggaaccgccgcccgtcgcctccagatacgtgcctccggcggaaaatcggtatcgagctcgctttgttcgaatcttctgtatagccagcaaggaggcctctccatctcctccgggaagctattgtgcaggctgtgcagcaatggagaagtataacagcaagactcagttagcacccttgagagataccccatttgctctccgtggtgctcttggtagttcaagctcataccttgagcaagccaggggctacacgtcttcccctctagcagctctgcgaccaaagatgtcttctactactggaaatcgactcctgcactcgagttgccccctgtcatctcctgtagcaaaccgcccgctgtcgccccaccttcctctgaagaagccacagttcagcgcgactttctcaatctcgcatcgtatattcggtgtcgcgttgggagttgccatcgtatctgttcctctcgccaccaagttcagcctaatgtttggtgtctgagagcgatttgctgcgtctcatgagaaacatcattttccgtttctgtgtctgtttttcatcgtctcggttaccttgcgacacaactgtaggtgccgttggaataatatctttgccatgcttgcagacttgtgtaataagtaaataaacctataaaataccagtttaactgttt

SEQ ID NO: 32655 - DNA, 1073 bp, Zea mays
  Clone ID: UC-ZMFLMO17012B07_FLI
gctaatcagtaaatggcatgctatgagttctgtcgtgaataactctctgggagcaatggcttggttttgtggtgggcgtttgaacaaaatctttaggattaacaagactttgtaggttgaattagaccttgcaaaattatgattttgtcttagtggtgtcactaagcatttgccaatgcccagaaaattatgattttgtcttattatatcgacaccatgcatattccaatcttctgtcatgcctcaccactttggagtctctatccagtctggtatggcccttctggaacctgcgcttaatgatgtacaaaaaaggttggccaacatgtgggcgtcactactgttattacgtggctaggtccgctctctctccgtataatggttatcatgaatgaaattggaagacatgttctaccttctaccgctcttgctagatggcccattgtattataatttgatttgtatcagtttagttcattgatgagatattatgacttgttcacactgcatttttacagtttctcatgcagtgaaaaagctattgttgcatcacgagtgtaagtaaaatgaattatcctccgtaatggatcatgcagacaaataggaaattgtaccattaacacaaaacatgaactatcacccaaacagaccctatctataaggctaataatatctaacactcttgtgacattgcttattgtgtgtaatcttgtgtgaagtcagtttgtcagacaatgactggttggttcgagctcttcgccatcggctgcctccgagctgtggcttcttcctgctgggaaaatgcctctccgccatcgaccgcctctgaggtgcggcttcttcctggcgagaaaaatgcctcccaatccctcatggcttcatttcgttacttatatcttgctaatgtgtttcattgtgctggtaatgagcaattctcaaggggatttcgaatggactctcgtatgggcaggggctaaaggagatggacaaactggtgtgattctcgcctttgttgttcatgttcttggggatgtaggagggcactatatttggagcatatttttggcgaaatt

SEQ ID NO: 32656 - DNA, 1077 bp, Zea mays
  Clone ID: UC-ZMFLMO17012B12_FLI
ccactattgtctctctcgaaatcggccgtctctctcccgtccggcacttcctccgatcgactagcctgcggcggcgccggcgccggcgaccagcggccatgcgggtggcacccagggtgctcttcctcgtccgcgacgccgcgggctacggcgctgccctcgccgacgcgctccgcccgccgcccgggctaacgagggagtcctcgcccttcgagctcccccttggaaagtacggcctcgacggagagaaggcgtgcgccgagctcctgagcttttccgattccagtggctctccacaggtgaccatttttgttctgccagactataagccacctcttgcagcgtgtgttgtaaatgaggtcttggaactgatttcttctgaagctacctccactgagcgaactctaattgtcccatacatcacaagatcgtcaagctatcatcatggaacggaacatgcaacaaaggcatcgactgtacttcatggtgctgaaataggggcaacaactgactatactcacctgttggttggtgggaccactaaacctcctacatccttgcaaatacgtagtgaaccaatattatgtttgctggaaatggtgcgcgtgttgaagatgcctacagttcttgtcacttctggtggacagcagcaaggcaagagctctacagtttctgatcttgaggtactgcaaagcttaggagagcacttggccaagcacacggctttggaattttccaaaggaactgttctcaagagagggatcgaaaaatcaccaattgatcaggaaccctggcgcgagctgtatgggtgacggtgccctcatacagtttggtattagcttaattggctatacatgtttgactcggatgaatgatggtgttttatggagctggaatcacgaaggatctggtccgtcgaaaccactatatataatgtggttcctttcgcctgggtaaatcaactcatcagcaagatatcggatgtcttagaacttgtagacgctttgcagttaaacattaaacgaaatacatttacacttctaacctcttggccagtagtattcaagggttaggttt

SEQ ID NO: 32657 - DNA, 2143 bp, Zea mays
  Clone ID: UC-ZMFLMO17012C02_FLI
gtctttgtgaaattgggcttgaggattattcgtttgtattgttaagtagatacatcaatgctcttgaagctttaggtggatcagcttcacttgcagagggtcttcctacaaatacaagtctatgggatgatgcccttgatgcccttatcattggcataaatcaagtttgcttttcaggttggaaaccaaatgagtgttctgcaatagtgaatgagcttctttcttggaagcagaaaggtctatctgaatttgaaggcaatgaggatggaaagtatatttgggcactgagactcaaagccactcttgatagaacaggaagactaacagaagaatactctgaagcacttctttcaatattccctgaaaaagtcaaggttcttgggaaagcccttggaatacccgagaacagtgtcagaacatacactgaggctgaaattcgtgctagtgttatttttcaggtctcgaaactttgcactgtacttttaaaagcaactcgagcagttcttgggtcgtctgtgtgggatgttcttgttcctggagtggcccatggagccttgatacaggttgaaagaatagctcctggatcattgccgtcatccatgaaagaacctgtcgtgctagttgtaaacaaggcagatggagatgaagaggtcaaagctgctggggataacatagtgggcgttgttcttctacaagaattacctcacctatcacatcttggtgttagagctcgtcaagagaaagttgtatttgtaacttgtgaagacgatgacacgattaaaaacatgaggttacttgagggaaaacatgtcaggttgggtgcatcatccaataatgttgatctttcagttgtatcaaacaaagatgactgtgctgccatgtcttcagagccatccgctggaggagatctatttgcacagcaattctcactattgactacagacaagaagttagaattgtctgagcaaaagagctatacttccgtagcaaatggtatgtctggtgtgctcgagctttcagaggcatcgattgaatcatctggtgcaaaagctgctgcatgtggaactctttcggttctttcctcaatgtcaaataaagtttacaatgaccaaggaactccagcagcattcagagttcctgcaggtgctgtgattccttttggatccatggaggacgccttgaagaaaagtggatcaatcaaatcctacactaatcttctagagaggatcgaaacagctcaaattgaaaatggtgaacttgatagcctatcctcgaagcttcaagcaactgtttcacttctttctccatcggaagaaatcattgaatctttgaagaaaacatttgatcagaatgttcgactaattgtgagatctactgctaatgtggaggatttggctggaatgtctgctgctggactctatgaatcaattcctaatgtcagtctctctgaccctagatcctttggagctgcggttggacaggtttgggcatcattatacacaaggagagcaatccttagccgtcgagcagccggtgtacctcagagagacgcaaagatggcggttctcgtgcaggaaatgctgcagccagatctctcttttgtgcttcatacaattagcccagttgaccatgatcccaaattagtagaggctgaggttgcccctggtcttggagaaaccctcgcttctggtacccgtggcactccatggagactctcatgtcacaagcttgatggcaaagtcacaactctagcttttgcgaatttcagtgaagagcttatggtgctcaactctggccctaccgatggtgaaatgagtcgtaggaccgtagactacagcaagaagccgttatctgttgatgcaacctttagggagcagtttggtcagcgccttgccgccattggacagtatctggaacagaagtttggaagtgcccaagatgtggaaggttgcctggttggccccgatatatttatagttcagagcaggccacaaccacaataaacaaaaagttttgtgtggttacctggctagctgaataaaaatggatactggcagaagaaatatatggacttcgtagcacgcgtaggagtgatcgagtcttttttaatatgctatctcaggtaaaataataatttattggc

SEQ ID NO: 32658 - DNA, 1910 bp, Zea mays
  Clone ID: UC-ZMFLMO17012D05_FLI
gaggcaatcaagaacaccacctaccgctgacttgtcaattcctgtctgtgcgcgcgcgcgcgtggcgccggccgagcggccgttgacccgatgaccggcgcggcggccgtcgatcccccggtgcctcggccgcggcggctcacggtcctcccgctcatcgcgctcatcttctacgacgtctcgggaggccccttcggcatcgaggactcggtccgcacgggcggcggcgcgctgctcccgatccttggcttcatcgtcctcccagtcctctggtcgctcccggaggcgctggtcacggccgagctcgcatcggctttccccaccaacgccgggtacgtggcctgggtgtccgccgccttcggccccgccgtggcgttcctcgtcgggttctccaagtgggcgtcggggacgctcgacaacgcgctctacccggtgctgttcctcgactacctccgctccggcggcgggctggcgctgccgccgccggcccgctcgctggcggtcctcgcgctcacggccgcgctcacctacctcaactaccgggggctccacatcgtcggcctctcggcgctggcgctcaccgcgttctcgctctccccgttcctcgcgctcaccgtgctcgcggcccccaagatccgcccgtcccgctggctcgccatcgacgcccgcgccgtcgacctcaggggctacttcaactccatgttctggaacctcaacttctgggacaaggccagcacgctcgccggcgaggtcgaggaccccaggaagacgttccccaaggcggtgttcggcgccgtcgggctcgtcgtcggcgcgtacctcattccgctgctggctggtaccggtgcgctgccgtcggagacggcggccgagtggaccgacggcttcttctccgaggtcgggcagcggatcggcgggccgtggctgcgcgtgtggatccaggccgccgccgccatgtccaacatggggctcttcgaggccgagatgagcagcgactccttccagcttctcggcatggccgagatgggcatgatccctgccatcttcgctcgcaggtccaagtacgggacgccgacgttcagcatcctgtgctcggcgaccggggttgtgatcctgtccttcatgagcttccaggagatcatcgagttcctcaacttcctctacgggctgggcatgctggccgtgttcgctgccttcgtgaagctgcgcgtgaagaacccggacctggcgcggccgtaccgggtccccgtcggcaccgcgggggccgccgccatgtgcgccccgcccgccgtgctcatcgccaccgtcatgtgcctagcgtcggccaggaccgtcctcatcaacgccgccgtggtcgtcgccggcgtcgcgctgtactacgtcgtggagcaggccaagaggcgcccgtgggccgagttcttggcgcccgtgccgcccgctgacagctcccacggaccagccacggcgcctgatgacgccgacgccgccgacctcgaggatgtccgcgccgggctgctcgccggcgagccggccgacgaagaaggcagcaaggtcgagtactcaagactggagattcgtgcatgaacccgtttgccgttctgtgtacagtaattccagcgaatacatggcgaattattgtatgaaattcagaggagccgaggaggaggtcaggtgatcgatcgcgctcacaagaagattcagaactgcaaaccgagtactagataagtctgaaccatgaatcggagaagtgagaacagatctcaaattgtagaagctgtttttgttttgaccttttaagtgtagtgtgatgccggtttgagacgaagctgtatttttccagcaagggggtcagataggttgtactgtacttgcattgagtcaacttgataattcagtaaagtaaccagcat

SEQ ID NO: 32659 - DNA, 597 bp, Zea mays
  Clone ID: UC-ZMFLMO17012D09_FLI
tgaaggagcggagggttccacgagagactgcaccgccgggagggtagcacctgctatcatgccagacctcatacatctggagttcaatgtccctatcgcagccttgtataagagaacagataatggatgcagctgttacagcctcggctgggagtgcctcccttcgctacacaaaatcaaggcgcgtgtcgactatgacggcacctacactgctgatttcgagaagccagtggctgagatgatgcaggcagcaaaactccatcccaaccaacccataattgagatggttactcaattctaagaagcctggaaaactgccatttaatactggttttagcaaccggatgaaaaggccgctaatttcccactagatatattccatttccttgcttttcgacagcttggtgttgtatgtcaaattattaagcagctttgtaataagactgtgtggtgccactttaggcgcatgatgcttgttcctaaacaaacatgaagtaatctcttggtattgtatgtcttggaaatttacacatctcttggtattgtagagtgtaaacagcagattggttcaattcaatacagtttagtttttgtttc

SEQ ID NO: 32660 - DNA, 2526 bp, Zea mays
  Clone ID: UC-ZMFLMO17012E02_FLI
gcggccggtgcagctgtagccacgcgcgcctcggcaaaccctccgcctcctcgcccatcctcccctccatcccgtcccagccgcagggccatggactcttctgccggcgcaggccgccaccgcgttcgaatcgcagtcgtcggcgacgtgcacaatgattgggcccttgaggaagattcaaaggcgcttcgatttcttcagccggatttagtgctttttacaggtgattatggaaatgagaatgttgaacttgtcagaagcatttcagatcttcagttaccaaaggcggcaattcttggcaatcatgattgctggcacacacatcaattctcagagaagtaagagtcacgatctcatcctgaaaggagaaagtactaaagtaatttaatttctttttatgtcaaaatgtactggttggtattcaggaaggtcgatcgtgttcggcttcagctcgcaagccttggtgagcagcatgttggatacaaatgtttggacttcccatcaattaagctgagcgttgttggtggacgaccattttcttgtgggggtgataggctacttagaccaaggcttctgtcaaaatggttggtaagagatatgataactaatacatacatatgcttgttaactttctgttttgtactttgatatttcttttgtcatttccttgaattaacattgagattttgtaatgttgttggaatcatgggattacagcttaccacccaagacggtaaaaactgctgaagttattttctcaccaactgcatctcacatgttattactcccattttcatgtatgtgtctctcaggctctcagctgcaggattccaaagtatagtcatatagatctctctctctctctttctcgaacacgtaggagagctgcacatgattatattaggaagaaaaaaggggaagaacccttacaatcttgcaacattcgctgatccagttgtctgggtaaatactagtaacttaaatgatgagtgatggggtggctaacctccaagaaataaggaaatcgactgtttcttgattttttttaaaaaaaaactcccatcaagtttcagatctagattacagagcatgcactgtggtctgttggagaaccaaaaccaatctggatcaggatttcacaagaaataagattgatgccttgattcattgttttgtattgttgatatcttagtcgtatcacatggctggttatcaggggtttttgtaagcagtagaattacaactggaatgacctttaggtggtaggaaattgcgtgaaatggtggtaattgatgactgatacctgtccagcagtgtactctagattgatgcttttacggactgaaggcatatcttatctttagaaggatggctggatttttattgtggagctagcttatttgattcacattcatacatcactaactatgatgttaggaccaaatggtagactacaataggaaatttgcagctctagctaaatcagctactatttggtgtagtcagtcacagtagctcttggaaaatttagatctatgcctggttttattgcactagcaatgtatgctactgccttcttcgttattgcataatactctccagaaaatgtagctccaccttttcttgtgcaatcaagtatagcctcacacaatattctcgtttccttcatcatttcccttgctgatacctgtagttttgatccatcttcacccatcaccattgaacacttactatagttataataccttatagttatggtgtcaatgatatggctggaagtgcaaagaagatatacgatgctgctgcaggtgcaccagagggacattctgttgtattgcttgcacataatggaccaacaggtctaggttcaagaatggatgatatctgtgggcgggattgggtacctggtggcggtgaccatggcgatccagatcttgagcgagccatctccgatttgcaaagggaagccagagtttccatcccgctggtcgtttttgggcacatgcacaagagcctggcctacggtagaggcttgaggaagatgatcgcctttggagccaaccacatcatatatctgaacggagcagttgtgcctagagtgaaatttgcccaaacaactcctgggcacgagcaaaatcaacccgaaggatcgggatccatagctccaacgttgcgcgcgttcaccattgcagatctctatgaagggcgtgtggagaagatctctgaggtctgggtgctggtgagtggcgccaggaccgaggtcgaggaggaaatcgtcttgtacaagcatcctcgagagcagcatatgtgatggttatgagaccattatcttaccaaaaaaaagatgtggtgttgtgagacgaaaatgtgactgttgtgaatgccgtaaatgtgggggcgatgctgaagttgtgtgttataaagtgccttgtattcgaactgaaaggagcacttcattatagagatcttttacctctggcactctgtgactgttattagtaagtaataattctagctaattgacgg

SEQ ID NO: 32661 - DNA, 579 bp, Zea mays
  Clone ID: UC-ZMFLMO17012F03_FLI
cccgacgtcactcccttcctgaaggcgtcgcttctgaagtttgtctcggccacgtcgtagcctgtggtggttgctttcgtctttcgggtgccggtttgcgtgtggaggtgggagcttgcattatgaagtcgaagctgctatgtcaggggatgtggctcggcaacgatgacgtggggcgaaccccccttcttcgtgggttggtctgcgtcgaagacgaggcatttggcggaggcggggcggtggattaaggttttggaagtctcgctggtgaagaatcggagctgactcgagtggggtgtctcgtggcttggcaacgacgacgcgtcgcagtcttccttctcctgtgccggtgtttgtaatcgtcgtgtttcctttggccttgtgctgcccgtcttgggagtcggagctcgtcacttgtgttgagctcggcaacgatgactcaggatgggtactgtgtgtgtgggttgctgttgtctgggttgtttgtgcgccctgtattggttttgggcccggtttcccttaaaactgggtcaattcttttcttcttaattgagaggcagagttcctgccattacgttc

SEQ ID NO: 32662 - DNA, 470 bp, Zea mays
  Clone ID: UC-ZMFLMO17012G08_FLI
gaagagatatggtggtggtaaagctgacacagctcttgcaaaaagtctaaataaagaatatggaccagttataaagcagcacattcaatatgttcttgatcattcagaggaactagataaaatgttaaaagtgcaagcccaagtttcagaagtgaaaaatataatgttagacagcatagaaaagacactgggccgtggagagaaattgagtgaactccaagacaagacttctgagctacatattcaggcccagcagttcaagaaacagggagtgaagattcgcaggaagacatggctacagaacatgaaaattaagttggtgattcttggaatccttttgctccttgtaatcatagtatgggtatctgtttgtcagggctttgactgcaccaagcatgaaacataatagaaatggtacaacactgctccatccattttaaattataacatgttttggctctttttagatc

SEQ ID NO: 32663 - DNA, 1300 bp, Zea mays
  Clone ID: UC-ZMFLMO17012H07_FLI
gtggtgctgttcaacttcggcgactccaactccgacaccggaggcgtggcggcggccggcgggatacggatcatgccgccggagggccgcacctacttccaccaccccacgggccggctctccgacggccgcgtcatcatcgacttcatctgtgagagtctgggcacgcgtgaactgaacccatacctcaggggaattggttcggactacagcaacggcgtcaacttcgccatggcaggctcgacggtgacccacggcgtctctccctactccttgaacgtccaggtcgaccagttcgtctacttcaggcacagatcccttgagatgttcgaacgaggactggaaggcccggtgagcaaggaggggtttgagagcgctctgtacatgatggacatcggccacaacgacatggttggtgtggcgcacacaccgtccgatcagtgggacaagaagatcacagagatcgtcggcgaggtcagacaagccatctcgatcctgtacgacaacggagcgaggaagttctggatccacggcacgggcgccctggggtgcctgccggcgctggtggtgcaggagacgaagggcgagcaggacaagcacggctgcctcgccggcgtcaacagggccgccaaggcgttcaacaggaagctcagccagctctgcgacgacctccgcttccacctcaagggcgccaccgtcgtctacaccgacatgttcgccatcaagtacgacttcgtcgccaaccacaccaaatacgggatcgagtggccgttcatggtgtgctgtggcaacggcgggccgccgtacaacatgaagcagggaagacccggctgtggcgacctgtgcccaccggaggcgaaggtggtcagctgggatggcgtgcacttcacggatttcggcagcggccttgctgccaagcttgcgatgagcggggagtactccaagcccagggtgaagctggcaagcttgatccatggcggatccaagaaaacgtcagactcttgatgcggaccattgaccgagtcgtgacctttggatccacatctatggaatggaagatgggtagcggtgaagaattggagggatatcttgcaccaggctgtttcttgacgaagattgactccttgtacacactacacagaactactacagaaggcaaagtagcactgggaatgctcagttacaagcttaagttaatttgctgtctttttattttgggattttgtgctgcagagtacagagattttgtaccttgatgtacgtgtaactatttatgatagttcttacaagctccaaaagg

SEQ ID NO: 32664 - DNA, 2346 bp, Zea mays
  Clone ID: UC-ZMFLMO17012H11_FLI
gatcacttcttcctctggattttgggaaggaggcatcggacgtcggatgcatgacacactcattgcattagcgcctacgcctaccgcaagtggaagcctatggatctcaagcaagcctcctctggtacaatcttctgccttctgcttctattctgcgtgggctgcagatgtcggccttcggaaatagaggccacccagacagcagccctcaaggttgatgcctcgccacagcttgcccggaagatccctgaaacactgtttgggatattttttgaggagatcaaccatgcaggagctggtggcatatgggcagagcttgtcagtaacagaggtttcgaagctggaggctctcatactccatcaaacatcgacccgtggtccatcattggagatgactcctccgtgtttgtggcgactgatcgtacatcatgtttcagtcgaaacattgttgctctgaggatggaggtcctctgtgatgagtgtccagctggtggtgttggtgtttataacccaggtttttggggcatgaacatagaagatgggaaggcctacaatctcgttatgtatgttcagtccccagaaacaaaggatctaacagtttcattaacaagctctgatgggttgcaaaacttggcttcagctacaataacagtttctggcacatcaaattggacaaaagtggagcagaagctggttgctaaaggaaccaatagaacatcaaggcttcaaataacaacgaacaaaaaaggagttgtttggcttgatcaagtatcactcatgcctgaagacacatacaagggacatggtttccgcacagaacttatatccatgcttttggatttgaaaccacgattcttgagatttcctggaggttgttttgtagaaggtgactggctaagaaatgcattcagatggagagagtcaattggtccatgggaagagaggcctggacacttcggggatgtttggcattactggactgatgatgggcttggatattatgagttccttcagcttgcggaggacctgggtgctgccccaatctgggtattcaacaatggaataagccacaatgatgaagttgatactgtagctattgccccttttgtaaaggatgtattggacagtctggaatttgcaagggggagtgcagattcaacatggggctctgttagggctgcaatggggcaccctgaacctttcctggtcaaacatgtcgcaattggaaatgaagattgcgggaaaaagttctaccgtggtaattacctcaaattctacaatgctataagagaggcctatccagacattcagatgatttcaaactgtgatggttcatctagaccacttgaccatcctgcggatttgtatgatttccatgtctatactgattctaagactttgtttaacatgaggagcacatttgacagaacatctcgtagtggacctaaggcttttgtgagcgagtacgctgtctggagaagtgacgcgggtagaggcagtcttcttgcttcgttggctgaagctgctttcctcactggtctggagaagaacagtgatattgttcagatggcaagttacgcaccactcttcgtgaacgacaatgaccaaacgtggaacccggacgctatcgtcttcaactcctggcagcactatggaactcctagctactggatgcagacgattttccgcgagtccagcggcgccatgatccatccggttaatatcagttcccggtactcgagttcgctggccgcgtctgcgatcacgtggcaagatgcagagaatagcttcctgagagtgaaggtcgtgaactttgggtcggacaccgttaacctcacggtctccacgagcggactcggggccagcgtcaacgcgctgggatcaaccgccaccgtcctcacgtctggcaacgtcatggacgagaactccttcagtaacccgaacaaggttgcgccggtgaaaagccagctgagcaacgccgcggagcagatgcaggtcacgctggctcctcactccttcaccgccttcgatctggcgctggctgagcccaagcttgtggcggagatatgatgtgtgtgctgttagcgatcttgatcgataaaaaggctttgtactggtgtactacgtactgttgcttcatgaaataaaaaccacatcaggtttttgcttggtgttggttggtttcctttctcttgtacgtgtttgctttgcatgttcatcaccatctactgtacgggatgatggtacattgatggtgagaacgatagcctcctgtggattaaacaaactgtcgatggatgccttcatggtaaagaactttatcgtgaatcacggtatgtggctgtc

SEQ ID NO: 32665 - DNA, 736 bp, Zea mays
  Clone ID: UC-ZMFLMO17013A08_FLI
gttcagatctctgactgaggtaaattggcttactcaagaacacggtggtgaattggctttctcaagaacaaggcgttgctgcacacagactactgacatggatggctgttcttccacctttctgaataagcccattcatgtaatgtttggtaaatgcaaaccgcatgcttatccgcttgatactgtgattgatagatccttcacctcgtgccaatattctgtgttccaatgccaagtcacatattctgagcagcaactggagatttgctcatgtaccgattcttcaaggtcctaggatcatttggggtgatgaagattttgaaatacatgtggaggggtacttatatgatgaaaacaaggatggttgtgaagagaacggagtagtggcatcagctatcagggaaagggaagtgctattgacatcatggctgacccctttcagattatcgcgctgagatcttcctggcgaggattgggagccacgagccagatatccttgacggaaatgtttgcttggacaccgtaaaccggaaagtaccggcgatgatattgatgatgataatcgcactgctctctattgtcatactgttgtctgcactcttcagcgacatgtcttgtgccttttcaacgtgcgaaatgtgagcaattgctcttgtaaagctgcactatttcactaaaacattattgtttgggttatttagatccatggtattactatttatctatttggaaactt

SEQ ID NO: 32666 - DNA, 1701 bp, Zea mays
  Clone ID: UC-ZMFLMO17013B09_FLI
ctcaagttttacatcatttgaaccacgaacttaagaactttcaagtttgttgtctccatttctattattctatattgtcttactgttagttatcatgaaaccttccataactgaaaaataaccagtttgactttggttaagatatttggcaggaagcctagtgtgagttaaagtatgatttgactgcttagctgaatgctactggagtctggatctcttaggctgtcattagagctgtggtataacatgcacttgaatggcagcattagcttccaacaaaaccacacaaagcattttttgtttccccctttgaattgtgggattgaagggcagcctctccgcatttgtagggggaaggcttgccttgatttatcccttacctagaccccaccattgtaggagcctccgacactaggtctgccttttcattgtttcaactgactccattgtgtatctatttgttaaactgttaatgttaatgtgaatacaattactctagtggaagataccctacattagacttaagaatgttagaatgatataccttgacaaaaaggtcatattaccaattttgtcatgtctctctgctgttacctgtgctataacattgtcgatgtgtttccagactggaaagtgggagtggaaattcgagaacaagccggtaaacatatactatgaggaacatgagcaggaggttgctgagaatatgaagaacattctcatgatccctacgatctctgatgtgagcactgtggaggagtggagggtggttgccaaagatattgttgggcggaaaggagaacttggctaccgtgttacaattgtcgattggcctggtcttggttattcagataggccatcactgaactacaatgctgatgtgatggagagctttctggttgaactaatgaattcaccaaacagtccagtcgcaaatgcagatgatgaactgatcattgttggaggtggtcatgcagcaaccatagctgttcgtgcagctggtaaagaccttataaaaccatctgctgttgctgctgttgcacctacttgggctggaccccttcccatcgtatttggccgcggttctgatatggaaactaggtatgggcttctacgaggaaccctcagggctccagccctgggctggatgatgtacaatgttctggtgagcaatgaaaagtcgatccagtctcagtacaagtcccacgtctacgccaaccctgacaacgtgacgccagctatcatcgagagccgatacgagttaaccaaaagaaaaggcgcacggttcgtccccgcggccttcctgacaggcctccttgatcctgtccaatcgagggaggagtttctgcagttgttcgccaagttagacggagacgtaccagttctggtagtgtcaacggtcaatgctcccaagagatccaaggccgagatggaggctctaaggggctctaaaggggtgacgaagtttgtggaggtcgcaggcgctcttctaccgcaggaagaataccccttggcagtcgcggaggaactctacagcttcctgcaggaatcattcgcagcaagaaggtgaatgtgcgtgcgtgcgtgcgcacaactgtgccagaagacaggttctcaagtcccacacatcgtgagtaaattcgttagcctgctacagtgtactggaggtttttagcaacaataaagcggcatcactcgttc

SEQ ID NO: 32667 - DNA, 721 bp, Zea mays
  Clone ID: UC-ZMFLMO17013C02_FLI
aagcctgaaaagaaaaataagttctactgcttgcacacttcctcggtcccacatggaagaaaagatttttttcagcctttctctagtgccatcaatgctcgctcacggttcacacactcgtccaccacgttgctacttgcgagcccgtgcagctgcgtttgcgcatctggtttcttctgggtcatctatatacttctctcctagcaggaacaggaacagcaagccactcgctcctgccggcgagacgatggagcgggagccgtcgcgttccactgacatgtgggctaggtatgcgcttcgccggcgacgtgatgcggcacggggctggtggacccctgtggctgcgccgactggtaccgaaccatcggtttgtggacgttctacccgaaggcggggtccggcggcgcctcatgcgtataggacctgcgcgttgcagggcgccatcccggcgaactcggcggagcccttgaccacctcccactccaccacttcgtcctcgacgccgggtaccgcggcggcggcggatgcggcggcagaaaccgtgcccacggcgacgtcgagcccggcgccgacgacgtatatcctccgcctcccgccagcgacctccccgacctcgccagcgacaacgtgcggccggcgcacctcggggggcaccccgctgccggccaccatccgccactcgtcccgggcctcgtcgtaccgcttcagccgccactccccg

SEQ ID NO: 32668 - DNA, 1357 bp, Zea mays
  Clone ID: UC-ZMFLMO17013C10_FLI
tttaagagtgtgtcccttggcttgggtccagcagccttcagaggcaaaccgtcggccggcatgcagtagaggcaggctagctgcaagagagttcatcgatctagctagctagcgtgtgtttagggtacctagctagctagcttcaacatatatatcttagttgcacacacagctcaaaagaaaggaaccatcgatcgatcggcagggagggatggggctgagggagatcgagtccacattgcctccggggttcaggttctatcccagcgacgaggagctggtgtgccactacctctacaagaaggtggccaacgagcgcgccgcgcaggggacgctggtggaggtcgacctgcacgcgcgagagccatgggagcttccagacgcggccaagctgacggcgagcgagtggtacttcttcagcttccgggaccgcaagtacgccacggggtcgcgcaccaaccgcgccaccaagacggggtactggaaggccaccggcaaggaccgcgaggtgcgcagcccggccacccgcgccgtcgtcggcatgaggaagacgctcgtcttctaccagggacgcgcacccaacggcgtcaagtcctgctgggtcatgcacgagttccgcctcgactcgccgcatacgccaccaaaggaggactgggtgctctgcagggtgttccagaagcggaaagacagcgagcaagacaacggcggcggctcctcctcgccgacgacctttgccggcgcgtcgtcgcagggggtcgttctagatctgccggacgaccagcccagcatgacgatggccggcgcgtacgtagcagtggaccaccaccagccaggctcttccgccgtcgggttcgcactgccgccgcatgcgcaggacaacggcctcggcgatggcggcctggacgcgttgctgatgaacggagcgacgatgtggcagtacagctcatcggccctcgccgaccacttcccgccggaggaagtgaccgccgcgcccatgatggggctaggctccaggggaggaggtgacgggtgcagcttcttctacgacagcggcttcgacggcatggggttcccgcagggatggatgggctgaggaggcaaggcaccaactacaacgccatgggatgatggattgtgaaggaaacgattgaattgattccattagtggtagtattgtacagtaggtacgtagtgtgaggttaggtaattggaaattattagagtgcacctccccaatccaaaaaaaaaaacacaacggaatgaaaagtagatcgagcgcatgacgacaattgtatgtatctattcactcttactactatgcttgtacattaattaattagtataaacgaatccaagt

SEQ ID NO: 32669 - DNA, 1982 bp, Zea mays
  Clone ID: UC-ZMFLMO17013D09_FLI
ctgaaggagcagagagagaaaatgttgagggacgtgatgaggcaggtattgttgagggtaagtctctgtcaaatgctcaagtcgacttaaatctgacaatggcaggaggtttgccgtcaaacaattctgcattgcccccgatgcctggacatctcaactatggtggaatgggaagagatctagttattgggcaacccactggaagtgagcttggtggccgtgcagcctcaattgaatctcggggccctagttcgagaaaacgtaacctggaggaaggtgggagcacagctgacaaaccaataagcaggcttcagcctgctgacagcattgagggaaccgtcattgaccgtgattgtgatgaagttgatgacgccgcacaagattctggtgctaggagcaaaaggcctcgttgttttaatctttttgatattaatcgcccatcttcttcaggagctggtcccagcagaaatttaagttttgacctggatatagatgttaataggttagatacatctaatgctgaggttccatccgcccttcgcaacccatttccaagggactctatgagggcatcttctgttattgcaatggatacagttcacggcatggaagaaaattcaatggagagtgttgaataccatccatgtgatgttgatgatgttaataagccttctagtgcactcaggagtggtgtaatgagtgatatgttggatccgaattatagcaaccaagcacagcaaagcagttttgtacagcctgctgctgaaactgaaagcaatgcaagagagataggagggagtagtatgaatggaggggaagaagtcctcaatgctgaaacaacccctgcatttgctagagatcaacttagcctgggagttagcggggggagtgtcgggatgggtgctagtcatgaagctgaaattcatgggactgatgtttctgagcataaaactggtagcgttgttggagatgctgatccaattcctgagctcatcgagactatgggccacactggtgagtcagctcctggacctgcattgatggatgagtttgtccctgaagaagttggtcgagaaggtcctaatggtgatagccaagatatggcatctcggttagcggttcgtgctgacagtggttctaaaatttgtggttcaactaaagctgattcagttgagagtggagagaagacgagccgtgagaatagcgcacatccttctctttcttgcaatgcaagagttttttctggcattgatgcatcaaaagacgaagtgactggtataatgctaactaatgatgactatgatccaggaagtggtctaggagcaacaaatggaggaaacgattatgaaacaggtcttccagacttcgatccaataaggcaccacaacgattactgtccttgggtgaatggaaatgttgctgctgcatgctgtattagtaccggttcgagcacagctctttcaggctggcagctcacggtagatgccatcgagactctgcagtctcttggtcaggcccaaaatcagacgatgcagtcagactctgcggcttcattatataaggacgatcacgtccggcctagccggaagctgctgaaaagtgcgaaccacagcaagagctgagctctggagcaagattcttcaatgctcatagaaaagttgtcttgtcgaggccctaacctgagcaggggcgatggcttgcgtttctgtgaaatttggtcttagtgtggtcgtgctgcatttaccggaagagcttagaaaccatggacacgcgtgataagagataattcttaggccgtgatgtgtgcaggtgacatggcttgtcccccgccatcttgccaaattgtttatgtcaggttgattgtatctatctacatacatgttatgttatttcagtctcctggagtctgtaacatgtagcttgccatttcgttgatggtttgtcctactgaataatattgacacagacgaccacatttatgt

SEQ ID NO: 32670 - DNA, 962 bp, Zea mays
  Clone ID: UC-ZMFLMO17013D11_FLI
ttccattccaccccccgactaaacgccgccgtcaagtttccccctcccccaccatctacagccgccgccgacgcccaccagggctgttgccccagccgccaccagggaggcaccaccgaggagcgcgccaaggtgccggccgcgctcacgcggaggggcctgcccgcctctgctagggccgaggctgaggccggatccacactggcggtcagcgtggcagggacgtgcccgcttgcgcagaggagcagagcgcccgttcaggcgtccgcccgtacgagcgtccgtgcccacgctggcaactgaccgcgtccgagccgggggacggccgcagcgtgcccgccggggcgctcggctgccggggaaagctgcaatccgcaggcccaatccatcctcttttttcaaatttcttttagttaaaattttgtttttcaacaaaaaccagagaaagatcttaatcttgttagggagtttggcttaaaatccacctctacaatgtcaccatcggcctctgcatgctcgattggtgggagcgctacctcttcatgggtacttccaatacatgtcatttaattatggatggttgacagtctcgaagacgttttttagctcagcgtggactggccttgataggttgctaaatctattgcatttttagatgatgtcaataccataaaaaggagatcgggtaagagttacgactgttcctaaccttgcttgtggctgttggaccgctgatttacttcgctgcgtatatcgggctgcttcagccccactctgatgatatgtcctgagttgtggaccaactcttaaagttgatcgccacctttataggtttgtctcgtttaagcagatctggaatcatctgttgtataaatgtgtttactagcctcttgggactagtaattgtatcacatttgagtcctagaggattggggcgttacaataacagagtgtatagagat

SEQ ID NO: 32671 - DNA, 1206 bp, Zea mays
  Clone ID: UC-ZMFLMO17013E02_FLI
gctgcctaggcaccggcgtccggatctcctgctccgctgctcgccgtctcgaggctctccggcgttgactcggcgcggcagcgccccccggtagcctagttccggatcccccaccgcccacgccccacaggtcaagttctgtgaccccaattgccccacccgcaccggctgtccccttgagggaggagacggagacagagagggaggcgtggcgactgctgcggagggcggtcgtcagctactgcggcgagcccgtggggacggtggcggcggagaaccccgagtgcatggagatgctcaactacgaccaggtcttcatcagggacttcgtgccctccgtgctcgccttcctcatgcgcggtgagaccgagatcgtccgcaacttcctccttcacaccctccagcttcaggatttttaggcacagattgtggacaggccattcaaagtctctgaaaactgagcatacacaggagacctggtaatggcatccagacacttcacctcgcgagatgttgcctgagaagatggaaatacaaagtgtcaacaaggcaaaaagtaatgatagtttcatctataagactgagggaagtaagcttatgaaaaatttccttccatagatgcctgactggtttgatcaatattaatctatgcaacttatttcatacaatactagtagatgggatgaaattatttggttttgtccatggcgagttctagctgaagtattttgtggattcagtcaagaagtggggaacacgttctgctacttttcactttcatcagggaagcaaatcagtatctgtcaattattttgtagaaatctagtgggcagcttgtgttcttttttatacatagtttagataattcttgaataattctgagagcatttacatcccttagttatttgttgatatatgatatagtattttcctgctctttttgtatgccatatttatcttctaggcttcaagctccaagtaacagcatgggattcaccttgaaggcttcccaccgatatggtctatttcaagaatatgttctagtgagtctatggtatatacgagtagtcacttatgcctctacgatataagataatgttttatcagtttctacataatactttgcatgccaaccatatcagtgtatttgtagtagtatggtgtataaatgttgctggtcataaagccacgcttgataaggtgttc

SEQ ID NO: 32672 - DNA, 3037 bp, Zea mays
  Clone ID: UC-ZMFLMO17013F04_FLI
tggtcggcgagtcattaggaaaagatttttggatgatcctggtgtagccacagtgtcaaggccacatagaggaaggaaatctaggaatggatgttctagtaaaaagaaaagatcccctaaatccaggggtttgcgacctcggagacgtgctgctgaaaccgcattaattactttcccaaagaaaggagtttcaacagaagaggatgaagatgactccgagagtttctcagatagtgaattgaacacggatagcactgaagctgaacagttagaatggagtggtcagttaagaactagaagagagattaactccccatttgacatcgatgatgttacagatccttctcagtttactgataataaggaaaattctggaactggtaagaaactagttctcagaataccacgacgtgatttaagaactcaatttcctttaggaagcggaaaagcagaatgctccatacaggataaagcagtgaagtctctttctctagctaatcatgaaccagttgagcacgaactgactattgaaccaggacattcccctgcctccaaggctgaattaacaattgatggtgatctgcatgatagttctgctgtttgcagtaataactcaattaggtggggtgaggttaagatgcgatcctcaaagcgttgcaagtacagtgagccagctggaggtttgtggtcctcttcaaataacgttgctttgcaggatatcgagggatcgagcagtcagcagatacctcatgaatatggcgatggcatccagccaagtgttgtgcaaaacgtacaagaagtgcaacatggaacaattctagataacattccggaaaacaacagtactgatgaacacactagagaaaattttggggatttagaaaagatagctaacaatattaatgctcatgcagacggagtgaatgacactgtacaagttcccaatacttctcagcctcaactaaaagttaagtttaagtcaagaggctctgcagatgcagtaggaaatatcatgaactccaagcatgtcaaagattcagtgcagtgtggcgatgattcttccatcaatcaaccaagaaatgctgacttctatattgtgcccaaaagttctcaggaatgcctagataaaagcactagtttgcatgattcaaaaaaaccgtacttggatgcttcaaagaagtacactgcagtgtacaaaaggtcaaagcgaaagaacaagaaaaaaatggattcagatgaatgtccgaacgaggatagcacttctatctccaatgacgatggtggataccaacctgcagaatacagtcctgttgcagctgcaagcagtagattgagaagaagtgctaggaagtcatttgcatacaatatcaatggtacaacacaggatgatatctcggaagtgaaagtttcttacggttcccatgaagcatcaactagtggaagacgagttgtcacagatgtgcgtgaagggatgtggcgacaaaactcaagaagtgttggtttaaggtctgctaggaacaaaagagaaagtaacagcttccttgatacacatccattgggtagaaggcaccaggtttcttttaagtattcatggttaatgttgcttgagcatgaagatagctaccgttatattcctcaactcgatgatgaggttatgtacttggggcagggccatgaggaatatcttaaacaagtgcaatcatctgaattttgcccttggaaccggataaaaggacttaaagctgtagaactttgcaaaatacagggtcttgattatgccacctacagaggatctggtgaaagctgctgtaaattaaccattgaatttgttgattgcacgtccagtggatttggcaaaacatttatgatcacgttgcgtgagctggtcaactttccagattttcttgtggagagaacaaggtacgaagctgctatggagcggaactggacccacagagacaagtgcaaagtctggtggagggacgaagaaggacaggtaggaggaacttggtgggagggacgggtgatggcagtaacacctaaatcacctgattttcctgagagtccatgggaaaaatatgtcatacagtataaggaggatggttctgatcacgctcatagcccctgggaacttcatgagacaggcagtttatgggatccatggaaacatccacatatggatctcacggttcgagataaattgttatcagaaatggaaaatttacaggaaatgtcacacagggatcaggatcattatggtgttttaaaactggacaaggttgcagaaaagtcagatttcatcaacaggtacttctaatatattgtttttaacaagttttcaccgaattataatttgcaaggcaatatttgttgaagttttcttcccaaaagtttgataaaagaattaatttgatacttcgtttcttttttatttcataatatattcttttgtcagacaacacagaaatttaggagataccatgcacggagtacattactttgatttttgttgcttagtacaaagattacaaattaatattatacctaacagtaatgttcatcttaactgactcctagccatacaattcttgccctaggtttcctgttcaattttctattgaggtgatcaaggcaagattagcgaacaaatattacagaactctgggggctgtcagacatgataccactgtgatgctttcaaatgcagaatcttacttttcaaagagcagtgaaatgaccaaaaagatccgcaagctctctgagttgctcgaccagatcttttcatcactgtagggaacattgcttgatgcctgattgacaatttcccttttcgtttctgcaaaaaaaatttggccttaggcatcgagatgatttttactggtcctactgaggcattagagaattagccaaagtagttctcaggacagaaagggtttccggtgtagctccaaccagttaaactagttgctgatacaaagtgctcgttgctaacacatttgaccgtttgatctgttgtcaagatacaatggttcatcct

SEQ ID NO: 32673 - DNA, 1270 bp, Zea mays
  Clone ID: UC-ZMFLMO17013F07_FLI
tctctttctccgggtagtgcaccagcggaacggcgaggagcagaagggaacggggatgggaagcacaggggcgctgctttggcacccgtcgccgcaggtgcactccggtggcgtcctcttccgccagagccggcgcatcgtacgccagcgcaacttgcctctattatcgctagctgacgcggcgcttgagctcgagcgccgccgcgggcagcgtctccgctgcgctgccggcgacggggacggcgggccccgggaggctcagaaggagtctccgagcggcatcggcgcagcactcgaggatccgtctccaggacctcctgtggaaaacggtgccttcagaagcccctcacaggaagaacagagtgctctgtataattttctctatccaagcaaagacttacttccagatgataaggagatgagtatatttgatcatctggaggagcttcgcgagaggattttcatctcagttttggctgttggggctgcgatactaggctgttttgctttttcaaaagatctggttctttttctagaggcaccagtgactgttcagggtgttcggtttttgcagctctcgcctggggaatttttctttacaacattaaaggtttcaggttattgtggccttttacttggaagtcctatcattttatatgagatcattgcatttgttatcccaggtttaacaagggatgagcggaaatttctcgggcctattgtgttgggttcttctgttctattctacctaggcattttcttctcctacacggttctcagccctgctgcgttgaacttctttgtgaattatgcagatggggcagtggaatcgttgtggtcaatagaccagtacttcgaattcatacttgtgctgatgtttagcacagggttgtcctttcaggtccctgttatccagcttctgctaggacaacttggattggtttctagtgaccaaatgctttctatctggagatatgttgttgttggcgctgtcgtcgctgctgctgtgcttacaccttcgacggatccgttgacacaaatgttgttggctggtcctttgcttggtttgtacttgggtggcgcatggatggtcaagctaactggacgataagtggttcatgcaaggcaatgatgctccgggaagcaagagcgccactgtaacctagtcttgtaaaaatgaattcactctgttcatcagatgatattgttaccatttctctttctgaagttcatgagcagtagaaaatagaggaaacggttagttagtttc

SEQ ID NO: 32674 - DNA, 887 bp, Zea mays
  Clone ID: UC-ZMFLMO17013G12_FLI
aggactacctcaaggcggtcgacaaggccaagcgtaagctccgcggcctcatcgccgagaagaattgcgccccgctcatgctccgcctcgcatggcactccgcgggcaccttcgatgtggccaccaaaaccgggggccccttcggcaccatgaagaaccccgccgagcaggcgcacggagccaacgccggactggaaattgccatcaggctgctagagcccatcaaggagcagttccccatcctatcctacgctgacttctaccagcttgctggagtcgtggcagtcgaggtaaccggcggacctgatgtccccttccaccctgggaggcaggacaagcctgagcctccaccggaaggccgccttcctgatgccacccaaggttctgatcacctcaggcaggttttctccacacagatgggtttgagcgaccaggacattgttgcgctttctggtggtcacaccctgggaagatgccacaaggacaggtctggatttgagggagcctggacgtccaaccctttgatctttgacaactcttacttcaaggagcttctgagcggagagaaggaaggccttctgcagctaccaagtgacaaagccctcctctctgatccatccttccgcccacttgttgacaaatacgcagcggacgaggatgctttctttgctgactacgccgaggcccacctgaagctttcagaattgggatttgctgaggcgtaaagtgagagagaacgaaccagaagagtgtggtggttgtcgtcggccggcaggccttgtgtttttgttgtctgcttttctcttgaatgaagatgtgatgaactctgctgaagatgtagtgtgtatgttgtcatggttcatttttctattttatttatctataat

SEQ ID NO: 32675 - DNA, 624 bp, Zea mays
  Clone ID: UC-ZMFLMO17014A02_FLI
agtttttttcctgcccacaagctctaacctgtgttcctcatgtgagcatattgtttctgtgctcaagccgaggatgactcccttcccaaccctgagtgcgctgtcccagagcttgcttgtcgtgttcctgtgccagtggtgaccgcagccacctatgttcacctcatcgtggccaagacactcgaagcaattacacacaaaggtcgcgcctccgtggatcggcgttgaagacaatcctaccgtagacccttcaactggcactttctctagccgattcctcgcaagcactgaagactagagcacctagaataagtggtgtttaaaggaggagtctactccagtggctgctaatcaagtggaggagccatctaactgggtatgatagtaggatctggaacctcttcactgcaataaggtaatcaggagctttctaggtgtccctgtggctggaagatgcttccagtcttgaaggaggattagttaggtttatgtgtgaactttggaagggttctaccttcctgctatggtaataagttatgcactttgagtataacatgacttgtaattattataactctttttatgttgtaaaacttgagttttggaaatataaagtatgtttgt

SEQ ID NO: 32676 - DNA, 2312 bp, Zea mays
  Clone ID: UC-ZMFLMO17014A05_FLI
gtgctgtcctccttctcgccgccgagcgccggcgtcgtcaaggagttcttcgtcccggcaggcggctccggtgagttccgcgtcacgttcacgccggccgccggctcggccgcgttcgtcaacgccgtcgagctgttcccggctccagaggagctgctgtggaacgccagcgtgacgccggtgggcgcggcggtcctcgacatagccgcgtggccgcgagacgcgctggagacgatgtaccgcctcaacgtgggcggccccgaggtgagcgaggagagcgacacgctctggcggacgtggctccccgacgaccccttcctcttcagtcccccggggacctccacgctggagaacacgagcgccccgatcatctacgccacctacacccgcgaggtggcgcccgacgtcgtctacaggacgcagcgcgccgcggcgaacgtgtcagggatggcggtacccacgagtgtcaacgtcacgtggaccttcccggcggaaccggggtcgaactacctcgtccgtctccacttctgcgactacgaggtggtgagcgccgtcgacggagtcggcatcgtgttcaacgtcttcgtcgcgcaggccattggcacccaagacttcacgcccaaacaattcgagacgcagccgaacacggccttgtacagggactacgccgcctcggctcccatctcccggaacctcacggtcaccgtcggcatgtccgacaagagcagccctggcgaaggcggtttcctgaacgggctggagatcatgaagctgcggccttcgggttcgagcttggcggcggggtcacgcggtagcagcaggagagttctgatcatcgcgctctcggccgtgctcggcgcctcggttctcgcgtccgccgtgctctgcttgtgcttcgtcgcgcggaggaaaaggcggatggcgcgaccggcgccactggagaaggagagcagcaagccgctgccgtggtgccaagagagctccgggtgggtgctggagccgtcgagccggtcgggcgagggcacgaccggcgcgatgcacagggtgagcacgcagctccacatcccgctggaggagctgaggtcggccaccgacaacttccacgagcgcaacctcatcggcgtgggcgggttcggcaacgtgtaccgcggagcgctccgcgacggcacccgcgtggcggtgaagcgcgcgacgcgcgcgtccaagcagggcctgccggagttccagacggagatcgtggtgctgtcccgcatccggcaccggcacctggtgtccctgatcggctactgcaacgagcaggcggagatgatcctggtgtacgagtacatggagaaggggacgctgcggagccacctgtacgggggggcggacccgggcggcggcggcgaggcggtggtgctgtcgtggaagcagcggctggaggtgtgcatcggcgccgccagggggctgcactacctgcacacggggtactcggagaacatcatccaccgcgacgtcaagtccaccaacatcctcctgggcgacgggttcatcgcgaaggtggccgacttcgggctgtcgcgcatgggcccgtcgttcggggagacgcacgtgagcacggcggtgaagggcagcttcgggtacctggacccggagtacttcaagacgcagcagctgacggaccggtcggacgtgtactcgttcggggtggtgctgttcgaggtgctgtgcgcgcggccggtgatcgaccaggcgctggagcgcgagcagatcaacctggcggagtgggccgtggagtggcagaggcgcgggcagctggagcgcatcgcggacccgcggatcctcggggaggtgaacgagaactcgctgcgcaagttcgcggagacggcggagcggtgcctggcggactacgggcaggagcggccgtccatggccgacgtgctgtggaacctcgagtactgcctgcagctgcaggagacgcacgtgcggcgggacgcgttcgaggacagcggcgccgtgggcgcgcagttccccgaggacgtcgtcgtgccgcgctgggtgccgtcgtcgaccagcttcatgaccacggccgacccggacgactcggccgtcacgggcgtgggcgccgtcgacagcaaggtgttctcccagctcagcggcggcgagggccggtgaacgatgaccggctactggagtgtactaatcgctctctgttttgctatcgtttgacagtaccataggggggaaaatcacgttattatcacacacacagcagcagctcctagagttgctggtgaatgtgctcaactctgcaaccaaaaacttttcgagcc

SEQ ID NO: 32677 - DNA, 896 bp, Zea mays
  Clone ID: UC-ZMFLMO17014A11_FLI
gctcttcttcaggacattgccattgttacaggtgctgaatatcaatccaaagatcttggtctactagttgaggatacaacagtggagcagcttggcatagctcggaaagttacaatctcaagttcctcgacgaccattatagcagatgctgctagcaaagacgatatccaggccagaatcgcgcagctgaagagagagctttctcagacggactcgacgtatgactctgagaagttggcagagagaattgcaaagctttctggtggagttgctgtggttaaggttggagcatcgaccgaggcagagctagaggaccgcaagctccgcatagaggacgcgaagaatgcgacttttgcagcaatagaggaaggtattgttccaggaggcggtgcagcatatgttcatctatcgacattcgtaccggctatcaaggagacgttggatgatcctgaggagcgcctaggtgctgatatcattcagaaggctttggtggcacctgcagcgctgatagcccataatgctggggtggaaggtgaggtgattgtggataaaatccgggaaagcgagtgggagttcggttacaacgccatggcggacaagcacgagaacctggtggaggctggtgtgatcgaccctgccaaagtgactaggtgcgccctgcagaacgctgcctccgtggctggaatggtgctgactacccaagcaatcgttgtggagaagcccaagaaggctccagcagcagctgctgcagcggcaccatagggttctttcaccatgtaataatactttctagtgaaaaacaattttactaggcatggaacaggcacgttagagtgacgaggagaaaaaactatttttgtcatgcgtgggccggaataaattgagtcaggaattgc

SEQ ID NO: 32678 - DNA, 1792 bp, Zea mays
  Clone ID: UC-ZMFLMO17014D03_FLI
gcagctaccggccgtgacgttcttctcaccgtacgtcgccgagggattagataaactaagcagggcgctgcacgaggatggggtgcggggcgtcgagccagaaggacgccggggcgccgcggaggcggccggtgagcgtcggcgacgtggtcgtcttcctcccgggcctccgcgtgccgagggccgtcgacttggcccaggcgctcggcggctgcctggccaggagcgccgtggaccggctgtcggctctgcgatcgcgggtcgtcgacatggcaatgcgagagtcggcggcggcgctcaagcccaggcggagggcggcggcacggcacgggtctagtacagccaatcttctacaggccctcgaagactacttgccggctctgctaggactggtaaaagaaggtagcgtcttgaggaacaaagtgcacttcacctggagtaaccaggaggataatgctgaggagacggccatgccagacgcctggtacgaggtgctgtccatgctgcatctgatggccatggtctgcctgctgcaggccaacgccctgcttctcccgaggtcatacggcgatggctatgccccaagggtttctgaagagagtcgacgggctactgttgatgtcttcttgaaggcagctggatacctagactgtgcagttcggcatgtactcccgaagatgccactggagctaaggagacaacttccagtagacctggctgaaggaaatctcaaagctctaagcctccaagccctgggtcagggggttgacatgcagcttggtttggctattgatagtccaaaggccactttagcagtaaaacggcgcttagcctgtgagatggtcaaatattggcaacaagttcaagagagcattccagagcttcctatctctgatggatggggtaaaaagcaccggctctttataaagtggaaatatgttgaagctaaggctgcagcatactatttccacggtttgattcttgacgagggaaataccgaaaaatcccatggaatggcaatagctgcactccaagcttcagaggaatttctaaaagaaagcaaaagggtttcagaagccttccatgcaactcctccaacatcgaggagtcccaatccattcggaacagcaaaatatctgtttgacaagatcccaagagatgcttccagcaaggttcgaatcaaccaggacctgtatactcaagaaaaggtcattggagcgccacccccattaccagattttgcattggcgctaacacctgaagaatatgatcttcctccactagatccactttggaacaaagaagacacaagccattaagtgtatatgcagcagaatggttgcttctggcaaaaatattggctctggagagaaaggaaggaccaagatctgccatgtcaagagctgatgtgtaatgaatgaagtgtacaaagtattttcaaacaaaaatacatgttcacaaatttacgcaaggcctgaagacaatctgaagagctttgtacaggcgattcttcttctgacaagggaaatgctatgtcaaagggttccttgatcattgtgcatcttgatgcttgcattttgtcaaaaacagattttcagcaatttatgtagaactgtaaactagcctctgatcgaaagtggcagccttcaaatttttttttgccataaaacatttacatcggcaccttaaaacatgccgtgggacaatcagtttcatctgagcacttaggtgaacaggattttcaaataatcagtggatactgtggcaaagtcagcttccagccattcagtgc

SEQ ID NO: 32679 - DNA, 1145 bp, Zea mays
  Clone ID: UC-ZMFLMO17014D12_FLI
tttataaggaaaaattcagaatttcatctcgaccttgaaaaatgtgcaaaatatcatagcttgtagactgttatttagagctcaattagtacaatgcatgtgctttgcgacggcacacaatcatatttgatacccataaaaaataaatttaatatcaaagtgaacatatgatccatatatcagatattaaacatttaaactgataggaacaaatattacaccttatcttagtcaaaagaccgagaaaggtataggccgctcggtcgctcgtcctcctccagctagcgagttggtactatgtgggagcgttgcgctgcgagtggcggcttcttatcatgttgggcttgggtggtttctcaaggcccatctgtactgtaacggctcattgttaggtgagaagtaaggaagagtaacagacctacgcgcttcgcacgagacgctcgacgcacgaaactggtgctttaatagagtagagattaaaagatttcatgcaaagttttgatttactgattctgttcaataagcttttctatttttccaacagattgtgagtaggattaagaaagagtgccctaatgtaccccttgtgttgtatataaatggaaatggaggtttacttgagcgcatgaagaacacaggagttgatgttattgggcttgactggacagtggacatgactgatggaaggaggcgccttggtaatggcattagtgtacaagggaatgtggatccagcatttttgttctcaccattaccagtactgactgatgaaattcatagggttgtgaaagcagctggtccaaaaggtcatatacttaatctgggccatggtgtacttcagaaaacacccgaagaagctgtagcacatttctttgatgtcacaaggcgcttgagatatgacacccttttccaaggttctgttgctgaagaattgcatcacgttgcttgacaacggcaatgacattcccatttttcatcaagtggtgtatttgatctgtcatatcatcttagagtcgtagtagattcctagtgttgcctgcattctacctttcaagagagactcattttcttaagcctgtatatgtattgcagagataccggcggcaaatctagtgcaattttattcattgtttgttcgttccatt

SEQ ID NO: 32680 - DNA, 832 bp, Zea mays
  Clone ID: UC-ZMFLMO17014F10_FLI
tcagcacacggcgcacccaaacatggccgctccgaccaccgccgtcgacatcaccgccccgcctcctacacctccctcggcagagcccgcggctgcacccgcaccggatcaaaaggtgtctcctcctcctcctgcccctcagcctgataccgctgctcccccgcccgtgcccgcgccagcgccgaggaagcggaagctcgaggaagcggggttccacacctccgaatgctacaagatccgtgccgtcgtcgccgacctgcgtgtccgcttcgtccaggtttgccaagctactgatttccgcaacacggatccagctcgtgagattttgaaagaaataaatgtggtaatggatctatccaagaaaatgaggctcaagcttggtgctacttctgagcctgtgaaaccactggagaaaccttcagctgggtttgtgaaggatgagcttgtgaaaccatcagagaagccttcagctggacctgtgaacgacgagcctgtgaaaccatcggagaagccttcagttggacctgtgaaaaatgaacccactgagccagctccagctggagaaaacaatcaagctcccacggtcggtcagactacagtttctccgaatgatgcaggtgttggtgcaccagtagtcaagcatgacaactcagaggcgcagaagtcctgatccattgagatggcatatcgtgcacatctgctcgacaaaaatgtagagtggccggttgatcccctgtgggctcagattttctttcttctactgtaggtaaaattgtttgttttgggctaatcgaagaagagtggtgggcgtatcaagatccaaattttgttg

SEQ ID NO: 32681 - DNA, 1357 bp, Zea mays
  Clone ID: UC-ZMFLMO17014G05_FLI
acttctgcacaggcgagtgcggctgattcttccaaggcagctacaccgggagctttatttgaggataaaccccaatctgcaaatgatacatggagaaaactccactctgatcctctactcctaataaggcagcgggagcaggatgcgatttcaaggattaaaaacaatccaatcaagatggccgagataaagaaatctgttgaagctgagaaaaagcaaaaagaagagaagaaagcgaagaaaaagcacaagaagcatcaccaccataagtcaaagagtaagaggcatcactcagatgagaattctgattcagatgaaataagtgatggcaaagatgagagaaggaagaggtctcattcttctcttcataagaaagaagagaacatgtccaggcataagaagcagcacagagaagattcatcagattcagacgatgaaccgcagagaagaaagcaggatgtatcagaaaatgatgaaccgaggagaagactacatgacgacaatgaaccgaggagaagatggcaggatgacgttgaaccgaggagaagactacatgacgacgatgaacccagaagatggcaggatgacgttgaaccgaggagaagaagacaggatgatggtgaatcaaggagaagatggcaggacgacgatgaactaaggggaagacggcaggttgatgagaaaccaagggaaagaagctacgttaatcgtccaagatatgaccgctctgacgctgatgataggaggagacaccattcacctcgagacactaagcccaaaagagtggatgatggccacaaaactggaaattccacttctgaacaccattcccgctctgaacaaggctctggcgagcagacaaggcaagagagcgaacatgacaggaatagtggtccttcattgaaccgacgacgcggtggtgtccaccatatgtcagaagaggagaggttagctcgtctgcaccagatgcaggctgacgctgaggtccacgaggagcagagatggaagaggctcaagaaagctgcagacgacgatgctaaagaggcaacaactgtgaatgcaaaccagttcaaagggaagaacttcttggaagatgaaaagaagagcatatttggaacagataagggtggcagtgccacgattgaagagagcatcaggcgccgcgctttctactcgcagggtgggcgtgatgccgagggcaatgccttcaggcggtgaatatattgttttgttgtttgctgccttgttggactcatcttgccgtcgtgttcgttttattattgtacgtgaaagttgagaactatgtacaacaatttctcaataacagcaattttatatgcaacttcaaatttttgat

SEQ ID NO: 32682 - DNA, 2601 bp, Zea mays
  Clone ID: UC-ZMFLMO17015A04_FLI
gggggccgcgaggccgacccacgccacgctcctcctcagctacagtccctcctccaccgctgctgcgctcacgctcctcgacctcccacactcactgtcagtgtaaagctcacgccggaggccggagctagctgccccctgcccgtgcgtgttcatcctggctgctcatctatctctcttgctccgatccaagatccaacaaggtggtgggcggcgggattgcggttgcggcagtagggttcaggctcagataccagcctcctccgtctccgtttccagcgggggcgagcgctaccggggagctcgacagacgccgcgccgcaatgcccaagatgttcggtttctctcggcgccggatgaagctgggcaggttgaagggccatctgcacgaccatttccatggccctcgaagcccgtctcggaccaccaagcgttccagccatcccaacgcagaggatccattggctacctcagtgagtgggcgcgccgacgacctcgcctggcgctgctcgtccgacactttcgatctcaatgggcgcgatttcgagagctcggagaactgggcggtcctgtccaccgagggtgacaagccagctcctcgtttcgatcatgcagcagccatggtggggagcaaaatggtggtgtttggtggcgactccggtcaatctttgctagatgatactaagatattgagcttagacaagcttacctgggattctgttgctcctaaagttcgaccaccattgaacgggcgttctctgaagctgaggccatgcagaggtcattgcctggtttcgtggggaaagaatgttattcttgtgggagggaaaagtgatcaaccttatgacaagatatcagtatggaccttcaatacagagagtgagctctggtcttatatggaagcgaagggtgacattccggtgtctcgaagtggtcatacggtgattagagccggtcctgttttaattctctttggaggtgaagatgccaaagggaagaaactacatgaccttcatatgtttgatctgaagtcattaacatggcttcctctgaactataagggtgctggaccttctccaagatcaaatcatgtagccgccctttacgatgatagagtcctattgatttttggaggccagtcgaagtccaagaccctgaatgatattcatgctctagattttgaaacaatggtatggtcaagggtcaaaacccatgggcatcatccatcacctcgagcaggttgctgcggagctctttgtggaactaaatggtatattgcagggggtggaagcaagaaaaaacggcaccctgaaacatgggttttcgatgtccttgagtccagatggtctgtttgtgtagtgcctcctagttcctcaatcactacaaagaaaggtttcagcatggttccattgtactacagggacaagatcgtgcttgttgcttttggagggaacaaaaaggaaccatccgacaaggttgaagtactagtggtgttgcaaaacgagcactgtttcagctggcggtctgcgcccgaggtggaacccttactgtacgacgagtctcctccaggctcaagggaactcgccgaccacctcagcagctgcgctcctccgtatcctactagctccgcggcgaggagcggtctcgccgccacagcggagaactcctgcgggaggaaacccctcccggactcactgctacggacctcgaacctcgggggctcgtcgctccgcaggcagttccgtcaggaagaggagtgcagcagcctggcgcaaaagctgcagaaaccgatcgacgacgacaggtacaaggacgccgccgacgagtgccccgagcaccaaccgccctcggccacgaaccctaaaccgcggaacgacgcgcgccggtcgtccccggaggtcgtcgtcgacgctaaagcgaggaggctgctgggcaggagctcgtcggacatgaacaaccaccaggacgcaagggtggccgccctggtcaggaggaacgtggcgctggaagagcagctgtcggcggcgctggcgagcaaggacgaggcggagaagaacctgtccctggtcatcgacagcaaggacggcctggagaagaggctggccgagaaggacagggaggtcgaggcgctgagggagaaggcgacggggttggagctggcgcaggaggaggccaacagcctctccaacaccgtccacgccgacaacgtgcggctggagcgcgaggtggcgttcctgaaggccgtcatggacgagacccagaaggaactgcactcgactcgcggagttcttgcaggagaacgcgcacgggcattccagcttcaggttgaagtctttcatctgaagcagcgcctgcagacgatggaagggaggtcacccgcagcaccaagaaagcctcagaatacgtagggtagggtgcaggcgtgtagagtttttgagctgtagattcattcagtgttgtactgtaactgtagtaggtgccggagctactgtcatttgtaatattattcgacgcgatgcgatgcaaacgtatttcgcaactgggacgtacgtaattgtgtacaatgagttgcggtctatatatgcaagatgtgttttatct

SEQ ID NO: 32683 - DNA, 649 bp, Zea mays
  Clone ID: UC-ZMFLMO17015B12_FLI
ctcggcgacaacctggaggcccgcgtcgccgacttcgggctcgccaagttcctccgctccggcgccacctccgagtgcatgtccgccgtcgctggatcctacggctacatcgcccctgagtacgcgtacacgctgcgggtggacgagaagagcgacgtgtacagctacggcgtggtcctgctggagctcatcacggggcggcgccccgtggggggggacttcggggaaggggtggacatcgtgcagtgggccaagcgggccacggccggccgccgggaggccgtgccggggatcgcggaccggcggctcggcgccgcgcccaaagacgaggtggcgcacctcttcttcgtctccatgctctgcgtccaggagccgccggccaccagctacaagctgttccccgacctgctggcctgatgaagcgcagacggacgaacggcacctgttttgccatgccactgttaattacaccccaaaaaaacacacacacgacgactcatcatcgtgcaggactgaagttacagcatgtagcgcagcagactggagctagaggttcttcaggttggtcggccgacattggagatggtaacaagatagaactggggatcaataataattaagtaacatgtaactttattacaattttttt

SEQ ID NO: 32684 - DNA, 2129 bp, Zea mays
  Clone ID: UC-ZMFLMO17015C03_FLI
ttcaccttcacggcttcaccagcctgcgctctctcctctcagcgcgacgactgggtgggcggggctaccgccgccgccgccgcccgacaccaggtgccgaggttttcgtcggtctcttcgccggcgacgagctccaaccaggtgctagcgcggtacaattttcgagaatttgtggtgttgaactgaacctccatgacacaagctaaacctgcccctagtggcaagaggaactggagcagtggcgggactgccgctggaaggaagaacaaggaaagaggagatgacaaagcaaaaggaatcagggttgctggttggaacaagggcgacaagaagaaagaagacaaagggcgccaagtaagtgcgggatcgaagaggcggtggagtgagggagtgccccgggttggtgtgaagagggctgtgtctgggtttgacaggaggaagaggaagatcgatgatgactcgtgggatgatgatggtggcaaggatgtttcatcttccaaatcaaagtttaccagaaagtgttcttccacaataagccgtcgaaaggtttctcctggaaaaggtgacagattgaagtctcaaacgttgtatgaggatgactaccgtgcagggaaaaggagtattagcaaagtttctgatgttagtagaggggtcaagaatcgactggtgaattctgtagcatccaaagggaagaagcttggtgcatccgaaggagtcatacgaacaaagaagggtggtgctaaagaagttgatttggatgaggaggctgttaatagcaagaagtcagatgacttggatcttattattgaagaagagaagcctcgccctcgccttactcgagtactggaccagactggtaagaaaataaagcccgctaagaaggttgtagttcctgacaatgaagaacgtgctcctcctaagaagagaaagcgaatgaagctagatccttatgacacttcaaacaaacggattgaagattcttctatccaagatgtttccagtgcagagaaggttctcgtgaattgtacacctgaagaagagactgaaatgtcaataaatgcaaaatttcgtgctatacagccaagttcttcaatcctttcatatgtggaagataatttactaggtcgtaggcgcttaattgagataaaaaatgctggctacaatgtcaagatttctgctcctctggataacgttcccttctcaaccagcacagaacgtgaacgcatagaagacattgcgttcagaaataagctggaattctttgctgctgcaaagatctcttcctcattccccactccaacactcccagagatagcatttgcaggtgtatcgaatgttggtaaatcctcactcctaaattcacttacaagacaatggggtgttgtgcgaacatcagataagcctggacttactcagacaataaatttctttcaacttgcttcaaagttatgtcttgttgatttacctggatatggttttgcttatgcaaaggacgaagttaaggaatcgtgggaggaacttgtgaaagagtatgtttcgaccagagttggcctagaaagggtgtgccttcttgtgcacactaaacgaggaatgaaaccgttggactatgagcttgtagacttaatggaaaggcacaagacgccataccagattgtactgacaaaaactgatttagttttcccaattgatgttgctcgccgtgccatggaaatccaagagagcctgaagaggaataagtcagtggtaaacccagtgatgatggtgagctctaaaacaggagctggcatacgcaacctgagaggcgtgcttggaaagttagctcgcttcatcaaaccgtagcaaagctgcagccaatttcggagtctgcgtctgcgtcggtcgagaccgtgagaggaaactcacaccaggctgtcttaggcaggtgccgcgctacgtcaacgctctaaccagtccaccgccacaagctttgtctgcatcagtttagactatcgaacacttgcagcaagcgttcctagttaggttatgctttggagcctagctgtatcacaggccattccggtaggattgaactgttcaacttttgagtggattatgcgatgctcagattaatccatgaaatatttgagttt

SEQ ID NO: 32685 - DNA, 1697 bp, Zea mays
  Clone ID: UC-ZMFLMO17015C12_FLI
ccctttctctctctcctcctcctctcccccctgtcttcccccattccccactccccccacctctccagctccgtcgctagggctccatttcccctgcacctccgccgccgccggatctcactttgcctcgccgccgccgccgccgcttcaacatcagaagcaccggattcggtgctgtttctcggctgcctcagcttccgccgccgggaggtccctggcggcgctcgccgccgccctccggcctttgctgagtcctctagacttgagaaggctgctgctgagtatatggtatctgtgggccattgtgctgtccatgcgagcggagagcatgcgtggcagctgtgcttcgggtgatgcccctgaccagagtagctgccgatgcattcggtgtgttgacgatcggactgttggcgctgcttgccgctctgggcctcttctgcatcttccaatcggtctacttcaggtgtcagatccggagaggaccctccttcctcccgctaggctactttaacggcccatgggtgacccgcgtcgctctggttctgatcaccatctggtggggagtaggcgaggtagcgagactgagcttcttgaagcaaaagctgttctccagcttgacatggcagaggaacatatgcgatgcgtacatactttccaacctagggttcgcggagccggggatcttcttcgcattcgctttcctgctccatggctcgttgcagaagaaggagctgggcactttaaaccagagatggaactggaagagcatggcctacacgctggttttctgcgttccagtgttctccgtgcaggcagtcctggtgttcgtcgtcgggcccaggcttgttagagactcgaaccatgacctcgggaggaggaagatcgcgaaatacttcgtacggacgcacacgccggttggagacaccagcgtctgcacctacccgttgttgggcaccatctttctcgggctcgtggatgccttcctgatgagctacgtgtcgtacgtcggatcacgggcgctgtccttggtcatcaacaagtcgctgcgaaggagggtgtacctgctgatgctgtcggtgctctgcttcctcccgaccagggtgcttctcctcggcttctcggtgctgcccaggccaggagacgccgccttcgagggcatcgtgttcctgtcgttcttgacgatgctgtcctgcacggccgtcgggatactcttgctggtctactaccctgtggccgattcgctggccctcagagacgtcggccagagggacatggctgcagagatggtgccttacgatgactactactgctacgaaggcgcgtcgctcgtggccaaccggagtttccgagaactcgagcgcaactccgacacctcgacgaagccgggatccatatcgttccgcactatgatcagggaagaccagcttcagcaggacggcgccgccgacgagatcggcttctcttctcgcagcggtgcccatatcggatcaccatcacccgcaggctcttcgccgagcgcggcaatgccgatgctccctgtcaaggagatccctagatactaaggagtattcagctgtgctgtgcgttttgcccctctgtgctatgtcctctccttcaccctctttttttcccccttctcttcctcttactaccttgatgataacagttttgtggcaatcaaaaggttttttttttgt

SEQ ID NO: 32686 - DNA, 713 bp, Zea mays
  Clone ID: UC-ZMFLMO17015E06_FLI
tcgcaagcctaagtgtcctcgccgtgtccttgctcagctttttcagctcgcctgtcatctatgcgcacacgtcatcgcctcccctagccattatgcttggccgacgactcgctttgtgccactgcgtcgatgtctgcacaggcttgcgatgtcccgtcttagctgccagttttagcttttctctggccgtaaggccgtgctcctcgttcgacctcgccgttggctgcttactcctgtcgttgtgcaagctatcaggttgtctgatgctgctctagtactcgccagttggatgctgaactgaagaaggcgacgttccgatgcgtcgctcatcaagcgttcgatcgaagaattcaatcagagactgtcatcgattctgtggtttcgagttggatttaatttaggtacgataattaatcacgtgaggcggaagacgatccaagtcgaccacaagatatcgatacgcgtgagtttcttcaaaagataatgttgatggattaacccgaagatggatggacgaagcaagtattggaacaaaggctgatcgtcaagtggtcgccacctaacaaacactaacgtagtgtttattccaggcaagccccggtgcatttgccccttccttgtgttttaaatgctttttcactttatctgatgcattaggtgataggagttgtgtaataaacaattgatgcattaccattccttggaaactcctt

SEQ ID NO: 32687 - DNA, 1228 bp, Zea mays
  Clone ID: UC-ZMFLMO17015F05_FLI
tcccgctaccggcaggccacccccatacgcctcgttcgtctcctcctcaaccgcaggtcagcagcgcccgagctctgcgtgcgatggactactcgggcaccaaggagtcgcctccctccggggcttggtggtcgagggagacggtggccgtggtgaccggcgcgaaccgcggcatcggccacgcgctcgccgcgcgcctggccgagcacggcctcaccgtggtgctcaccgcgcgggacggcgagcgcggggaggccgccgcggccccgctcctcgcgcgcgggctcgccgtcgtcttccgcaggctcgacgtctccgacgccgcctccgtcgccgagttcgccgcctggctccgcgacgccgtcgggggcctcgacatcctggtgaacaacgccgccgtgtcgttcaacgagatcgacaccaactcggtggagcacgccgagactgtcctcaggaccaacttctacggggccaagatgctcaccgaagcgctcctgccgctgttccggcagtcgtcggcgaccagcaggatcctcaacatcagctcgcagctgggccttctcaacaaggtgggcgacccgtcgctgaaggcactgctcctggacgaggagcggctgacggaggcggggatagaggcgatggtgtcgcggttcctggcgcaggtgaaggacgggacgtggggcgagcaggggtggcccaaggtgtggacggactactccgtctccaagctggccctgaacgcctactcccggctgctggcgcggcggctggaggcgcgcggcgtgagcgtgaactgcttctgccccgggttcacgcgcacggacatgaccaggggctgggggaagcgcaccgccggcgaggcggccgacgtcggggcgcggctcgcgctgctgccgcccaccgagctccccacggggaccttcttcaagtggcgcacgccgcagctatactctaagctgtgactggctctgggctctggctggctggctagctgagctgtcgtccgtcggccggggcgtacagcatttcgtccggcggtgtaggcgtgtagccgctcctcctattcctcctgctgaatagtactagcaagtatcaacaacgtgtgcagagaagtcggtaaccggagtgtcgatctgccaaggtgctttggttgaacactggctcagcccgtttgtgactctcagctatgtgtacaatgtgcgcttatatctgtcttaagatttaggcc

SEQ ID NO: 32688 - DNA, 1736 bp, Zea mays
  Clone ID: UC-ZMFLMO17015H01_FLI
ccctctccactctgcggcccggtcgatccccattccgatccatcgcacgggcagcgcccagtccggttcactcatggagtctctagtggctgcgctccccgcgggcggcgctgcggcggcggcggccttcggtgggctggtggccgctgccgcgctcgccggaaaggtcggccttgtcgggtccaagaaacacctcaacgcgcccccagctgtctctggtttacccctgattgggaatcttcatcagttgaaagagaagaaacctcaccagacctttacaaagtgggcagaaatttatgggccaatttacactataaggaccggttcttctactgtagttgtgctcaattcagcccaagtagccaaggaggcaatgattgcaaaattctcatcaatatctactcgaaagctatcgaaggcattgtcagcgctcacccgtgacaaaactatggttgctacaagtgactatggtgacttccacaaaatgattaagcgttatatcatgacattcatgttgggtacttctggccagaaacaatttagggacacaagaaacatgatggttgacaacatgttgaacactttccatacattgttgatggatgatccaaattctcctctgaacttccgggaagttttcaagaatgaattatttcgcttatccctggttcaggctttaggcgaggatgtgagttcaatctatgtggaagagtatggaaaggttatatcaaaggaggaaatctacaaggccactgtggttgacatgatgatgtgtgcaattgaggtcgactggagggatttcttcccgtacctcagctggattccaaataggaccttcgaaacaagagtactgactaccgaagcgaggagaactaccgtgatgcaagccttgatcaagcagcaaaaggaaagaattgcacgtggggagactaggatatcctacctggacttcctgctggcagagaatacactgactgatgaacaattactaatgctggtgtgggaagcagtcatagaagctgctgatactactttggtcacgaccgagtgggctatgtatgagattgcgaagcacccagaaaaacaggaatacctttatcaagaaatccaaaaagtctgcggcaataagacagttaccgaggatcacctgccagagttaccgtacttgaacgcggtgttccatgagaccatgaggcggcattctccagttccattagtgcctccaagattggtccatgagaataccaacttggctggctatgaggttccagccggcacagagataatcatcaatctgtacgggtgcaacatgaacaaaaacgactgggccgagcctgaggaatggaagccagagaggtttctggacgggaggtttgaagcagtggatatgcacaagaccatggcctttggcgcaggaaggagggcctgtgctggcagcatgcaggcgatgaacatctcgtgcaccgccatcggcaggtttgtgcaagagtttgcctggaggctcgaggaaggcgacgaggacaaggttgacaccatccagcttacaaccaacaggctttacccactgcatgtgtacctcgcacctagaggaaggaaatgagcctctactgtaaacgggtttcactgtactaatttaaaaaaataatttgctgttgcctgtgtatgacttttggatgatctctatgctgtgaagttgttggtctgaaattgggttaacaatacgaagtgcatatcat

SEQ ID NO: 32689 - DNA, 1585 bp, Zea mays
  Clone ID: UC-ZMFLMO17015H03_FLI
cgaagacaggtcttcagaggccgattgcttggattgatgaaaatggaaaccgctacttcccagaatcatttgtgcaagatcagaaaatatttatgaagaaagattttggcaacggatatcatgattacattagtgttgagtcaaatgggacacgagaaatgaatgaccagcttggaacatcagaaagttccgcagaaagttcaaacttcggttcaagtactgaagatgtttccagtcctaagagagctagagctgaaaataattccatcataaaaaaatactgtgatatgggagaagctattggagaaaatgagccatgcactttgttgcctacagcctgtaacctactaccacgccaagctaatctgggtgaggtatcacgtgcccagcgcactattgaagccgtggagaagctgttgttgcaggggatgggttcagttattgaatccaaggatattattggaatctacaggactccattattggatgaccatggacaagtccgttaccataatcacgaaaagcatgtacaggttaccagatgtcatcgtggaaacgcaaatgtccgttatgcatggcttccttgctccaaaagcactgtgcatgaaatgatgctgaatagttctttacaagttcataagccgcccattaagtgtgcagcctatggagagggcacattccttacaccagcaaatcgttctgatgcctgtgtgaaattctctgctgttgatgaaaatggcattgtccatatgatgttgtgccgtgttataatggggaacgtagaaatagttcaccctggatctaagcagcaccaacctagtagtgactattttgatagtggagtagatgaccttaaaaacccacaacattacattgtgtgggatatgaatctgaataggcacatctatcctgagtttgtagtcaccgtcaaattgccttctaaaacaaaagattacttcgtatcgcaagaagactgccagaattcatctgatctgtcactggtgttgaattctagttcacccgactgtatttcagagcgatctcaaccaaagtgtctcctcaaattatggacatggttattggttgctatgaagagtttaagagtaagaaaataagccgatgcgaactaataaaggagctgaggcacgtagttggtgatagagtgctaatatcgacgataatgcgtctccaagataagttgcctcctgtggagaggcgtgaggcaccgggtgcatcagctgccaagatggtggcgaaaccgtgaggcgggtgtcggtcggtcggtgggcgaggaatgcagaagggaggaagcagctgactttgacaaccctgtgggaagcagcaactatgaagcctcttgtgtcagtctttgtatggcggctgatgtttcttctttctgtgtcgtatgagtatgttttttcctagtagattgtatcaggagtttttcatttcaaattgagctgcgcatgttcttttgagcctttggaatagttcgtcaacgaaaaaggctccttttacctttctgataacagtgttgtgcattgttaattaatgtgggtcatatagaataatatatgatgtatac

SEQ ID NO: 32690 - DNA, 2340 bp, Zea mays
  Clone ID: UC-ZMFLMO17015H07_FLI
ccccgaagtgggggcagatcccactagctgtcggaggaaacctagcggaattaggggccaaacccacccgtacgaaataatcagcgctccaagccatgaaaatcacgggttcgattgtttgctctagaaagatctctagagaatgggcaattaggggtccctccatctccatcgcatcggaagacatgggaagagcaagcgcatattgagcgggtactacatgatcatttcctatttaggaagcttactgactcacaatgtcatgttctacttgattgtatgcaacgagttgaggtgaaacctagggatatagtagtacaacagggcggtgaaggtgactgcttctatgtagttggtagtggtgagtatgaagttctggctattcaggaagaaaatggaaaggaaataaccaaggttctgcatcggtatacagctgacaagttatcttcttttggggagctagcactaatgcacaataagccgcttcaggcttcagttcgtgctgtgaccagtggaacattatgggttctaaagagggaggacttccggggtattttgatgtcagaattttcaaacataccatcattgaagttgctccgatctgtacaactgtttacaagatttacagtgcttcaactaagtcaacttgccgagtcacttgttgaagtatcttttgcagatgggcaaaaaatagtagataagaatgataaattctcttctctgtatatcattcaaagaggtcgtgtgagacttatattggctactgatcaaatgacttcagatacttgggatctcattagtgctgaaacaaagcaggcacaaagtagtcgggaaaatggtaattatgtgcttgatatagatgagggagggcacttcggagagtggtctctcattggtgagactattgctttcactgctattgctgttggtgatgttacttgttctactatcacgaaggagaaatttgactcaattgttgggccttttcctaaacttttgcaagctgattccaagattaaagaatctctggtaactctggagaatgttgcagatggtgatttcccttttaggagggtgaagctctcagatttggtacggggaatggaaaatgtgcatatatgctgctgattgcagtgagattggtcttgtccaagtcaggggctatgacaagatgagaactttaaaaaggttttacatcaagagagtacaagatctccataaggaagtacaagtatttgaggaaaaggaccttatgaaaagcttgagcaaatcaacttgcgtgccagaagttctgtctacttgtgctgatcagtcataccttggaatattactgaattgttgcctttgttgctcactggcttcaatacttcatacaccactaaatgagacatctgcaagattctttgcagcctcagttgttgttgctctagaagaacttcatcagaagtccattatctatagaggtgtttcggcagacattcttatgctcgacagatcaggacatctgcagctggtggattttaggtttgcaaagaagttggaaggtcaaaggacatacacaatatgtgggatcgctgactctctggcaccagagattgttcttggtaggggtcatggatttcctgctgactggtgggcacttggagttttgatctatttcatgcttcagtcagacatgccattcgggtcctggagggagagcgagctggaacctattacaaaaattgccaaaggccaccttgttatgccagtgtctttcagtgcagaagttgttgaccttataaccaagctactcgtggtcgacgaaaacgcgcgccttggaaccagtggtgctgaagctgtgaagaaacacccctggtttgatggcactgattgggagcgaatagcatctgggacttgtgcagtacctgaagaaatcactgagcgcatcaactactgtatagaaactcttaatgaggacttgtcagcatctccttctgtgccgattgaagacccagatgatctcactgctccagagtggatccaggattggtgatctcaatagtcgcatgattgtccaatgatgaattgttttagttgaggaaaacgtctctagtttttcaccgagcattcgcgtatcaaatggaagaaggtatacataagagttaatcgaactgacaagttgtacataccaaggagtattccttctgtgatcatagatcagaatttgagatatgccaagcatcagagagtttggtctatgtttgctacatagttcctggtaagaaggatctggatagtttgttggtgatccatgtacatgaactttggatcttctgtaattatatatccaatttgtgc

SEQ ID NO: 32691 - DNA, 1717 bp, Zea mays
  Clone ID: UC-ZMFLMO17015H10_FLI
cagcagcatcaaaaccagctccaacaccagcacccaccacttcaaattcaacgcccccagcaccagcaccctcatttccttcaagatctcctcccccacctaaaacaacctcaaactcttctgaaggatcaactacccgagatagcacttcaccatctaagaaacacagtacatcaaccctcaagattgttggctttgttcttgccggagtagtgctgtttattatcatagtcctcctagtattattttgtctatccaagtaccaagagagacggtcgagatatgatcataacagaagtcagcaggcaagggtgcatcatagggttgaaccgcaaatcaagccacctccagtgcaacaaagcaatgatcttaaaaaaggttcaggtgaggtacttgatagaaggggccatgaactaagttcatcaacggcagctctcgcaaagaaatctcctgaaaaccaaaaggagcatgtaattaattttgatcgaacagattcagatctgtttcctgtttctctacccccaccacctcctccacctccattacccccaattgaaagagttattgcaaatcccattgttccaccagaaaagcgatatagtcctccaccaaagacaagtagctctacttctgccacatcattctctattgcatctcttcagcaatatacaaatagcttcagagaggagaatgtgataagagagagtagattaggaaaggtttacctagcagagcttcctgatggcaagttattggaggttttgaagattgacaatgctaatggaagaatatcagtagatgacttcctagaagaggttgaatgtatcttagatatcaagcatcctaacattcttgagttagtcggatactgtgctgaatatgggcagaggttacttgtgtacaatcactttagcagaacgacactagatgacacacttcatgatggagaggatactgaaagtgcactgtcatggaatgcccgcctccaggttgctcttggttctggaaaagccttagagtatctccatgctagcttccaacctccaattgtgcaccagaattttgaaccagctaatgtgctccttgacaaaaagttctcagtgtgtgttgctgaatgtggactggcagaattgatgccaccaagttcagtcactcagctgtcaggtcggatgcgtgcattactgaactacgaagcacctgagttgcaggattctggggtcgtttcagaaaggggtgatgtatacagctttggtgtagtgatgctggaacttcttactgggcgtaaaccatatgacagttcacgcccgcgtcatgagcaacatcttgttagatgggccagttctcagcttcatgacattgaatccctgtccaagatggtggacccatctatacgtggacaatgttctgagaaagcattgtcacgtttcgctgacataatcagccgctgtatccagcagcagccagaattcaggccaccaatgtctgaaattgtacaagacctagctagacttgtaaatgccaccggtgaggaatcagagtaacccccaaaaaaagcatggagccatggaaggcatacaatacaaacgtcgcgaccaagttacgtgttgtacaatttttttgggaagataattgtcttgccacagtctggggagaatactgtgaagatgtattttcctcagagagcattgcacactaatgtcagattggaatttcattt

SEQ ID NO: 32692 - DNA, 3833 bp, Zea mays
  Clone ID: UC-ZMFLMO17016A03_FLI
accaactccggttccagccattcaaattggttccatacagatgccaatccatctccacaatcagtttaacccatccctgcctcatatgcacccttcaacaacccctttgtatcaatttggccagttgaggtatgtacgtcctatcgctccgagtgttcgatcgctgccttctcaggccacccgccctgcacattcttccatatcagctcaacatacattgaatcagaatgtgtccagtgttctacctgagctaatggatggaggtacaaaccagaacatcccagctcaggcaagctcatccacctttatcaacaaatcagcagcacctacaaccaaggttccccttggcatggacaattcaaattcccagtatctcaatgctcctgcaaacaatcagatggctggtgtggacggatttagtagtcaagtggacagagagtttgctgagggtacaactccaagtgggaggaatcaaggtctctctttgaagaggaattacagacctacgtccaacaatgtagaatcttctcaatatggtttggaggggagagccatgggtgatccaaaggctcttggtgttgtctctgatagaagggggaggagatatggatatgctgttaaagacattaacatgagatctactggctcaattgttgagccttctcataaggattccaaaggaggattccagagaagggctcgtaggaatgtaagacgaactgagtttagagttcgggaaaacatcgagaagaatcaaaatgaaacttctgaatcattttgccatggtgaacaagatgagataacaagctccaatggaacaagagatattccagcgagaaatactaatagaagggaacttgatatgagcaaggcatctaggataaatggagcaagtgatcagagtctctcgtttagaagtacacacaatgtcccttatgagagatctcatggtgggaacaagaagtctagaacgggtgctgttcctgatggagatactacctcattgcaagctggagctgtccgtgttgtgaagcagcaaggcattgaggtccctgttgatgcagatggcttcattgaagtaagatccaaaaggcagatcatgagtgtcaggagagagcagagggagaaagaaaacagatccaaaataaggatggcaaaggctccccgcaaacagcatagtatttccctacaaagctcagttggtcctagtgtgaataagcgagcagctccttctagtggagaagttacaaagaaagtttcttctggttccgccatcacagtagaaggaagaattgttgactatgctgaatcttcaattccattgatgggtgatacagcctccatgaacctcatagggccaccctcaaccaatgcagaaactcatacaaactgctttgccaatcagcctatccagatccaggcatcctctgacttggtcacctcgagtcctgcaaagcttgtgagtggcttatctgatggcgacaataaagggccatctattagtactccatttaacatggtttcctgggataattcacaaataaaccaacaggtcatgccattaactcaaactcaacttgaagaagctatgggaccagctaaatttgaacagcaggctgggcctggcttttcgttggagtccaacaatgctttgtctcccacagtaatcacagaaaaggtgttgccttcatctgctagtcctattaactcccttctggctggagagaagattcaatttggggcagtaacgtcaccaaccatgctacccccagtcagccgaactgtttcaagtggtcttggagctccaggttcatctaggcctgatatgaagatcgatcgaggcttgcctagcgataacagtggtcctgataaggcaaattccaaggaattatgtccgagtaccgaggatgcggaagcagaggctgaagcagctgcttctgctgtggctgtggcagctattagcactgatgagggatctccagctgatgcaactactgcatcggctccagacaagagctttacaagcaaggatctcagtgggttaacatcaggaggggcaagaacaggtcaagctggtcaatcatccacagaagagccactcgcagttgctcttcctgcagacttatcggttgatactccatccatgtccttgtggcctcctatagccagtccacaagcatcagggccaatgctttctcagtttcatggtgcacagccatcccacttttcctgctttgatatgaactcgatgttaggagggcacatttttgcatttggcccaagtgacgaatctgctggttctcaaggtcagcaccctcaaagaagcaatgcattgccttcagcaccattgggagcttggccacagtgtcattctggggtagactctttctaccgccctccaactgggtacgctggtcctttcatcactccgggaggaatcccaggcgtgcaagcccccccacatatggtggtctataaccacttcgccccagtaggtcaatttggtcagatgggacttggttttatgggagccacttatatccctggtgacaagcagcctgactggaagcaaagtcaagggccacctattgttggtgtaagccagagtgatccaaacagccaaaatatggtgtctggtcaagtaaacgctcctagtgttcctgctccagttccacatctacgcccaacttctatcatgccaatcccgtctccattgaccatgttcgacattgctcctttccagacatctacagacatacagatgcaaacgtgctggccacatatgcctgtacctcctctacactcagttccattatcagttgcacttaagcagcatccagtagagggtacagccacacaacagtttgttcataacgtgccaatagacaagtctggtacaaataaccgatttcaggagtcctctgcttctgctgggccatcagacggcaacaaaaccttcccaaatgcagccgtctctcagtacagggatgagttaggtcttgtcgaacagccagcctcaaccagctcaagctcccaaactgttcagccttcgtttggccaggcgggcttgatcagcaatgaagtcccaaccagtgccaaagccatggttagggtgaccccatccaaagtcaaccctggaattgcagcaggggcggctggcagcacgaacgccccccaggtcaccagcataccttccaagacccatcagtcctcgtcatcatcatcagacccgcaataccagcatctggttaacaatcaggatcgccgtgcccgtgcgactcagaaggctggtactggtaacgagtggcagcgacgatcagggtaccagggtaggaatcaaggttctggttccgacaggagttcaggcactggtaggatgaagcagatctacgttgcgaagccctctgcaacaagtggccatgcctcgtcaggctagagagtggtggtgctgacttcactgagcctgctccacgctggtacacagctcagagcatccttggcatcagacacatgtgaaacatattttcgctccatgtctgtctattctggtttgttttggtgattgtggcatggtgctggttgtgtatgtttttggttcattttgttgcatagaagaaaatagagtgtgctgttgcactgcaaaaagacattcgaagcgataccatatcatgcatgataaattttgcagccgatggaatcggctgcccgtgtaagtcactggtgtgatgtaaggattactattgtttattgttactatttgttggctggctcaacgtctggacaggcgaggaaatgtaacgtgggggggtatgttaataaatgcctcatatgct

SEQ ID NO: 32693 - DNA, 1086 bp, Zea mays
  Clone ID: UC-ZMFLMO17016A12_FLI
ttttgttttgccttcaaagaagtatgctgacgtgatcattcctcgaggtggtgataaccgtgtagcagttgatctgattgttcaacacatccatacaaaacttggttagcatgacttgtgcataatctatctgaaagggaaatgtgcccttgggccatttctaagtattttggtgatttagtgtccaacaagtgcctaagtgtaaaaaggtgaacaaagtacaaatcaaggataaaggtatgtttctcagacttagtacattgttttatggactaatgtattgtgtctaagtgctggaaacaggaaaaatccaattgtaaatgtcttggctcgagcagccaagactctgctgagtctgggagcaccggacagtgtccggtggtgcaccggacagtgtccggtgcgccaggctggctcgagcgaagtggccgctctcgggaattcaccggcgacgtacggctataattcaccggactgtccggtgagccaacggtcggcagggccaacggtcggccgcgcgatctgcgcgggacacgtggccaagccaacggctagaagggggcaccggactgtccggtgtgcaccggacatgtccggtgcgccaacggctctcaggctgccaacggtcgactgcaccatttttggaagggaatcgggcaccagacagtgtccggtgtgcaccggactgtccggtgcgccagtcgacagaaggcaagatcagtcttcctagattgctctcaacggctcctagctgccttggggctataaaagggacccctaggcgcatggaggagtacaccaagcattcctacaacattcctaagcaccaagacatcgattccgcacctttgtttctttgcgatagcaattagagctcttgctgagtggtgaactcattgagttgtattgtgagctctcgttgtgacttgtgtgcgtggtgttgctgtgatttcttgtcttgagtgcgttgctaatccctcccttgctctgtgcttctttgtgaatttcaagtgtaagggcgagaggctccaagttgtggagattcctcgcaaacgggattgagtaaagcaagcaaaacaccgtggt

SEQ ID NO: 32694 - DNA, 3297 bp, Zea mays
  Clone ID: UC-ZMFLMO17016B06_FLI
gcgtatatatataacccatagcacattagcagaaccgtcaaagcacatatatacatgcctgccgtcgtgctacagtactacaccgcagttggggcatggtggcccgcgagggagagtgagggccagcgcgccatgcccgcgcgacacgcactggcactgccggcagtggcacaggcacacccccacgatctccccacctgggtcctgggctccacagctgcctcgccagtcgccaccaccatgcatggaacggacggctacgggggtcttgtttgctctctttgactcggcgcctgcctcgggaaacgtggtctctacatgcttccgcttccgcctatatgcattgcctggctgcctgctatagtagtaccagcagtgtaatatgtacagttctgatggcctggcactggcaggtcctggatgctcgtcggtggcgtatggagcgtcggaggagatcggcccgttccggatcaaaccaaacgggacaggcctgttcctcaacaagtactcatggaacagaggtcagaaagaaagaaagaaagaaagaaagaaagaaagaaaaacccttaaaactcttaattaatcatcatcaactgcccgttccattgtcgcagaggcaaaccttctgttcctcgagtcgcccgcgggagtcggcttctcctacgccaacaccacctcggacctcaagacgtcgggcgacgagaggaccggtacgtacgtagtgaactctgctgctgggccatcgagctagctagcagctagctcctcagactgatctgatgcctgaaatgaaacgccattagcagctgtgtcactggtcaggtagtcccccagctagctgacgccgttgcgaaatgtgaataattgttggctgctgcagctcaagacgcgctgcagttcctggtcagctggatgtcacggttcccgcagtaccggcaccgagatttctacatcgccggagaaagctacgcgggtgagtcactgtcactcgctgccattgctgatccacagggacacaccagctagctgtccaagagttttctttttttgctgcttcaatctgttcactttgctcttgcttccacaggccactacgtcccccagttggcaaggaagattgtcgagtacaacgaggcctcgcctcaccccttcatcaacctcaagggaatccttgtgagtatcgtatcgtatctatgcatgctgctgccaaacacgagcaggccgccggccggctccagtctaatcttaacccccctccaaaaaaaaaaaacatcgatcaggtgggcaacgcggtcaccgacaactactacgacaacatcggcacggtcacctactggtggacgcacgccatgatctccgaccgcacctacaaggccatcctcaggtggtgcaacttcagcagcagcagcatctcgcgcccctgcaaccgcgccatgagctacgccatgaaccacgagttcggagacatcgaccagtacagcatctacacgccgtcgtgcgccgccgccgcggccagggccaacgccaccgtgctcaggttcaagaacaccctcgtccgccgccggcgctcctccggctacgacccctgcacggagacctacgccgagaggtactacaacaggatggacgtgcagagggcgatgcacgccaacaccacggggatcccctacagatggactgcctgcaggtaaggtatccacatacagcttcttttcggtggttgccaggccatttaatttaagagtgccactgaatgttgttgttgttgttatttccctatactgtcagtgatgtgctgatcaagacatggcaagattcagagttctccatgctgccgacgtacaagaagctgatgaaagcaggactgaggatatgggtgttcaggtaatcgatcaagagtctaaatctgaaacgggaaaattatatatatatacttgctacttggtcgcataacaacactatgtgacctggcaaaactgcagcggcgacacagattcagtcgtcccggtgaccgcgacgaggttcgccatcagtcatctcggtctgaagatcaagacccgctggtatccatggtactcagctggacaggtacggaacttgccattgctgctgttgttgcttgtaacgtctttctgagtttggggcgcatgtgcaggtaggaggatggtctgaggtgtacgaagggctcacgtttgcgtcggtgagaggcgcagggcatgaggtgccgttgttccagccccggagggcgttcaggatgttccggtcgttcttggccggggagccattgcccaagtcctgaaggttcctcacatgtgtgaggccatgcctacctgatcatgtctagctacggtcctgacggaaatgtagaagacgggtgagaaggtgacgttccccaggtagagaatgacttgacttgttgataggcgcgcagttcatagctgaggagtgattgattggtctcgggagaaggatgtagagaataataaggatggctatgttatgccatggaaacccatgagcattgcaatgattagcgaataattttcagtgatctcactctcaagtgcttatgttatgttatgccatggaaacccatgagcaatgcgacgaataaatttgaaggatctcactcttgaaccaaatatgtttcatcgcaacacagttttcacatcgtgattctttgcccctccaattataaacgtagggcgttttaggattctcgttgttcaagttctttagcgtggctcgtcaacactggttgatgttactagactcatcatcatagaaattacttagtaataatttatagtcgtctctatgtgaagtactatacgtttacaaaaatttaagttatactgttatattggacatagtgtctcttatggttgttatggcagtgatcagtactaataagggagcgtaaggaggccgaacgaaggccttgcctacgaccgagtaagatataaggatttttttcttaattattgtttaattagattgatatatctcttcttatacagagcaacttatttgacctctatgaaatatcataaccaaattgatctagtttatcttttttttcttatcctaagtaaccaaatcaacctaacttatcttttttcattatatcctaactaaatcaatttaactttttttttctaacaaaccaaaccaatctaatctctcttttcaaacaaaccaaaccaatataatctttccgacactcagtttatcctcgcgctatactgatggctggttgcagatgtcgacgttcccctagagacacaaggcttagag

SEQ ID NO: 32695 - DNA, 2355 bp, Zea mays
  Clone ID: UC-ZMFLMO17016B09_FLI
gtcttcgtcgtcttgtagtagcactgagtgcgggagtactggccggccggcggcgaggctcctccactttctctgcacccatacatacgtatatgcttgttctccgccgtctccgcctccgcctcccactgccacgccctcttctcgtctcctccttctcctccacctccccctcctcctcaccctcgacctctagctcctcctcctgttggtcgtcgacaggcgaaagtagaagggccatggcgtcatctccttctcccgattcggccgcggtcgttgccgagggctccgcggctcgccgcttctggatcgctgcctccacgcgcgaggccgccttcgccgcatacacgcccttcctcctctccctcgccgccggcaatctgcggctcaacgtgtttcgccactacatcgcgcaggacgcgcacttccttcacgccttcgctcgcgcgtacgaaatggccgaggactgcgctgatgatgacgacgacatggccaccatagccgccctcaggaaggccatcctccaagagctcaacctccactcctccgttctgaaggagtggggagttgatcctaccaaagagatacctccaagtgcagctacaaccaaatatactgatttcctacttgcaactgcggctggaaaagttgatggcacaaaaggttctgacaaaatggttactccatttgagaagactaaaattgctgcatacactgttggggccatgactccatgcatgaggctttatgcatatctaggcaaagaactcatggttttccttaaacaagatgaaaatcatccatacaagaaatggattaacacatatgcatccagtgattttgaggacaccacactccaaatagaagaattgctagacaaactaagtgtctcattaactggtgaggaacttgagattattggcaagctctaccagcaagctatgaaactggaagtggagttcttttcttctcagcttatagaccaacctgttgtagctccactttcaagatactgtgatccaaaatataaactcttgatcttttctgattttgatttgacgtgcactattgttgattcatctgccattttggcggagattgcaattttgtcattccaaaaggcaaatcaaagtgggattgataataacctcgaccgtgcaaaatcgggagacctgagaagttcgtggaacatgctctctaagcaatacatggaagagtatgagaaatgcatggaaagactacttcctccagaagaatcgaagtcactagattatgataaactgtataaaggcctggaggtgctagctgagtttgagaagcttgcaaattctagggttgtcgactctggtgtgctgaggggaatgaatttggaagacatcaggaaagctggtgagcgtcttattcttcaaggtggctgtaaaaatttctttcagaagattgtaaaaacaagggagaacctcaatttggatgtccatattctttcctattgctggtgtgcagaacttataagatcagccttctcatcagccggttgtctagatggtttgaacatacattcaaatgagtttgcctttgaggattctgtttcaactggtgagatcgacagaaagatgcagtctccgctagacaaagttgaaaagttcaagagcatcagaagtgacgtggacagtacagtgccattcctatctgtttatattggagactcggttggagatttgctctgcttattggaggctgatattggtatagtcattgggtcaaccacaagtttgcgtagggtgggcaaacagtttggtgtttcttttgtcccattgttccctggtctagtagagaagcagaggcaactggcggaggaagatgcatccgtattcaaggcacggtctggagtcctctatacggtttctagctggtcagaaatacacgccttcgtactgggaagtgatttcagctgatggatgtgctgcttcttttcttccattttttttccgcttgagaagcaaaattgccggccgatgctgatgcacatgatacgtgaatcctcaatgtggtcattttatgaaagccacatgtcaattctggctaccagtatgtatgaatgaataccgataccagtttgtggtgtggaatgggttgagtttgtacccttgaattgtgatcaatgtttcattgattcgtctgtccttgttccattcggggctaatttctgggtggttgctggcattatactgcaccaacaacaacagtataaacatagtggtatatatcccaagtccaagtgtaacgacgactgcataaatgtagagatgtttgtttttaattggcaataaatgaaatgtgatgagactgttgcgcgtt

SEQ ID NO: 32696 - DNA, 1653 bp, Zea mays
  Clone ID: UC-ZMFLMO17016C07_FLI
cctcgcggggcgcctgcgccgccgcctcgccgtgcgggactgggccttcgtcgcgcaccgactgccataccgcttcccggacctggccgacctcgacctgttcccggcctccatcgccgcgcccaccacggcggcgccccacggcaccgctgcctccccgcttctcacctgcggcgcggtctcgctaaccctagacaccagcgcagacccgccgctcggcgcctgccggttcatcgacgacgacgcgctcgatcggggactcgccgccgtcgccgctagcttccccaacctcagccgcctctcagccaccgccgcctctgagtctggcgggctcatggccatcgctgtcggatgcccgacgcttcaggagctcgagctccaccgctgcaccgacctcgccctccgcccggtttccgccttcgcgcacctccagatcctccgcattgtcgccgcgtcccccgcgctctacggcaccgctgagggcggcggcgtcactgacatcggcctcaccatcctggcccatggatgcaagcggctggtcaagctggagcttcagggttgcgaggggagctacgacggcatcgcggctgtggggcgctgctgtgcgatgcttgaggagctcaccatcgctgaccacaggatggacggtgggtggcttgccgcgctagccttctgtgggaacctcaagaccctgcggctgcagagttgcagtaggatcgacgacgatcctggcccagcggaacaccttggtgcttgtctcacgctcgagagcctgcagctgcaccggtgccagctgcgtgaccgtagcgccctccacgccctctttttggtctgtgagggagcccgtgagatacagttccagaattgctgggggcttgaagatgatatgtttgccttggctggcctatgcaggagagtaaaaatcctgttgttagaagggtgctcactattaacaactcgaggtctagaatcggtgataacctcatggggcgacctccagagtctagaagttgttacctgcaacaaaatcaaggatgaggaaataactcctacccttgcagagcttttctccaatctcaaagagctgaagtggcggcccgacaacaagtcacttcttgctgcaagcctcgttggcactgggatgggaaagaagggcagggtatttttcaaaagggtatgaagtctgatcaccttggtgctccattccctgtgatgcgcttcacctgttatctgccctgtaaggattgtcctctcttgcagcttgtcttacctgcccatcaacgaatcaaagggaaggtgctcaactattcagcaggtgttgctgcttagttggattgctagtcgaaactaggctactgcacaaagttcctagttcttgacttgttcaaagtcaaccacgtttcttgatactcagaagccgtacacaatgtggcatctgttcttccacttaagaccaaggacagtcataactagtcagaacctggtagtttgatgatgcacagtttcgggtaccaggcgcctgattttgtgtttgtacctgtgttcatgtgttgtaactgacaagctgaggtttgctcagaggagcctgaccgtagtatttcagtatgaggaaaagcattgcttcataaattatggcagagttaaattatggat

SEQ ID NO: 32697 - DNA, 1524 bp, Zea mays
  Clone ID: UC-ZMFLMO17016C09_FLI
gcgcggcccgcccagacccgcggtcctccccttaacgcacctcatcgagtaggggtcctatcatcgaggcatcgttcagagacagaggctggtcgatcgtcggtgactgatggcgatggcggcggcgcaattggaggcggaggaggagctgcggctggaactggaggcggtggcggcggtgtacggagacgacgtccgcgtgctccgcgacctcccaccgcacctcttcgtccacgtgcggccccgcaccgccgacgacacctcgcagcagttcgtggagctctttcttggcattaaagcatcttcacagtatccgaaggaaccaccacatatttatgctgtggaaagtaagggccttgatgagaaccgacagatatatcttatcaccagcatccagaacaaggcaaacgaactttcaaactgtccaatgcttgtgacgttatgtgaggaagctggagagatcctctcgaacatgaatcatccagcaggggattgtccattgtgtctatatcctttaatgggagaggataaggttgactcggagttgccatttatgaagttgatgtcatgctaccattgcttccacagtgactgcattatgagatggtgggaatggctccaacatggtgacacaaacccaaaggagcccaatactggagacaagcattataatgtgaatcagccaagaggattttgtcctgtttgccgcaaagtgttcgatgagaaggatattgagcatgttcgtgatttgttgggtgacaatacttccaggctggcatcactaacagttgaccttggtgaagatgaaaaggaattgctccattccgaggctgagcaaaacaggagaaaaagaatcgagtcacttgttaatctgcagcaagaactaaacggcctgattgaaccaaagaaagacctcgccatacaaccaggaatgtacgtttccgttcctcccagcacgccagacacagctgaagaagagaatgctgatcccagccaaggcacggctacttcgacctcagaaactgagcaacgtggccaggcaagcaacgccagcagcaacaagccgaagaatccaggccatcgaaggagaaacagagctaatgcatcaagacgacagcctcatggccagggccagccagctaggcagcagtggcagaggaaagaagcaggcacttcacaccaataaaagaagatcgaagcaacgaggaggatgtgacctgtgagttgtttttgtcggctatgtacatcaatgtcgtgccttgctttcgtctcataataattgcgagccatggtatgacaatgttttggcgtatgacaatgttttggcgctgctatggaagttccatgcaagtgatactctggaaagaaccctgcaccggattctatgggagtagtaagtatcaagcacatgcatgcttggctagtacatacaatatctgatttttttttttgtgtgtcattgccaggtactatgttcaaactgattgtccgtagtcagaaaagcaactgattacactgtttgtt

SEQ ID NO: 32698 - DNA, 1404 bp, Zea mays
  Clone ID: UC-ZMFLMO17016D07_FLI
agggggggagggggttaacttccaaggaaccagttcattgctggttctgctagcaggaggttggatttcagaggcagaagctttcagccaggcgggctcaggggcgggcacatcaatggctggcaaggaaatcctccacaaggtgaaggacaaggtgaaagatgcatttagttcatcaggaccagaaacagggaaaggcaagacaaagttatcaggcaagcgtgtcaagcatggttaccatctggtgaagggcaaatctaatcatccaatggaggattatctagtggcagagtaccggcaagttggtgaacatgatttgggattgtttgctatattcgatggtcacctgggccacactgttccagactttttgagctcccatcttttcaataacatcttgagtgagccagaattcttgagtgatccagaaactgctatccgaaacgcataccaacttacggatcagaagatattggaaaacacagcagagttgggaagaggtggctccacagctgttactgccatcttaataggaagtgacaagttcgtgaaactagttgttgcaaatgttggggattcacgggcagttattagcaagaacggtgtagcgaagcagctttcagttgaccatgaaccaaacatggagcgacaaacgatcgagcagaagggtggctttgtatcaaacctaccgggtgatgtgccacgtgttgatgggcagctggcagttgcaagggcatttggagaccggagcttgaagaagcacctcagctctgatccatatgtggtcgagcaaactatcgatgaaaatactgagtttttaattctagcaagtgatggcttgtggaaggtaatacatatgaaactcttacagaccatgtctgaaggatttacggtgtaacccaattcacagcatggtcttcaaacgatgttgtatgcatgtatgcacatggctttgcaagttgcatgcaatttaactgggtcttttgttatcaacagtagactctaaatagatctagccatgaagtttgtgtttaccattttcaatgatgattataatgtgagaatggcgcatgtgcaggtgatgtccaaccaggaggctgtcgacgagatcaaggattgcaaggacgcgcaggcagctgccaagcacctgacggagcaggccgtgaaccggaagagcaaagacgacatttcagttatcgtagtcaagttcatgtgctagcacatcgtcaggttaaatggtctcccgattgtataccgtgttaaattatcttttaagtcttgtgctcgctggtgtcggacattttgtttaccttctttggttttgtgaccccacaaagagggtcaaggcttgtaacatattgttgtttctttaaggctccaaataaagcatggtaccaccatagt

SEQ ID NO: 32699 - DNA, 2384 bp, Zea mays
  Clone ID: UC-ZMFLMO17016D10_FLI
cactcgtgccgtgcactcgtcccgtccccctccctccactcgacccacccgccaagacctcccattgccgccgccgagccagccaggggggagaagagaggccagccgcgtcgcggcgggcggaggaggaggaggagcgggagagcggagcgagccggcccggcaggatgttcgggcgggacccctggggcgggccgctggagatctccaacgccgactcggcgacggacgacgaccgcagccgcgacctggaccgggcggcgctgatgcggcagctggacgagacgcagcagagctggctcctggccgggcccggcgaccaggccggcaagaagaagaagcggtacgtcgacctcggctgcctcgtcgtcgaccgcaaggtcttcatgtggaccgtcggcaccgtcctcggcctcggcgtcttcatcgccttcgtcatcatgatcgtcaagctcgtcccgcacaagcgccccccgccgccgccgcccgaccagtacacgcaggcgctgcacaaggcgctcatgttcttcaacgcgcagcgatccggcccgctgccgaagcacaatggcgtgagctggaggggcaactcctgcatgaaggacggcctctccgacagcaccgtccgccggagcctggtcggaggcttctacgacgcgggggacgccatcaagttcaactaccccatggcatggtccatgaccatgctcagctggagcgtgatcgagtacagggccaagtacgaggccatcggcgagctcgaccatatcagggagctcatcaagtggggaacggactacatcctcaagaccttcaattcgtctgccgacacgatagacaggatcgtcgctcaggtgggtgtaggtgacacctctaaaggcagcagtcagcctaacgaccattactgctggatgaggccagaggacatcgactacaagaggccggtcaccgagtgccactcctgctcagacctagcgtcggaaatggctgccgccctggccgcagcttccatagtgttcaaggacagcaagacctactccgacaagctcgtcaagggcgccaaggccctgtacaagttcggcaggctgcagcgtgggcgatacagccccaacggatctgaccaggccatcttctacaactccaccagctactgggacgagttcgtgtggggcggtgcgtggatgtacttcgccacggggaacaactcgtacctcaccgtcgccacagccccgggaatggcgaagcacgctggagcatactggtttggaagtccaaactacggagtgtttacctgggatgacaaacttccaggagctcaggttcttctcagcaggctgcgactcttcctaagtccagggtacccttacgaagaaatactgaggacattccacaaccaaaccgacaacgtcatgtgctcgtatttacctgtattcaattcattcaacttcaccaaaggaggattaatacagctcaaccatggaaggcctcaaccgcttcagtacgctgtcaacgcagctttccttgcttctttatacagcgactatcttgaagcggctgacacgcctgggtggtactgtggaccgaacttctacaccatagaagtcctccgcaagtttgccaggtcacagcttgactacatccttggaaagaacccattgaagatgagctacgttgtgggtttcggaaacaagtacccgaagcgccctcaccacagaggtgcgtcgatacctcataacggcgtcaagtatggatgcaaaggaggttacaaatggagggacacgaagaaggcaaaccctaacatccttgttggagcaatggtggctggccctgacaggcgtgacggctacaaagatgtccgcacgaactacaactacacagagcctacccttgcagcaaacgctggcctggttgcagcactgatttctatatctgatatcaaaaccggacggttcggcatcgacaagaacaccatcttctctgcgatccctccgatgtttccgacaccaccgccgccaccatcagcatggaaaccatagagagacagacctctgaatatccgccccccccccccccccccaaaaaaaaagcatcaacacagggaagtggagcaaacatatgatcagttggtacagcaaaggccaggaacaggaaagcggacagcataagcttatagagcttctatttctgtaccagtgtgacagatcagtataaaatcctctgtcatacatagaccagaagttgtgtgcatcgcgtgaaagctaatttttggggtcttgttgctgtgggcattcctgctcatgtgtgaagttattttttgtagaaattgtacctttacaaattgttataggagtgacttttcatagtagtaaagcatttgtgtgacctgt

SEQ ID NO: 32700 - DNA, 1967 bp, Zea mays
  Clone ID: UC-ZMFLMO17016E02_FLI
aaaaaagatttagaaacggaagaacaaacagcaagcgaagcatcgccagattggtatatcgatcgattgatcggtggcggaggaaggggaggacggggggcagatggcggcgtgccggggcttcttcgagtgcctgctcaggctgctcaacttcatcctcaccgtcgccggcctcgctatggttggttacgggatctacctgctcgtcgagtggatgaagatatccgaggacggcatcggcggggcttcgacggcggaggtgctcgtctctggccggccgttgttgggggctgtcattctcggtgacagcttcctcgacaatctacccaaagcatggtgagatggtttccttgcctgtggacttttttttctgatgtatcaatactggtttcgtccatgtgatgtcgccattgattatgattttggattgagaggaactgcaaggtttgcttagtaggggtggcaatcacaactgtgaatgtgtgaaatatgcaattgatagccaaaacacgcagttccaaattgcagtctgacgaagcatttgttactcgcctttagattattggtgagcatgttgggtagggggtaaattatgtgtggatttgaatgttccaagtatcattgactctttagtttggcaactgtgggttttctctgtttgtttttactgccaaggtgattgtgtttcatatttaatagcctctgttccctgcaggtttatttatttgtttattggtgttggcaccatcgtcatcttggtgtctctgtttggctgcattggagcagggacaagaaacacctgctgtttgtgtttcgtatcctgttatgtgcctcttcggcgtcattatgttgtcctctctaaagaagattccatttgtcatgcacaagacactaaaaagtacttggaattatgctcaacattaattccagacgggatattattagttgctgaacatgtgaaccaacaaaattttgtttctgtgctactctgaacgctgatcttaattcttatagaacagcagtagcagaggcaataagattatcactatttctgcagcccaaaaaacgtttcgtccaaggcacttggcattttataatgatagggtcacagtattacacgcttgtttccttttacttgtaaacaagtatgctttcttggtcatattgttgatccttgctgaagctgcagctgctgcattcattttctttgaccatggctggaaagatgtgagtattctattgggtgcttatctcaggaactaaactactataatgtaccttgccttaccatttccttgagtagctgtagttatcaatagacttcttttgcaggtaattccagtggacaaaacacataactttgatgttatgtatgactttctgaaggaaaactgggagattgcaagatgggtcgctctgggcgttgttgtttttgaggcagtgctcttgctgttagctctggctgtcagggcaatgaacaaacctgctgagtatgacagtgatgacgaaattatagcaattggccgaagccctaccatccggcagccactgatccatacccaaaatgttcctgccactggtgttcctgtcccaacacttgatcaacgtgcaagtagaaatgatgcctggagccaaaggatgcgagagaagtatggtctggacacgagccagttcacatacaacccttcagacccaagcaggtaccagcaaaatggcacgccacgggctgaagaaaggagtcgatgcactataatgtgaagaattcttcatgaggtcctacgagataatagactttcttgaaggggctactgtagtttggtgttaccagtgttgttcagactttacacagcggtgtgtggaatagaagaatcccgaccatattttttgtcacgctcgatatgacttctcagcaaatgctctatgcacctaattttactgtgaatgaggaactgctagccgttgacatc

SEQ ID NO: 32701 - DNA, 1405 bp, Zea mays
  Clone ID: UC-ZMFLMO17016E06_FLI
ctccttccccttcgatatttttttggttggatctagcgtgacggcaaagacggtgtatcgaagggtcgacaatggttacgacgatcggtagtccatagcagcggcgggcgcaacttcgacccggttttcttcccatatatctgtcaaatccttctccggttgccctccatcggcagcaatttccgccatagataccggcgatcgagggcctcggacaacccaatcgacggagcagcgcggcggcaggagagggcaaacccttttcttctcagtactctacttgtctgcgcctggatcccctccgcaggaagataagacatgggtcaagcactcggcttgattcaagtggatcaatcgacagtagccatcaaggaaacttttgggaagtttgacgaggtcctagagcctggatgccacttcttgccatggtgcatagggaagcaaattgctgggtatctgtcactgcgtgtgcagcagcttgatgtccgctgcgaaacaaagacaaaggataatgtcttcgtcaatgttgtggcatctgtgcaatatcgtgcccttgccgataaggcatctgatgcattttacaggcttagtaacaccagggagcaaatccagtcatatgtttttgatgtcatcagggcaagtgttccgaagatgaacttggatgatgcctttgagcagaagaatgaaatcgccaaagctgtagaaaatgaacttgaaaaggcaatgtctatgtatggatacgagattgtgcagactctgattgttgatattgagcctgatgagcatgtgaagagagctatgaatgagatcaatgcagctgctaggctgaggttggctgccagcgagaaagctgaggcagagaagatactgcagatcaagagagccgaaggtgatgcagaatccaagtacttggcgggtctgggtatcgcaagacagcgccaggctatagtggatgggctcagagacagtgttcttgctttctctgagaatgtgcctgggacctctgcaaaggatgtcatggacatggttctggttacccagtacttcgacaccatgaaggagattggggcctcgtccaagtcctcgtcggttttcatccctcatggaccaggtgctgtcagagacatcgcagcgcagataagggatggtcagctccaggccagtctgctgtgagcacgttggaaaaggcatgcttttgacattcccatcagtaaagaagtacatatacatcatgaggagtaaaaaaaaacttactagcgataatgtgagtacagcttgttcgttctatctatatggtgcatgtgattattattatggagattaatgttaaataggttcgcatgtattgtgccagaacaaggctaaggaccagtttgcgtaaaaaatgtatgtttggaacttatct

SEQ ID NO: 32702 - DNA, 1811 bp, Zea mays
  Clone ID: UC-ZMFLMO17016F02_FLI
gttgtttagggtgtagttcttgtgcccaaggatttaaaatttggtacagaaaagctctaggaacttaggtttttgattgctctctttgcttgtttagttacccttggatctaatgtttaattgtagataaatgtggcacataaaactattatgttgcacaactaacttggtgtgatagtggtaagatccttgatctatgaaggatcgtggtgttcttggatctggttcttggcctttccatttacttctatgataactggaaaaaaattaaaactgttgaagtgaggtaggattgaacccagagcatcatgagcttgcgctcacatatgttatcgtaaatgtgacttgagatggtttggtactggataatgacaccaaagatttttcagcaaaaatatcattgaggtcacatatatgggataagctcgtttcatcactcgatggaaaccactccttttgtgaccgcctggatggatcagggtctggttcggtggcaaaaacctgagacaaggacaaactcattgtgtaatgattcgtgtttatctctgctatattgcttgtgcctaagaactgtgatacatgcagatcgctaatgcgctctactacaatcctgcgctgacccttgagattttaaataagctcggggttgcagctgacatttttaaccattggtttgctatgctacgacaagttaaaaaaagtggggcacgtgttaatttcaagagggagcatgataagaaagtttgctgcttgggcttgacctcccttattgcgcttccagctgctaagattccagcagatgctttggatcggatcttcaaagcaacacttgagctgcttgttgcttacaaggaccaagttgcagaagctaagaagcaaaatgaagaggctgctgatgatatggatggttttgatgctgatgaagaagatgatgacgaagttgactctgataaggagatgggtcttgatgatgaagacggggatgaagtaagcagtcttcagctgcagaaattagccgcagaggctagaggcttccaaccagccgatgacgatgactcagatgatgatttcagcgacgatgagctacactcaccaatagacgaggtggatcctttcattttctttgtagaaactgtccaaggtttgcaggcatctgatcctgccaggttccagaaccttatgcatacattggatttttcttatcaagcgcttgctagtggcattgcacaacatgccgagcaaagaaaaaatgaaattgagaaggagaaatctgagaaggcaaatgcacagtgacgtcataaagcatttctggttcccttcgattgttttgccattttgccggtatagcattggtggacggttaatttcctgcgatttgcaggccgcaggtaagagtttttgcagccttagccaaagtgtaggacaaattcaatcttgtgagatagcatcttggataacctgtcacctcgaccatgttcgtcgtggccagttgtagacgtcttggttgtgcaagaaagtttctctcgaggacagttgctcgttttgttagggccatcaatttttttgggcggcttgtaagttatttgagaatcccacctcaggttgaggggttgtattctcgagtcgtcaaagtttagtaccggtgcggtgtagattgtatatggtttcagttgtctagaacgttgtggcttcatggacgggctgtggtataagtttttattattttttaatttttttgtcaacaagacattgtaattggggtttgtttgtttggtaagagcaagaaaggtcggcactgttatttcttcggt

SEQ ID NO: 32703 - DNA, 1877 bp, Zea mays
  Clone ID: UC-ZMFLMO17016G08_FLI
gcccccccgtgccctcccccgtcccactgacggtggcccccaccgcccggccccgctcgtcggcgagcgccccttccccacgctgcaccgctgtcctgggcttcctgcccaagagatccgcccgactccggtcgctcggaggccggcgagccgcgcgtgctgggcgccgggatgcaggcggccggcgccagccggtggcccggatctcgctggcggcgcgtctcggcgagaggagacctctgaactttctgacctcaagtcctcgattttgtcatagatcagacaaataatggaagagttacaagattgcaactcaagaagcctggttgcccttccgggctctttggttctgcgtctctttaggctgtttggccagcaggatcagagttcatggcagaagtacatactagcttactttctgttggtcaggaatgagtacttctctggggagtcgaagaaacactcagatgtgttctgtgatatttcagaattagatttctttctatatgctacagatttggatagtgaagaacttgaactgaaggagcagaaacccattacgaaggctcaatcaggaggtgattcaagtggcaacagatcgaatgattgctacttccccggccttcatgatgatctgtctcaagactgccttgcttgggcaagcagatcagactacccttccctttcttgtctgaacaaaagattcaatttgttaattaacagtggatatttgtacagactgcgaaggaaatatggcattgttgagcactgggtctatcttgcttgtagcttgatgccctgggaagcatttgatccttcacgaaagcgctggatgaggctaccgagaatgccatgcgacgagtgcttctcctgtgcagacaaggaatcacttgccgtcggaacacagctgcttgtcttcggccgtgaatatactggccttgctatttggatgtacaacttactgactcgcagttggtccccatgcactccaatgaatctgccccgctgcctttttgcctcgggaagctcaggtgagattgctattgttgctggtggatgtgataagaatggacaggtgctgaggtctgctgaattgtacaattcagagattgggcactgggagactatcccagacatgaacctgcccaggcggctctcttcaggtttcttcatggatggcaagttttatgtcattgggggcgtgtccagtcagagggattcattaacttgtggagaggaatataaccttgaaacaaggacctggagaagaatacttgatatgtaccctggtggaaccagtgcatctcaatcgcctcctcttgttgctgttgtgaataaccagctctacgccgctgaccagtcgacaaatgtggtcaagaagtatgacaaggcaaacaatgcctggaacatactgaagccattgcctgttagagctgactcatccaatggttggggtctagctttcaaagcttgtggcgatcgattgctggtaatcgggggccatagaggacctcgtggcgaggtaatattgctgcattcctggtgccctgaaggtggggaagatggtgctgactgggaggttctctcggtgaaggaacgtgcaggcgtcttcgtttacaactgtgcaataatggggtgctgagttacctttgcttcagtacatgccactggtttagcaagccaaccatttcttgctgccatttagctgccctttataatgacttgtaattcagaaatgacaccccctcccctcatttcgcggagctctcaattgattgaatgttttgtagagagcaaagagcattcagttcagtttacctggaactacttttttttcttcttctgttaaactcgttcagaattctttgttcttgtcc

SEQ ID NO: 32704 - DNA, 1267 bp, Zea mays
  Clone ID: UC-ZMFLMO17017B09_FLI
ccgcgatccagatccagccaggtattccgccgccgcggactgcgcctatcttgcttctccggcggacgggcgtacccatcgtcctcgatcatcccccggactggatcggaacggagatccagccggacctgcggtgatcccttccttttctcggatagtatagtgagctagccaatgaagaggtaaattcgtcaggcttgtatcaagttagtagttcatggtgcctggatgagcagtagagatgctactggccgtggaaggaggagggttcttctcgtcttcagcttcggggtacagccatggccttgctctcttgctactcggacggaaagctgaggagaagcccgtcaaggcttcgccgtggaaccagtaccggctagtcgaccgggaggccgagcaggtgtaccacctgccctccgccaaggatcaggcgcctgggaaatgtgctccctttgtctgtttcggatgcacggctaatggcctcgaggtggcgtctccttccaaagcggtctccagcaatgcgctcggtaggggtacctcacaggaagaagcatcttgttcagcacacaaggcgttgacaactagtgcttccatcagtggcagtgagagacgtggctgtcttaagagcaactccaaaagggattctttggagcaccgtatagtggtgagcgagggggaagaaccacgcgagtctgtggaagaggtgcagaccttgagatctagcatagaacggaggaaagttcagtggacagatacatgtggaaaggagctttttgagataagggagtttgaaacaagcgacgagggcctgtcggatgatgatgcagaaaacgatggtttccggaaatgtgaatgtgtgattcagtagatttcatctctgcacaacaagcctgacagaaacatctcatgggaagcctgtcctgctgggaaagatgtgccacggagactactttgccactgaaatgatagacgacagtcgaaacaaaacaaacagtcatgaatcgatatcgtgctagattatttgttggttatatgcttaactagtctgctcagcagggttatagtttcgatgcccacctgtacaatatcaagatctcctttctttcttttctgtcacattttatttttttctcgctttccattgtgttttcacgcccgctgtaccatatgaggctgccctgttacctcctccagggattttggatccctgaattcatgctgttccattttgttttgctcctgacgtatttagtgatggcttgttgat

SEQ ID NO: 32705 - DNA, 1295 bp, Zea mays
  Clone ID: UC-ZMFLMO17017C03_FLI
ggcagattttgagacgtttcataagcaacgcccaccggtatcaaaattctatatggaagagcagctctcaaaagtatacacacataatatgttcaagaagttccaagatgagattgaagccataatgtactgccatgtatctttaattagtgttgatgggcctgtctctacattcaatgtcaaggagtgcattttctttgaagatggtaaaaggactatgagtaaaatttttgcagtgacatacaaagcggacgaaaagaatattagttgtatatgtggaggtttccaattcagtggcatactgtgtaggcatagtctctcaatgctcaagtttcaactggttcgtgaaatcccacaacattatattcttgataggtggaagaaggattttcgacagttgcatgtgatgagacgccctccaagcgatcttgttcctaacaatcgcatggatcgatatgactatttatcaataagatgtttgcaacttgttgactctgcagtcctatcagataagtatcgccttgctttgaggttggtaagggagacagagaaatttctgctaaatagcaacacacatgatgatacacaaccaaggatcaagtctcgtgttcctaaagtaaataaaccaatattgtgactggccaaaccatggtgggtacagctactggaaatggaaatgatggtctcaaaggaccagaggctacagcagtcacgcaagtaccacaatcccaaaagggaggagcagaaaaaggaatagttcctactggctacattggagtaccagctaatctccaacaatttgtaggcaatcaaacagcatttcggccaagcattgtgtacatggtaccgagtggtgttgatccacatgcttttggaaatgttatgatgccagtgatgtaccagcagatgttccaggtgcctccgaagccaaatgagaccgtgcaggatacttcagccaatggaaaaagtaagcgacctcgcggtcagaagctcacagagacatcccaacaggcaaatggaaccccagcatctgcatctggctagggtggactactaacattttgaacaggatttctgtacatacgttgacttcgttgacttcatgccgtgagaaattttacatatggacgctggcactaacaattacctcaatgttgtccaaggtatctggcccaggactggaaattgtctctcgcacactttctttttgtgtgtggctgatttctgcaagacaggttccacctaatgtacaagtccccctgtcctttttatgatatgtaaatgaatgttcttgg

SEQ ID NO: 32706 - DNA, 2325 bp, Zea mays
  Clone ID: UC-ZMFLMO17017D05_FLI
gccaccttccctcccaccgccaccattcgggccgccctctctcctagtcccagcaaatcccacttccccaggccccagctccagctcgcctatccccctcaccagcgccgcaggaagatcgcgctgcgcccgccgtctcacgaggaggcatcgatcggcgaggtggcatttaggaggaggaaggggaggctgtaccttgttgacagggtcttagttaggcggggagcggcgagatgagcatgtacgggagggacccctggggcgggccgctggagatatgccacgactcggccacggacgacgaccgcagccggaacctggacatcgaccggggtgcgctgtcgcggacgctcgacgagacgcagcagagctggctgctggcggggcccggggaccagggccgcaagaagaagaagtacgtcgacatcggctgcctcgtcgtcagccacaagctcttcgtctggacgctcggggtgctcctcgccgccgccgtattcgcgggggtcgtggccgggatcgccaaggccatccccaggcgccaccgcccgccgccgccgcccgacgactacaccgtcgcgctgcacaaggcgctcatgttcttcaatgcccagagatccgggaagcttccgaagcacaacaatataccatggcgtggtaactcttgcatgaaggacggactttctgatcctgcaattcggcgaagcctggtcggcgggtactatgatgctggcgacgctgtcaaattcaatttcccagctgccttctccatgaccctcctcagctggagcgtcattgagtacagtgctaagtacgatgctgctggggaacttggccatgtccgtgacattatcaaatggggttcagattacttcttgaagacgtttaattccacagccgatagcattgatcgtgtcattgcgcaggtgggaagtactgcaacatcacccggttcaacgcagcccaatgatcgttattgttggatgaggccagaggacattgactacccacgtccagtggtcgagtgccacgcttgttcagatcttgctgcagaaatggctgcagcattagctgcagcgtcgattgtattcaaggacaataaggcttactcacagaagcttgtacatggtgcaaccactcttttccagtttgcaagggaacgacgtgggaggtatagtgcaggtggctcagatgctgcaaagttctacaattcaaccagttactgggatgagtttgtgtggggtagttcatggatgtaccttgcaactggcaattcgtcatacttgactctagccacacaccctaaacttgcaaagcatgctggcgctttctggggtggaccagattatggtgtgttcagctgggataataagctcactggggcacaggttcttctaagccggttgaggcttttcttgagtcctggatatccatatgaagagaccttgagtacattccacaaccaaactagcattatcatgtgttcctaccttccaatatttaaatctttcaacagaacaagaggtggtttgattcagttaaatcatgggaagccacagccccttcagtatgtggtcaacgctgcattccttgcttctgtgttcagtgactatcttgaggctgcggatactcctgggtggtattgtggcccacatttctactctatcgaggttctccgcagttttgcaaggactcagatcgagtacatcttagggaaaaatccattgaagatgagctatgtggttgggttcggaaaccattaccccaagcatgttcaccaccggggcgcctcaatccctaagaacggtgttcactatggatgcaaaggagggtggaagtggagggacaccaagaagccaaaccccaatatcatagtaggggccatggttgctggccccgatcgccatgacgggttcaaagatgtccgcaagaattataactacactgaagcaacgctggcgggcaatgctggtctagtcgcagcgttggtagctttgtcgggtgaaggccatggggtggacaagaacaccatgttctctgcagtgccacccatgttcccttcgcctccgccgccaccagccccatggaaaccgtaatgcctgtgggtgtctgattcttctgtatactgcgtatttagattagtgctcctctcgctataactagttaactactaccatcactatcttgcatatttaacaagatgtagcatcgatttttcttgtttctttcattgttgtatatttgccgtgcaatgtaaggattgattatgtttgtgtatgcatctctgttctttttagataatggagaaaaggttccggctttcctctc

SEQ ID NO: 32707 - DNA, 855 bp, Zea mays
  Clone ID: UC-ZMFLMO17017D10_FLI
gtccttggtgggtacatctttgtctgcaacaacgataccatgcaggaggacctcaagaggcagctttttggattgccagcaagatatcgtgattcagtccgggcaattactcctggcctgcctcttttcctctataactacaccactcaccagcttcatggggtatttgaggctgccagtttcggtgggtctaatatcgatcccactgcatgggaggataagaagtgtaaaggtgaatctagattcccagcgcaggtgaggatccgcgttaggaagctctgcaagccgttggaagaggattccttcaggccagttttgcaccactatgatggcccaaagtttcgccttgagctctccatcgcggagaccctgtccctgctagacctatgcgagaaggaaggcatctgagctgttggctgcctcgtgaggttctagtaaatatcaatcatccttgtatgttctgtggatggtggttggcaatgttgtttatttttcaagcgcaagctgctgccggtctcgttttccctgtcctggatggaagcaaagggacctggtactttgaaggcccccctcaaacataagctgtgagcctgtcagtgcacgtgtccgccgttgtcgtcaagaaccaaaccaaatcatgaaatcttgcgccgacggagagttggagcgtgtatgttttgctatctctatctacatgtctcagtagagtggatataccctggggtccccaaaagatgggggcctgtatgtaacactacgtgtaatggttaaggtgaatgtgccgtgaggccccccaaaagttggagtgtgtattttttgttgtcaccttgaaccgactttgcgtatgcttttttt

SEQ ID NO: 32708 - DNA, 891 bp, Zea mays
  Clone ID: UC-ZMFLMO17017E05_FLI
tgctgttatctcatctgctgatctgaagagtgaatcctttaccgacccatggaagctttgcacagttacccaggtggaagaattgaagatcctaataagaatgtttcccatttgggctactactatcatattcagtgctgtttatgcccaaaactcttccatgttcatagagcagggcatggttcttgacaagcgcattgggtctttcaacattcctcctgcatctctctccacttttgatgtaatcagcgtcatcatgtgggtcccactctatgaccgcatcctggtgccactagctagaaaattcactggaagggagaagggtttttctgagctacagcggatgggaattggattagtcctgtccattctcgcgatggtatctgcagctctagttgagttgaagcgtttagagattgccaggtctgaaggtctcattcatgagaaggctgctgttccaatgagcattctttggcaaataccacaatatttcttggtgggcgctgctgaggtgtttacttgtattggtcaagttgagttcttttacgatcaggccccagatgccatgaggagtttatgtagtgcacttgcacttattacagtctcactgggaaactatataagctccatcatactgacattggtgtcgtacattacaactcagggaggagatcctggatggatccctgacaatctgaatgaaggccatctcgaccggttcttttggttaattgcagggataagctttgtaaatttgatagtttatatgggttgtgctgtcagatacagatataagaaagcctcttgattatatttatgtgaactcttgtaatgtgatttcccattcccgatatcatacttatcaaatacaatgcactgtacagatttctg

SEQ ID NO: 32709 - DNA, 606 bp, Zea mays
  Clone ID: UC-ZMFLMO17017F01_FLI
atgttgaatcagttcattcaaccaatgcaagcctatataagaatgttttcatatctagttttgcagagatcccagggtcatttctgtcggccatgatcgtggatagatttggtcggaagcgttccatggcgtcgatgctcttcactagctgcgttttcttactcccactagtgttctcccggacagatatactaaccagaatctccctgtttggtgcccggctctgtatatctgccagcttcaccatcgtatacatatatgctccagagatttacccgaccgcggtgaggacgacgggcatcggcatcgcgagctcagtgggcaggatcgggggcatcctctgcccactcgtcgctgtcgccctggtgcacagctgccagcagacgacggcgatcctcctcttcgagcttgtaatcttcctctccggcctggccgtctcgttcttccccttcgagacgaaggggtgtaggctcaacgacaccgacgtggacatgaactgatccggtggctgggtgtagtgtgactctcagagcaattttcctgtggcggttaccggaattgcatatggattggatatttttagcaacacgtatacgtgttagactg

SEQ ID NO: 32710 - DNA, 1413 bp, Zea mays
  Clone ID: UC-ZMFLMO17017F03_FLI
cagatggagcaaacaatagtgagagccaaatcttgcacagtagattgtagaagtgttgacaggaagcttcgccagattctttatatgactgaggatgaagctcattttcatatgcagcagagtgcattcctctacaatctcggtgcccagacattgccgaaaagtcatcattgcctttctatgaggttgacactagaatatttcaaatcatcttcattggattctgatgattctcctggcaggttcagtagtccagaatacaggcacttcgttatactatcaaggaacgttcttgcggcttctgtagcaatcaactcaactgtgagcagttgtaaggagccaggctactttgcttttcatatcctaactgacgctcagaacttctatgccatgaaacactggtttgccaggaattcgtataaaaatgcagctatccgtgtcataaactacgaagcaattattttggagaaacttccaaagtatactatccggcagctgtttttgccagaggagttccgtgttctcattaggagcattaagcggcctactgaaaacacaagaatgaaatacctgtcactgttcagccactcacatttcgttattccagaaatattcaagtatctaaacaaggtggtcgtgttggatgacgatgtagttgttcaacgtgatctgtctttcttgtggaatattgatatgggagacaaggtaaatggcgctgtcgaactttgtggtctgaaactgggtgagatgaaaaatgtcttgggtaaaacagcatatgatccaaagtcgtgtgcgtggatgtcgggggtgaatttgattaatctggataaatggagggagcataatgtcacagagaactatctgcggctcatgaaaaagttcgaagtcaaggatgagctgtccctgcgagcagcagcatttcctctaagcttgctatccttccaacatctaatataccccctagatgaaaaattgacgctggctggacttggatatgattacggaatcgatgaagaggttgcgcggagatctgcatcattgcactacaatggcaacatgaaaccttggcttgaattaggtataccggagtacaagaagtactggaagaggtttcttgtccgaggagatcgatttatggacgagtgcaacgtaaatccgtgacgtagagttggacccgaaacgagaacgattgcgtgaatctgtgacgcagagttggatctgaaatcagaacaactggaatagacatcagctagcctcactgaagtttgtgtcggcaaattgtgaacgagaatgaattctggtggtggagctaggatttttttgagtggagattccaaacatgaaagtagtaaacactaatatatatacggtagtataaatttgagtaaatgatggggactacgtgatccatcc

SEQ ID NO: 32711 - DNA, 1791 bp, Zea mays
  Clone ID: UC-ZMFLMO17017F05_FLI
cgctgtctctgtcctcacctccgcgaagacaggctaccgccgccgccctacgccaggtgccgaggcctctctgtctcttcgccggcgacgatccaatagccagcagcagcaggaggacactatgaagcttgacgtgaatgcccttcgctacctcgccaaggacgacttccgcgtcctcaccgccgtcgagatgggcatgcgcaaccacgagattgttccagcagaacttgtcgacaggatcgccagactgaagcatggaggcacatacaaagtgctgaggaatcttttgaagaacaagctagtgcatcatgatgccactaaatacgatgggtatagactcacctatctaggatatgacttccttgccatcaagactttggttaatcggggagtttttgcttcagttggacgtcagatcggtgttggaaaggagtctgatatatttgaggttgccacagaggatggtacagtactcgccatgaaacttcataggctgggaaggacatcttttagggctgtgaaatctaaacgtgactatctaaggcacagaaggagctttaattggctgtacctctcacgacttgcagccttgaaagaatttgcctttatgaaggctttaggggaccatgatttccctgttccaactgctgtagattgcaatcgccattgtgtgatcatgtcacttgtgcagggatatcctcttgttcaagtgaaagagttacaaaatccagatgacgtttttgacacaattcttggtcttattgttcgtttggcagagcatggactgatacattgtgactttaatgagttcaatatcatgattgatgatgatgaaaaaattacggttattgattttccacagatggtatctgtttctcatcgtaatgcccaaatgttttttgaccgagacattgaatgtatctacaagttctttaacaaaaggttcaatctgacatcagagaaaaatgaagaacaagctgggtctgaaagtgatgatgaagggaatagcagaccttcctttttgtctgtgaaaaagactgctggttccttggacaaggaactagctgcaagtggatataccaggaaagagcaagtggagatggacaagtacattgaggaagatgctgaaagacatgattccagctcagatgatgatgacgacgacgacgacaatgacaaggttggtgatgctgtgtctttggtttccttgaagatagaccaggatgattctgctgagcctgattgtaatcttgcctcaagggattcagatgtgcctggaactttttctgaagagcatgaaacgagttgtagcagtgagaagagattggaaagtccctcgggtggcaatggagaggctatgaaaccgcttgaatctgagggcaagacgctttcccagaaagacgacaataatgatgatgactcatcagaggatgctgatgaagaagaagaagatgccgagctcacgaaacaattgaacaagcaaaggaaaaaggcaatagcagctgccagtggtcggagaaggccagtgtcgtccaggaacgcctacaagggtaagggcaccatgaactccaaaatccagaggcaggcgtgccagtggtgatggtcactcgaatgtctgcagcgcctctttcgacaatcgtaaagtagaccatgagtaggattttccatgagtgtagaaccgagggatccctgtactagaatcaactctggtcttattcttttatcacgtgtcgtatacctttttgtacacggttatggtgagatcatttgggttatgcttctgtttatacc

SEQ ID NO: 32712 - DNA, 890 bp, Zea mays
  Clone ID: UC-ZMFLMO17017H06_FLI
ctgaacttcagaccattgttggtgagactgctatgtcaagaacccagattgtgagcagctatgggcatatatcaggcagaacaatcttcaagaccctgatgacaaaaggaagatcatttgcaatgacgaacttcgtgtggtttttgaaactgacaccaccgacatgtttaaaatgaataagttgttggctaagcacataaccccacttgacccaaaagatcagcttcatgaagtaaaaagaatgaaggctcccacagtggctcctcaaccacctcccattaatcagcccagtgtagttatttctgatgcacttgcaaagttcatcggaacagacggaacatttcctcaagatgatgccctgaaatacctgtgggattacataaaagcaaaccaacttgaggatgtcatcaatggatcaatattatgtgattcaaagcttcaagagctctttggctgtgagagcattcctatgtcaggactatcagaaatgcttggtcaccacttcatcaagaaaacatagcaaatcctcgttaactgatctaggattgcagtttggcagataggcctaacattacaatatggtgttcttgacagaatggacagcatagcgtctgtatttcttcaatgttatggaatatgaatggtgtctggcaaagatcatattatttgcggtagcctgtgctttgttacgtgtgcaggccaccgctgcggcgtctggtggaacctctttactgaactcgtagtgctagttcctaaatgtcaaaatgtcatttctgactatgtaaagttgctttttatttgagtgccagattgtactcttaaaaaggaatttctgtaggtaccgataatcttgttacttccgaattgcgaagatgaaatctttgaaggtc

SEQ ID NO: 32713 - DNA, 463 bp, Zea mays
  Clone ID: UC-ZMFLMO17018A05_FLI
gccggtcccaggcggcgtcgggccgatgacgatcgcgatgcttctgtcgaacacgctcgagtcggctagacggatccacggattcaagtagccgcacccaccgtccgtccagcagagagaagcgaaggcgttggccctgccagccaagccagactagtgcaggggtcgtaggaaaaataaataaataaataatttttgacgcagatgagatgggaaatcccagcttgacactttgttagggtattgtgcttgataaaaaatatggcaccaggtgaatctgaggtgccagtaatcttggattaattctgccgcacgcatccgactggatcagcagaaacttgtctccatgccatgatctgggtacctgtgttgtgacttgtgagtgactgtggctgtgactggtgggtgccgttgtcgacgtgggataatgcctgatctgtccagttggatccccgatttcatt

SEQ ID NO: 32714 - DNA, 1976 bp, Zea mays
  Clone ID: UC-ZMFLMO17018A07_FLI
cgcttctatggagcctacagaaaatatggaaaagattggagaaagtttttttttatgcccttctagacagaaccgagacataaaaatacatttagttgctggtgcaatacgtgataggacatctgaaatggtggaggctctttacaacattaataaggcatatttatctcttccagagggaacagctactgctgcggggttaatagcaatgatgaccgatcactacaatattctggatggaagtaacagtgatcatgaaagcaatgattcaccaaaagcttcaaggaagccacagaagcgtggtcgtgctaggtttcaatctgtttctaagacatctgatgcacgttatgctgatctagggcaatctcagccttcttcatcaagctatggctgcctttcgttgttgacgaaaaaatgtgctggagatctgcttgtagggaacaggcctcgtgctgttggaaaaaggactccaagagtacctggtgcaagtatatactatcgagatgacaggggtgtaacagataggcgtgcaaaaacagttgctaacaatggtgatgatgaaggagctcatgtagctgcgcttgctctggcagaggtatttcaaagaggaggctcacctcaggtttctgaaacatccaaatggtgatcacatgttcctgtctcctgttaaaagtagtgacagaaaaaatgctgattcagagatgggaagctcaaagttgcatgggtttcatttggatgctgattaccccgaaggtagcttaggaagcagggaggccgagactggtgaatattgcaaaggttcatcatttttgacgaaaaatgaaggttctggtaagcctctgaagaagggaaaaaagtctcagaagaggaggaaaaaagctgcacataaaacaggtgatcagttcgaggatgacagagaggcttgtagtggaactgatgaagggcataggtcgataaagattaaagaagactcagagctggagtcattgggatggccgtctagcacgtcaaataaaagaagtcgtcaattgttttttggtggattgctaacaaaagaacagtagcggaggcccttgagggtatggcgtggattagtgatatcagggggaccatctcttgggcagttattttcgatctcctgatcctgtgcgaagctgtcacagaagttcatctacaggctgggaccaccgacaagcacttttggagattttccacttctggccagtattctgcgaaggcagcttatgagctgttcttccttggctccactgccttcgggcctttgaaaggatttggaaaacttgggctcctgccaaatgcaagttctttttgtggttggtcatgcataacagatgctggacagcagatcgtttggcaaaaagggatctccctcaccctgcggtctgtcctctctgtgatcagcaagcggaaacaatccaacaccttctcatttcttgtgtttttgcaagacaattctggttcacgctgctgcaaaagatgggggctgccgaacctctccccagacttggatgccaccaatctggacagttggtggaatagtgctgctgagaagctgcctggagaccttcaagccggctttaattctatcgtgatccttggcgcttggagtatctggcgtccccgcaatgactgtgtcttcaatggcatgtcacctagtgtgaccacggctatcacccttgctagtgatgagctgaggatgtggagcctcgctggtgctaaaggtctcaacctgctgtcagccctggtttttgtgttcgatccagggtaggggttttttcttgagtttttgggtttttgggtttgtgtgtgagttgtgctgtgttttgtgggttgtgttctggtgaccttgtggtcgctgggctgtttgggtgtgtgtttgtgtgtgtgtgtcgtggtgttttgtactccctttttatctttaatggaaagatacgcagctctcctgcgtgttcgag

SEQ ID NO: 32715 - DNA, 2163 bp, Zea mays
  Clone ID: UC-ZMFLMO17018A10_FLI
ccacgcgccgtgcagccgtctgccctcttcctcctcgtgttggcgagtctcgccgtcgtcgtaaccatgcaggacagcaatccgttcacatcggtcgattgccaatcctcggggtcggggacgccttctcctgccccctcgtcgtcgtcgtcctccaacctcaacaacagcgcgttctggtccaacgtcgtcgcgctactggatgcgctcccttcggccgcggcaccctcgcgcttcgcctccatctccagcggcaacgggaccacccgcgcctttgtccggggaatctgccgcggcgataccttgccggccgactgcgccaagtacctccagaacgccacgctgaccatccagagccgctgcaacagaagcagccgccgcgccggcatctggtacgacaagtgcttcgtcagctacgccgacaccaacgcgtcgacgtccgaagagcaatcattccgctccatactctacaacacaggggaggtcggcgacaaagacgcctttgagaccacctactacgcgctcatgaggcagctcaccgcccgcgtcgtcaacggctccggcaccgccacctcgccgtcgtcgacctcgtcctctttgcggtcggtgtcgcccatgttcgctacaggggaggccgtctatgatgctgccgcccccaacggcaccatgtacgggctgctccagtgcatgagggatcgaacgcaagcggagtgtgagcagtgcttgaaggactcggttgggcagctgccaagctgctgttatggtcaccagggcggggtagtgctcggctacaactgcaatctgcgcgtggagatatacacctactatgatctcgcgatagatgcgccgcctccatcaggctcaggcttcatcgggcaaagtcaagtaaagaaaagggtccatacgaggacgattctcgctgtcgccctccctgttggaacagtgtttgccgcagccgccatccttggagttttcatgcaaaggagaaagaccaatcggaagaaaacacaacgactaggcaatgacatcaaagaagagaacatcagttttgttgcgccgggcaaacttagtatagcggtgttaagaactgcaacaaacaatttctcagaagaaaacaaacttggagagggaggttttggtgaagtgttcaagggtacattagaagacggggaagagatagctgtgaagagactttcacatacttcctcacaggggttcaacgagcttaagaatgagcttgttctggctgccaaattgaagcacaggaacctggttcagctccttggcgtgtgcctccaagaagagaagctgctcgcctatgaatacatgcccaacagaagcctggacaccttccttttcagtggcaatccagggacgcggcggcaactggattggagcaagaggttcggcatcatatgtggaatcgcgcgaggactcgtgtatctccacgaggaatcccggctgaaggtggtccacagggacctgaaaccgagcaacgtgttgctggatgcggacatgaaccccaagatctctgactttggcctcgccagggctttcagcaacgaccagtctgtagatataacaagacgaccggtcggaacccttgggtacatgtcaccagagtatgcctactgggggaacgtctcgaccaagtcagacatgttcagcttcggcgtcattgtcatcgagacggtcaccgggcgtaggaacaacagcccatacgatcagtctgcaggatctgtgtctgtgctcagccatgtctgggacaagtggagaactggagcaacaacggacgtggtggatccaactttgggcgccgagcactactcagaaagcgaggtcgtcacctgcatagaggtcgggctcctatgcgtccaggagaatccggcggaccgcccggacgcctccgccgtggtgcttatgctcagcagtcccacctccacgcccggtgataggcgagtcccatccagaccggcctttgtcttcagcactgcctcagcttggagctccggcggtgtgcagattggcaataataaacacacatccacgtccatggtttcagtttcagataacgaggtgacaatcacagaacttcagccgaggtagctaaaaaaaatggacatatataagctttgaaccgatgggatgaaacagattgtattg

SEQ ID NO: 32716 - DNA, 1736 bp, Zea mays
  Clone ID: UC-ZMFLMO17018B05_FLI
aactgctggattctaaaacagttgtttctgatgctaaatctgtagattcaagtgttgctactttgtctactgatctggaaagcactgaattggtgagtgtcgatcaactaaaatctgctttggcttccacacgcaaatcattgaacaccctatattctgaacttgaaaatgagaggaacgctgctgctatagctgctgatgaaaccatggcaatgataaaccgtttgcaagaacagaaagctgcaatgcagatggaggcaattcaataccagcggcttatggaggaacaatcagagtatgaccaagaagcactgcagaggctgaatgaattagttgttaagagagagaaggagaagcaagatctggagagagagctcgagctgtatcgccacaaggttcatctctatgaggtaaaggtgaggaaaatgtccaggcacaaggctgatgaccagaatggatcatcgtcagcttcatcgagtgctgaggatagtgatgacctttcacaaagtttctatgaaggtgatgaatcttcccatggtattaatggaagcaacgggagtattcctacagatgttgtgctacaagaaactgccaggcatcttgttacccttgatggctcactagctgattttgaggaagagagactatccatactggaacagcttaaagtgctagaagataaactttttgatcttgaggatgaagagtccgataacatgaagcatttctcagaagaaaaccatttaagtggtgcctcgaatggtttctctgatgatgatagctgctttaagcttcatgacaagagaaagaatgtaacctatagaggaaagaaactccttccattgttcgacgatgctaccgtggaagctggaaacgtcccccaaggtaatgatgcacagacagaggtcacactggaccttgctagagagcaacataagcttgcaattgccaatgaaatcgatcaggtacacgagaggctgcatgctcttgaggcagatagggaatacataaaacagtgcgttaggactttgaagaagggagggaaagggtttgatcttcttcaggagatattacagcatcttcgggacctaagaaggattgagcaacgtgcaagtgcaaggaactctggggagctttcgcctcattacctacatcatcacacggattgaagattccagatcagctgcctatgtccagcgaatattgcttgaagatggaaatcatacaacaatgataaggggaaaaaaagattgccgactaagtagtattgtcattggagaagttttgttggttcccggagaggaaggagctcctcctggaacacccgtcacagtcggttcgaagataccattgggaaggcagatcacggagcaattctgccttccaaggtccaggattttttttgtggaccacatcccacgttctctttttgtgttggtttagttttcccggtgggttccaaacttttgcccaagggcaagagggtggttggtgagccgcccgggcccctgtggggctgtgtgtttgttgtgggggtgtggcggcaatcatggccttgtgcagaagctttagaattcattaacctgaaaacatgccgatgccagctttgctgccagatatgttgggcttcactagtttttgttttcttctttttttctaaatcctttccctgtaaatcttctagctgtatgtaatgtgctttcggcctttggaatgatgaggtgttgggtgtgtgc

SEQ ID NO: 32717 - DNA, 757 bp, Zea mays
  Clone ID: UC-ZMFLMO17018C01_FLI
ggtcacgtctcccagatctaactccccccgactcacgaatcccagagagcctccatggcgacgcaccgccactgcctcccactcctcctcgtggccgccgccctcgccctcgccgccgtccctgctcgcgcggcgctgggcggcgggcgcggcccgctgctgggcgggtggaacccgatccctgacgtgagcgactcgcacatccaggagctaggcgggtgggcgctggggcaggcgaagcaccagaagctggccgccgacgggctgcggttccgccgcgtggtgcgcggcgagcagcaggtcgtgtccgggatgaactaccgcctctacgtcgacgccgccgaccccgccggccgcaccgtgccctacgtcgccgtcgtgtacgagcaggtctggacccgcacccgccagctcgcctccttcaacccggtgccccgcgccccctgaaaccatacggacacgggtgggccgaagcgaccacgacgatgttctccgtcaattacgtgtcgagctaatcttattattgtttctattattataataatgcttctccctgttcctatggacctatagtagtatactagtatgttgcgagggagcgagtagaccgtgtgtttcgctatcgtgggactagaataagccatgccaatgaacatgagccgaatagaggctacgtactgttattgtatcagtactagtaccctatatatatgggcgcactacagttctgtgatgtaatggattctgctagtatttg

SEQ ID NO: 32718 - DNA, 2436 bp, Zea mays
  Clone ID: UC-ZMFLMO17018C03_FLI
ccgtttcttcctcttccgaggtagcaacgtggtgagtgaggcagccgctgctgtgctgcactgctgctgcggaggcccaagccgaccggcggagagcacccgtccttgggcggcggagggtggaagaataaggccgggcttgcggatgccggggtgcggagtagcggggagaggtggtgtgggggtatcgtcggccgcgcgccgcactccgccacaagggaagagccgcccctgcctctggatgactatcgctcgcggctacgggaggcaacatgagctcaaatattgcacatcgccacaaagcaaatctgtgttactagaagcaagatttggtcgacatgttactaggagcactgcttatctgctccaaaattcccggagcactgcaatgacaagactacagaagtctgggaagtttctgcaacctgtcttggactcctcaagaaattatttgactagtacattctacaatgcaagcttgaagaggagagttctgtcgagggttgagtgctttgtgtcttcagatccaataaacaatggttggttgaaaccaaggaggtcagagaacttcactagtttggagagcgcatgtgttcagccagaatacaaactaccagtcaggacacgtgctgactgtaaagcagagcagtatgaaataacaggctcacctttgagcccttctgatgttcctgctgatgccgttatgattggagatacaaacgagatttctccctggtggcaggagtttccaaagcgctggacggtcgttctcctctgcttctttgcgtttcttctttgcaatatggaccgtgtcaatatgagcattgcaatccttccaatgtcgtcagagttcagctggaatccagcaaccgttggtctaatccaatcatctttcttttggggttaccttctcacacagattcttggaggtatttgggctgacaggtttggtggtaaggtagtactaggatttggggttgtatggtggtcatttgctacagttcttacaccccttgctgccaagattggtcttccatgcttactcaccatgcgtgccttcatggggataggcgagggtgttgccatgcctgctatgaacaacatcctttccaaatggatcccagtctcagagagaagcagatctcttgccttggtgtacagtggaatgtaccttggatcagtcaccggcctgtctttgtcacctctgttgattagcagatttggctggccttctgtcttttatgcatttggatctcttggaaccgtttggtttgcactgtggcaaagcaaagcacacagctctccagatgatgatccggagctaagtaaagctgaaaagaggcatatactgggtggcagtgccttaaaggagcctgtcacttccataccatggaggctaattctatcaaaggctccagtgtgggctctcataatatcacatttttgccataactggggaacattcattcttctaacatggatgcccacatactacaatcaggttttgaagttcaatctaactgagtcggggcttctctgtgtcttgccatggctgacaatggctgtttttgcgaatattggtggatggattgctgatactctagttcagagaggggtctctgtaacaaacgttcgtaagatcatgcaatcgattggtttccttggaccagccttgttcttgacactgctgagcaaagttcggactccagccatggctgtgttatgtatggcatgcagtcagggtagcgatgctttttcacagtctggcctgtattcaaatcaccaagacataggaccacgttatgcgggggtacttctcggactgtcaaacactgctggcgttctggcaggagtttttggtactgctgccactggctacattcttcagaaaggttcttgggatagtgtgtttaaggtgtctgttgtgttgtacatagtaggaacggtggtttggaatgtcttttcaactggagagaaaattctcgaataagctgtggacattcctatatgccactatacggaactgtgtgattttgatgatgtcattttggcaaacaaaataaattttagaagagatacatctggaagaaaactccattttatgcaagaggtgtacctgaatctgatgtttgggctatcggaagaaccagatcaaattagggtactgtgtgaggtcaagaaggtacacttggaacttgggaaaattcttgtacacaaagcaaccgcaccaagggcacgtcagatttttgcagttgtttcttgagaagtccaggcttctgtcaagatcaccaatccacatctttttgttttaaaatgattgacagttaaatcgtgtatcaccttgcctttgcttaaggcgctacaggtactgccaaactaatgtatgtgcttttcttatcgaaaaacctaaatgtatgtgcttcagatatcttgaac

SEQ ID NO: 32719 - DNA, 4377 bp, Zea mays
  Clone ID: UC-ZMFLMO17018C05_FLI
agcctttcttcttcctcctcgtcagattcatcgtcagttcaggcttcagctcgtcaggcgagagagagagagagagatgcccagctgcttgctgtcgtgtgatttggagctcgattaatattaccatgattctgctgcacacaagggacgacgatgccaagcaggatgaggttcgcatgatggccaccgctgaatcggacgacgacgccatctgggtaccgcctgatgaggcggcagcagcagcatacagcatgatgcaagatgatgatgatgatgattaccatgccggagccggagaggaggatgacgaatacgaggacgacgatgatgctaccagcagtatctgcaggtggcgccatgactctgatcatcagtccgccgcccacagggaggagcggcagaaagccatgctgagagccatgaatgggcagctcaggatgctcgccgctcgctttctagagtcggctggcattgataccagcagctggcttgatatcgtcatctccctgtcctgggaagctgcccttgccatcaagcctgatgttggcactgctgtaggcaaccaaatggacccttcctcttacatcaaggttaagtgcctagcatctgggacaccccgccaatgtgaggtcgtcaagggcctagtcttcaggaagaacgtcgctcataagcacatgcccaccaagtgtcacaatcccaggctgctgcttcttagtggactcctcggccattcctatgttggcttttcatcgttcagttccatagagcaggagaaagaccatctggacaagtctgtctgcgaaatgatggagatctgccgcccagatgtcgtcttggtcgagagaacggtttcacgcgacatacaggagcttcttctcaaggaaggtgtcactctagtgcttgacatgaagctcaaccggctgcagagggttgctcgctgctccggcgcccccatagtctcgttttcagaggttctcagcaagccaaagctgaagcagtgcgactacttccacatcgaaaaggtgacggaggagcacaacctgattacctgcagcgctggagttggaagcaggccatctaaaacattaatgttcctggaaggctttcacaagccactgggatgcacgatattgctaaggggagcaaatactcaagaactgaagaaaatcaagcaggtcatgaactacacagtgtttgcagcgtaccgcctcgttcttgagacatccttcttcgaagatcagagactaatcttgaacaataaggattcttccaaagaagaagtttctgttgctaggaaggccggaccatcgtcactaggatcagtacaggaaactactgattccaatgctctaaatccactcgacaagggcttccctaatcaagcactactcccttctgaaggactagtagtatcagcagtcccagaatcacccagaagattcattgatatactccgttatcataatatttatttgccggtcacttcttctcaagaggcaactgatcatcagatacaagacagtatccatatcagcccaaacgttggagtaccaattggttctgttgagagtgtggatcatttaagcgatccccaggaacaagcatcctctgaaaccaatcagcaaatggcattggacggcccttcggttagtgaaaaacatgagcagtcattggaaaatattaaaacatctgatacagatgaggtggacgatgtgttggagtctcagagcatacttattttgctgtctagccagtgtatcacaaagcaggttatctgcgagcagagccgcctatcccgtataagatactacgggaattttgatgtttccttaggacgctatttgcaagacattttgcagaagcagaatctcagctgttcctcatgtggagagcctccagaggctcacatgtattcctacactcaccgcaatgggaatctgactgttcttgtgaggcacttgctgcctaaatatcgtttacctggtgaatcagaaggaaagatttggatgtggactagatgcttaaggtgtgaacgtgaaagtgggatctccagatcatcacgaagggtgataatgtcagctgaagcacactacctttcatttgggaagttccttgaactcagtttttcaagccactcaaccgctagaaggctgtcaatatgcgggcattcactcaataccgattgtctgcgcttttttgggttgggctccaaagttgcaatgttccagtattcctcagtcgaaatttacaatgcctgcaaaccacagcctactcttgagtttcacaattccgatatgcacgagtggtacgggcaagaggttcttgctacaggagttacacttttctcggaagtcacaagcgcactacagaagctcaaggatcagtttcctgttaaatacctttcccaacttgaagagatgttgattaaagagaaggctgagttcatggattctctagcaaagactgttgatcgaaatagggaatcaagctctgtggatgatatccttaatgtaaactggctctatcaggatcttctgctggaactttatgtgtgggaccgccggctgcaccaacttgtaggttgtacaccagctgaaaaggcaatagcggcaaatggccaaactgcagcagccgctgaagcaggcagaatcggtgagcgcatgagcagcatagcatcttttgagaatagatgtatcaaggaaccagagaagttcagtgaagcagggactgcatcagccttgctcgatgatgcatggaatgataagcattacaatgatcagcacagcacaaactgtgagtgtgatgggggggaggaaaaatgggtttggaacccagtgaatgagtccagattggctttcaggcaggaagtggaagttggatgtttgaaaaggtttgaggtcgttaaccactactgtccaagtcatttatcccccttgcacaaacacagagaatctggcgaggagatggggggatctccacagttcacagtaggtccaggtggcagtatcttgtgtgtatcagaggatgaggtatccagtataatatcccgagctcttgctgtatccgaggaacgtcggcacttactgatggatgctatcgctgagactgaaccagcagatagcaccaggggtaaaacaatggacaagtcttacagctctttatctgaaagttcatctgcttctctgtggtcttcagattctgaggcaagcatttcgtctgacgacctctccagctatgatacctcgcttcttctatcgtcctctctccatccagaaatagctgtcaacgggacaacagctctcaaagggaggtactcggtcatctgtgtacactctaaccagttctacaacctccgaaggaagtgctgcccatcggagcttgcatacgttgcctcattgagccgttgcaagaggtgggatgctcagggcgggaagagcaaggcattctttgcaagaacaatggatggcaggctcatcataaagcaaataaagaagacagagtttgagtccttcataaaatttgcgcctgattacttcaagcatgtcaaccattctctggacacggggagccagacttgccttgccaaaatcttagggatctatcaggtgaagcagacaagacatggcaaggagatcaagatggatctgatggtgatggagaacatcttgtttggacacaatgtgtcgcggacatatgatctgaaaggcgctgtcttttcacgatatgtctccgacccaaatgaccatgctggcactgtctacttggaccagaactttgtggatgacatgcgtgtttctccaatctatattggtggaagagcaaagcatctcttggagcgggcaatctggaacgacacgtcttttctcacgtccatcaatgtcatggactactctttgctggttggagtggacaggcagaagcgtgagctggtattcggcatcatcgactacctgaggcagtatacatgggacaagcagctggagacgatggtgaaagcgtctctggtggtgcccaagaatgaatcgccaacggtgatttcccccagggattacaagaagaggttcaggaagttcatgagcaagcacttcctcacagttccagacgagtggagcacggagagtcggccgccggtggcctgggagtcctgtgcccacgccggcgagttgccgggagtgaagccccagcatccaaacccaatcctcctggcgtgcgcttaattcaatttcacattctgatgctggcgattagtgtcacaaatggaaggaggaaacgatgcttgtacgaagttccagtttactaccctcaccacacacgcacgcacgagtacatatataattctctcttcaacaagtgaagagaaggcctagcaccattgct

SEQ ID NO: 32720 - DNA, 1348 bp, Zea mays
  Clone ID: UC-ZMFLMO17018C11_FLI
gggaacaaaaagagaagattagtcatcgtgaagttagtgttttgactgctgctatacgtagtagaactttatttgtacagccatgtgagattgaattgaagatcaaatgttgatcctctttttagttagaggatacggatgctcctctatactgtcacattgtctaccgttcaaaattgttaggcattccaaatccgaaaatacaaaaccacaatatctgggatcttttcgttcacatgattcggtaatcgacacgtgtctctctcacgtacgcatcctctgatgaaaaagtacaatattgtgcgcgaacagctcctacttgattatgctcgaaacctaatattttaattccttgaacaacttgtttgctgaattgctttccctagttttcactcgatggctggctctcaccgacgtgttgtgtttgttcgtttttcctttgctctcggttactgtttaatttctgcacatcgttacggtagcaggtggccaatgataatgttggcggtcagagggctgaacagtaaaatgctggagaaaagactgcacggatgcctgctcctgctcgtcttccttctggcagacgtatcaggcagccgtgctgaaactgccgtcgatctgggtccagactcggaggacggcagcaagaggaggtcgctggccaccaccatgttctgtgtggcgaaacagggcgcggacgcgacggcgctgcaggcagggctcaactgggcgtgcgggcagggccgagcgaactgtgcgcccatccagcccggcgggccgtgctacaagcagaacgacctggaggcgctagcgtcctacgcctacaacgactactaccagaagaactttgctaccggcggctcctgcggcttcaacggcacagctacgaccaccaccagtgatcccagctcggggcagtgcgtcttcacaggaagctccatggcaggaggcggcacgccggctgcgagcgcccccagcggcctctccccgccgtcgtcgttcacgccgggcattgggagcccctccaacaccctgatccctctggacggcgccgagagcctggtgtccagcgtctggtcggcgatttgcgccccgctgctggcgttgccgctcttcttcctctgaccaccagcggcggcagatgagtggccggtgcttgctagtagagcgcttattatgtttttttgttcttgttcctgggtagatcgctctcgtgtggcggtgttgatgtacatgtcagagtcgtgttggatgcgctgggatgggagattacataagatgctacagagatctattcatacgtagaaagtggaccggactccaccgtgtttccgtgtgttctggtctc

SEQ ID NO: 32721 - DNA, 2936 bp, Zea mays
  Clone ID: UC-ZMFLMO17018D02_FLI
gtcaatcgtcctccttcgggcttcggcacagcaagcaccacccccttcgccaccgccaccatcaccgctaccgctacggcttcccacctcaaaaccctaaccctaaaccccctccgcgcgggagccctcgcccatggagaaccccaggccccaggccccagcactcacccctcccatggccccgctccccgtccccatccacccgccaatcgccccaatccccgtccctccgccccgcgtgcccgcccccgccccagccgccgccgcttccatggcctccacacccactccctccactggggacggaggcgaggccgagtacgaagtctccgacgaccaccgcgccgcgcgggagcgccacgagcgcgcggtgcaggagctcctccagcggcgccgcgcctacgccatggccgtacccaccaacgactccgctgtgcgggcccgcctccgccgcctcggcgagcccatcacgctattcggcgagcgcgagatggagcgccgcgaccgcctccgagccctcatggtccggctcgaggccgatggccaggtcgaccgtctcctccgcgcgcaggaggacgaccaggccgcgcgcatcggcgaggaggaggaggaggagcagatcgagtaccccttcttcaccgagggctcgcaggagcttctcaaggcgcgccttgacattgcacggtactcgctgccccgtgccaaggccaggatcgagagggccaagcgacgccacgaggaccctgatgaggatccagaggcggaggccgaactcgtcgtcaagcaggccggggagtttgtgctcgagtgcagtgagattggagatgatcgcccgctcactggctgttccttctctcgtgatgcatcgatgctcgccacaagtgttttttttttgttgttgaagggaagatctggtgcagcggcgagagctatctcattgagtcatcaagtcgtgggtgccaagcagtttctctgcatttgtgggggaaggaggattgtcacggtttatccctttcccagaccccactcatgtgggagcctccaacattgggtttgcccttgctgtaatttttttgttggaagtccatatcagtggcgagagctatctcattgagtcagcaagtcgtgggtccgaagcagtttctctgcatttgcggggaaatgattgcctcggtttatccttttcccagaccccactcatgtgggagcctccaacattgggtttgcccttgctgcaatttttttgttggaagtccatgtttagtcaatttatttatgatggatttatgcactgtgcagtcctgcttgagcttaattgagattagtttctcaccgcaagagaactgcaactagtaagttcatatatgacattcaaaaaattcagcatctgtccatctgatcacttgggaactaactaagtcagctgtagtttcgatttttagtatctgaagtcactgggctgctaggaagccaggatcaggtattcaggtttgcttttcttctagtggatagagaatgaccaacatattatcaatccaaaattcccgtttggaacttgtatccctacccaatgcacataattctccctttttaacaaaccttggtagaacataaagctgaagttagacatctgtactgtcccccgtggtattgagtattatcaaaataacagcaataagaccatgttcagcgatatttaccttgagccgttaattgaaatcagttagcagttcgtatgcacagaaataagattgttaactgaagttaaacaacttatctatgttaccagtgtcatgtgcaactagttgcttattaaatgttatgatgtctatcatatatttacatttgttttgagctttaacatggtagattatgttctcgtactcttgcttccttttcaggaaataaccatttgcttatccacattgtgtagttcctggagtggaatagtcaaagtatggagcatgccacaaataactaaggttgcaaccttgaaaggtcacacagaacgtgcaactgatgttgtcttctctcctgctgatgactgcttagcaacagcttcagctgatagaactgcaaaattatggaaaccagatgggtcacttttgatgtcttttgatggccaccttgatcgtcttgctcgccttgcttttcatccatctggaaagtaccttggtacagctagctttgacaagacttggagattgtgggacatcaatactggcaaggaactgctactccaagaggggcacagcagaagtgtatatggagttagctttcaccctgatggttctttggcagcatcttgtggtcttgatgcatatgctcgagtatgggatctgagatctggaagattgttctttacactcaagggccatgtgaaacctgtcctaggagtcagcttctctcctaatggttatctggttgcaactggaagtgaagacaatttctgtcggatatgggatttgaggaaaaggcaaatgttgtattctattccagctcataagagtattatttcatatgtgaaatttgaaccccaagaagggtattatttagcgacttcttcctatgacaccaaagcagccctgtggtcagctcgtgattacaaaccaatcaaaagtttggtgggccatgagtcgaaggttactagtttggatattagtggagatggacagaagattgtgactgtgtcgcttgatcgtacgataaaaatttggtcatgcagaagtagcacacaagataatgagatggaactggattgagacaattgggttcattgttgccagccccgcttctctattcatcagctagaagtagatattctccctttttgctgatcagacattccaatcagtcattggtgctattgcacggaactatttcatagcatgtataaacccttggcttgagaaatatgttctgcacttactttgctg

SEQ ID NO: 32722 - DNA, 2412 bp, Zea mays
  Clone ID: UC-ZMFLMO17018D03_FLI
ggctttgcctgcgctcacggacggtcactggctcacgctcccctcgcctgcgtcgcctcgcctagacaagagacaagacgcctagtcgcctccgatcgaaatcgaatcgagtcgggtgggctcgggcccggtcttgttgtcttgtctcccagctaggaatagcgcaacgagatccctcgcgcgcgcggaccccggagaggccgagggagggtgacagggcgtgtcctcgaccgcgaggggaatgggatcggagggacgggcctggaacggcgcgggcatggccgccggcagcggctatggcggcggggtagaggcgaaagcgaccaccacggctgtgtcggccgcggcccccgcggaggttcccacgtcggcggcctccgtcgacatctcgctgccgctcctgaagatgtcgcctcgcatcatagctctctgcaaggaattggtcgaagggtggtcgtcgattgacagctcgctcttctccatcgagaccgtgtccgggggcatcacgaatctattgctgaaggtttctgtcaaagaagacaacggcaatgagtcttctgttactgttcggttgtatggaccaaatacggacttggtgattgataggaaaagggaattgcaggtgagaatctgagtggtacgagattgtgtgttatagtcatattatactaacctagtaacctgcatcctatagtattctacattgggtctagtatgaccccttgtatttggtgtcatatttttatagtggcatattttcaattcttctagacatagcatagtcatggtcttgtagtagcatctgtcctaccaagtgcattaccttttgtttcatatctgtaccttttccctgacaaatggatttcatttcattctctgaaaattgctaacctagaatgatagtttttaagggttcctagactgtacacatagtataatttatctcggttctaaaatatttcctaatgcatacatctattaccgtcatggttaggcgataccatatctctcagctgcagggttcggggctcggctacttggaatatttgagaatggagtagttcagtcattcatctatgctcgaacactgtcaccagcaggtaggcatagatcctgtctgaataacatatgggtgtggggtcctaatcaacctagtgcaatagtttctttgttctcctttgtagtttcagttgcaatttcaaatgcaagttgaaaggatttatgttttttcctttccctgtagtcagcattatccacgatttggtatgccaatttgaagccttggatgtttggaggttttatgaaatgcttctgtaaacaaatctactgatcctcgttattttgttttgtagacatgaaagaacctaaaatagcagctgaaattgccaaggagctacgcaaattccatcaagtagacataccagggtctaaagaaccacaattgtggaatgatatattcaagtttttgaagaaagctgcagcattgaagtttgaggataacatgaagcagaagagatatgaaaagatctcatttagagaaatacaagatgaagttcaagaacttaaggatctcttggacattctgcgcgcgcctgtggtttatgcacacaatgacttgctttcaggaaatctgatgctcaatgatttggaagggaagctatattttattgattttgagtatgggtcatacagctaccgtggctatgacattgcaaatcatttcaatgagtatgcaggatttgattgtgactataatttgtacccagataaagatgcccagtatcacttcttcaggaattatctacacactgatagacctagtgaggtggatgcacaagatatggaagtactttatgtggaaacaaacactttcagactagcatcgcacatttactgggcattatgggcccttattcaggcaaaggtatccccaattgactttgactatcttggatacttcttcttgcggtatggtgagtacaagaaacaaagggagtcctgcttctccttggcacaaagctttctctccgagctaaaaaatggctagagcctgagaatctgttcacgagtttatactggtgtacgcatgctcggagcgggtacgcgttgtgatcatcgactgctacccagaaactctattatagcggttgtagcagcccctcattgttgtatctgatgttaggttcatcattgtctaaggactagtttggatactctagtatcgagctcaattcatgtgtatgagatggattcgggtgtaacttaaactaatttacacactaatccaactcaacacatgtggattggggtcaatactaaattacccaaacaaagcctaacagggaagtccccagtggcaaattatgtacttatatttataataataaacacaatcctgatgggttgtgcccc

SEQ ID NO: 32723 - DNA, 1616 bp, Zea mays
  Clone ID: UC-ZMFLMO17018D04_FLI
ctatgaccttggcatccaggcacctgggaggtgttctattctgtctcatatattctgcagggagggcaaatcatcgactgagccttatgtcgtagctcacaacatactcttagcgcatgctggtgcctttcatacttataagcagcatttcaaggtaatttactataaacacatccacgagatgtgtcaaaaggtaaaaacaacataagggctagtttgggagcaagggagaggcaaacctagggagagaaaacccgctataagggctagtttgaaaacctaaatcctctccaggattcccggtgattgaggggaaatttaagctaatttccccctcattccctcggaataccggtggggtttaagtttcaaactagccataaattactaaatatcttattcaaatgacactccttgggattactacccggggaaatgacagggatcccggaggggatttgggttctcaaactagccctaaattgtttcatgtattcattgcagaaagaacaaggaggtatcattggcattgcactcgattctaagtggtatgagccactgtcagatgttgatgaggacacagaggcagcagcacgagcaatggactttgagcttggatggtgatacatctatcacaatttcgatattaccaagtcgattagttcctatgtagttgcagtacacagctgttgctcataatattaattgtgaaactttccaagtgtgaatacaggttcctggatcccttaatgtttggccactatcctccttctatgcagaaacttgtgggcgacaggctgcctcagttttcagctcgggcttcgatgttagtgtcaggctcactagattttgtgggcataaaccattacaccacactgtatgttaggaacgacagaatgcggatcaggaaacttgtaatgaatgatgcttcaactgatgctgcggtcatacctactgcttatagacatggaaagaaaataggagaaacggcagcgtcaggatggctgcacatagtgccctggggcatgttcaagctgatgaagcacatcaaagaaaagtacgggaatccgcccgtgatcattactgaaaacggcatggatgatgcgaacaaccggttttcgaaattagaggatgatctgcaggatgataaacggatacagtaccacaaggactacatgtctaacctcctagacgcaattaggaaggaaggctgcaacgtccatggctacttcgtctggtcgctgctcgacaactgggagtggaactccgggtacacggtgcggtttgggctctactacatcgactacaacaacaatttgacacggatacccaaggcgtccgtggagtggttcaggcaggtcttggcccagaagacggctggtttggagtacagtggttctacagtggccagtagttgagtgtatataacatacacggcacggctaccatcgatctgtacatgcgtacgtagctttagattagattgtgattattctcgatgtatatagactcaccatttggacgaccttcaaccgcacagttgaatgtgtcgttatgcttgctacaaattggttgattggtgctaaagaaatcagtgaggggtgctcggttctact

SEQ ID NO: 32724 - DNA, 2984 bp, Zea mays
  Clone ID: UC-ZMFLMO17018D05_FLI
ggaacagtgagataaccgaggaaatgatgcaggagatggactacaatgctgaccgtgcatggtatgactgcgaagaacacactaccatgtttgatggtgatcattctatgtatcttggagatgataattcctacaaaaagagggaagcagagatgccgaagaagctgactcgtagagatggtagcctgatgacccttgctcaaagcaaaaagatgtcacagatgactgctgataatgctcagtgggaggatagacaattgttgagatctggagctgttaaaggaacagaagtgcaaactgaatttgatgatgaggaggaacggaaagtaatacttcttgttcatgacacaaagccccccttcctggatgggagagttgttttcacaaaacaagcagaacctgtaatgcctctgaaggacccaacatctgatatggctattattgcacgcaaaggttctagtctggttagggaaatccgtgaaaagcaaagcatgaacaaatcaaggcaacgattttgggagcttgctggatctaagcttggcaatatcttgggtgttgagaaaacagctgaacaggttgatgcagatactgctgttgttggtgaccaaggtgagattaattttaaagaagaagcaaagttttcacaacatttgaaggataaagcagaagctgtcagtgattttgcaaaatcaaaatccctttctcaacaaaggcaatatcttcccatatttactgtccgggatgatctgctacaggttgtgcgtgaaaatcaagtggttgtggttgttggtgaaactggttctgggaagactactcaactgactcagtatctgcatgaggatggatatactaccacaggagttgttggttgtacccaaccaaggcgtgtggctgccatgagtgttgctaagcgagtcagcgaggaaatggagactgatctgggagataaagtcggatatgccatacggtttgaggatgtcactggtccaaacactataataaagtatatgacagatggagtgcttctccgtgaaaccttgaaagatgctgacctcgacaaatatcgtgttgttgtcatggatgaagcacatgaaagatcactcaacactgatgttttgtttggtatactgaagaaggttgttgcacgtagacgggattttaaactaatcgttacatctgcaaccctaaatgctgacaagttctccaagttcttcggaggtgtgcctgtattccatattccgggtcggactttcccagttaacattatgttcagcaaaacaccatgtgaggactatgtggaagctgcagtgaagcaggccatgactatccacataaccagcggccttggtgatatcctaatcttcatgactgggcaggaagaaattgaggctacctgctatgcgcttgctgaacgcatggaacagttaatatcgtcatccaccaagactatccccaagctagagattctgcccatctactcacagttgcctgctgacttgcaagccaagatttttcagaaggctgaagagggcgctcgcaagtgtattgttgctaccaatattgctgagacctcattaacagttgatggtatcttctatgtcattgataccgggtatgggaagatgaaggtgtacaacccgcggatgggtatggacgccctccaggttttcccagtcagccgggcagctgccgaccagcgtgcaggtcgggcaggaagaactggccctggcacatgctacagattgttcacagaatcagcctaccagaatgagatgctccctaaccctgtgccagagatccaaaggactaacctggggaatgtggtgcttttactgaaatccctcagagttgaaaacttgctcgactttgactttatggacccaccgccccaggagaatatcctcaactcaatgtaccaactctgggtgttaggtgcattgaacaatgttggtggccttacagaaattggctggaagatggtggagttcccgttggatccaactctggcaaaaatgcttcttatgggggagcagctagagtgccttgatgaggtgctgaccattgtatccatgctatcagtgccgtcagtcttcttccggccaaaagaccgagcagaggagagtgacgcagcaagggagaaattctttgtcccagagtctgaccacctgacactcctgaacgtgtatcttcagtggaagtcgaatcagtatcgaggcgattggtgcaacgaccacttcctccatgtcaagggtctccgcaaggctcgtgaggtgagatctcagctgctggacatactgaaaaccctgaagatccccctgacatcatgccatatggaatgggacgtggtgaggaaggctatctgctctgcgtacttccacaattccgcccggttgaagggtattggggagtacgtcaactgccggaatgggatgccgtgccacctgcaccccagcagtgcgctatatggccttggctacactcctgactatgtcgtctaccatgagcttgtcctgaccaccaaggagtacatgcagtgcgtcaccgcagttgatccacagtggctagcggagatggggcccatgttcttctctgtgaaggagacagacacctctcttcttgaccacaagaagaggcagaaggaagagaagacggcgatggaggaggagatggagaagctgaggcggcagcaagcagaggccgcgcgcatggagaaggagaaggaacgggagaagagagctaagcagcagcaacaggttgctatgcccggcctgaagaagggtgcgacttatctgaggcccaagagaatgggtctgtagataagacctgatataatataacttaactgtctccggtgattttgttactaggctgagggaacttgtaatgtgtagcctgctcaagcagcatgtaaaacaacacgtcaatgtgaatgtatacaacatcgacatgtgaaaaaatgaaaagaaaaatagagtgttgtcgac

SEQ ID NO: 32725 - DNA, 1879 bp, Zea mays
  Clone ID: UC-ZMFLMO17018D06_FLI
ccggtggcggtggcagcaccggctcggcgaggctggatgcggtgaagaaggccgtcaagtttatcatcgggcagatccatgacaacgaccgtctcgccgtcgtcgggccgtcgcccaaccgccggctagtcatcgggtttccgagcactcacgaggctcgacagaacgcagaaaaatccgtcgacgacctggagccccgtggcgagttcgcgtccggcgccggcttggaggaggccgtcaagatcctcggggagttaccggcgacggcgagcgggagcagccgcgcgcgcttcgtcatcctggtgaccgacacggcggtgacggagggcagcggcggcagattcggcaagctgcggcgcgagctcctccccccggtgcacacgttcggcctcggcgcggggcacgaccccagggcgctgctctccatcgccagggagtcccagggcacctactccttcgtcgacgaccagaacacggacggcatcacgggcgccatcgccatctgcctcagcgggctcaaggacgtggtcgccgtcggcacgcgcgtccgcgttgaggcgcccgtcgggagcggggtcacgatcgagaggatcgagtcgggggggtacaggactaaccccaacaccggagacgacaagacgtacggcgaggtcgccgtaggcgccctctatgccgaagaggtgaagagcttcatcgtccacctccaggtgcctgctctgccttcgacgtcggcgatgacgacctcctcttccgtcgacaacggaggctgcgacaagcaacagctgctcaccgtcaccttcgccggccactacaccaccagggacgagggaggtgccacgtctccagcttctccaagtccgacagtgaccacagcagtcttgtacgtgcaaaggccgcagccggaagccctcgacgttgccggcggcggcgcgctgcacagagtccccgtccccgcggtgatgaacctcatcgcgcggttcggcgtgctggagatggtgaccaccttcgtcgaggacgagatctggcggcttagttcttccagttccagcacggtggaagtggcgacaaagctgcggacgcagtgggagcagttcgtgcaggcccggcagttctggagcggcctggacctgggagtcctcgacgtcgaggtcaacaggatggcgagcatcctagaagcagcaggaacccgaatcggttcgtcggcgacggcctacatgctgtcgtggctgtcgagctaccagatgcagcggccgacggccatgggctcgccgagcatcgtggccgccgcgttcgtcaccgtgaagatgcagttcacgctgcagcaggcgaccatcgtcaacactcgtccaccaccatgcatcggcggctgcccggcgtgcgagtgcgggtgcgaggaccgctgcgtgcagccactgccgccgccggtgctcctgccgtccggacgcggcgacgacacctaccgcgtcaaccccgcgtacccgcagggcgtactgttcaacgccatcaaccaagcaatggagcagatgtacctggcgttggtccgggcgagcaatctgacgcgttgcgacgacgctgcccgcgtcgagttgttcctgccggcatgatccggcgagcgacgacgactcatcacggggtacgggcaactcaccgccgatcgatccatcgaggatctagctagctataccgtctaccgtataccgtcctagctagtaggctagtagtatacggtggtgtgcttaactatacaagctaagtactgtacgaccaagcttagcttgtcataaataagcaatcgatcatacgcactccataactagtacatgctcgtatgcgttgccttgtgctctcatttcctttctatccagaaaccctctacact

SEQ ID NO: 32726 - DNA, 3047 bp, Zea mays
  Clone ID: UC-ZMFLMO17018E02_FLI
gtttcatacaacatgtacaggtatatgcatataggttcaagaaagaaaaacttcatgtccaaaaggaaggagaatgaattctccgcaaaatcataaaaaacattacaagtttatatcatgtttatgtgcacttcataacctttatgaacaatattttgctaactaaaaaggattgtacatatgactaatacttttgtcaacacattgtttcagaaactcactgcaaactactattcttattattttatggccttcaacaccaacattttattgcttacgtgcatgtacataccagctcctataggcaacaccaacgtaatacgacatcctgactgctcatactattatatttgtaaactaaactatcctgctaatgttatatgaacaaatatatattcagaataaatctgtcacttctatgatgaacttttggaacacactgctgaaatacaatgtaatatatatggtcctctcagtctaccgtaggtttgctgtaactactacaattacaatctcagcacatcaacttctgtaagcactggaaccagtttaaatttgcccttaaatttatggcagcatatggtacataataactgctaacaactactctaagtgtacatataattttaatacataaccccaacgaaactgatcgtaaaaatggttcaggttcaccatgcgcgcatggcgcgcaccatacactagtaaaagtgaaacatgatgcaaagggacaaatggaataacacataagaacttatcttattgctttaacattttcagtatgtttcttattgtattggacaaatttataagcataccttcggctcctgaataatgggatgcacgaagattctttgaaggctaagcactacgaagtcgggacccttccaaagatactttttgtagggtaatgttcatctatttataggggagacgaactgactttgtacatatttacagtaatgcccatccatttttacataagccatttacaaatgacattagggtagtaatgtacttcctcctttctcagctccgcaaattccaaccctcgtcgtccggtagccttccttttggacttgtggcccaagttgccgccttcagccattattttcgttgcttgcgtatagacgaaatgcctttgtacactgcttttagccaaagcttagctttgtccgtcagtgagaatattcctgaaacacacttgtgattttgaaaatggttgcttatgattttcgttgcttgtgattttgctcttcgtttttcgactttatgattttacccttctgttttgaaaaccaaattaccgtttgcctcaccctctcaacgccattagtgaaaatcagatttggtgattaaaaaaataaaaaatgtgaaaacaatggatgaaaggtccaaactgccctccttatattatatatgggtgttacctaacaagagtaaaatcacaattacataatataacaaagggcaaaatcacaatacatgtatagacatttttgtcttttttatatcagatttaacaccattaactacatgaaacgacgcaggggtatgccaaagcctcgtttccaaaaccaagggttaaaattacaaagttaaaaaacaaggttaaattacgattgcaaggctagagaggttatactaaatgcctctatagtttacgtggctgacctctaacataaaaatgatttagttctgctaagagtttaaaaataatttagaaagcctaaaatatataaaaaacggttgatttgaaatagtaaaattgaacgatgatcgcgagcgttgatttagatctagtcatcggctccgacttctccggtcaagtcctccccctacctctaccagctgcccgtcgcacacaaaaccccaggctgcccgccgccgccgcgacccgccacgccgccatgtccgctgccgcggcgctccggccgatcgagccacttcccctcccgactgggctctccctctcgccgcgcctcaagcttctgctcaccttctttcgcgccgacctcaccgtccggcccctggacgagtggcagctcaagtccgccctcctcgcgtttctccgcgacccacctctccccctcccgctcctccccgactcagacctctccgtgagccgcctccctgacctccagaagcgccgtcgcgaggagcccgtagcctctggggtcctccacgtccgcgacctctccttcctccgcccccgcaagggagacggcgaggccgaggagatgaccggggagcaggagaagtacttcgagtggcggagcaccctggttcagaagctcgaaggcatcgagctcaacctcgagggagtgaagttccggatgaccgtcgagatcccatcgtctgacgacttcagaacgatgaagaagtcatgggaggatttctactcctccgagctactcaataccaggaatcctgtgagaaagatagctaaaaggccagacacaattgttgtccgtggcgtgccttccaggtggtttgcagagacaagagtatcatccaaaccttccacgctggtcacccacactgttttctcagcgcttggtaaaataaggaacctaaatatttccaatgatgatgagatagaagcaaaaggacatggagtcaacaaggggctcatatctggacttaattgcaaagttcaggtgcaatttgagagctataatgacttccaggatgcaatgaaggcattatgtggacgttctttagagaaggaaggatcacggttgaaagtagactatgacgtgacctgggactgtgaaggtttctttcgcatttctcaatatgagccagttcgtaacaatttagaggagagggattcattagcatcggttaatagccagaggaaacatcacacttcgcgaattgaatcagattataggaagagattcagggagtgatgacataagcccatggtatgagcgagatttctttgtcctctggagagggaaaacagctgcattgtaccatcgtattgtttcgttctcagatttcaagttatatttctcatttgttcacaattaaccgaacag

SEQ ID NO: 32727 - DNA, 2079 bp, Zea mays
  Clone ID: UC-ZMFLMO17018E08_FLI
atcgtgtagaggtgaagaattctttacccgagggcttagctaaggatgattggtgctgggaccagagtatcttgaatatagatgttggtactgatgatgtgagagacattgtgtttgtacaaaaaggctattggattgagctagtttcaactcatgatactaatgcttatattcagcagccagattcttctagacttgatttgttgataaagaaaggatcacaaagaatttgtgttgaaacttcagggcaacatgagattcatttaactaatccttgtatttcctttgggacctcgtctgttttgtttgatacagctaatttaatgccgatccatatcaatgcaaagaagtatcttgtaaaaggtgaaatccatgtggacatgagctccattcaggaaaacattgattccaaggacatagtcgtggatatcttgaagagtgatggcagtttcatagaaaagatatccacatcacttgttcttggaaaggacaatcaaaatgacttcactgcctttgagtactctatttgggctgaccttggggaggacttcatctttgtcccccatgattctagcattggaaggaacaaggtcctattttatccagcaagacagcagtattcagtttctatgaatggatgccaagatactgttcctctaatcactgcaagaactggtctatatcttgaaggatcagtgttacctgcaacttctgatgttgacatcaagattctagcagctggaaagagcaactatgcccatctgaacaaaggggatgtagcaacagaggcaaagacagattctgaaggatcattttttgcaggtcctttgtatgatgacatagtatataaagttgaagcttcaaaggatggttaccatctcaaacaaactggcccatacaccttttcttgtcagaagcttggtcagatattagtgcggatttatggtgaaaattcagagcttttacctttagtattattatcattgagtggcgagaaagggtacagaaataactcaattagtagttctggtggaaccttcacctttgacaacttatttcctggaagtttctatctccgaccacttctaaaggaatataaattcaatccgtcagcagtagctattgatcttaattctggagagtctagggaggctgaatttcgtgcaaccagagtggcttacagtgccatgggttctgtaacactattaactggccaaccaaaggagggtgtttttgttgaagcaagatctgaatccacaggtttttatgaggaagctaccacggattcttttggtagatttcgtcttagaggacttgtgcctggatcgacttactctataagagtggctgcaaaagataatcttcagtttgcagcagttgagcgtgcttcacctgaatatttgtcagttaatgttggtcatgaagacatgactggtattgattttgtggtttttgaacgccctgaagtaacaatcttgagtggccatgtggaaggagatggcattgatacgttacatccgcatctctctgttgaaatcagatcagcaacagactcttctagagtagaagctgtacttcctcttcctctttcatactactttgaagtccgagatttgcccaagggcaagcatcttgttcagcttcgatctggccttccatcacatacacataggtttgaatcggagttagtcgaagtagatctggaaaaggatccccaaatccatgttggtcccctcaaatataaaactgaggagcgtcatcaaaagcaggaactgaccccagcaccagtttttccgcttattgttggagtttctgtggttgcactggtgatcagtatgccaaggttaaatgacttataccagagcgctgtagggatgacttctctgggttcagggatggcaccgaccaaaaaggagccacgcaagaatatattaagaaagagagtgtaaatggcatattagcttagccttaggggtcgagaaatgagacatgacaaattgagcaatttcaacagtggaatagcttctggtttccccctcgggtaattttgccgacgaaaaggaatgccagttttgttgt

SEQ ID NO: 32728 - DNA, 2017 bp, Zea mays
  Clone ID: UC-ZMFLMO17018F09_FLI
ccttctccgactccggcgacgccgccggtacccgccaccccgtcccccgcggcgctgctccgcccgcggcgggaggcattcgagcacgggctcttgcccatccccaagctcatcttcccggagggtacgctggcgcagaccctcgcccagctcaaggagaagctcgctgcctcagccccggacggacgcgtgcgcgccgcggccctggcggaggcgttgcagatcccgcaggagcaggcggcgctcgccctcgccacgctcgcggctgtgctcccggcagaggaccccgcgctcggcgacggcgccgtggatggttctgccgcggacatccgcgacatgctgctcttcctctacatccagtcttacaaacgtctcgtcccgcggagcgcgcacaaggactcgcccgtcgtggcggacgtctggccgtccacctccgcgttcgatgggtacctctccgcactctccccgatccagcttgttcgcagtaacagccgtcgttttatgccttctcaagctgatgaagaaattcatcagttgtcctatctgcaaaagcatatggcgaatattcttactctcttggcagattctgttgagggtgatggtgatgattcactggtgttgacaatggagacttttgagcaccttggatttctagttcaattctcagaaggaacttctttaagccaggctgctacattgtttgcatgctcagatccagacatgcctgatgtgcctgtccctgctgctcaggttcttgattggatgtcacagaaaatagctttttcactggaatattctgctgagaggtctgcagcaaaggaaagcaaccagcaaaccatgtctgatcttgatgtgaccatggctgaggccaatacaagtcacccacggaacagtacaccaagtgccaatcctgcatactacagaaatgtaacatttgtggagggcttttccaaaacctctgttgtcaagcatgcatctgatgtcaaagggaattctataaaggttttgaactgccatgattctgttatctacatattagcaccgctgaagtatgctactgtgtacggttgttctgatgctacagttgttctgggtgctgttggtaaggtagtaaaagtggagcattgtgaaagagtacatatcattgcagctgcaaaacggatttgtattgccaactgccgggaatgcatcttctacataggagtaaatcaccaacctcttgtgttgggggacaaccataaattacaagttgctccattcaatacgtgctacccacaactgcatgaacatatgatacaagtggctgtcgatcccagtgtcaacaaatgggaccaaccttttgtgttgggagttgttgatccacatgattcattatcccatcctgctggagtttcagatgttaaagctgaatcagcaacatgtctggatcctgatctattcaccaattttttgattcctagttggtttggggatgaaaggcaagggactacaaactgcaatcctttcccactgcctgaaatttatgggacatcccaaagcaaaaagcgttctgctctggaagatatccaaaagatgattcgggagctgcagcttgatgagaaccggaaaagggaattggcaactgcccttcacgttcagttcaaggattggttatacgcttcaggcaatatccgccagctctactgtctacagagcgattaacgatgggatttgcaagactgactacccttttgccgactcctactccaaaacattcgacaattgtcgaaaactgaccttccttccctgggagagaggattcccacccgcgcagaaggatgtgaagatgtactgttacctacttttttacagattcatttgggtatattccctttgctgcgagttggaggtactaattaggatgtaatctccaagcctactcatttttttttggcccttgataacgtccacgagtatgtaatagggggactgatggatcatacgttgttgaataaacatttcttcatcccgttttgct

SEQ ID NO: 32729 - DNA, 1504 bp, Zea mays
  Clone ID: UC-ZMFLMO17018G07_FLI
cgaaacgtttcacgtgagcaaacctgggcgtattcctctctctttcctcatcctcatccgagtggctctctccttgtgctgtggcggcggcggcgcccggctctgctcggacggactccaccgaaggcgctcggctcccctcgggctccacctgcgacggccggccctctgactgcaccgacggtgcccgccccccctcggcatccaccagcggtgcccggctccaagtccctgccgccactccgaccgtcctctagcagctccgtccggtggtccggccagctgcctagctccctccgaccgtccggccagcatcgcctcctgctcgcggcctcgctcagctcctccgccctctgttgagacgcagatcttggtgcggcagggcaccacagaggctgtgcgtgtgctggtggcctggtgcttgcaaccgagagccagtgtccagcctgccagctcagcccggcgccaaccgcccagcggctggctcgggcagcggccagtggccaacagctgacaaccatacctcgtttcttcggcgtcctccgccgctgcccccaactatgcaccctgttccagtctcctcccagccctttaccgcaactcctgcaaaaaaacttgtttcaaggagcactgctgtgaggaaggccatccattttgtcaacctgcggacagctggaaggtctagtggaaacctggctatgaactccgtaccgaaaccagcccttgggtccgaaacatctgggagggaggattttgctgtgggggataaggatgctgtggtcattgttgatcatgggtcaaaacgccaagaatccaatctcatgctaaatgactttgttgagatgttccgggcgaagactagctataggattgttgagcctgctcatatggagctagcggagcctactataaaagatgcttttggaaaatgtgtgcaacaaggagcatcccgagttattgtcagtccatatttcctttcccccggacgacactggaagcaagacattcctgctttagcagcagaggcatcaaaggagcactcaaatataccctatattgtcactgctcctcttgggctgcatgagcttatggtggatatcatgaatgatcgcatcaagtactgcctgcgacatgttgcgggtgatgtcgatgagtgtacagtgtgtgctggaaccggaaagtgccgcctgtactcctgatggagcatacctgggaggcacatcgatactgttaccatttattatgagatctggagaatacgagatctgaccatattctgagcagatcgtcggaattagacaaatgccaaattagttatgctgtgcatgcttgcgaacatcaatagtgatagagattcattagctaatcttgagtttatttacataacgaacaaactcagtcaagtgctctgatatttccattcacatgtaatctatattcctgctaccttgtagttgaatgaattaacatggatcaaatgataatataatgtgcgacttgtttg

SEQ ID NO: 32730 - DNA, 1350 bp, Zea mays
  Clone ID: UC-ZMFLMO17018G08_FLI
cgcgcaaaccgcttgaaccctagctggcggcgggaggcggaggtggctccgggatgacgcggcggtgctcgcactgcagccacaacgggcacaactcgcggacgtgccccaaccgcggggtcaagatcttcggggtgcacctcaccgatggctcggccatccgcaagagcgcgagcatggggaacctctccctcctctccgcgggatccaccagcggcggcgcttcccccgccgacgggcccgacctcgccgacggcggcgggggctacgcctccgacgacttcgtccaggggtcgtcctccgccagccgcgatcgcaagaaaggtgttccttggactgaagaagaacaccggaggtttttgctgggattacaaaagctcgggaaaggggattggcgaggaatttctcgtaattttgtggtctcaagaacacctactcaagtagcaagtcatgctcaaaagtattttatacgccaatcaaatatgagcagaaggaagagaaggtctagccttttcgacatggttcctgatgagtccatggaccttccaccccttcctggaagtcaagaaccagagatctcacagttaaatcaaccgccactgccgcctcctgtggaggaggaggtggaatcgatggagtcagatacttctgctgtcgcagagagttctggagcttctgctctcatgcccgagagtttacagcctacctatccgatgattgttccagcttatttctcgccgttcttgcaattctcagttcctttctggccaaatcaggaagatggaggcgatcttccccaagaaacacacgagattgtcaagcctgttgcagttcattcccagaatccaattaatgttgatgaactcgtgggcatgtcaaagctaagcatatgggagcatggtcaggagacagtgtctacttctctgtcgctaaatctgctagggggtcaaaataggcagtcggctttccatgcaaaccctcaaacaagagctcaagcctgatcatcccctaccagcacagaaactgtattttagatggaatcctgggcaaaataagctttgctctttttttcttcttctaaatttaagatcaccgagtcacaaggtcactggttggaagtagcttctccgtatttgcggggaaagcctgccctggtttctctccatcatcagagccttcaatattgtcttttttatatatttaagattgaccgtgctctgtagcttgtatcatgtgctgtaagttatgctatgtatgaatgtacctgtagtttgtatggcacgcatggtatgacactcttatgttagcaaagtcattaatgttagtgctgatctttatggttgtaatgtt

SEQ ID NO: 32731 - DNA, 1473 bp, Zea mays
  Clone ID: UC-ZMFLMO17018H12_FLI
ctcgccggacaggaaggcacgctctggtggcacgcgcacagctcctggctccgcgccaccgtccacggcgcgctgatcatccgcccgcgcgccggcgtcccgtacccgttcaacgccggcgacacgccagccagggagatcaccatcatactaggggaatggtggaacatgaaccccatcgacgtcgtgcgcaccgccacccgcaccggcgccgcgcccaacatctccgacgccttaaccgtcaacggccagcccggcgatctctacaagtgctcatccaacggcaccacgacgttctcggtcacgtccggcgagacgaacctgctgcgcttcatcaacgccgcgctcaacacggagctcttcgtctccctggccggccacaccatgacggtggtgggcgccgacgcctcctacaccaagccgtacgccacgcccgtcatcttggtcgcgcctggccagaccaccgacgtgctcgtcaccttcgaccagccccccagccgctactacctcgccgcgcgcgcctacgccagcgcccagggcgtccccttcgacaacaccaccaccacggccatcttcgactacggcaccggcgccagcaacagcagcagccccgcgatgcccacactcccggcctacaacgacaccgcgacggccacggcgttcaccacgagcctgcgcggcctccgcgcggcggaccttcccgcgcgcgtcgacgagagcctcttcttcaccgtcggcgtcggcctcttcaactgctccagcggccagacctgcggcgggcccaacaacacgcgcttcgcggccagcatcaacaacgtctccttcgtgctcccgtccaccacctccatcctgcaggcgcactacgcgtacgccgccggcggggcgacgccagcaggcgtgttcaccgccgacttcccggcgaacccgccggtgcggttcgactacacggcgccgaacgtcagccgcgcgctgtggcagcccgtgccgggcacccgggtgtacagcctcaagtacggcgccgccgtgcagctggtgctccagggcaccaacgtgttcgcggccgagaaccaccccatccacctccacggctacgacttctacatcctcgccgagggcttcggcaacttcgacgccgccgcggacaccgccagcttcaacatggacgacccgcccatgaggaacacggtgggcgtgccggtcaacggctgggcggtcatccgcttcgtggcggataatcccggggtgtggctcatgcactgccacctggacgtgcacatcacctggggtctcgccatggcgttcctggtggaggacggcgtcggggagctgcagtcactggaggcgccgccgtctgacctgcccatctgctagctcattgcatagggggcctcaactcatttattatgctcaaaattcgtcaaggaacattcttgccgatttataattaattcaatcatataatactattcaaac

SEQ ID NO: 32732 - DNA, 1511 bp, Zea mays
  Clone ID: UC-ZMFLMO17019A08_FLI
gtaccgtgatactaaagtcaggatgaaggaacccctggagcaatttaaccaaaccaaggacgctagtgattacttatggtacaccacaagctttcgcttggagtcagacgatttgccttttagaaatgacatccggcctgtgcttcaggtcaaaagtagtgcacactcaatgatgggatttgccaatgatgctttcgtaggatgcgcacgcggaagcaagcaggtgaagggtttcatgtttgaaaaacccgttgatctgaaagtaggtgtgaaccatgttgtattgttgtcgtcaactatgggaatgaaggtaaaaattcgtcggaactgtggaatgtgtttggaatgtaagatgactgattatactgtcctagccgatatccaggcgaaaaaaatatggctgtattgacgcaagctacaaacactttattttggaaaggtggacatatataaatatcataaatagaagggtggcccatgcgctctgctaatgcaataatccttcccatcagctctaaatttgcatgtttcactatcttctgcaggacagtggtggtgaacttgctgaagtaaagagtggcattcaggagtgcctaatccagggtctgaacactgggacgttggatttacaagtcaatggctggggccataaggctgcactggaaggtgaggacaaggagatctactcagaaaaaggtgtgggcaaagttcagtggaaacctgccgagaacggccgggcagccacttggtataagagatacttcgatgagccagatggagatgatcccgttgtacttgacatgagctcaatggacaaaggaatgatttttgtgaatggtgaaggcgtgggtagatactgggtctcataccgaactcttgctggaactccttctcaagcactataccatattccgcgtcctttcttgaaatccaaggacaaccttttggttgtcttcgaggaggagatgggcaagccggatggcatcctcgtgcagacggtgacgagagacgacatatgtctgttcatctcggagcacaacccgggacagataaagacgtgggatacggatggtgacaaaatcaaactcattgcagaggatcacagcaggcggggcaccttgatgtgcccccctgagaagacaatccaagaagtcgtctttgccagcttcggcaacccagagggcatgtgcggcaacttcactgtaggcacttgccacactcccaatgcaaagcagatcgttgagaaggaatgcctcggcaagccatcctgcatgctgccggtggatcacacggtgtacggcgcggacatcaactgccaatcaacgactgctacactgggggtgcaggtgagatgcggagggggcaagaagggtgcctgagaataacaagatggatgctgctaattaatggacgtttcagcttgtttgtttgttcatcccttcggtttggcactgatgcttacattgttctgacattgcaattgaaatgtgattggaacattcttgatcggg

SEQ ID NO: 32733 - DNA, 2839 bp, Zea mays
  Clone ID: UC-ZMFLMO17019C01_FLI
ctaacccgcgggactcgtctatctctccgtctctcacatgctctcatcccttccacgccgccgccgccaaacacagactcgtaagccacgccgccggacccgcgctgccagaccgcgtcgacgctccctcgccgctggggttaaggtgacggcccatcttcaccttcggcgaggtggacctccgccacgtctcgctcccgtccttgcccgtctccggcccgtcccccttccgcgcggctgccgtggcggcgccctttgtggagcggcgcggaacatgcagctgttcctggctgactggcccttctacatgaacgggtggaactcctactggctcatggaccaggccgtggagccgaggtcccgggaccgcgtctcccgcatgttccgcaccgacaccgagatgggcctcaccgtgtgccgctcctgggcgttcaacgacggcacctacaacgccctccaggtctcccctggccacttcgacgagcgcgtcttcaaggtaaaaaaaggaaactgcccccccgttaattttagccgaaaatgccgcgccttgtggggtggtgctaactgcttaacaatggagtgtctctactaggactattccaccatgggtttagataatttcttagtctatgtttttaattagggaaccaatgaacacatgtagtgcgttgctaattttagactggaaatgctttgggtgattcagatactgaggtatgtacatttgaggtgtttagataatttcttagactgtgctgttcgacaattgggctaccatttgaggtgtgcattaagaaattaaactgaggtatgtacattgactcgatgaggcatgctgagttgaaagcatggattcgctccatgatgttcggctttactctcgcattccatcatgcgtggtccttgaactttcaatacaattatatatgacatccattgtttaggcttatcatgtatcaaagcctagtctattgaatatttgcacctcattagtctacatgtcttgataaattgtaaattcattcttctttaggaatggacttgatgtaacttttgaaatttgtatggagcctccttttattataacatgaatacatattatttagttctcagaactaaaaatgtcttctatgcttcttgtgaaattcacgcctagttatttcctggaccagtaaggttagaggatgtgcttgtgtgatctattttttcttggcgaggaactgccattcttttctcaaacacacaagtgaattgtgtgcctttaggcatcaaactctggcatgaaagatgaatggtatcaatgtgttcatgtgttaaagctatctgagcgaacccttgctccatactaatgtaaatagtgtgattgaaatagtatcagtaattattctaaagtctaaacacagagttttcgttttggtttcctctgtttatttctctccatggttcaataacaatgatttttatgaagtacaccagtgcttgtacattttttaggatatgctttccagtaaactttgatacatttttttgtatgctcactcctgctctatctgcaggaatggctagttgcagtgaaagtaatttctagctggagcagatcagtcatcatgctgatgtttggtagtttcctgcattctagcgcattgtcatttgttgtggtgaaaatagatagattttcaaatcactagtcaaatgaacacatgccttgcacaatactgcatatgtaaatcgagcaaaaagtaagcacatgccaatagttttgggccaatcggaaagcacaaaagaaggaaaaaagaagggattaacctaaagcaaaagactcttttgcaccatctttaggcctaggaccatctccaagatggcctaattgccaatctattgagctctaatgttaaactgtttggagggagcaaagctttgctcgacattggtcttactactttggttttcctatttttgtagatctatacttgaacatagatgcaagtacaatgtccccctttgagcatgatgaggtgtctattcttgataatggtggtacaactccctaatacttccatttaatacacattttaaattttgcagcctcgatggtatctacctagcatgtggtatttgtaggttgacttggatttagagaattatgagtgtttcatagatgttactctgacgagggataacaatattaccactagaaatatatattagtctgccattgagaaggagagaaggggtgattatattggaaagactttatatgtaatttttctgtggcatttatcactcgagttgcattgtatggactatccatatcccataatctaaaatatctatggtttcaaatatctagtgttgggggccttcgtcttccgaaggtcctcaaaaatatgatttaacaatattttccaagtgtgatatgtaagcaggtaccttcagactcgggtcaaaagcatatataatatggaaagcatgatcgggacgaaggtcgatcctgacgaaggtcgagtcaatcccgaagctatgcgcaagaaagcttcggctagatggcggaaaaaggaaccgacttaaaggggaaaaggctatctagtcctaatagaattgtatataagttaataataaatgtaaagggcatgaatgtaatttctcacaggctgtgtcctgtgcctacatataggtgaacagtacccccgtactattcacgctgatttgacatttgcttttgcgtcacgctcgtacctttgttctctgtcaagccaaaggtaccaaatgttattcaatattgtctttatattaacttacaattatatactgagaaatatatatgataatgttattgttc

SEQ ID NO: 32734 - DNA, 1130 bp, Zea mays
  Clone ID: UC-ZMFLMO17019C08_FLI
ctttcttgtttccatttcactgcagtcctgatcgctggatgctatgcatgaaatgcatttgctgtgcttgcgagattgggcatttactatgagctttgtgacagttaacatcttggtcctgtttggaagctgggattgggaatcaaatccttacatggtttaggagcatccagtttgaacttaaaccattgtagacatctgctgcaataaaaacaattggcttcggtgagaggcactcatcatcagttcaaacttaaaacgagataagccatcggttgattggcctaattaccttgcttcccgtgattgttcgcctcgctgaaaggatatgctcacaacccgtactgttttgacttgttatccacatactatttaagtacgaaaggacatgcgtactactttcatttgttgttcttcgtctagtcttcagactgataatataaggtgaaaaacttcgatgtttcgcgtgctgtcaagtgattgtgaagcaaagtttctgttagtgtcaatgcgtacaggctgcaatggccatctttactcctacttgaagcatatctctgatccacactgatgatgatgagttgtgtgcgccacttttttttctttttctttcagaactactcatccatcataactgtccaccccgagagcattgacgggaggccgggcaccctggtgatcgagtcgttcgtggtcgatgtgcctgatggcaacacgaaggacgagacatgctacttcgtcgaggccgtgatcaagtgcaacctcaattctctcgcagaggtgtcggagcagctagcagtggagtcacctacgtcgctgatcgatcagtgaagtcacctgcgtcgcccatcgatcagtgaccaccggtacaaaaaagaagcttcgaaggctggctggagagttcaacctttttgagaccggtggtttcgccatcgtcttctgcgtgtaatgtctcttggaatatggaagtattagtcgttgtgtaggattaaacatctgtagtagcttgtatgctagggatggttgtttagccttagaaactgcacctagatacctcatggcatgtatgcatactgctagtatgtgtagagatcagggaaagcatggagcgggttttgcctcttaggtgc

SEQ ID NO: 32735 - DNA, 1233 bp, Zea mays
  Clone ID: UC-ZMFLMO17019E02_FLI
ggcggaccgcggacagcggcgagctggccaccgcgtcaccgcctctacagccccaggttccactgctaatcgccggtaatggcccaggctccggcgcgcgccgcttccgccttacgtctcttcgacgcgcactgccacctgcaagacccccgcatcgcggccgtcgcccctgcccttatacgagccgccggcgcatccggcgtcgcacgcttcgctgtcaacggcacctccgagaaggactggcacctggtgaagcagatggccgaggatcacccagccgtcgtcccctgcttcggcctgcacccatggtgtgtacccgagaggtcgccggattggatgaatttgctccgggggttcttcgccgaaaccccggaggcggctgttggggagattggtctggacaaaggttcacatggaaaaaccatcaacttcggagaacaggttgaagtgttccagcgacaactcgaactagctaaggaattggagagacctgtttctgttcattgtgtgcgggcatttggtgatcttctagaagtattgaagcaaactggacctttcccagcaggcgtgttgttacattcttatatgggatctgcagaaatggtgtctgcccttgcaaatttaggctgttacttttcactatctggcttcttgacaggcatgaaatccactaaagctaagcacgtgctgaagtcgattcccctggataggattcttttagagacagatgcacctgatgcattaccaagattggacaatgtttctgtatcaccagtccatgttcacagttcagatgcagatactgaaaagcgtcacatggattcagagtcacaggctgctaatgcatcaaatgagtccttgaaccatccagaaaatatccatattgttttggagtatgtcgcatcactccttgaaatgccagagtcagaattggcggagctgagttacaagaatgctaccaagctgttttcttatcctggctccaaagttcaagatgaacctaaacacatctaaatcgggttcaacactaccttactcactggtcagcaaatctgaaacctgttctttttagttttgactcctggtttttctactcttcttaatgctgtttgtgtaccggattgtagggtctcccagacacaatgtttgagaaactgaaatggttgtacatcactgttaatattggtgaaataaaacagataccgaatcaaagtagtgcaactggtttccttc

SEQ ID NO: 32736 - DNA, 819 bp, Zea mays
  Clone ID: UC-ZMFLMO17019E07_FLI
atgaacctgcggcggcagaccccgctggccgcgatccacgccgcgctggcgtcggcggacgccatggtggccgtgcacggcgcggccgtcacccacttcctcttcatgcgcccgggctccgtgctcctccaggtcgtgcccgtggggctcgactgggcggccgacgccttctacggcaagcccgcgcagcagctcggcctcgagtacctcgagtacaaggtggcgcccgaggagagctcgctggccgccgagtacggcctcgacagcaccgttctgaggaacccctgggtgatcagcagccgcggctggtgggagatgaagaaagtgtacatggaccgccagaacgtcaccgttaacatcaagcggttcggcgagctactcaggacggcgcggacgcacctcaagaacaccacggcgtgcgccgccgccgcggcgctgaggtagaagatgctagttgagcttggtcaggtgctaatgacttagtcatacttgtcaatttctttgtgttttcgtcgagatcctgtaaatatgattgggttggttcttttggtcgagagattggtggggatcgatcgccttcttctacagtgcattcgtttggttcatggtgttgctagagcagaagcagatgaagaatagtttatggcaggggcagctgtcctcaaacaccttgttcacactagttcataggggtagcagctctttttatttctcttcaaattttctttttgttcttctcattctttgggtgtcatgatgatgtataagaaactacatgtctttctctgtaacaaagatcaatagtccagactcttttac

SEQ ID NO: 32737 - DNA, 793 bp, Zea mays
  Clone ID: UC-ZMFLMO17019E08_FLI
atcaatgcttctgatgccctcgccttgtaccgtcttgagtacaagtcctctgaccccaaaaagggtgctgctaagtcaaaactggctagtccactgaatgaaatccggcagcgaatgggcaggctgactgcagacagccctgtggaaaacaagcggactgctaggagcaagccaaaggctaaccagaaccagaaggataccaatgcaaatacccgtccacatgttaacactcccaatcaagttaatgctccaaatgcttatcagacaacgcagcaggtgaaccaaatggcatttctgaatggaaacgttgtttatggacctcaccttccacattctgaaagcgtcgtctatggacctcatcttccacattctgaaaacgttgtctacggacctcatcttccacattctgaaaacgtcgtctatggacctcaccttccacagggatactcagccgaaggaagcagcttcttttggaacccaagtgacgggacttgaagacgcaggcagcatcatgtagctgctcatgcattgcatggcacttatcaagcaaaaacctctaacatcatcgaccaagttggggctgagtagcttggcccttcacatttctaaattctaaatggttggtttctgcacgggggcctggcaggtcggtgtatttgaattttgaaatgcagaggtattacttgcataaactctgtataatatagccggtgtccaagttgccaatctgaatgtaaattagtctgctgtaccagtaaccagttgctgcttgggtatgttagatttgagtcct

SEQ ID NO: 32738 - DNA, 1854 bp, Zea mays
  Clone ID: UC-ZMFLMO17019F01_FLI
ggagcgcacacacacacaaccagatctcccccaaatccacccgtcggcacctccgcttcaagatgcagatctttgtgaaaaccctgactggcaagactatcaccctcgaggtggagtcgtctgacaccattgacaacgttaaggccaagatccaggacaaggagggcatccccccagaccagcagcggctcatctttgctggcaaacagcttgaggacgggcgcacgcttgctgactacaacatccagaaggagagcaccctccaccttgtgctccgtctcaggggaggcatgcagatctttgtgaaaaccctgaccggcaagactatcaccctcgaggtggagtcctctgacaccattgacaacgtcaaggccaagatccaggacaaggagggcatccctccagaccagcagcggctcatctttgctgggaagcagcttgaggacgggcgcacgcttgccgactacaacatccagaaggagagcaccctccacttggtgctgcgcctcaggggaggcatgcagatcttcgtgaagaccctgaccggcaagactatcaccctcgaggtggagtcttcagacaccatcgacaacgtcaaggccaagatccaggacaaggagggcattcccccagaccagcagcggctcatctttgctggaaagcagcttgaggacgggcgcacgcttgccgactacaacatccagaaggagagcaccctccacttggtgctgcgcctcaggggaggcatgcagatcttcgtgaagaccctgaccggcaagactatcaccctcgaggtggagtcttcagacaccatcgacaatgtcaaggccaagatccaggacaaggagggcatcccaccggaccagcagcgtttgatcttcgctggcaagcagctggaggatggccgcacccttgcggattacaacatccagaaggagagcaccctccacctggtgctccgtctcaggggtggtatgcagatctttgtgaagacactcactggcaagacaatcacccttgaggtggagtcttcggataccattgacaatgtcaaggccaagatccaggacaaggagggcatcccacccgaccagcagcgcctcatcttcgccggcaagcagctggaggatggccgcaccctggcggattacaacatccagaaggagagcactctccacctggtgctccgcctcaggggtggcatgcagatttttgtgaagacattgactggcaagaccatcaccttggaggtggagagctctgacaccattgacaatgtgaaggccaagatccaggacaaggagggcattcccccagaccagcagcgtctgatctttgcgggcaagcagctggaggatggccgcactctcgcggactacaacatccagaaggagagcacccttcaccttgttctccgcctcagaggtggtatgcagatctttgtaaagaccctgactggaaaaaccataaccctggaggttgagagctcggacaccatcgacaatgtgaaggcgaagatccaggacaaggagggcatccccccggaccagcagcgtctgatcttcgccggcaaacagctggaggatggccgcaccctagcagactacaacatccaaaaggagagcaccctccaccttgtgctccgtctccgtggtggtcagtaagtcatgggtcgtttaagctgccgatgtgcctgcgtcgtctggtgccctctctccatatggaggttgtcaaagtatctgctgttcgtgtcatgagtcgtgtcagtgttggtttaataatggaccggttgtgttgtgtgtgcgtactacccagaactatgacaaatcatgaataagtttgatgtttgaaatt

SEQ ID NO: 32739 - DNA, 760 bp, Zea mays
  Clone ID: UC-ZMFLMO17019F03_FLI
aattttataaatcaatatcaatttagggaccatcttggaatatcaattttataaaattttataaatcaatatcagctcggtggccccagggtgagccttgctcttcagatgcaaattttctcgccggttttgggccaccagcatgttcttacctagtttcttgccatatcagttgccacgccaaagcaaatcagggagctgatgaaggtgaacggcctgacaaacgacgaagtgaaaagccatcttcaggtgagctatgtaattgacccaaaaggcacttcaagcgggcaggaaagtctaaggcccttacttagtacttccaaatttatatgagccatcaacttaatgatgattaaccttgattgcaccagctgaagttggtgcataaggctgcaacaccgtctagtggagggtgttctggacaaagaaagcttgtaccttaaaataggaggatacaagaagctagagtggttgtctgaaggcttaactgcttgaagcattagtgtagctttggtgcttttgtgactgatcagctctggagcagctagagtgatgtagttgtgggcttttgaacaatagctggagtaatatgaaacgttagtgatgtagttgtgggcttttgaactgtttcaagctggagtgatgtcgctgtggtgcttttgtgactgatcatctctggagcctttgtgaatgatctagctagctatctataaatgatctagttatgaataatattataattgtgatgcttttgtgaatc

SEQ ID NO: 32740 - DNA, 1397 bp, Zea mays
  Clone ID: UC-ZMFLMO17019F09_FLI
ccccacctccctccgatcccccaaatcccgaattgaccaacccaaagccgtcgccccgcatggagtggacggtcccgaagcgcgccgcctcgccgccctcgcctccgctcctctgggactgggggggagaccacgccggcgccacgggctcgggctcctccggcgacgccccggcgcggcgcggcgggagggagcgggaggcgaagcgcgccagggccgacgacggcgaggtgaggtgccaggtggaggggtgcgggctggacctcagcagggtcaaggagtaccaccggaagcaccgcgtctgcgaggcccacaccaagtccccccgcgtcgtcgtcgccggtcaggagcgacgcttctgccagcagtgcagccgatttcatgccctgtcagagtttgatcagaagaagaggagctgcaggaggcgtctgtctgatcacaatgcccgccgccggaagcctcagccagatgcattcgcctttgcctctgcaaggctgccttcgtcgtcgttcgatgataggaggcaaataagttttgtctggaataaagctcctgttagccatcctttcacttctccatgggacagctcatctgagctccctcatgcaaaggaaataagagaggtgtcaacgaaagttgggacaattactggacaagttcatttggataaatcttacgtgtccaatgctgttccatcacttacccatggcaaagatgagccttggccaatgaaaggtccggacatgtctatagctgcttcaaaattcgatggagcaccggatcttcagcgtgctctctctcttctgtcagttggcgcctgcggattgcccgatcctgtacaccaaacatcttgcgtcatccaattcactagtgccagcgagaacagtggcgaccttcatctatcacatggagcgaactctggtctagcgtcatgcggtgatggacagcatatagcttctcagcctcaggctcagctggttcggtttaccatggataccagcaacagtgtctatgagcccagtttcttcagtgtaaaccagataaattaagcgttgaagacacacgccacttggtcatttggataaatagccctgaagatggcctgagcttgtgcaagaagttcttcaaccaaccaccggacataaggatctatctgttaatgttatctgtgtatttattagccatacctgaattaagttgaacccaatctaggccagcttatgtgcaatatgcagttccaacctgtgattgacccattttttctgttgtttctttgcccgtgatgtgactgctctggaacttaagtgtgatactgttgtagttacactttactgccctgacaatcatgtcaaacggctggatatctttgaaactgtccttgatgaatctggacgtgt

SEQ ID NO: 32741 - DNA, 2083 bp, Zea mays
  Clone ID: UC-ZMFLMO17019F10_FLI
tttttcttgtgtgtcatttgatcatttccacataaacaccatataaaaaaataactgcatcttgtttcaactttcaaagtgagaaccaaaagcatagggttgctggtgtagccagacaaaactaagtcagaccgcatccaaccattgacaattatggataaagggagaaattttctatgcctagttgcctactattaacccacttctaggacatgtcgaagattgtttaatagggaatatacgtggaatttagacaggtttgagccctcgatgtgagataataccctacatcatgtttgaggtggttctgttgttgtattgtatgttctaatctgatgattctatgatctgatgctctcaggcggttccctgtccctcttttaatattctaaggagtgacggaagttacatgataggcaccgagtcggctatcaagttcatgatggaaccgagtcggtacaaagtcatacgtgaattgaattctatgtcttcgagtttatctcttattctgttgagatcttactatatctgcgcttctagaatcctcctggttgtaggctcccctggtcctattgccgagtccttcggcttgtggccgagcccatgagctcttttgctcaggctcttctttacgaagcttggatagatgtcctagtatatattattgataggacatagcatgtcataatgtctggcttggcatgttctttgatagagtttttatcactcatctctgtcaccttcctgatgtattttattgcttgggctcaagtcgaatctggaatgagacttggctttcaggatttttctacaaaccttgcaactatgaactctttgtgaagcaatccctcaacatggagatggctattgtaatggctcgggatggtggcatggattggatcatacatttagacactgatgagttactttatcctggcggagctgctgagtattctgttagacgtttgttagctgaggtccctcgtgatgtcgacatggttatttttccaaactatgaaagcagtgttgagcatgataatataaaagatccattcagcgaagtatctatgttcaagaggaattatgatcatcttcctaaagatacttactttggcatgtataaggaagcgacacgaggaaatccaaattattttctcacctatggtaatggaaaatctgctgcacgaattcaagaccatctccgtcctaatggcgcgcacaggtggcataattatgcaaagagcccaaatgagatcaagttggaggaggctgcagttctgcattatacatacactaaattttcagatttgacatctagacgtgatcgctgtggatgcaagcctacaaaagaagatgttaagagatgtttcatgttagattttgacagagcagcttttataattgcatcaactgctagtgaagaagaaatgcttcgctggtacaatgaacgagtcgtgtggaccgataagcagctgaacttaaagcttctgaggaaaggagtgctgactcgcatatacaccccaatgacaattgttcagagtctgcgcgaatccggtgtcttcacttccgccattgcagctggccaacctgctgtgaatgccaaactctcacccaaggaaaccaatgcgcagagccaaaatgttaccgcatctgggaacatgacaagagtggtcagatctactgattcaaaggcatcaggcagaaagatactgcaagccgttgatcttgccttcagcgatactaatgtaactgctgttccaccgttgtcgccgcccagtttggacgaacacaggcatcatagtgaataataatgtcatacgtatgatatatatattttttgctcggcgtataagctcctaagaaaaggaagaaaagaaagttactgacatcttcgttaagagaagtgctaacatcagcttggatggtcaatttttatgcaatctgcggcagcgaaattctggcaggcgtcttttttcgcgatcgaagtgagatgcgggtgcgggcaacattgatagatagtgttttactggaaacaaaacatatttttagcaattttgtacaaaatctttatgaagttattaac

SEQ ID NO: 32742 - DNA, 586 bp, Zea mays
  Clone ID: UC-ZMFLMO17019G06_FLI
gccttcgataagcgaacagcttcatcaagttcttctggccagtctatgtatacccttcatgcacacgataaggctgtttcttccatctccttcaacccgtctgcccctaactttctcgcaacaggctcagttgataaaatggtgaaactatgggatctatcaaacgacaaaccatcatgcattgcctcccaaaatccaaagcttggagctattttttcggtatcattttcaaatgacagccccttcttgttagcatgtggaggttcaaaaggcaaactgaaggtttgggacacgcttacggagcctgcagtagccaacaagttcagcaaatagaactgccgctgtttgccattataagttatttcccggcacacacatgtttgggtagattgaagttatagtcgaagttttgcccttgtgagttgaggagcccaattgtataatgaactcatgaaatcaatccaagcattgatttatgtattagtggtgggcagaggttttggagtggacgtattaactttatgacggtgcgagttgggttgtgacttcccaattttttgtgaaagaagttagtgatcttcagacc

SEQ ID NO: 32743 - DNA, 672 bp, Zea mays
  Clone ID: UC-ZMFLMO17030E02_FLI
gcgctcaccaccaccaccaccaggacagtagctgacgacgacctcctcctgcagctcaagatcaactactacccaaggtgcccgcagccggagctggccgtcggcgtggaggcccacacggacgtcagcgccctgtccttcatcctccacaacggcgtgccggttctgcaggtgctccacggcacccgctgggtgacggcgcgccacgagccgggcaccatcatcgtccacgtgggggacgccctggagatcctcagcaacggccgctacaccagcgtcctccacagcggcctcgtcaaccgggaggccgtgcgcatctcctgggtcgtcttctgtgagccgccaccggactgcgtgctgctgcacccgctgccggagctcgtcacggaaggccaccccgcaaggttcacgccgcgcacattcaagcagcaccttgtgagcaccactcagccggtcaacgagaaggaagcaacggaggagagcagcgaaggcacgaaacgtctgaacaggaagcgttacagaaggccaaatatgaaatatgttgggccacaatgggtcaactagttgggccttgtaactagctgtgtgagaatacgattccagagaccatataggctctgagggcatcagacatcagggtatcgagaaaataacaacaaactattctacctc

SEQ ID NO: 32744 - DNA, 1165 bp, Zea mays
  Clone ID: UC-ZMFLMO17030E08_FLI
cccgagtcgccgtcctacgcacgctggcgggacttactcctcctcacccttcgtcgctacgctctggacgaccacgtcctctgcgaccccaccggcatggcgccgactgccacgtgggtgcgccttgacagcatcgtactcacctggatcgtggggacgatctccgttgacctccacagcctcctccggaaccttcctcacgctcgggcttttggcttgccatcgagggccagttcatgggcaacgccgaggcccgggctctccgcctcgacgctgcttttcgcaccttcgtccagggggacctcagtgtcagtgcgtactgccgcaagatgaagaccatggcggactctcttggcgatctgggttgccccgtggaggaccgcatcctagtcctcaacgtcctccgcggcctcggcgatcgctacacccacctccggtcgttgatcatgcgccagcgcccctttcctaccttcctccaggttcgcgacgacctcgccctggaggagatcactctgggcgctcaggctgcatcgatctccggcacggggtcctcgtcctcttcgacagcactggcggctttcaccccgacccgtcctcctactccgtcacagtctgcccttggccctcgccctcccgggccgagcatgggcggcgggggtcgaggtggcagaggcgggggcggtggtggtcgtcgccgccgtggtggccgcggtggtggttccgggggtggtgcccgtggccacgccccgacgccgggaccccagcagggtgcgccttggcccacttttcaccacccgtggtcagggcgcatctccatgtggccgttccaggggccaggctctgaggctcggcccccggcggccatgttcgctggtgcgcagccagggttcgccttcgcctccccgtcaccatggacctcgacacctgccgcttcgtcgtggcccacgccaccggctactcctccgtccgggctggttggttgggacgcggccaccctggctgcctttcagactcctactctgactccgccgatgggtcccgagtggatcgcggacaccggtgctacctaccacaccacccccgaccctggtatactcacctctgttcgccctccttcttcctctctcccttcgtccatcatggtggcgaatggctcatgtcttcc

SEQ ID NO: 32745 - DNA, 652 bp, Zea mays
  Clone ID: UC-ZMFLMO17030F06_FLI
ggactggcaagaccatcaccttggaggtggagagctctgacaccattgacaatgtgaaggccaagatccaggacaaggagggcattcccccagaccagcagcgtctgatctttgcgggcaagcagctggaggatggccgcactctcgcggactacaacatccagaaggagagcacccttcaccttgttctccgcctcagaggtggtatgcagatctttgtaaagaccctgactggaaaaaccataaccctggaggttgagagctcggacaccatcgacaatgtgaaggcgaagatccaggacaaggagggcatccccccggaccagcagcgtctgatcttcgccggcaaacagctggaggatggccgcaccctagcagactacaacatccaaaaggagagcaccctccaccttgtgctccgtctccgtggtggtcagtaagtcatgggtcgtttaagctgccgatgtgcctgcgtcgtctggtgccctctctccatatggaggttgtcaaagtatctgctgttcgtgtcatgagtcgtgtcagtgttggtttaataatggaccggttgtgttgtgtgtgcgtactacccagaactatgacaaatcatgaataagtttgatgtttgaaattaaagcctgtgctcattatgttc

SEQ ID NO: 32746 - DNA, 1262 bp, Zea mays
  Clone ID: UC-ZMFLMO17033C11_FLI
gggcgataaacttaaattcggactttcatctatgcaagggtggcgtgcaactatggaagacgctcactcggctttgctagatcttgacaatgacactgcatcctttggtgtttttgatggacatggaggaaaagtagttgccaaattctgtgcaaaatatctacacagagaagttctccataccgaagcctatgctgctggtgacctgggtgctgctgtccacagagcttacttaagaatggatgaaatgatgcggggtcaaagaggatggcgggaactccaagcacttggagataagataaatcagttcactggcataacagaaggcttgatttggtcccctaaagcaagtgattcaaatgatagacatgatgattgggctttcgaggagggaccacactctgacttcactgggccaaattgtgggagtacagcatgtgtagcattagtgagaaataggcaactcgttgtggcaaatgctggtgactcccgctgcgtcatctcaaggaatggccaggcatacaatttgtcaagagaccataaaccagagcttgaggcagagagagaaaggatacaaagtgctgggggttacattaaaatggggcatgtaaatggaagtttaaacttgtcaagagctattggagacatggagcttaaacaaaacaagttcttgtcccctgataagcaaattttgaccgcaaaccctgacataaacattgtcgagctatgtgacgacgacgaattcattgttttagcatgtgatggcatttgggactgcatgtcaagccagcagttggttgatttcatccgtgaacatataaacacagaggaaagcctttctgcagtatgtgaaagagtgcttgatagatgcctggctccatcgaccatgggtggcgagggatgcgataacatgacgatgatcttggtgcagttcaagaagccatttgctcaggtaaaggatgccagtgatgcggaacaactaactggagatgcgggatgctctgagacccatggggccgaggagaatggctctgacaagcagatatagcgaagacatggactcttttggagtcttggtacatggcctgacgctgaacctgggtaaaacaggagtacgatgttgcaatgtacataccaaccatgcgctgagttggcgtgaaggatatattcattgttccactgttgtctttaaccaaacgtgctgttttcttccggttgtgatttttggtgatctgacaatatctaattatacatttgggtgg

SEQ ID NO: 32747 - DNA, 2631 bp, Zea mays
  Clone ID: UC-ZMFLMO17040F12_FLI
ttctgcacaaccgctcgtcactctccaaatttgctgcacctgccctctccaaagttcttgcactcgtccctctccaaagttcctgcagattcacttctctccaaagttcaggaggatgtgtggtgtgacagcgctacaacaaatctgtcaacggggactctcatcctcttgctcatagaaagaactgcagtgttacaggtaggtaattactagagtactactactaagtaaatctgtcaaaggcagtcatggcatccatatccttcacatcagtactgggagtggcacacgcaccgcacacatactactacatctactagtatgtagtggagtgcttgaaaggcataagcgaattttcttcttgtttggtctacgtccatttgcttgtccactaaccggctagtttactctgctttttgggttttccacgtctctacaattgtgactgttagagcaactccagtagttctctaaaaaatagcttgctaaaatcatgtttagcaagttgctaaatagctattggaagtaaaaaataacttagtttccaatagttgctcatatttaggaagtagttcgattttgaatctagctttagcggccctgtccctatgagatctgcctgataataaggttgagagcagaggatatgagggcggaagaaaaaaggtcggtcgatatgaattatggatgagtggtggtccggtgacgcaacctatgagaaagttaggttcgacggtgaaggagaaacttgcgtcatacgtgtttgacctagctacctcattatgctagaaaataaaaaaaagagtgtgttataactggctatctcactgtataggaaaggtaaaaataatcacgctagtgtgaagaaattgacgtcaactgtatttagggagttcctaccgagttgctaaatgtggagagtaaatagagttgaatagcaactaactaaatttagcaagtctatttagagaaccattggagaagtatttttctgttcacttcttaaatttaagatttagagagttatttagagaactattgaagttgctcttagaccacctataattgtgactgttgaccacctatagatgcggttcaactagccctccgaccccctctcgagagttccgctccaccgcggcgaaggaagtggcggaggaggaggatccgcgcctgcgctgggccttcgtgcggaaggtgtacgcggccccccgctgccgtctggcccacgtacatcgccatcctcctatccctgtccccgctcggactcttcctcgctaccgccgtgtctgcggatctggccaagtagcccggtaggaagcgccgtgggaggagacaggcgaggcgttcgaccgccgccggcagcttaggacgtaccacgtctctgttctatgggttcacgagtttcggggccctacatggattctccgcctccgcctccgcctcgtccgccatcgccgccgcgacaccctcctcaccctcagggcgagcgtcacgtcggcggggagatgctgtaccaggacacagaccataggctccgcgcgctggtcgggagcgccgagggcttcggccgccacgccatcgggggcctctacggggccatccaccgcgtcacgtcgctccaagacgacgggcccgggagtctgagggaggcgtgccgggcggaggagcccctgtggatcgtcttcgaggtgtccggcaccatccacctccactcctacctccgcgtctcctcgtacaagaccatcgacgggcgcggccagcgcgtggtgctcaccggcaaggggctccggctcaagtcatgccatcacgtcatcatctgcaacctggtgttagaaggaggccgtgggcacgacgtggatggcatccaggtcaagcccgactccaccaacatctggatcgaccgctgcaccctcgccgactacgatgacggcctcatcgacatcacgcgccagagcacagacatcacagtctcaagatgccattttatgcggcacgacaagacgatgctcatcggtgccgaccccacgcacgtcggcgaccgctgcatcagggtcaccatccaccactgcttcttcgacggcacgcgacagaggcacccccgcctccgcttcggaaaggttcacctctacaacaactacacgcgcagctggggcatctacgccgtctgcgcaggcgtagaggcccagatcgtgtcccagtgcaacatctacgaggcaggtggagggcccccaaagaagacaactgtattcaagtacatgccggagaaggccggcgaccgagaggacgtggtggcagggtcgatcagctcggaaggggacgccttcctcaatggcgcgctgccctgcctgatcgataaccctgggtctgtcttcaggccagaggagtactaccagcagtggaccatggagccagcgtcgccggcgctcaaggacataatacagctctgcgcaggatggcagccggtgccccgccccccggatgatcgctgactttcatcattctgatatgctgcagctcgcttctgtaagaatattcgtttcacggaagcactgcatttgtatgcatctcatcctaggtaattcaacatttgtttcatggtagagtggcatttgtatgccactcctcttc

SEQ ID NO: 32748 - DNA, 2045 bp, Zea mays
  Clone ID: UC-ZMFLMO17040G02_FLI
taccgtcgctcgctcccctctcgttgtccgccccacccccagcctccgcccgtcgcgtcgtaacagacgctgccccagcctccgccccgttctccccgtcgtcggcaccccgcttgacgccccccctgtgctccaagactccccctccgcctccgtcctctcgccggccttggcgcctgctctctccgctgtgggtgtcagttggaggggtcccgcaccatgcagaagctcctcggtcaggcaccgccacacgccagattcgagctcctccccacatgccgcaagatgattcaccgtgcactccgccgctttctgtcacgacgttgaaccgtccaacctcgccatcggcggcggcctcctctctcttgccttcctccccctgtgcaccgaatcatccctctctgtttttgtgctggatttttggagttttaccagagttgtttcctggggtttagcgggaatcctagatgtgtacccccttggactttaggtccctgtaatttcgtaatactgccaaagattgggggttttagtgttagtaggatcattatctctgtcgtgtttggttgtacttgtgctgctaatttggggacaatttagttaggaatagggagcacgaatgccttgccagtttcattgtcttacttgctgtatgtggtgaatctaatgcctactttaggccagcatgactattggtttgataaaagcttgcaatcaagtttggaaatgcattttttgttttaatggtactaattgataagctataattttcagaagtaacgtttcttccttacaggttgctctggtcagtggacattacatatgtattcttgctgcaaaactgtagaaaatttgctatgaagtctatgcgttggttcctggacttctacgtgaagagttcacattgatcttcggtccaacagtcattttgcccccaaaagagccgacatatattttctactcgttgaggggtttacgaatttctccaagactgcaagagaacttgtgcaccggatgcagaagattgatagcgacattatcccgagtggatttaagtggatctagaacagcatgaagggcttccttgacccaaaaacttcatccaagattcatgtgcttggttcgaactaccagagcatgcttcttgaagtaatagattcgagtgagctgccagaattccttggcggttcatgcacatgtagtgacaagggtggtccgctaggaagttgctgatgcggtggacaatgctgtcatcagatctgttggtgttcttcccagctgttttgtggtttgtgtgggcgtacatcaaacttggagtcggtattagtggagaggagagatgggaggggtggaggtggctgctagccatggtcctgagcagtccttgcttggtattgatcgatcatggccattttcagtgtaattgcgttagccttggacttgcgcttggagcaattgctggtgttctgtcgaggaatgagctcgtcgctgcagatctcttcactcttgcaatcaatcacaaacagttcatatgggcgcaacagcggttggtgcagtggcgcccgtgtgagtggtggctgtcggggccaccagtgcaagctctgtccaggaggaacgggtacatccgaatagactactacgacgtttagatatgattattgattagcataattaaaaatagcatgttaaatgcatcttcagggtcaaaggaaaatacaaattacgacctgcaatattagaaaccaacatcatcttttgtgttgtgagtttaaattcttgctttgatggttttcattttcttaacactaaatccaagtcggcgcttctgttcttatcaaggtaacacatggaataccggctgcatttgtaaatcaaagctaggacaaaagcgaaaaagttggctgggcactaaccaaagaagcattttttattttaggcatcaccattggatttgtgtcgttctgattgtagaaataacatggctttaggattggaatatttaccctgtattatcatttatgaaacatagtcttatgattgttgct

SEQ ID NO: 32749 - DNA, 2213 bp, Zea mays
  Clone ID: UC-ZMFLMO17042B02_FLI
ctagtcctctgttacttctccctccgccgccactcccctcccattctccgccaccgccaattccataccgtcctccgccacctctgctgagagcgagaagagatggcaggcaagggtgatgggccggcaatcggcatcgatctcggcacgacgtactcttgcgtcggcgtctggcagcacgaccgtgtcgagatcatcgccaacgaccagggtaaccgcaccacaccctcgtacgtcgccttcaccgactccgagcgcctcatcggagatgcggccaagaaccaggtcgccatgaaccccatcaacaccgtctttgatgccaagcgtctcattggcaggaggtttagtgatgcctctgtccagagtgatattaagctgtggcccttcaaggtcattccagggcccggtgagaagccaatgatagttgttcagcacaagggggaggagaaacagtttgcagccgaagagatctcctctatggttctcatcaagatgcgtgagatcgctgaagcttaccttggcagcactatcaagaatgctgttgtcacggtccctgcctacttcaacgactcacagaggcaggccacaaaggatgctggggtgattgctggcctcaatgtgctgcgtatcatcaatgagccaaccgctgctgctattgcctatggtcttgacaagaaggcaaccagtgtcggtgagaagaatgtcctcatctttgaccttggaggtggtaccttcgatgtctccctccttacaattgaggaaggtatctttgaagtcaaggccacagctggcgacacccatcttggtggtgaggactttgacaacaggatggttaaccactttgtccaggagttcaagaggaagaataagaaggatatcactggcaacccgagggctctccggaggctgaggacctcttgtgagagggccaagagaactctgtcttccactgcccagaccaccattgagattgactcgctgtacgagggcattgacttctactccaccatcacccgtgccaggtttgaggagctcaacatggacctgttcaggaagtgcatggagcctgttgagaagtgcctgagggatgccaagatggacaagagcagcgtccatgatgttgtccttgttggtggctccactaggatccccagggtgcagcagctgctccaggacttcttcaacggcaaggagctgtgcaagaacatcaatcctgatgaggccgttgcctatggtgctgccgtccaggccgctatcctcagtggtgagggcaacgagaaggtgcaggacctgcttctgctggacgtcactcctctctctctgggtctggagactgccggaggagtgatgaccgtccttatcccgaggaacaccaccatccccaccaagaaggagcaggtgttctccacctactcggacaaccagcctggtgtgttgatccaggtgtacgagggcgagaggacccggacccgcgacaacaacctgcttgggaaattcgagctctccggcatcccaccggctccccgtggtgtcccccagatcacggtctgcttcgacatcgacgccaacggcatcctgaacgtgtctgccgaggacaagacgacggggcagaagaacaagatcacaatcaccaacgacaagggccgtctgtccaaggaggagatcgagaagatggtgcaggacgcggagaagtacaagtcagaggacgaggagcacaagaagaaggtggagtccaagaactcgctggagaactacgcctacaacatgcgcaacacgatcaaggacgagaagatcgcgtccaagctggctgccgacgacaagaagaagatcgaggacgccatcgacgcggccatcagctggctggacgccaaccagctcgccgaggcggacgagttcgatgacaagatgaaggagctggagagcctttgcaaccccatcatcgccaagatgtaccagggcgcgggtgccgacatgggaggctccggcggcatggacgaggacgctccggctggaagcggtggccctggccccaagatcgaggaggtggactaagcggtttgtgtcagtctcgtgtgtctgctgcagtggctggctggcccagtcgctgctcgatttatcgtcgtcgtcgcggtgtatccgcgttagaaccttttgttggtgaacaatattatcgtggcacgcgttttaagtaatacggtattctggttcggttt

SEQ ID NO: 32750 - DNA, 1111 bp, Zea mays
  Clone ID: UC-ZMFLMO17044A08_FLI
aaggtcaagtggacttccgtcgagaagccgcgcgccggggagcggacgctcaagtgggaggccgagatcaagtcccccgacgacgacggcttcgaccgcaagtggaagtgggaggccaagggcggatcctccgcagccagcgccaggaagctcaagtggggtgccgcggtcaagggcaagggatgtctcgagccctggtcccaggcctacacgtgggaggaggacttcaccgccagcgacagcgacaaagaagaggaggagcgcgcggccgacaagaacaaggccaagaagatcaccatgaacaagaatgagaagaaggaggtgaaggctgtcaagaaggagaagaaatgccccttcgccaccgtcaagatcgaggagatctcggaagacaatgatgctggatgcgtcgccatcaaaaaggcatttgctaagggcaacggcaagggaaagaggaaggagctctcaccgcaggacgctgcattgctcatccagatgacctacagggctcaccttgctcatcgctcccaggtgcttcgctgcctgcgtgacctagctgtggctaaagccaagctcaaggagctcaggtccctgttctataacatctcctacaggcaccgcattgcgcatgaccacgaagagcgccagaggttctctgagaagatcatcgtgctgctcatcaccgtagatgcgctcgagggacctgactacatggtgaggaccgcgaagaaatctatgctagaggagctcgaagcaatgctggaggttgtggaccctcagcccccagggaagcagcgatcactgagccgcaggaaatttgatctcccagagggtggagccatccccgatgagaaaaccgctgctgtgaacaaagccatcaggatcatcgaggaaggcaagtgaagtgatgcaccaccaccttgttactggcaggattgaatcctgatgaaagctccatatctatccgtgtatcgtctaggagaagtttatatccgtgtgctttgctgacactcgagggaggagaactaatatctgcactttattgtaccttaaatgatagccatgtttttattgtgaacctgtagtatgttgctaggcagtcagtttgaacatt

SEQ ID NO: 32751 - DNA, 428 bp, Zea mays
  Clone ID: UC-ZMFLMO17044C04_FLI
ctttattttgtctggtctcaagggccaaatgttgctttgtctctgattaacattatgagcggcacgtcaccgggtgatatgcagtgcagcagcaggccacgctgaagctgaagctgaagctgaacctcatctgcaggggcacaggcaaggagcagatggcagtagtgtagtgacgctagctcatggaaaaaaggtagaacgatctgaagcaggagttacagacaatgaggaagatgcgcttgtttacagctccctaaaaaaaaagagataaatgcgtcgataaggccaaccttgttcatcatttggtttggatttttcggggaaaaaggggaatcaagttggtgtaagctgtagttgctttgttctgacccttggctacctgaatgagtgggtcaaaattaaacaggcactgcgctaattaagtgctg

SEQ ID NO: 32752 - DNA, 1622 bp, Zea mays
  Clone ID: UC-ZMFLMO17044D02_FLI
ctcctctcctctcctctcctctcctctcgccggcgcatcgcccgactgtcagtcagcctcagccatggccgcggaggaggagcagggcttccgcccgctggacgaggcgtccctgctcgcctacatcaaggccacgccggcgctcgcctcccgcctcggcggcggtggcagtctagactccatcgagatcaaggaggtcggcgacggcaacctcaacttcgtctacatcgtgcagtccgaggccggcgccatcgtcgtcaagcaggcgctcccgtacgtgcgctgcgtgggggactcgtggcccatgacgcgggagcgcgcctacttcgaggcctccacgctgcgggagcacggccgcctgtgcccggagcacacccccgaggtgtaccacttcgaccggaccttgtcgctgatggggatgcgctacatcgagcccccgcacatcatcctccggaagggcctcgtcgccggtgtcgagtacccgctgctcgccgaccacatgtccgattacatggccaagacgctcttcttcacctccctcctctataacaataccacggatcataagaacggagttgctaagtactctgcgaacgtggagatgtgtaggctcacggagcaagttgtgttctcggacccataccgtgtttccaaatttaatcggtggacctcgccttatctcgacaaagatgctgaggcagttcgcgaggatgatgagctcaagttggaagtagctgggctgaaatcgatgtttatcgagagagctcaagctctgattcatggagatctccacactggttctatcatggtgaccgaaggttcaactcaagtcattgatccagaatttgggttctatgggccaatgggttttgatattggagccttccttggaaacctgattttggcatactatgcacagaatgggcatgctgatcaagcgaatgatcgtaaggcttacaagaaatggatcttgaagacaattgaagagtcgtggaatttgttccagaaaaagtttgttgaactatggaataaacacaaagaaagcaatggggaggcatacctgcctgatatatacaacaagccaaagcttttgagcgttgttcagaagaagtacatgacaaacctatttcatgatagccttgggtttggttcagccaaaatgatcaggagaatagtcggaatcgctcacgtagaggatctcgagtcaatcaaggatgccagcaagagagcagagtgcgagcgtgctgccctcaactgtgcgaagacgatcctcaagggaagacaccagtttgagacgatcgagcaagtcgtcgagcatattcagtcattcgatcaggactgagaagacgacagtctatttgtgcgctgaagcctgaaggagccatactctcgtcaattaacccacgcatgcccgagtatcgatgaatcgtctgttttgtagtgatgaagcgcccggttgtttgtgatctctgtattggttgctaggtgagaaaagtatgtggtctcctggcttgaactgtgtgtacactattattccgggccggcatagcgagcagctgaataatgaaatgtacgggtcctcagtgaccatctcagtgcatataaacacgtgtgttaccaat

SEQ ID NO: 32753 - DNA, 2280 bp, Zea mays
  Clone ID: UC-ZMFLMO17044D05_FLI
ccggtggcctcctcgtcgccactcgccaccggcgccgcacttcccccgtctccccaactcattccttggcccctcctctccaccgaagcgatagcaaagccgcaggccgcaccaattgttcccttcccccggcggcagcaaacatggcgctggaggtgctgccggaggagtccaaccggtgcgtgcgcgggtgctgccgtagcgccaccatcccgctcgaccttcggtccgcctccttctccctcctcgcccccatcgcgcgaggctcggagagcactgtgtacgaggcattgctgggcggcgagcgcgctgcggccaagaagcctgtgctgtccaccgccgaggatttggacaagttccactaccagcttcagcttctctgcaagctggatcaccctgggttggcaaaactgatcgccgcacatgcacaccctccggcttacttgatgttctttgacttcttcgagcctccaaatcttgcagaaaagatacatgtcgaggaatggatcccttctatccagcaagtggttacgatggccagtgatctagcaaaggctctccaatacctacaaatccttggggtagtacacagagatataaaacctgcgaatattttgctagacaaagatctccatccatatctagcagattttggcttagccatgtttcaaaaggatattaagcgtgtctcagttgagaactggaaatcatctggcaagcctactggtggtttccataaaaagaatatggttgggacactaatttacatggcaccagaaattttgagaaaggatatacatacagaaaagtctgatgtgtatagctttgcaatatctatcaatgagcttcttactggtgtggtgccctatacagatctgagagcagaagcacaggattgcgtccagcacttgcccttcctgaatctggtgccccaccaactcttttgtcacttatccagcgttgctgggatcctgatcctgaaaagagaccatcatttgaagatataattgatgagctaaatatagttcaaaagcatatagtttcaaatgcttctgttccatcatctcctgtcagcaagagtcaaaatggtaccatagaagtgcaccattatcaagaagcattgaactggttcaaccagggggagctttttgttaaaggatcaagtagatcagaccttaagaatctttggtctgattgttttgatcaatcttcagagtaccatccaacattaagttggggctcttttgcaacgtgtggtcgaagggaaaccatggaagacacccattttgtacttccccatgtgagcgaagaaaatgatgtttttgcctttggcatttttgatggccatagaggttcagcagccgctgaattttctgtccgagcagttcctggatttctcaagcaatttggtcagggtgcaagcccaactgacgctctttcagaagcgtttgtaaggactgacatagcatttcgagaagaactaattcttcaccggaagtcaaaaaggataattcaaaaagattggcatcctggttgcacggcaataaccgccctgatagtgagaaacaagctttttgtagcaaatgctggtgattgccgagcaatcctgagccgtaagggcaaaccatttctgttgaccaaggatcatgttgctagttgcccaaatgaaagagaacgagtaacaaaggcggggactgaagtaaaatggcaaatagatacgtggcgagtgggttcagctgctcttcaggttacaaggtcaattggtgatgatgacctcaagccagctgtcacagcacaacctgaggttattgaaactgctttatcagctgatgatgagttcctggtgatggctagtgatggcctatgggatgtggtaagcaaccaggacgtgctgtcaataatcaaggacacggttaaagagcctggaatgtgctcgaagaggttggccacggaggctgcggagcggggcagcaaagacaatatcactgtcattgttgtctttcttcgccccgtctccacagctgagcgaatctactgagtcacctcccaaaacctattctcattaacttcaggtggccataccgcacgccttccgctgttaagtcgcaatttttgtattcgatccacatcggttctcaagaagaaaagaagctatactatacgtccattcttgtatttgtagatagaagaaacagcagcctctgcggcggctctttttttcaatcttttgaaacatttctcgtgtgtaaactatgcaagctgaatggatattgttggcat

SEQ ID NO: 32754 - DNA, 1892 bp, Zea mays
  Clone ID: UC-ZMFLMO17052C08_FLI
gacagccgcaacatgaggccggcgctcctgctcttctacaccctggcgctcgtggaggcgtcgctcttcctgttcgagaaggcgtactggacgtggaaggtctccgtctgcaagctgctccaccaggtgagcgccgagtgcgagctgggcccgtacgggctcgtctccctcaagcgcttcttctacgacgcctactcgcggtgcatcgccgggagcatcttcgacggcatcaagatggacctcgtcaccttcgccgaggacctcatcctctcggacttcctggacgagcagatcatcggcgtgcgcatcctgcagcagttcgccaacagcgagcgctccgcgagcgacacgctgcgcaaggtcggcaccaccccgaggtccatcgaccggctcgtcgagatgctcaactggaagcggaccgaagaggatgaggtgcgactgtgcgccgccgagatcgtgtccaagctcgccagcaagcgtcagaacgcgctccgcgtgtccggcatccctggggccatcgagtccgtcacgtccctgctctacaccgccacgagtccgcccgtgtccggaacgcacccgcagctgcccggtgctcccgccgagcacggagcctcaccgccggcggggagccgcggctacgaccacctgcagttcaacctgctgggcctgctcatcctcaaaaggctcgccagggaccacgataactgcggcaagatcggtaacgcgcgaggcctgctcgccaaggtcatcaacttcacgcaggcgtcgcgagctctcctccagaacccgcacgtcaccgactcgcaggtgcgcgccatgaagcgcgcgctcaaggtggtcaagatgctcgtgtccacgacgggtagcaccgggaaggcgctccgggagagcgtcgcggagaacgtcttcacggtgagcaacctgcgcggcatactgcggtacgggcagcagcacagggagctgcagaagcttgccacggacgtgctcactgggctggccatgcacgacagcggcaaggaggccatcgtggccacgggaggcgtcgtcaagctgctgctttcgatattcttcaatgcccaagacacggaactcggtcgcgaggccggcgaagcgctggcgatgctggctctggagagcgaggccggatgcgcggcgatactcaggcagaccgacgtgctggaccagttcgtgtcggcgttgcaggacggcgacgcacggcggcgcctcaacgcggcgagggtcctgcggaacctgtgcgcgtactcggggcaacagcagagggagcggctgcgcgtggtgaccaaggccttgccggcggtgctgaacgccaccaaggtggacaaagacagaatactcgaggtgtccgtcggcctgtcgacggagatctgccagttcatcgacggcgagcagtttgccgccgagctgcgcggcgccggcgtggcggacgaacgcgcatacgtggagctgctggcgagcatcctgaagcagtacaggtatccggacatcagggtcccacgaatgcgacggttcgtggtgcagcaagtcatctggctgatgacgagttcgggcggaggcggtgaccacagcggcgggtacgttcagctcctcagggaggtgggcatgaagcggctgctagagtccatcgctgacaccacgtcggagctggagtgctaccacgttttctcaggaagcgtcggcatcagcaagcaccgtgagagcttctccgccatcgtggactccgcgctggagctgatcgccggcagcggtgatggagcccgagctgaagactgaaaggttgcatggaattatgaaaatacataaaagggcagctgaagtctgcactctgcactcgtgtagaatgtaaaaagaatgtaaagaagtatgaaaattac

SEQ ID NO: 32755 - DNA, 1335 bp, Zea mays
  Clone ID: UC-ZMFLMO17052G04_FLI
cacagctctgccgcttgcctccgccggcgagggaagggacgaggcgccgagccggcaaccgttttcggggttgctggcggcgattggctgcggttccgcatcaaggctggtcgaacgctgcccctcctgattggtaggtagctcgagatggatctgattcttccatataaggttggggacctcgcggagtccaaatccttggtgagcggttacagaggtgcatggtttcgctgtaagatacataatatgcgtgtcaggcttggatacctggagtgttacttggaatacattgattatccaggcgaaaaaaaggaatgggttaggctctttcgaaagaactctgcaaggtccaaccaaaattcaagtgatagtattcacaccatgataaggccttcatttccaaaatggtattttgtgcatgaagttcctgagcagttcccaaatagtgatgtcacagcaattgttgatgaaacctggcaaattggtgatcgagttgattggttgaaggaaggttgttattggtctgggacaattactaagataatcaatgaagatctggtcgagatagagctgccggcacctcccataggtgaaggaaaatgttataaagctaaatgtagtgatctgcggcctactctcgagtggtctctagcaagaggttggatggtccctctttcacaggcaaatggaaaaggttggcatgctgctcgtctacttcaacattataaatctgaatcagatgatgataatgacgacaacgatagctgcgatgcccggcaaacggtgtgcagagcttcaaacacgcatgaggaagctccaggccccatggtccctgcacctccgtcagccacaaacaacgctcccagccacacatatcagaaggatgctgctgtcgcatccacagaggacctgctgaagcccggctcaacatccaagtcgccagaccccaggcacgacgcccaagctagcgctcaacctgcaggtacgggggtctccatgaagccggaaccggttattggagtctcaacaatcaagaaagaggactccttgacagaaggtgaggttgatggcgacacggaagagtgtctggagaagctgggcgcgatcaaagccaggctcaaatacctcatgcagggcacgcggctggaacatgagcgcagcgccaccttccgtgggtagtcaggcagatgaagctgcatcaaaggtgcaacttcacgcaggggccagggccatctaacgcctgttgtggttgctgaattttgtttcctgtggttacaggtattattgtcctgaataatgatgctgtgaataagtggtttgttttttgagtgcggc

SEQ ID NO: 32756 - DNA, 1894 bp, Zea mays
  Clone ID: UC-ZMFLMO17052G10_FLI
gaaagagttaaatgtatggtaggcccttgaacttgtgaggatgtcacttaggtccacaaactatcaaaatgcatttttggcatcctaaattcctaacattgcttaagtgtgcgacttaggtccataacggttcggaaggtgggttttggcctacatggcttcgccagtgtcgcagtgactgtcgttgcgcatgtaaggagcgtgtgaggttggtttgtaccatggaaataaccagagaagaccctcttcttcctttctttttgtttctgtggtccaagatggtggagtagaaatgaagggaagaagagggtatctttgcttattttcatggccaaaccaacctcatgctctcaccttgtgcgcagcgacacagttggtgccatgctggcaacggcatgtagaccgaaacctaccttcagtaccgttatggaccaaagtggcacacttaaacaacactaggatgctagaaatgcatttgtcacccacactggctacgtgtcattgccagtgtgggtgacacgtagccaaaacctagcttccaaaccgttatggacctaagtgacacacttaaacaatattagggtgccaaaaatacattatgagagttcatgtatctaagtggcaccctcagacaagttcaagggcctaccctgcatttaactctttgataaaacatttgtggcataggattattcaataaacagcagttgtctgatgaaatatgtgtactttgttcttgcatcgtctgcagacagaacattctatacatattggtggactggtgcgcctggacgtagaagagttaactgtaggatcgatctatgttacagtttgggcatcaccacttgtcccacttcacatgggaaagacagaaaacacgacaacattgataaaagaacactttggcttgcaattacagcctcccataggccaggagcgggtaaaggagcttggtaaatgggtgaggaaacagttcaaagtttctgggaacagttgggatacaaactctaaggatatagccatcgctggtcttggttggtttggaattgggctgaaaggagaggcagtgttaggattatggacatatgatggtgttgatgtcatctccaggagctccttagtccatgagagggcttcagtttttgaggaagctggtttcacagtttcacagattgtttctaaggcagatagcatgaccaataagctgaagagcaccaagaagccaaaaaaggagagaatgaaacgtacttcccccacagagccggaagcttgagacctgcttccaccgatagatacttgagtcttttcatccagtcctgtgactggagtatcattttggtgatcatgttacacaatgttccgcattggtcctagaaactgttaattgaattcagaagcagcggctgagtatacaatgtattgttctccagaaggaacctgccctaatcggagtgtctatgttttacaaagctctaaattttgatcctttgctagtttgctgagctggagagtcaggaagtattctgagatgtcagtcagttacggaacacctatctggagagtcagtcagttaggaaatactctgtgagatgttttgatgttaacttataaaatccaacatgaggacttgtgttccagcattaaagggaaggtgtggagacattccagattgcatttgatgttatcattcagttttaggattcatgattgtgcctccttgtaaagttgtagctgaactataatgatgtaggttccacagatgcatatcctgtttttcgtcaacattgcctgcattatagattccgtgggcatcgttctcagaccacagcttgttttctaatgaactttctctcaattgcttgttgagctattggatgcaatgcgttttgtattg

SEQ ID NO: 32757 - DNA, 721 bp, Zea mays
  Clone ID: UC-ZMFLMO17052G12_FLI
atcgccgcggggatgtacgtgttctcggcgtccacgctcgggtacgcgcgcggcgtgcgccgcgactatggggccgaaagcgcgcctgacatcgtacaacgtgtgctgggtgggcggctgcttcgactccgacatcctcgccgccttcgacgccgccgtcgccgacggcgtcgatgtggtctctctcagcgtcggtggcgttgtcgtgccgtactacctggacgccattgccattggggcgttcggcgccaccgaagccggtatcgtcgtctctgcttcggccggcaacggtggtcccggcgggctcacggtgaccaatgtggcgccctggatggccaccgtcggggctggctccatggaccgcgcgttcccggctaacgtgcggctcggcgacgggcaggtgctcgacggcgtgagcgtgtacgggggacccgcgctcgagtccggcaagctgtacgaactggtgtacgctggggcgagcggcgggggtgcctcgtccgcgtccgacggctactcggcgtcgatgtgcctggacggctcgctggacccagccgcggtgcgcggcaagatcgtggtgtgcgaccgcggcgtgaactcgcgcgccgccaagggcgacgtggtccgccgcgcggggggcgtcgggatggtgttagctaacggggcgttcgacggcgagggccttgtcgccgactgccacgtcctgccggcgaccgccgtcggc

SEQ ID NO: 32758 - DNA, 1341 bp, Zea mays
  Clone ID: UC-ZMFLMO17052H10_FLI
aggcgggcctggtggagaagaggcgcaaacgactgctcctattcgccatcttggccgcgaccatcacctaccaagccgggctgacaccgccgggcggctttctggtccaggacgataaccgtaccggccgccatgccggcgacgcggtcctgctcaacaactacccgcgccgttacacggctttcttctactgcaactcggtgagcttcatgctgtccatcgccctcatcatcctcctcgtgaaccccaacctgtaccgccctgccattcggagcaatgcgctgtctgtctgcacggcggccgggttgattggaatcatgggcggctacgcggccggctgcacgcagcatctgaagacatccatctatatcttcgtgttggcggccgtggttctgtccactgtggtctttctggctgcggtgttccttgtgatccatctgagaaaaaaagacgataatgctaacagcaccaacagagcagcagcaagagaggcacctggggaagaacaagaagccaatgctggtgctggggtgccaaatgccatggggggcgagcaaagaggtccccaaggagccaaagctcgccgaaaagaaaagagggcacacgccaagcgcaagtatctgatgctgcttggaatcctcgtggcgagcgtgacctaccaggccgggctggcgccgccgggcggggcgtggcagtccaacgacggcacccacaccgcgggcgaccctgtgatgcacgactaccggagggcccggtaccttgccttcttctacagcaactccacctccttcgtggcgtccgtggtcgtcgtcgtgcttctgctgccggagtcgctgcacaagaagtggtggtggctcggggtcatgaacgcgacgatcgtgctggacctgctgggcctcttgatcgcctatgccgccgggtccagcaggacgtggaagacttctgtggttgtttccgctctcgttctcgctgtgctcgcctatttcgccatacatgtgctgctgtcaagctgcgtcaggagagggaagaagacagcccccgactctccgtctccgccccaggaccaggagaacagagaggaaaacgaagcggcaacgaaagaggtcgagctccagggtccagcttgctgaaactggagtgtacagtgcggagctgaatgtgtgtgcagtccagtacttgtagatttttttttcacgaccgtgttgtcgcattttttttttgtcaagaggtgtagtgtttttgttgatccacgtagcgggcgggaacgattgatgtgcaatcaagtgttagatgtaagtgtacaaacaagtctgcgtgcaagcgaggcttctctgtcttttt

SEQ ID NO: 32759 - DNA, 1768 bp, Zea mays
  Clone ID: UC-ZMFLMO17053A01_FLI
ctgataataggtggtcttgggcagaggtgaaacatctctctaaatgtctagtccaggcccttgatgctggtctggaacacgccctcttggattctgtagtgactgtagacaggtatgcagctgctgagggtttctataaactagctatggcctatgcgcccgttccagatcttcacattatgtggttgcagcatttgtgtgatgcacaccaggagatgcaatcatgggctgaagcagcacaatgtgcagttgctgcagctggcgtgatcatgcaggcacttgttggaaggaatgatgctgtgtggagcaaggagcatgttacttcgctacacaagatttgccctatcgtcaacactgatgtgagtgcagaagcatctgcagctgaagttgagggatatggtgcatccaaattaacagtggactcagcggttaaatatcttcaacttgccaataaactcttcacacaagctgaactttatcatttttgtgcaagcattcaggaactcataattcctgtgtataaaagcagaagggcttatggacagctggccaaatgtcatacatcactcacaaacatctatgagtcaattcttgaacaggaggcaagtcctataccattcattgatgccacatactaccgagttggtttctatggtgagcgtttcggcaagctcaataaaaaggagtatgtatttagagaaccacgagatgtacgtcttggtgatattatggagaagcttagtcatatatatgaggttaaaatggatgggagtcacactttacatataattccagattctagacaagtcaatgctgatgagttgcagcctggcgtctgctatttacagatcactgctgtggatcctgtaatggaggatgaggacttgggtagcaggagggaaaggattttttctttatctactggtactgtacgtgcacgtgtttttgaccgttttcttttcgatacaccattcacaaaaaatggaaaaacacaaggtggtctagaagaccagtggaagaggcgtaccgtgctccagacagagggttcctttcctgctttggtgaaccgtctgccagtcaccaaatctgaatctctggagttctctcctgtcgagaatgcgattggaatgatcgaaacaagaacagctgcattgagaaatgaactagaagaaccacggagttctgaaggtgatcaactcccaaggcttcaaagcttgcaaaggatactccaaggaagtgtggctgtgcaggtcaacagtggggtattaagtgtgtgcactgcattcttatctggcgagccagcaactaggctcagatcccaagaactgcagcagctcattgctgcattgcttgaattcatggctgtctgcaagcgtgcaatccgtgtgcatttcagattgataggggaagaagaccaggaattccacacccaacttgtcaatgggttccagtcactcaccgctgagctatctcattatatccctgctatactctccgagctatgatagaactgtaacaagccagaaattaggtagcatgtgaatgattcattctttcagttgcaggttcccaccaaatgtccatatttccattagttttggttgtatagttgcaccgattcctgattttggagtgtaaagtttgtatgacctagtgttttctgttatgcaccggttatatgctgagtgccatgttttttgcggtttgctactgtatcacagcgagccgacattttacaacagttatatgtaatgttctgtagtgatac

SEQ ID NO: 32760 - DNA, 1149 bp, Zea mays
  Clone ID: UC-ZMFLMO17019G09_FLI
ctcctgcgcgccgccagtccggcttctcctggctcctgcgcgccgccagccgtcagcccgtcaccgattggagatccttggaaacctgcgcgccgccagcccgtcaccgcttggagacccgctcagccgcgcttccctgcgcgccgccagccgtcgccgatccgtggccgcgtccgccgccgccagctctgaggtcgcgccgtcagccagcccgtctgccgtcgtgaggtactgagcattgtttcaagtggttattaggcttcatggatatgtctcaagagcaagaacaggattttggcgtactgctgaagcaaggtgcagaagggagggtatttgcttcgacatttgtgggacgaaagtgtgtaatcaaagagcgtttttcaaaaaagtaccgacacccattgttggactcgaagttgactctaaagcgcttaaatgctgaagctcggtgcatgacaaaagcaagaaggcttggtgttcctaccccagtactttatgctgtggatccagttctgcatactttgacctttgagcatgtggatggcttgtctgtcaaggatatacttcttaggtttggttcagatggggtcaatgaggaacgcctgaatgatattgccacacaaataggaaatgccattggcaaactacatgatggaggccttgttcatggtgatttgaccacgtcaaacatgataattaagaacagtaacaatcaattggttcttattgattttgggctgagtttcacttcgacaattcccgaggacaaagcggtggacctatatgtgctagagagagctttgatttccatgcattcgtcctgtggggatgtgatggagaaaatcctggctgcgtacagaaaggcttcgaagcaatggtgctccacccagaacaagctggctcaagtgaggcaacggggcaggaagcgcaccatggtcggatgaatggagaagaagaaaaatatgtggcatggaatggatgtatgttattagaaagaccgtcgtctaaaacgagagtgatgtaccaccattgctgtatttttttagcggtgagtggctttggctgctgtaacgtttgtgaaatctggaaatatgttgcctggctgcaccatttggtcagaactcagaagcagagtgtcgtttcatccgg

SEQ ID NO: 32761 - DNA, 1412 bp, Zea mays
  Clone ID: UC-ZMFLMO17019G11_FLI
gcgccaaccccaccccgctccgcccgtgtaaaccaaaccccgcttcggcggcggcggcgactggcccacgagccttctcgaaccgacgcatccgccacccatgctgcgctgccacacgccaccgcaatgcgcccgcgcgccgctccgccaccacggaaggtgggagtcgcctccggcggcggcgcccgcggtggtagtgcggtgcgcgcggggtgcgccgcaggtgtccgggatcgaggcggcttcgccgggccacgcggctgtcacggcggcgttagctaaggcggaagggggtgacgcgcggcccagcctggccgagcggctgcggttggggaacctcctggaggacgggctatcgtacaaggagagtttcatcgtgcgctgctacgaggtggggatcaacaagacggccaccgttgagaccatcgccaatctcctccaggaggtaggatgtaaccatgcacaaagtgttgggttctccactgatggcttcgccacgaccactacaatgagaaaacttggactaatttgggtgacgaaccgaatgcacattgagatctacaagtacccagcttggggtgatgttgttgagatcgaaacatggtgccaagaagatggaagaattggtacccgtcgcgattggatcctcaaggacctagctaatggtgaagttattggcagagctaccagcaagtgggtcatgatgaaccaaaatacacggagacttcagcgggtcagtgatgacgtgagggatgaggtgtttatgcactgtccaaaggctccaagattagcattcccagaggaaaataatggcagtttgaagaagattccgaatctttcagaccctgcagaatattcaagacttggactagtgccaagaagagctgacctggacatgaaccaacatgtcaataatgttacttacataggttgggtcctcgaaagtatacctcaagatataattgatacacacgagttacaaacaatcactctcgactacagaagggagtgtcaacaggatgatatagttgattctcttacttgcatagaggaaggagaggagaaaagcatgaacggctctgcttctgcagcagcgcctcacaaagaagagcggcagcagttcctgcattgcttgagatttgcagccaacgggcacgagatcaaccgtggccgtaccgtgtggaggaagctagctagataaaagtgttgtttcgtcataaatgatctcctccatttctctgctcacggctggcggcccttgtaccacaattttgtgatgtattgttgccctttggaatgtactcagccatgtatcggtgccgatttgtgacatttcttggagctgtagctgtctgtccgttttgtaccagtggacaatgtttgtgacatgcaataaactgcgtttctccggc

SEQ ID NO: 32762 - DNA, 1473 bp, Zea mays
  Clone ID: UC-ZMFLMO17020B08_FLI
tgttgtcattgcccaaggctctgcagaaagtgtccagagttcatctgatctgttttctaataatgaaatgatgacaaccattccagtagatcaacaagtgattgcattttgattgaattctaccaaagactgagagaagagtccttgacagcaatatcccggcacgtgaaggatcttaggggagcacagaagggatctacaatctctgatgaaaacaacaaagcgactgcaatgggaggggatattcaggaaatatatgacaaactaaaagattcttcattgcccgaaggctttttcacagaggaacagccttggaaggatatatatatcacagaactccttaattgtatcaaagaggaacatctgaaggattttgaacaagagtattgtttagcagaaaagatagaaggggcaacggaggacacagatattgcagttgaactttataagctcagtatttccaccctagatctattgaaactagcatccaaagaggaacagggtgattatgtcggtgcatggtacagtatgcttctgtcctgtgctcaagaattgaagcatggcgtggcactttggcaagagttttatcatgcaaatgtctgcgacagagtagtttctgaaggcggtcactactttattgctcttggggagatatatagagttgcacagattttatacttatccttgcagcgtttcaagccctgggttcttgcagatcctggaatgttgagtaaaatgttgtcttgtttggacagctgcacttatgcttggactagtggtctggaaacggctcttaagatggtcattgacagcagtcacatagattcatcccttgctaaagctctgatggagtccattaagaatattacaaaacttgaggtgcccaatctacaaaaaaatattcccaacaatgagatgcaatgtagactaactctcttgccaagtagtcttctgccaggattgaacttggtcatttggaatggtggtcactattttgttaaagtcgcaaatctgtgggcaaatcggatatctcctgatcctcctcttctgccaagcaaccccacctcttcaatgaacaatgcagcaacacacagccagtcatgctgaataacatgtcaaacatctgaggctgtgacctacactctgatggaagcatcaaatgcatgttgtgtaaaacatattcgtcaagttatcttttttatatacgtaaactgagcaagcaccgtgctgattgagggctgttcttggaagatagagatccaaggtgactgttcctttgcaggtcattcttttgtacaagttgtaatttacaacattctttccatagtgccggatgatgtcactaagtatagcaagtcgaaagggaatgacaagtttggaagtggacgtctggtataatgttgtactaaaacccatccgaaatggtgccaatgtgtagattatcaaagctgagaattggaatacggatcgtgg

SEQ ID NO: 32763 - DNA, 875 bp, Zea mays
  Clone ID: UC-ZMFLMO17020C03_FLI
cccttaccgatccgatcgtcaagcaagctaagccaccctgacatggcatcttcacccccctcctccgcctcgctacggcagaggccagccgccgcggcggcgacgcccgatcagcagcacgagccaccacgtctcgaagacggcctcctcccgaaccaaggcggatccccggcgacatcggcgctgtcccaggcgctgtcctccacggcaaacctggccaacctgctcccgaccggcacgctgctggccttcaacctgctggcgccgacgttcacgaaccacggcgcgtgcgacgccaccacgtcgctcctcacgcggggcctcctggcgctcctcgccctcgccagcgcgctggcctgcttcaccgactccctcaagtccccgcacgacggccgcgtctactacggcgtcgccacccgcacgggcctctggctcatcgactacccgccgggcgcgccgccgctgcccgagggtgccaccgggcgctacaggctcgcgttcatcgacttcgtgcacgccgcgctgtccgccgccgtcttcggggtcgtcgccgccagggacagggacgtcgtcgtctgcctgtacgggcccacgccggacagggccacgcaggacctgctcgacgttctgccgctcggcgttggcgtgctctgcagcctcctcttcgtcgccttcccaaccaccaggcacggcatcggataccccgtcgtcgccaatgccgtcgccgcagccaccgccacttcctcctaacaatagtttaatttaatttaatttcttcgaggctttaatgccttaatgtaactgcgttcgtatgtactattcatattttttttcatcaatcaaaacgacaacaacacacgttcacggaggggggg

SEQ ID NO: 32764 - DNA, 2803 bp, Zea mays
  Clone ID: UC-ZMFLMO17020C07_FLI
caagcccacacacacacactcgtcccttgccttcccctccatctccaatctcccctcctccgttcgacgctctccccttgcttctcgcgcacactaaccaattcgagcacccgacgccgcggccccgatcgaatccaccggagccgcccgcctggggcccgcccgcgccattgctcgaatcgggaggcattcgtccgcccgcgctgctgccccgcgccgtggcggtggcgttggcggtatgtacgaccgctagaaggaaggaggaggcggcattagtggtggggattaggcggcggcactgctggtgccgggaggaggaggaggcgtaccccatgaaggcgacggcgccgccggcgaagcggcggaggggcccgcggctggcggtgctggcgctcgtgttctgttcgctgctcgtgccgatcgccttcctcttcaaccgcttccccgccgtatatgtgacagatgagcgccctcagcaggagattgacttgccttcgttcgatcgtgtggtatttgaaaatggtggctctgtaattgaagatgtgtccaagaagacttccaggagcactagtgtgtcgcaccgtggtattgatagtgacccttccatagttagcactaaaccaaaagctatagttctacggcctccaaaaattgaacaggtcctcccccctccaaaagttgaacccaatccagaagtgaagccagtacttgtaccagttccagttcatcaaaacaaaaaaattaacctcgacaagattaggcctcccagagttcaaagtgctgatgaggtggaaaaggctaaggcttgtcaacttgagtttgggagttactgtctctggtctatagagcacaaagaagttatgatagataccattgtgaaaaggctgaaagatcagctatttgtagcccgatcttactaccctagcattgcaaaacttaaaggaaaggagacattgactcgcgagttgaagcaaaatattcaagaacacgagagggtacttagtgaatccattgttgatgctgatctaccatcctttataaaaacgaagctagagaggatggagcaatcaatagcaagagccaaatcatgcactgtggattgtaacaatgttgacagaaagcttcgtcaaattcttcatatgacagaggatgaagctcattttcatatgaagcagagtgcatacctatacaaccttggtgttcacaccatgcctaaaagtcatcattgtcttaatatgaggttgacagtagagtactttaaatccatgccattggatccaaatgactcttctgcccataagtttaaccttccagacaataggcactatgttatattatctaaaaatgtccttgctgcttctgttgtcatcaactcaactgttagtagctctgaggatactgaaaatgtagtatttcatgtactgactgactctcaaaatttttatgccatgaagcactggtttgcaagaaactcctacagggaatcagctgtcaatgtcataaattatgaacaaattattttcgagaatttccctgagtttggaacccagcagttatatttgcctgaggaatttcgtgttctcatcagtagccttgagaggcctactgagaagagtagaatggaatatttgtcagtgttcagtcactcacatttctttcttgccgaaatattcaaagatttaaagaaggtaattgtgttggatgatgatgtggttgttcaacgtgatatttctttcttgtggaatcttgatatgggagataaggtcaatggtgctatcagtttttgtggtttgaaacttggtcaactgaggaaccttttgggtaggacaatgtatgatcaacagtcatgtgcatggatgtctggggttaatgtgattgatttggacaaatggagagaacataatgttacagagaattacctgcaactcctgagaaagtttgggaacaatgatgacgaggcctcactacgagcttcagctttgcctataagtttgttgtcgttccagcatcttctatatccacttgatgaaagattgattttatctggacttggatatgactatggaattaaagaagaacttgttcagaattctgcgtcattgcattataatggaaatatgaaaccttggcttgagttgggtataccagattataggaagtactggaagaggtttcttacacgagacgagagattcatggacgagtgcaatgtaagtccatagtgtgcttgagcttgggagccgaatcatttttgacagtagatttcagtctactgctgtactatatactaagaggaccaacacttgagaaaagacctgggaactgggaagcagtcactagccatcaattttgacagagtagatccagcaccatctgttcattgaacttgtgagctcgatggatgggtttttctgcagttagcggggtttagttaagttcgaaggataatgcagtagacaacgttggtcacgtgtggtggtgaggttccaagtaagagagagcatcacactcacgtaacaggaatgatcattgatggattgaggcgccttaattgaaattggtgccttccacctcatggatgcaggttaattcttttcttcgttgattttttgacccctcttgctttgtccttctgtcaataaggacatacacaggttaaaattcaaattctttgctcttagttgttgcacattgattgtcctatcactattatgttgatgcaaagtatattatgatgtcagagactcatctgttacaaaaacgagattaacaactattctatttggatgccttctgagcactc

SEQ ID NO: 32765 - DNA, 1808 bp, Zea mays
  Clone ID: UC-ZMFLMO17020D12_FLI
atacataccccggctagctgtctggactctggagtgtcctccgggctaagcaaacccatagcccgatcagatcgatggcgccggcgccccgcgcttccagcttcttctcggtgctcctcgtcctcctctttgcgctgtcggtggggcgcgcgtccgcaaccggcgtcttccaggtgcgccgcaagttcccgcgccacggaggacggggtgtggcggagcacctcgcggcgctgcggaggcatgacgtcggccgccacggccggctacttggcgccgtcgacttggccctcggcggcgtcgggctccccacagataccggcctgtactacacccggatcgagatcggctcgccgcccaagggctactacgtgcaggtggacaccggcagcgatatcctctgggtcaactgcatccgctgcgacggctgccccaccaggagcggcctcggggtactgctccatctgaccatctccatggccaagccagaccaggccatgcgcgatgctcccatgccatgcttgtccctctggtccttgtctgcttggtatgatgatttttgtcgtgaagaatcgtcctcccctgcgcgttggtttggttgcagatagagctgacgcagtacgatccggctggtagcgggaccacggtggggtgcgagcaggagttctgcgttgccaacagcgcgggcggcgtgccccccacgtgcccctcgacgtcgtcgccgtgccagttcaggatcacctacggagatgggagcacaaccaccggcttctacgtcacagacttcgtgcagtacaaccaggtgtccggcaacggccagaccaccacgtccaatgccagcatcacctttgggtgtggtgctcagcttggtggggatttgggatcctcgaaccaggcccttgatgggattcttgggttcggccagtcggattcgtcgatgctatcgcagttggctgctgctcgtagagtgaggaagatttttgctcactgcttggacactgtgcgtggtggtggcatcttcgctatcgggaatgtggtacagcccaaagtaaagacgacgccgttggtgcccaacgtgacacactacaatgtcaatctgcaaggaatttctgttggtggtgctgcacttcagcttccaacaagtacttttgattctggtgacagtaaaggcactatcattgacagtgggacaacactggcatatcttccgagggaagtttataggactttgttggctgcggtctttgataagtaccaagatctgcccttacataattatcaagacttcgtgtgttttcaattttctggaagtatagatgatggatttcccgtaatcacctttagttttgagggagaccttacactgaatgtttacccagatgattaccttttccagaacaggaatgatttatactgtatgggattcctggatggtggtgtacagactaaagatgggaaagatatgctcctcttaggagacctggtcctctcaaacaaactagtagtttatgacttggaaaaagaagttattggatggacagactacaactgctcctcgagcattaaaattgaggatgacaagactggctcagtgtacactgtcgacgcacaaaacatctccgctgggtggagatttcaatggcacaactccttaattctgttgatattaataaggacaatctggagctgtttggttatagcctaacgctggatctaggactaaagccccgtttgtttccttccaagattatataatccagctcgtggattatataagcacctattgacctgcttatagattatcataatct

SEQ ID NO: 32766 - DNA, 2550 bp, Zea mays
  Clone ID: UC-ZMFLMO17020E02_FLI
ccttgtccctctcttcctcgaaacgcagctatggggactcggccgcggggggtcgtcctcgcgccatgggcggtggtgctggtgctcgcgcttcgtctggctggcgcgtcgcatgtgatccaccgcagcctggaggccgaggcgccgccgtcggtcccggcctccattgtcagccccctgctcaggacggggtaccatttccagccgccaatgaactggatcaacgaccccaacgctccgctgtactacaaaggatggtatcacctgttctaccagtacaaccccaagggcgcggtatggggcaacatcgtgtgggcgcactcggtgtcgcgcgacctgatcaactgggtggcgctggagcccgccatctaccccagcatcccgtccgacaagtacggctgctggtcgggctcggcgacgatcctggaggacggcacgccggcgatcctgtacacggggatcgaccggccggacatcaactaccaggtgcaggtgctggcgctccccaaggacgcgtccgacccgctgctccgcgagtgggagaagccggaggagtacaacccggtggcgacgccggcggccggcatcaacgcgacgcagttccgcgacccgacgacggcgtggcggcacgcggggcactggcggatgctggtgggcagcgtgcgcggcgcgcgcgggatggcgctggtgtaccggagccgggacttcaggacgtggaccaaggccaagcacccgctgcactcggcggcgctgacggggatgtgggagtgccccgacttcttcccggtgtccgggccggggatgcaggccggcctcgacacctccgcgcccggaaggaagtacgtgctcaagagcagcctcgacctcacccgctacgactactacaccatcgggtcgtacgacggcggcaaggaccggtactaccccgacgaccccgccggcgactaccaccaccgccgccgctacgactacggcaactactacgcgtccaagacgttctacgaccccgtggagcgccgccgcgtgctgctcgggtgggccaacgagtccgacagcgtccccgacgacaaggccaagggctgggccggcatccatgcgatcccaaggaagatctggctggaccccaccgggaagcagctgctgcagtggcccatccacgaggtcgagaagctcagggggaaggccgtcagtgtggacgccaagctggtcaagcccggcgaccattttgaggtcacaggcatcgcaacttatcaggttagtttttatactctagctacgttttgaattccatggatcataaaactgttttttttacttaactagtggcaagctaaggccggcgcccggcggtaacatgtgtgcgtgcgcgcgcacacagctggtcacctgtcaagcttcgattcgcagcttgtcggtagtatacactacactagtactagcagggtatctgtctagccagcccagctgccaagatccaatggtccatgcatgcctgttgtcggcggccgtaaaataatccctgctaggctgctacgttacacacacagccacttgccagcgacaccacggcgcttcgttcgttttctcttctctttcacctctgccgtgcgcgtagtttacgtcgtgcacttgtttctgatttgaagtccggaaacaaacaatgaaacaatcttctgccacacacacacacacacacacacgcacacgtacctgtcgcgtaagaaatcgcggacatgacatgaggaggaggagaatcttccggtgcaatgaaacgcacacgtatgcaagcacgttgttttgatgttgtgatgatggcaggctgacgtggaggtgagcttcgagctggaggcggggacaagcctgctggacaaggcggaggcgttcgacccggcgtacgacgacgacgcgcagaagctgtgcggcgtcaagggcgcggacgccaggggcggcgtggggccattcggcctctgggtgctggcctccgccgacctgcaggagcggacggccgtcttcttcagggtcttcagggacggacacggcaagcccaaggtgctcatgtgcaccgaccccaccaagtcgtctcttagtccggatctgtacaagccgaccttcgcgggcttcgtcgacgccgacatctccagcggcaagattgcccttagaagcttgatcgatcggtccgtggtcgagagcttcggcgcgggaggcaagacgtgcatcctgtcacgggtgtacccgtccatcgccgtcgggaaggacgctcacctctacgttttcaacaacggcgaggtggacgtcacggtgtccggcctgaccgcctgggagatgaagaaaccgctgatgaacggcgcctgaaattgaagggaggaaaaaaaaagtcttatccggccgccacgtgactttctttattttcgttcttcttcttcttcgtcaacacacgtctctgccgccaaaggagaagaaattgattgatttcaacgtacgtatgtgtacgtctgctgccgatcgaaagagaattggattattataaaattgtttgaggccggtccttcc

SEQ ID NO: 32767 - DNA, 1702 bp, Zea mays
  Clone ID: UC-ZMFLMO17020E07_FLI
gcgcaggcgcctctccttgccaggcgtgacacagacgaactggtgccgcctctgctggggcttggtcctcccagccgagcgcgcctcatccggatcttgcgacgacggtgcccaagctcccggcctccctttcgcatccctgctgcgagccgtcggtctccggaaagagttagagccgtcggtctccgtaaagaattggagccgccaggcgccttgagaagggttttgtcccgggatgtcgtcgtcggggaagatggaggggccgtctgccccggtggtgcgtcgggatccctacgaggtgctcagcgttcccagagattcctccgaccaggagatcaagtccgcctaccggaagctcgcactcaagtaccaccctgacaagaatgctagcaacccagaagcatcggaactcttcaaagaagttgcatattcttatagcatcttgtcagatcctgagaaaagaaggcagtatgatactgctggttttgaggagttagaaaatgaaggaatggatatggaaattgatttgtccaatcttggaactgtgaacacaatgtttgcagcactttttagcaagcttggtgttcctatcaagaccacaatatctcctactgtgctggaagaggccatgaatggcacagttacagtgagaccactccctgttggaacatcagctacgggaaaggttgataagcaatgcgctcatttttttggcgtaacaataagtgaagagcaagctcattctggaatggttgtcagagtgacttcacctgctcaaagtaaatttaagcttctttacttcgagcaagaagttaatggaggttatggacttgctttgcaggaagatagtcaaaagactggcaaggtaacatcagcaggcatgtatttcttgcatttccaggtgtatcgtatggactcaacagcgaatgcgttggcaatggccaaagatcctgaagctgccttctttaaaaggttggaaggtctccaaccctgcgaagtttcagctctcaaatctggaacccatatatttgctgtatatggtgacaattttttcaagccagctagctatatgattgaagcgatgtgcgcaaagagttatgaagacacaacagagaggctgaaagagatagaatctaaaattctagctaagcgaaatgatctgcgtcaatttgaaactgagtacagaaaagctttggcacgatttcaagaagtcaccaacagatatacacaagagagagaagcggttgatgatatgctgagagagagggacaatatccattgctcgttcacaactgaacgaactttggcaaaccctgttggtgtcggtagtagcagtaggtataccatcgagcagagcattcctgagagccctgagaatggtagcgtagatggcagagacaaatctggcaaaaagaagtggtttaatctaaaccttaataggtccgacaagaaagcctgatgaatcttttgtcagggaacgtcatgtgttttcactttgttgtacattttggaatccctattgtattcatgccgtatgagttctttggttcccagttctctgggagttttgtagcatatagcagttttgggtacaacattctattctcatgtatgtattatcctaagtgactgcattgaccccatgcatcccaggcgaagttgaatcgcccgaccaagttattttatcgttataatttcttct

SEQ ID NO: 32768 - DNA, 1763 bp, Zea mays
  Clone ID: UC-ZMFLMO17020E10_FLI
cacctgctggcggaggcggcccccaaaagccaaattccccagcccacttttttcttcacactccaggttagggtttgctgtcggcgatgtcggatcggcagccgtcggaggaaccggaggagcaggtggacctggagggggacgacgacggcatggacgacgacgacgccgggtaccgtcgccgcggaagccgggacgactcggaggagcccgaggaggatgacgacaatgacgagcgccacggcgaggccgacgacgacgccgggatggagccggagccggccggaagtaaaggcggggatgacacgggcaaggggcccgacgtcgccggtggcgggcccgaggacgaggaggagaggagcaagtgggatgacatgctcgccctgccgccccatggctctgaggtcttcattggtggcctgccccgcgacatcacggaggaggacctccgtgagctgtgcgagccgttgggagaaatatatgaggtgaggttgaccaaggataaggacacaaaggagaacaaggggttcgcctttgtcaccttcatggacaaggaggctgcgcagcgcgccatcgaggatgtgcaagacagggagttcaaggggaggactttgcggtgctctctgtcgcaggcaaagcacaggctgtttgttgggaatgtgcccaaggggctgagcgaggaggagcttaccaacactatcaaggggaagggtccaggtgttatcaacattgagatgtttaaggatcagcatgacccaaaccgtaaccgtggcttcctctttgttgagtattacaaccatgcctgcgcagactatgccaggcagaaactttcatctccaaacttcaaggttgatgggagccagttgactgttagttgggctgaacctaagggttcaacagatgcttcatctgcagctgctcaggtgaagactatatatgtgaagaacctacctgaaaatgtttctaaagagaagataaaggacctgtttgacaaacatggagaggtcacaaaaatcgttctgcctcctgccaaggctggtcataagagagactttggctttgttcactttgcagaaagatcaagtgcattgaaggcagttaaaggaagtgaaaaatatgaaatcgatggtcaagtactggaagtgtccatggccaaaccattggcagataagaaacctgatcattcacacaggcctggaggaggccctaattatccccttcctccctatggtggtggtggctacatgggagatccatatggtgcttatggtggcggcggtcctgcatacaaccagccaatgatatatggcagaggaccagcaccggcaggaatgaggatggtgccgatggtgcttcctgatggccgccttggctatgttctgcaacaacctggtggaatgccgcctccgcccccaccgcggaggggtagtgaccgaagagacagtggcagaggtggcgaagggcacagccggcgatatcgcccttactagcttttcccttatgggctctactcccatcatgtggtatgaagcgtttaacttatgagacaacgagataggagcctgtgttcttgtcccagtataagatctgcgatggcacgatgcttgtaccatctgtttcttcggtgacttatttttatcatgcagtgcatgtgacttgaaactgtgatggacttgtattgctttctgccttatggcacctgtagtagtgaactgatgaaggaagttcatgcggactctgaagctttgttggcttagaatggt

SEQ ID NO: 32769 - DNA, 771 bp, Zea mays
  Clone ID: UC-ZMFLMO17020G07_FLI
agcacctgcagacgttccaccaccgcgacaagaagaagctgccgtcgttcctcgactggttcggctggtgcacctgggacgccttctacaccgacgtcaccgccgacggcgtcaagcacggccttcagagcctgtccaagggcggcgcgccgccgcggttcctcatcatcgacgacggctggcagcagatcgcctccgagaacaagcccgaccccaacgtcgccgtccaggagggcgcgcagtacgtgcattgcacgcatcgcatttctctgatcaatcatggctggctgccagcccgccgtagtttccagacgctcaccaaaactggttgatcgcttccagattcgccagccggctgaccgggatcaaggagaacaccaagttccagaccaagcccgacggcgacggcgacggagagcaggcggcgggcgggctgaagcgactggtggccgagaccaaggacgcgcacggcgtgaagcaggtgtacgtgtggcacgccatggccgggtactggggcggcgtgacgccgacggcggggacggcgatggagcgctacgagccggcgctggcgtaccccgtgcagtccccgggcgtgacgggcaaccagccggacatcgtcatggactcgctatccgtcctggggctgggcctggtgcacccgcgccgggtgcgagacttctacggcgagctccacgcgtacctcgcctcctgcggcgtcgacggcgtcaaggtggacgtgcagaacatcatcgagacgctgggcgccggcca

SEQ ID NO: 32770 - DNA, 1467 bp, Zea mays
  Clone ID: UC-ZMFLMO17020G10_FLI
ctcgtggcttggcagtgtcgatcgctgatcccaccggctgatagagttggcggccgggagagtgagtcagggatggcgtcggagccggtggcgcgggcggtggcggaggaggtgggccgctggggcagcatgaagcagacgggggtgaccctgcggtacatgatggagttcggctcccgccccacccagcgcaacctgctcctctccgcgcagttcctgcacaaggagctccccatccgcttcgcgcgccgcgcgctcgagctcgactcgctgcccttcggcctctccaacaagcccgccatcctcaaggtgcgggactggtacttggactcattccgggacatcagatacttccctgaagtgaggagccggaacgacgagctcgctttcacgcagatgatcaatatggtcaaggtgcggcataacaatgtggttccaaccatggccttgggagtgcagcagctgaagaaggagctgggccgctcaaggaaggttccattcgagttcgatgagatcgacgagttccttgaccggttctacatgtcaaggattggcatccgcatgctgatagggcagcatgtggctttgcatgaccctaaaccggagcctggtgttataggcctcatcaatacaagattatccccaatccaggtggctcaagctgcttgtgaagatgcccgttctgtctgtttaagggaatatggatcagctcctgatattaacatttatggcgatccaaattttacgtttccatacgtcacattacacctacacctgatgttatttgaattggtgaagaactctctccgcgcggtgcaagaacggtatatgaactctgataaagatgttcccccggttagaattatagttgctgatggagaagaggatgttactatcaaggttagcgatgaaggtggcgggataccaagaagcggcctcccgagaattttcacgtatctgtacagcaccgcaaagaatcctcctgagctagatagacctaatactgaaggggtaactatggctgggtatggtttcgggctcccgatcagccgactctacgctcggtattttggcggcgacctgcaaatcatctcgatggaaggatacggtaccgatgcttacctccacttgtcgcggctgggagattcagaggagcccttgccttgacgacatatttttgtggacctccagtaccactcttctcctgtaactatgtggctcgatcttcttcactgctacgtcctgcttacttccgccatgtactatgatctctctgccggccttcaacaggaaaaaagaaaggacgagggaaatcatggggagcagctaggcggatgagcgcattctcggtagctgctaatctcattttcatagctgcgtctcttgtgttgtacattacatagtctggatttgagcttttgctatggcaagtatcacatgttacctgggtaattgagaaatataagt

SEQ ID NO: 32771 - DNA, 896 bp, Zea mays
  Clone ID: UC-ZMFLMO17020H08_FLI
ggtgtccccctcgcgcaggcaagctgaccggcggcggcccgacgaccccggcgggcctgatcgcggcggcggtggcgcacgcgttcgcgctgttcgtggcggtgtcggtgggcgcgaacatctcgggcgggcacgtgaacccggccgtgaccttcggcgccttcgtgggcggcaacatcaccctgttccgggggctcctgtactgggtggcgcagctgctggggtccaccgtggcgtgcttcctgctccgcttctcgacgggcgggcaggccacgggcaccttcgggctgacgggcgtgtcggtgtgggaggcgctggtgctggagatcgtgatgaccttcgggctggtgtacacggtgtacgccacggcggtggacccgaagaagggcagcctgggcaccatcgcccccatcgccatcggcttcatcgtgggggccaacatcctggtgggcggcgccttcgacggcgcgtccatgaaccccgccgtgtccttcggccccgccctcgtcagctgggagtggggctaccagtgggtgtactgggtcggccccctcatcggcggcggcctcgccggcgtcatctacgagctgctcttcatctcccacacccacgagcagctcccctccaccgactactaaaagccgaagccgaccgacccaggggtgcgcagcgcagcgcagctagcatccagctctctctccccggcccgctcgccgccgtttagtttctctcgtgcacgtgcatgcatcgtagactgtctcaggccgccgctgcgccggcgccgctcgcatcgtttgcttttccttggaccagcagtcgtcgccgtcaggttgagctgcttgtaaccgttaattccggacccgtttgcttctgtaagatttgtgcatttgcctgtg

SEQ ID NO: 32772 - DNA, 675 bp, Zea mays
  Clone ID: UC-ZMFLMO17021A07_FLI
gattctaactattgctatgcattaggctatggtgctggtgcccttctccaaagtgggaagacaggacttatttcgtcggttggcaaccttgcggctccagtagaagaatggactgttggtggaacagcattgacatcactgatggatgttgagaggaggcacggcaagttcaagccagtgatcaagaaggctatggtggaactcgatgctgcacctttcaagaaatatgcatcgttgagggatgagtgggccatcaagaacagatacatcagccctggccccatccagttcagcggccctggaagcgatgactcgaaccacaccttgatgctggaactcggtgctgagttatagagacgcgtccttcacttatttttgttcttacagttttgggagtggagacttggacactgggtctcctggagcagcctgcagtgcagtctccatattgtgaattgtctaataagaggttcgatgggagttttttgggtaccgactggatgtggtagaaaataagaactggttctagtttttttgggtatgatttatgcagcaactgacttgtcttgtagccctgattctgttcccatgtttgcaatctcgtgagaacgaacaaattgtacactgtcgattgcttgcttccgttagcagattattgtacacggtcgtttgtcc

SEQ ID NO: 32773 - DNA, 1691 bp, Zea mays
  Clone ID: UC-ZMFLMO17021A08_FLI
gggggccataagacccttgcgcgctgcgcattggtgggcggtggccggtggcaatggcgcccacgacttgcctccggatccccttcctccccgcccgaggccgctccgctaacgtcaacgcccctccgtcctggctcccccgccgcctttctctcaaatccagcgcgaccaacggtgacaattccctccccaatcccatctccacctctcccacctcgccgccttggttaacggtggtggacgttaacgggttgcgtcgcccgcccgcgcctgtttccgcccctaccatccccggcgaccgcggtccccggtggctgcctcggccgttcactagcgcggacgtcatgggggcggattggaaggggctcaaggttgcttaccagggttgcgctggggcgtacagcgaagcggcagcaaagaaggcatacccaaattgtgaggctgtgccctgtgagcactttgacactgcatttcaggctgttcaaaactgggtagttgatagggcagtgctgccacttgagaattcattgggaggtagcatacatcggaactatgatctattggttcagcatagtttgcacattgtcggagaagttcgccttgaggttcaccattgcttgttagccaatcctggtgtgaagattgaaaatctgaaaagtgttatgagccatccccaggctcttgcgcaatgtgaacacacattaacaggactaggaattgaacatagagaggctgttgacgacactgctggtgcagcaaagattgttgcagaacatatggtccaggatactggtgctattgctagttcattggctgctaaactctatggattggatgttcttgctgagaatattcaggatggcaaaaataatgtcacccgttttatgatgctagctcgaaaacccaacattcttcgcaatgatagaccatttaagacaagcatagtcttttcactagaagaaggacatggacaactctttagggcgcttggtgtattcgcacagaggaaaatcaacctcacaaagatcgaaagtcgtccacacaaggagaggcctcttcgattatctgatgactgttcctcactcttaaagaattttgattacctcttttacgttgaccttgaagcatcaatggctgatccaaagattcagaatgctcttggaaatctgaaggagtttgcaacctttttaagagtcctcggaagctatcctacaaatgtgaatgaaccttagaaaacactgcagattacatgatggattagcaggaatggacgaaatggtttgagttggttctctgagcaggttgacaagtgaggacctctatgaagctgatgctaacatttacagagcaaaaggatctatattagagcagtatagaagggtggatgtgaggcttacattggttgtgagcttgaaagggaatttgttgtttggctggtgaggttcttttgacttctgatgcaacgaggatagctgaaatagcaatcttcttcaatgtcttattatgcgggagcttgaaaatacttcaatttataagtttataggttttcatgttggagcatctttgtcatggtagcatgtaggttgctaaaatagtcagtggaataatgagacaatgtctaagaacacttgtcttttttttaggacagtataataagaactgacgtttccctgtccatatggacgttccac

SEQ ID NO: 32774 - DNA, 1805 bp, Zea mays
  Clone ID: UC-ZMFLMO17021A10_FLI
gggttggaactgaactgggaatgacgaggccgaggacaaaagcaaattgacaccttctccgttcccgacgactcccgtgagcgtggagcggcgactaggcgaggccatggcctccggcatcggctccggccagcagcaacccccagcgccggcggcagatgctgacccgggagccgtcggcgacaagctcgtcttcgaagcgccgcctcagcccgtgagggaggactacgtccagaacgccgtcaagtttctctcccaccccaaggtcaggggctcccccgtcgtctacaggcgatccttcctcgagaagaagggccttagcaccgaggagatcgacgaggccttccgaagggttcctgatcctcaacccagcactacggctaccacttctccgcagcagcaggtcaacagccagaatcaatccgtcggggtgcaagcttatgcgccagcacaacctgtgcacccagcaaacgctggccctgtcgtccttccaacgcagcccaggtttagctggtaccaagcattcctggctgcagggctcttgcttggttttggtgctagcgctgctgtctttatcaagaaactgttccttcctaggctcaagtcttggatccgcaatgttgtagcagaaggtaatggcactgaaggcaaccagcttaagcctaggattgatgatgaaacggccgatgctgtaaaggcttctgcttcggctgtttctgctattgccaaaacaaaccaacaactgcttgcttcaaaggatgaagaaaagaagatactagtgacgttgacacaagctctagattcccaagccaaggagttaaaatccttgaccgattcaatcggtcataccagggaacccataaatattaccagggatgataggttttctcagtaccgcccactggaagaccatgcccctactgttataaggaatggggcaattaacagttcatggagagcctctcagcaaactaacatgtatggtgtgtcaaatggcgactttggttccgtgaggtcttcatttgcgccagcacctgttgaacctacagctggatcattttcaagatcctatggcgagcagccgatgtccactgcacaacgaagcgataggtcttctggcagtaagccatgggagatgcagcagtattcacaacagaggcctggttatggatccaactcccagttgagtgaggaaggatcatactctgatgcccaggacagctatgctccttcctatcaccagaatggaaaggcccctgattttcaagcggatgaacctaggcctttgacttacaacactggagttgaggaaagaccgccaccgcagcgccgctgggtgccccctcagcctccaggtgttgcgatgccagaagcagcagctgccatacgtcaaccaaaggcccttccaaagcagccctccagcgatgcctctgaggcagctggtgagatgcaggtgaatggttcaagtgcatcggatgctgtgactgaggttcctgttaatggtgctactgcaagtgatgctggacgcagtgagatccaagaacaatcagtggcggcctaagtgaaaccaagaccagctaagaactgggaagcaatctaagagagattcaggatctctagtacatctgggcggtttgtcatacatctctgaataacgtctgtatcagaacagcggggcaaccacaccgatgggtacccgtaataatgcaataagtagcagatagtttctgcatttagattaatgctacttgtacacaggagaacatatcaataatatttctatggctgttcgattgagggtgctt

SEQ ID NO: 32775 - DNA, 1023 bp, Zea mays
  Clone ID: UC-ZMFLMO17021A11_FLI
ccgcctcctgcttcctctccctcagccgccacccactctctcctcttccctctctctgcaccgacttctacggcggcggcggcgccatgggcccggcgggctcgaccgccgtcctgtcctactgggacaccgtgacgcagctccacatggcgggcgccgcgccgcctctgcccaggaacttctccatcggggtcgtggtcacgacgctgtctaggctccctgacctcaaggtgctcacgttgtccgggctcgggctctggggcccgctgccgggcaagctcggccgcctcgcgtcgctggagatcgtcaacatgagcggcaactatctcttcggcgaggtcccgtggggcgtgtcgcgcctcgccggtctccagacactggtcctcaacgacaacatgctgggcggcgaggtgccggcctggatcggcgccctgtcgttgctggccgtcctgagcctgcggaacaacacgttccagggcgccgtgccggagtccctgggaagcgcccccctcgctgcggtcgctcgtgctcgcgtccaacaacctgtccgggaacctgccggacatgagccagcaggccaacctccaggtgctcgacgtcggcggcaactcgctcgggctggcattccccaagctcgggaggaatgtggtcaccatggtcctggccaggaaccggttcgtcgccttcctccagaacccgcagctcgtgcaggagttcaggcctgacaaacagtacaacatccacatgctctaggagcgataccagatcggtcctgaccagattgaagctctgtatcagtatgccaaatttcagtttgagtgtggtaactactcaggagcagctagagtgatgtagttgtgggcttttgaacaatagctggagtaatatgaaacattagtgatgtagttgtgggcttttgaactgcttcaagctagagtgatgtcgttgtggtgcttttgtcactgatcatctctagagcttttgtgaatgatctagctagctatctaaaagggaattaggctt

SEQ ID NO: 32776 - DNA, 2033 bp, Zea mays
  Clone ID: UC-ZMFLMO17021A12_FLI
aaaaacagaaagcaaacattgcttctttaaataattgcgtaagtatggacaatttaactgtcaatcctattgatcctgtagttctcaatgagggagagcagacaggtacagcaatcactgagcaggttcctgttcctttgaatctagtgcttgagaataacaatgacaaggaccaaggtgagcaaagcagtgaaacttcagaacaacttatgtccaaagaaccacaaaaaagggacatcaaaaggcaaaagagaacatggtctcatacatgcaagtttgatgatgatgaccttctgatgacagctgtaatatataagctgacagcacgttacaggaactcttttcatcggaagctcagaaataaattcggtttcaggcgtcttccaacataccgctgggagaatgaagataaaggtgacaggaagaagattcctggagaagcaaggacggtgttgaacaagttacttgaaatgggcattgttgctactgtggatattcttcaatgtcatggtccaggaggcaaaaatgtgttgaaggatgggaacataactgcgagtggcattcaatgccagtgctgtggtaccacattcacaatgtccaagtttaagtgtcatgcaggtctcaggcaagaagtcccatctctgaatcttttcttgggtacaggcaaatcttacagtctttgtcagcttcaagcatggtctatagagcagaaggtgaggaaagagcatgcaaaggatacaatgtcccttcaagcagaccaaaacgatgatacctgtggatcatgtggcgatggtggtgaactgatatgctgtgacaattgtcctgctagttaccatcaagcctgcttgtcttgccaggatattccagatggcaactggtactgctctagctgcctttgcgacatttgtggtgaagtaatcgattcaaaggagcttgtaacttcccttcctgctttagaatgctcacagtgcgaacgccaataccatgtaaaatgcgtatctgccaaagttccatgcaatgaggatggacctggtacctggttttgtggaagaaaatgccaggagatctatatgaccttccgttctcgtgttggagtgcctgatcacatggacgatgatctgtgtttcaccgttcttcgtaacaacggtgataagaaggttcgcacggcagaggagattgctctcatggctgaatgcaacataaaactcatgatcgccgcgagtatcatggaagaatgtttcctgcctattctagatcccaggacagggatagacattattccctccatattgtataactggaggtctgatttacatttcaattacaaggggttctatacaatagtcttggaaagtgatgatagcatggtatctgttgcctccataaggttgcatggtgcaattgtagcagagatgcctctggtagcaacttctaaagagaatcgtcagcaggggatgtgcaggcgcctcatggattacattgaggagatgctgaaatccctgaaggtggagatgctgctcctatcagcaatcccgcacctggcggagacatggacatcgacatttgggttcagagagatagatgagtcggacaagaagaggctgagtaaggtgaggctggccgcagttccggggaccgtcctactgaagaaggacctgctgtgtgaatgttcaggcgcggacgccggtgagccgccgagccctaagcccttccaagtttactcgcgcgtgccgagaggccgcaccggtttggatgcagtgtgccaataaagatgacgcagcggatcgaatgcgccgcggtcagtcgtcgccgtggtcgtcgtcggtgacaggggcagctggtggtcgtcacggggcctcgtctccggttgctgaagccgaggccgagcatcagcacgcgccggtttgtgtggtggaaatggaaagcctcgttgctctggtaggagctctgaagatcgctgtcgtctgcttgtagtctgtaaatagcttctccgtcggcgagaagcccagggtccacggatgccgctggccagt

SEQ ID NO: 32777 - DNA, 2065 bp, Zea mays
  Clone ID: UC-ZMFLMO17021B11_FLI
cttccgagttccaactcccaaccgcagcctcagcctcagcctcagcctcacacggccgaagcagaacccgtgaacacctcaaacctcacggctcacgccaccgtcctccagccccgttctccggcgatcctgtcattccagacgcgtctccgcccctctcggtccaccaccccgacgccgccacatgtcgacgcagtccatttcgccggcctctgcgtccgcgcagttcacctacccggcggcagcggccccgtcttacttccccgtgcccttccacctccagaacgcgcaatacaccgcatggaccgcagccgcgccggcggtgcctgtgtacaacgccatctatcccatgccccaagtccagcaggcccaacagttgttccaaaaggactcgaagataattactcctgaagctctagctactgttaaggctgctattgcaaatagtgagaaagacaagaaggttgatgcaacaaaaaaggcagtgcctcgaaaggcagctgggcaaagttgggaggaccctaccttggctgattggcctgaaagtaagatatctaattctctattatcttttttcacaatgttttgcaaatgctccaattctgtgggtatggagtccttaacatggcaacgttgtggtattttagctcttattgctcgttgccttgcagacaacaaccatgagaaaatgtcagtcttacaggcaaggtctaatgctctatctattatgctttgatctgaaacaaattgctcttttttccctttctctaaaggtgctcaaggatgtgatgagcccaacagattgccacacgtgatttaggtgggcttgcagatgattactgaacgttttcaaagtacctaattcctgtttacctgatttgtcacatgtagttgaatattgtttcatgtacctttattaatcttgggcatgcttatgctgttgtatgaaatgctatattcttcttgtgatgtttgatgcaaacgtatgtgtagggtttgaatttctttgtgcattacaggcacacaccccaactgctatgttccctccattacttagttcgccataagaatggcggcatacttgttctgtcaattgttggtttgttggctgtaggaacgttgtcttggctgctttcttcattgctcctcccctcttcaatggttgatttaagtttgaatgatgtccatccacctaccaatatttatgtaatgtccacaatttctaagatgtgccatatatgtctttttcataaaaaatcactattgttaattttgcaccgttttggtcaatgaatctctttaagtatttaatagttattctataattgttttgctagcacttacctgctcggtggccacaacttcaagttttgagttgcactactaattcatttgtgcattgataatgtgattctaccttgtagtcttcctgatgacaattcagttagtttctttaaggatacttcaagtaccctcattcacaattgcttgatctctcgcctacagatgatttccgtttgttctgcggtgatcttggaaatgaagtgaatgatgatgttcttgcaaaggcattctcaaaatatccatccttcaatatggccagggttatacgggacaagtggactggtaaaactaaaggatatggttttgttagttttgctgatgcgtctgatcttacttctgccttgaaagatatgaatggtaaatatgtaggaaatcggccaatcaaattacggaagagcacatggaagaacaggatagacttagaagctttggagaagggaaagacccaaccacagaagaaaatcaaactgcagaaaagaagtgttcttcacaaatgaatctgaaaaattctgctcgttcatcgtctgtcagtatcgtttgggaaagctgtctgaagcattaacagttttacttaacgtcagatgtgtaggactgatggtcaccaagttcccggtgacactgtatacaatcgcagacgcgatgctatgttggtgattgaacaggtgtagccgaatagttggatccaataacttcacctgtagtgtaatggtccaattttatc

SEQ ID NO: 32778 - DNA, 2801 bp, Zea mays
  Clone ID: UC-ZMFLMO17021C08_FLI
gcacgacacgctgctccccaccactaaccgcactcgattgagcgccatgctgcagctccagccccctgggttcctgcccatcccgcgccggcgcgtcaccgcccgcgggcgtcgcgcccgccctgtcatcgccttcaactcccagtggaagatccccgacgtcgacacagatgcggtgcgggagcgagtgcggtcttggatgtctctggcgcggggcgcgatcgccgacgcggggcgcgcggcgcgggagggagggaggcacaaagaggagcccgagggtgggaagaagaagcagcggaaggaggtgaccgtggaggagcaggcgttcgttgcggtgccagaggtcaccgtggagccgcgggtgccccagggttggctctcgctggacgccgtcgtctccatcgagcagttcgccaggttgaatgggttgacggggagacaggtgcagaggatatttgaatcacttgctccagagcatctgcacaatgacgctcgaagcctggttgagtatagctgcttccgctacttggcaaaagataattctgacttccatccaaacttgaaggagcttgcctttcaaaagcttatctttgtgactatgcttgcttgggaagatccatataacgaagacagcagtccactttcttcgctagacaactattctgtattgggaaggcttgttggagaagatgcctttgcccgaattgctcctgctgttgcaggtgttgctgatgtttcaacagctcattatctctttagggctcttgttggtgcagaaaagggactttcatttgatctgtggacaacatatctagcggaacttttgaaggttcatcatggcaggcaaacacatcaaacgggagataattttttgtatgatgagaaagtcttatgcattggctctagtaaaaaaagacctgttctaaaatgggaggaaaataccgcatggccaggaaaccttaccttgacggacaaggcgctgtattttgaggtaccaagaaaccaatgaggcttgaccttacaaatcagaattcaagggctgaaaagacgaaagttggaccatttggatccaaactatttgactctgctgtctcagtttcttctggttcaatattgttgttatgatatcatgtttttagtatgatctcaactctgaaggtaactggtttactactagcaggtcagatgaatggacattggagtttgttgatttcagtggggagatgagacgagatgtgtggctcgccttcatcagtgaaattatttcagtttatagattcattcgtgaatatggtccaggtggtgatgatccagcaatacataatgtgtatggtgcgtacaaagggaagaaaagagctgttagtagtgcagcgaacagtattgcaaggctccagtctctgcagttcatacggagattatatgaagatccagctaagctagtgcagttctcttacctgtccaacgcaccatttggtgatgttgttcttcagaccctagcagtgaacttttggggtgggcctctgactacaaaagccagatctgcaaatcatagatcaactcagtggcatagatcttcagaggacccatctagcggtcgcacacatgtttacgacatagatggcagcgtgtacttgcgcaagtggatgacgtcccccagctggacatctagccactcagccaatttttggagaaattcttctgtcaagtatggtataatattgagtaaatctttagttgtagctgataaaaaccttgtagaaaaggcaatggttgactgtaaagagaagagcaaagtagttgaaaggacacaagcgacaatagttgctgctacaatcgaaggtattccaagtaacattgacctcttcaaggagcttatgcttccttttgcaatagtggctgaaaatttcaagaaactgcaacgctgggaaaatccacgttcaacattttgttttctactattggttcatactgttattttcaggaacatgctttcttatgtatttcctttcaccttgatgacgatggccctttccatgcttgctgtcaaaggactgaaagaacaaggccggttaggtagatcttttggtaaagtgacgattagggatcaatcaccttcaaacacaattcagaagatcctagcccttaaagaggcaatggcctcagtggaaaattatctccagaatctgaatgtctccctgctgaagatccgcacgatccttctagctggccaacctgaggtgacaacacaggtcgcgtttgttctcctagcatcctcagccgtccttcttgtgtttcctttcaaatatgttcttgcattctttacatgtgatcttttcacaagggagctagaattccggagggaaacggtgagagccttcatgaacttcgtgaaggaacggtgggaatcaatacatgctgcccctgtggtcgtgttgccatatgaaggcgctgaaagcagccccaagacactcccggcagaagtttcggggcaagcagaaccccagaatgtccaacgtgggagcggttatgtctcctcaaagaatggcatcagcagttgatccgtgcagctttgagggcatcttgctgtaaacttgtgtacagttaaacttgtatagattactcgagagggcagattaggtatagatcgtaccaattggtggattttgcagagtaatgttccatttacgtcgtagtgaagataactagcgtagacgagaacttaggagagaattttgggtccaattcgctgtcttggatcgttggtctggcagttagggatgtcaagtaagaattttgggccc

SEQ ID NO: 32779 - DNA, 1746 bp, Zea mays
  Clone ID: UC-ZMFLMO17021C09_FLI
gtatggcgagcctcaacgtgctgctcctccctgagccgggctccggccacctcatgtcgctcatcgaagccgggaagcgcctgctgggccacggcgcgggcggcggggacggcctgggccgggagttcacggtgaccgtcctcgtcgtgcagccgccgacgccggagtcggccgccgaggtgggcgcgcacgtccggcgcgtcgcggagtccggcattgctggcgtccggttccaccacctcccggccgtggagcccccggcggactgcgccggcaacctgcaggagttcaagtcgcggtacctggagctccacaggccgcacgtggaggccgcggcgcgggagctcggcgccgcggcgctcgtggtcgacttcttcgccaccgccgtgctggacgtggcgcgcggcctcgccgtgccggcgtacgtctacttcacctccacggccgcgctgctcgcgctcacgctgaggctgccggcccttgccgagactctcgccgccgacttcgagacgttcgagggcacggtggacgtgccgggcctgccgcccgtgcccgcggcaagcgtcccggggttcctgggacgcaaggacagccccaacttcacgtggttcgtgtaccacggccggcgtttcatggacgccgacggcatcgtcgtcaacacggtggccgagctcgagccggggctgctcgccgccatcgccggaggccggtgcgtgcctggacggccggcgccgccgctgtacccgatcggtccggtgctcaacctcggtgcggggggaggtgcgtccggtgacgaggcgtgcgtccggtggctcgacgcgcagccgcgtgcgtcggtggtgttcctctgcttcgggagcctgggctggttcgacgcggcgagggcgcgcgaggccgcggcggggctggagcggagcgggcaccggttcctgtgggcgctgcgcgggcctcccgctgccggatcgcggcacccgtcggacgccgacctggacgagctcctccctgcggggttcctggagcggaccagggacaggggcctcgtgtggccgcggtgggcgccgcagaaggcggtgctcgcccacccggccgtgggcggcttcgtgacccactgcgggtggaactcgacgatggagagcctgtggcacggcgtgccgctggcgccgtggccgctgtacgcggagcagcacctgaacgcgttcgaactcgtggccgtcgtgggcgtggccgtggccatggaggtggacaggaggcgtgacaacttcgtcgaggccgcggagctggagcgggcggtgagggccctcatgggcggcggcgaggaggggcgcaaggcgcgggagaaggcccacgagatgaaggccgcgtgccgcaaggccgttgaggagcgcgggtcgtcgtacgcggcgctggagaggctgcgtcatgcgattcgcaagggtgcaaatacagctactgctcattttaaggcgccgcagccgctcatttgacaattgttgaatgagtccaagattccagacgttcgcgacggtgtccggctgtccgcttcgtcatggaaggagtggatgtccgtgtttgagcttcccggagtcgacagtcagtacacacagagacaacgagagagagcagtttgcagctagtgcttatatcggtatcgccgtgggacttcaggttttatgtcttttgtaatggtcgatctccatcactccatgtctactcgctcggaggtatcatatgtttatgataccgtac

SEQ ID NO: 32780 - DNA, 623 bp, Zea mays
  Clone ID: UC-ZMFLMO17021C11_FLI
gaggaactgggtcagatgttcggcattaagggtcagttggatgaccctgatagatcaggctggcagcttgtatttgtcgacagggagaacgatgtgcttctccttggagacgacccatgggagtcatttgtgaatagtgtatggtacatcaaaatactttcacctgaggatgtgcataagatgggaaagccaggaaacgatccacgctacctatcttaaattgatacccagagctctttcgggctcccgtgacgattctgtggcacactgtagcactgtccatggcggtccggtgtgctgtgctcgcatgttcgcccgtgtcatctatagcatgtacaccgtgcgcgtcttcagaactcccccgttacttgtatccggtgcaggccaccgctctggactgatatcttgtaggttccacttaggaatcagtatcagcgactctatcctagttggtttgtagctcgcacggcactcgttcttgtgtcgcatcgaaatcttcaggctaaatgcttagttgaaactgttcccgtgattcttaagctatctatgtatttgaggattccccggcatgcttttgacgatgaactgcaataatttgaatgcaggaggattgtttgaatgct

SEQ ID NO: 32781 - DNA, 2124 bp, Zea mays
  Clone ID: UC-ZMFLMO17021D09_FLI
gtactggccgccaccactcgccactcggccccaggaccctcctcttcctcgccagcaagccggcacgatccctcccttccgggaaaaaggctcccaacctgttccgagccagccggccatggcgattagggctggccgctcgccccttctccacctcctcgccctcgccttcctcatcctcgccttcctcatcctcgccgcctctccctgcctccaagctcgagtggaccatcacaaacagatatctcactggactgggcaacccaactttgacctgcagaatgtctcatcgggtcgaaaggatggccctcatctcctgggtagatcaaaggaaataacacacatgaaattaaggagagttgctgtaaggaagaaaatggaagtagtgcagcaggatgatgaagcgttagttaaacttgagaatgcaggtatcgaacgttcaaaagctgttgactctgctgtgctgggaaaatacagcatctggagacgtgaaaatgaaaatgaaaaggcagattcaagggtccgtttgatgcgagatcaaatgatcatggccagaatatattctgttcttgccaaatcgagggacaagcttgatctctatcaggagctgcttgcaaggctcaaggaaagccagcgatcccttggggaagctactgctgatgctgaacttcccaagagtgcttcggatagaaccaaagcaatgggccaagttttatcaaaagcaagggatctattgtacgattgcaaggaaattacccagcgtttgagagcaatgcttcagtcagcagatgagcaggtccggagcttgaagaagcagagcaccttccttagccagctagcagctaagacaatcccaaatggcatccattgtctttccatgcgcttaacgattgattattatcttctctctccagagaaaagaaagttccccaatagtgagaacctggaaaatcctgatctttaccattatgctcttttctcggacaatgttttggcagcatcagttgtggtcaactcaaccatcatgaatgctaaggagcctgaaaaacatgtatttcatcttgttactgacaaactgaactttggggccatgaacatgtggtttttgctgaatccacctggggatgcaacaatccatgtggaaaatgttgatgacttcaaatggttaaactcttcttactgccctgttctgaagcagcttgagtctgcagccatgaaagaatattatttcaaggctgatcgtccgaaaacactctctgctggttcttctaatctgaagtatcgaaacccaaaatatttgtccatgctcaatcatctaagattttacctcccacaagtctatcccaagctgaataaaattcttttcctggatgatgatatagttgtccagagggacctaactggactctgggaggttgatcttaatggaaatgtaaatggagccgtggaaacatgtggagagagttttcaccgatttgataagtacctaaatttctcaaacccaaatattgctcagaattttgatcctaatgcatgtggttgggcttatggaatgaacatgtttgatctggaagaatggaagaagaaagacattactggaatttaccacaaatggcagaacatgaacgagaacaggctgctctggaaactggggacattgccaccagggcttctaactttttacaagctgacacaccctctggacaaatcatggcatgtgcttggcttagggtacaatccaaccattgagcgctcagagatagacaatgctgctgtcatccactacaatggtaacatgaagccctggctggaaattgcaatgataaagtatcggccttactggacaaagtacatcaattatcagcattcttacattcatggatgcaagatcagccaatagaaaccaccctcagatattcttctgtgatgaacattgaagttggatgggactcaaaatgaaatcagtataactatcacatgttctttattcgtgttatattagatttgttagttatcatgtgtatgtagtttcgtcgcccttttgtggtgctttctcccctagctcattgttggttcttgtctctttttgtcatgaaaagaacgatgagctctatgattctcatc

SEQ ID NO: 32782 - DNA, 1686 bp, Zea mays
  Clone ID: UC-ZMFLMO17021G08_FLI
ccaaattgcaaaaagagttggcagtgagtctgttgtattgtggcgttgaagtgaagttccctcaagaattttctcaggaaaggaatctggtaacccctgggaacaacttagaggaagcaattttgttattactcatgctaacaagaaagctatttctccgagaaatacaatgggatcctgaccttgtgaatcatttggtgtatgcactctcattatctgggcactatgaagttttggccagccatcttgaaatgctgttgcctggaacctataccagatcagagagatggtatatccttgcactttgctacagtgcagctggcatggatgacagtgcgttaaacatcataaggaatggtttttctgtactggagagaaaaggaaagcctcatgttccatctcttcttttaggagcaaaactatgttgtaagaacccaaagcatgcttccgaagggataaagtttgcaaataaagccatgaagtctttcagaagtcgtgatctgcatttcatcagcactacaaaacactttcttggtgtttgttatggacctttttctaggtcctccacctcatacttggacaaatcgagactgcaagataatgcactgaggctgttgcaggatgctgccacaacagcgaagtataatcctgaaataatgtatagcctagcttgggaaaatgcgatgcagcgcaaactcaatgcagctgttgaaagtgcaacagaatgtcttgagatggtgatgggtggttctgttagtgcctggaagttactaattcttgtattatctgcacagcagaatttgcaagaagctgaagcagtagcagattttgcaatggatgaggctgagaaaaatgatcagttggatattttgagactgaaagcacaaattcaagcttcccgtggacagttcaagtctgcagttgaaacttttcgggttttgcttgctgctatccaagtaaagaaggaagtctggaaattgaccacttgtaatgaggttaaatgcctacaaaagttggagatggacgcatggttagatttggcatcaatctattcaaagcttgaggcatggcatgactcaaacatctgccttgacaaagctatatccattgatttctattatcccaagtgttggcatgtcagaggtcttctattggaggatcaattcttgcacaaggaagccctgatggcattatctttcgcgctatcaattgacccagattacgtcccgggcatggtttgtatggcaggaattctccgaaatattggaggggattcattatcaattgcaagaacttacttgcgcaatgccctccgtttagagcctacaaaccaccgtgcctggttgagtcttgggcttgtcctgaaagctgaaggatcgctgcaggaggccgcggattgcttccaggcagcatatgagcttagagaattatcaccaattcaggatttctctgagcaactcccgatcatgctgcattaggaatctatagcaaaggagttcacattttttgtggattttccccatagttgtcttagttattaacttatcccttgcaaaggtaggaaacatatgtttttgtgaatgtaaattagtccacttttgttcgtgaacaaatttactcgctcttgaaaacatcaaagttatataacttactagtacaattgatacgaatcaattgtcattaacg

SEQ ID NO: 32783 - DNA, 2053 bp, Zea mays
  Clone ID: UC-ZMFLMO17021H09_FLI
cttcctctcgtgctgcagtaggatgctgggaattgaataccagtcaaagcgtgggcacattggattggattactttggccgcactgtagggatcaagatcatgccagtgggagttcatatgggtcagttggagtcgggtctgcgcttgcctgatagggagtggaggctttctgagcttcaacagcagtttcagggcaaaactgtcttgcttggggtggatgatatggatatctttaaggggatcaatttgaagcttcttgcatttgagaacatgttgaggacacatcccaagtggcaggggagagcagttttagtgcagattgctaacccagcccgtggaaggggtaaggatctggaagccatccaggctgagattgaggagagctgccagaggatcaatggagactttggccagtcagggtatagccctgttgttttcatcgatcgtgatgtgtcaagtgtcgagaagattgcctattatacgatagcggaatgcgtggttgtgactgctgtgagggatgggatgaacttgacaccatatgagtacattgtctgtaggcagggtgcaccaggatctgagtcagtatcagaggtgggtgggccaaagaagagcatgctggttgtgtcagagtttattggctgctcgccgtcactgagtggtgctattagggtcaatccatggaatatagaggcaacagcagaggcgatgaatgaggccatttcaatgccagaacaggaaaaacagttgaggcatgagaaacattaccgttatgtcagcagccatgatgttgcttattggtcaaagagcttcatcctagacttggaaagggcttgtagggaccactttaagaggacatgttggggcatagggttgggttttggtttcagggtggtggccttggacgctcatttcagaaagcttaacatggattcaattgttaatgcttatgagatttcagggagcagggctatattgcttgattatgatggaacactggttcctcaaacttcaatcaacaaggaacctaattcagaggttttgaacatcatcaataccctttgctcagatagtagaaacatcgtttttcttgtcagtggtagagacaaagatatgttaggaaagtggttctcctcatgtccaaaattggggattgcagctgaacatggttacttcttgaggtggtctagcgaagaagagtggcaaacatgcactcaggccatggactttggatggatgcaaatggcaaagccagtgatgaatttgtatacagaagcaactgatggatcctacattgagacaaaagaaagtgccttggtgtggcaccatcaggatgctgacccaggctttggatcctcacaggcaaaggagctgcttgatcacctggaaagtgtactagcaaatgaaccagtctctgtcaagagtggccagttcatcgttgaagtcaaaccacagggagtaagcaagggaatagttgccgagaggatacttgcatcagtgaaggagaggggaaagcaggctgatttcgtattgtgcatcggcgatgataggtccgatgaggacatgtttgaaaatattgccgatatcattaagaggaatatggttgctccaagaacatcactgtttgcatgcactgtgggacaaaaaccaagcaaagccaaattctacctggacgatacatttgaagtggtcgctatgctgagcgcacttgcagatgccactggagctgaactggaatctgattcggctgatgaattggccgcatctatctcatcacttgatattggtgacgaacaatcagaatccagtgatacaccaattggagggtcttagtcagttttctcttgaatttcagaatataatgattatttcaatagtcaattctacagaggggaagcttctcaatctgctgcactccaagtttctccagttgggcaagatagtagtctgttgctgcaaggcgtagatccatatgttcatagctgactcgccgacttggcatattctttgactttctcatttctggttgaagtaaaatgaaagcctcacagaagg

SEQ ID NO: 32784 - DNA, 2401 bp, Zea mays
  Clone ID: UC-ZMFLMO17021H10_FLI
gcgccattgggagcctgtttggagaggggggttgccgtccaaatcgaaccaggctctgaacatccgtaaagcaacccccctctccattccaaacaggccctcctgcctccgttcctgggctagctgtcaggacggctcagctccagctttgcggccctccagctctccccagttcaagttcaatattggcgagcatgcgagtttgccctcttccgtcgtcgtcatcatcatcgtcctcgcgatcccggcgtccctgtttcggcctacgcctcccgtagacaacagttgcgccctgctctccggcaagctatggccaagctgagctgcttccccgctctgctccccggcaagaggaagaagaagacacgcaagatcaccgatgctatcaaggccagcggcaacgagtgccccaaggtgaagccggtcgaagtcgaactcatcgacccgacgcttggtgcaggcgtcgtccaggacgtcgtccccgccgagctctcggtccccgtggaggaccgcaacaataaggaagcggctgatcaactggtgttggtgaaggagagcgatctgtcagatttcgacttcagcttccacgcggccatgaagcccgtccggtccgacagtgacgtggcactggacacctcggccgacgctgcggtggcggacacatcgccgaagctgaagcggtcttgctccaacatcgagactaagcgaccaggctcgcgttccgcgcccgagatgccggcccggtcgcgctcctacggcgatctgggcaacctggtcgccggcctcgccctggacgcgacggcgaccccgcacggcgcgccggaggccagtccggcgtccgtgaagacgtcgcgcaccgccgaccgcgtgatgctgaagaagcggtcgtccagccaggtgctgccctcgcgcagccggaagctctggtggcggctcttcctctggagccaccgcaacctgcacatgccgcggtcggcgcgcacggcccaccgatcgttctcgcctggccgccacgacgggtacacctcggacacgttcgaggagggcccggccgccgaccgcaagaacaagacggtcatggtcgacgagtcgccgccagcagcgtctgtgcccaaccagtgggtcgccttctgcgccgagagctccatccacgaccgcgtcagcgcgtgggtcagcagcatcgaaagcgagcctccgttcgatatcgccgaggaggatgacgacaactacgacggagaggacgatgaggagaatggcgagtgtgcggcgtcgcagccgcgccatctcgagctcggggagccatcgtccgggaagggcggaaacagcaaatccaagcgctgcgcaacgacggccgacgaggtcgtccaggccaacaccgtggtgcagtccctgaacgccttctcgtcggtggcgcacatctcagggatgggcctcaaggtggtgccgatgatcgcgcccttctcaaccctccgggccgtcaacctctccagcaacctcatcgttcatatctcccctggatcgctgcccaagggcctccactctcttgatctgtccaggaacaagattgccagcgtcgagggcctccgggagctcacaaagctacgcgtgctcaacctcagctacaacaggatttcgcggattgggcatggtctgtcgaactgcacggccatccgggagctgtacctggcgggcaacaagatcagcgacgtggagggtctgcaccggctgctgaagctggcggtgctggacctgagcttcaacaagattacgacggccaaggcgctggggcagctggtggccaactaccactccctcctggcgctcaacctcgtaggcaacccggtgcaggccaacatcggcgacgacgccctgcgccgggcggtcacgggcctcctcccgagccttgcctacctcaacaagcagcccgtgaagccgcagcgcatcgcgcgggaggtggccacggacagcatcgcgcgcgccgcgctcagcggctcggacagccggagcatccggaagaggacgtcgcggcggctcacgcagagcccccgctcgtcgtcgttgaccagggcccgtggcggcggcggcggcggttcacccacaccaagaaacacctctcgtcgtcgttgaccagaagaaccaactgcgtgattcgcgttgctctttggagacgggagacggcggcgtgactgcgtgcaggcagactcagacgacaccatgattcggcacggcgccagcatgatatgagacaaaccaagtatataaagcaagtatgatgtgagagaattgcgatgcaacacataatgtacatacttgttagggagatattgcttagattaatactacgaccgatgcatctttgtacctgaaaatatcaatttgagcctggttgaagatgaacatc

SEQ ID NO: 32785 - DNA, 858 bp, Zea mays
  Clone ID: UC-ZMFLMO17022A11_FLI
tacagctttaattttgcagagcgaccaccagtccaggtccagcgcgggacgcatcacatacacgcggtaccttcgttcgttctcaagcttatagcgcccgatcgaccctgcgcggagctagttcgttcgttccggcaggcggcggcagcgaagtagtgcgacgacgacgacgaggtacgtagagagcgagaggatagatgtcgagccgaaggtcgtcgtcgtcgtcgtcgcacggcaacatctccgaggacgagatgaacgagctcgtctccaagctccaggccctgctccccagctcccgccgccgccgcggctccggccaggtgcgtcgtcggtcgcgaacagatggctgacccgctcaacatctccggggcactgtgcagtgcatatgcatgcatgctcgcctttttccagttttaaacgtctaaaatgcgcgcggcggggcggggacatgacatgcataatgcaggcgtcgacggcgaagctgctgaaggagacctgcagctacatcaagagcctccagcgggaggtggacgacctcagcgaccggctgtcggacctcttgtccaccatggaccacaacagccccgcggcggagatcatccgaagcatcctccgctcctgagcgcgcgcaagggcgaggtcaacgaacgccggcctccgatcgatcgccgacagcgcgcgctctccggccggctggtcacgtgcgggagctgagctcaattaggtagctagggtatatatacatataatatatatatctacatgtacgtgtatctaccttttcctttaccagtctccctagatctgagatcatgtggctagctccgtataaaaatgtactagccacacgctgac

SEQ ID NO: 32786 - DNA, 1196 bp, Zea mays
  Clone ID: UC-ZMFLMO17022B07_FLI
ctcgttctcccgaccccgactgtccccaatgcgcagtccgcgaggcctcctcaccgcctccggctaccttgcgggccggcacgctccgtcggcctccgtgtccaccactggccacaactccctactcgctcgcaccttccaaatcctagcccagccggagtccgtccgtctgcagaagcacccggcacccaactccgggatcttagagctgaggctggagcggccggaagtcaagaacgccattaattgggatatgatgaggatgctgcggagcgccatagagaagattcaggccgacacgacggcgaaggtcgtccttgttgcgagctccgtgccgggggctttctctgcaggcgccgatctcaaggaaaggaggctaatgagttcttctgacgttggggggtatgctagatccttgaggtctacattttcgtcttttgaggcacttcctattccaacaattgctgtcattgaaggagctgcccttggtggtgggctagaactggctttggcatgcgatcttcgaatatgtggagaaaatgctgaacttggactgccagaaacaagccttgctattatacctggagctggaggtacgcaacgccttcctaggatcatagggaggtccagagcaaaggaactaatattcactggcctcagatgtggtgcagctgaagctgtaacgatggggttagcaaactactgtgttccagcaggagaggcttaccagaaggctcttgacattgcctgtgagataactcagaagggtcccatggggataagaatggcaaagaaggcgatcaatgagggggcagaggttgccgacatgtcctcggcgctggctatcgaagaggagtgctacgagcagctgctttacacgcaggatcgcgttgaggccctagctgcatttgccgagaagaggaagcctgtgtacacaggaaagtagtagtgtcagaaaggatgataatcgtcttgagagtctgctacaagcagagatggtggcaatggataccccaaatccatacatccaatagccgggtgtggaataaattctttatcatagatacgttaatgggtacaatattatacccatcggtagacgggtgcaagatggatgcgggtatagatatgtattagctatctatgggtaatttttacccacctcatctatatatataatctactcaattaagtac

SEQ ID NO: 32787 - DNA, 619 bp, Zea mays
  Clone ID: UC-ZMFLMO17022C01_FLI
gtgcctgggtggacctaccgcctcgccttcgccgtgggggactcgggcgacggctgcgcgggctccatggccgccgaggcctacgcggcgcgcgccacggtcaaggtgccctaccagtccaggggcaccggaggctacaagcgcgccgtgctggacttcacggccatcgccaaccgcacccgcgtcgtcttccagagcaccttctaccacatgaagcccgacggcacgctctgcggcccgctcgtcgacgacgcctcgctcgtcggcctgcgcaagaagaagcccgcgcgccgcctcatgcagctcctgtaagcggtgcttccacgtgcactacgcccggacggaccgcgcaagcgatggtgtaatacggctggtatgtgttttttggtttggtgtgtgcgtgcgtggtatacgcgtgccgtgcgcgccctgtggctgtggctgcagtggcgtcgcgttgggtgttttcttgttgtgacgaagaaaaaagggtatgggttggggtggtccgctggccggcgcaccggggttttaatcaacttatattaacctgatgaaggtgaaggtgaaggtgacacgggattaatggcaaaaatgctcctagtactatttttgtaat

SEQ ID NO: 32788 - DNA, 2369 bp, Zea mays
  Clone ID: UC-ZMFLMO17022C12_FLI
ctcacattcttccacgtctactcaaccaagttttctcttcaagtgcctttaagccacatggtaatggggtgtcactcacggtgtcatcctcatccaacatttcctccacgggatgcaagcgttgtttaaaatgtgtagcactgcctctcttccactgtgttttacaatacatgcacttgaatctaggatatacgttctccccgtgctgccaaaccgaatcgatctgatctgacattcctaaaaacactagtagtatgagtgatttttgcaagtattgttagccattattgcgaataacagtaagcacctatgctaatttagaagacttgaggatgaaaacggaaaatccccaaaacctagctaccgcactggtcggttatcagcaacacgaggtgattaattgtctctaggggctggctaatcggtgcaaacacttgattaactagctcaaaccggtggctaggctcgatgagatccaacaacgacatcgaacgactagccaggataacggacgatttatcgaacggagcgtgcgatttaccaagtagaggggtggcttaccggcgcggtagagcagcggacgatctggatgtctttttaaccgtagtcgccgactagtcggcttagcgcacgtggaatggtgacttcggtagcaacgagcgactgcgtggctcagacagagcggtggaggaggagaggaaccgagtggatgcgttctccacctactagggtattgtatgagcttattgggacataggtgaaaccaacacgaataattgtttttcttttttcttttttcaaaacttgtttgattttaaacttgaactcagttacatgttttcaaatttaatttcagtgtcattaaataacaatagcatttatagaaaatttggcacatatataaatctatactacttattaaggcagtaaggggtaggctgtcattccgtgttctgccattctcattccctgttctgccttttcgattcccccttcaccgtttcctttctcattatctcctcccttataaagctcattcccattctcattctctcctccccccacaaagctcattcccattcccacgtacatctcaagcctagctaaaattaaattaaaaaaaacaagccttaaggggattcgaacccacaacctctcaagcaaatgtgttcacggctaccactacaccacatgtgtgtttatgtctacatctattatagtaaaaacatatactacatctctccctaaacccacctactacccttgcacaatgtgtagtagtagataagtatcaccaagattattaaattatatttttggattgagggagtagtatttaaagaagagccttgcatgcaattttttgtttaaataatgttttcaacttaaattcttttttttacatgtgtgacatttattctctgtaatatttttctatggatctgacttatgagtcattttcataaaccaatgccaaagataaatccatgtttcttacttgaaaaccccgaacaaacaccactagcacaaggcgctcgcgttggcgtcgctcatcgacgacgagaagaagcttgacgactgtcggttcaacctctgaaagcaatcctacgtggcccatgcacctctgtgtacggcaagctccggcacagccgccgcttggacgcggtccagagcgactgcaccacgctgtccatcgtcaaacagggggacctcatgatcgtcgccaatgccgacgactctcggattgttctaggcatcgcaaccgacggcggcgccatcacgctgtccagctcatcatccacctgaagcccaacctgccacgtaagtcgctactgaccggccaagaattcttgtacgcttggatgacgaccattgttgctgttgtgtgagtgtcctcgaacaagatgtatgtagaggagtagcacatccggtggtgcaacgaccagatgtactacctcgctgatgagcccagggtgcacttcatttggtagcccagccaagagtcatcggtactcaccatgtcgcgtgtgttcgacgactactatatcaacgattgtggcgtcatatcggcgccggaggtgacgcagaggaggactgacaacaatgaccactcaccaccgtcggggtagcttttgtaccggtctgcctttaattctcttcgcaaacacacacttgcctttttgtttaagcaaacgtgtatggtgatacgtgcctgatgactaacaatgtacgtaacttgtaccgacaggtgtggcacgtgctctccaatgatgagaccatgcaaatcatgatatatatcgaagtctgcatgatactgatggttgcaatatagtagtgaaacaactaaattaaaataacaaaatttatgt

SEQ ID NO: 32789 - DNA, 1768 bp, Zea mays
  Clone ID: UC-ZMFLMO17022E06_FLI
gccgcggtaaacgctcctcccccaccctgtcgcccgcggactgcgatgacgagggacccctgcgcggcctcttcgtgctatcccgcgaccccgagtgcccaccgcggctgctggtggtgcagccgcgcctccgccccggaagcctcctcgagtccaagctcgccgaggcactcaacctcgccaactccctcgaggagcgccgcgacggcttctaccacagcgagttcggcgccaagggcgcgccgccgcacctcgtcgtccagaaccccgcctcccgcggtcgctcacacgctgatacatattttgggcctggaactgtggataatgtcaagtgctacctgagtgcaacggaatcagaggaagatgtggatgcagtttttgtcaatgcgattctctctggaatccaacagagaaacttggaggttgcctggggattcatgagtggtgctggtgaaacagagcttcaactacaacggaggagaatccaagaacgccgtgtgagcttgttagctcaaattgaagatgtacgccgcactagagcgatacaacgttcaagtcggaaaagacatggtggctcgtttggtcaagagcttgtaactgttgcagtcgtcggatatacaaatgctgggaaatctacgcttgtgagtgcactttctgaagctgatttatacagtgatgacaggctgtttgcaacagtagatccccggttacgaagtgtgattcttccatcagggagaaaagcacttcttagtgataccgttggcttcatctcagatttaccagtacagcttgtggaagcatttcatgcgaccctagaagaagttgttgaagcagacatgttagtgcatgtgttggattcaagtgcatctaatcttgaagagcatcgatctactgtattgcaagtactgcagcagataggggtttctcaggagaagatcaacaatatgattgaagtttggaacaagattgatcttgtggacgagaatgttaaatctgatgggattgacgatgaagtcttcctgaccgaaggtgaacaggaggatgacatattctctgaagatgatgctccatcagaacaaacatcttttgattctgtagatgtagatgacggagcagattcagaatatttatcagaagaaaattctgaagatagcaatgaactgccatctaaaaagtcatttgctgagccaactgagatgggagcaatgaaagagttgtcatcaaaagaatgttttggagaacttcgtgtcctagatacaaatggacacactttcccacaaccagcttccacttgtcatgtaaaaacttctgctgtgacggggacaggattgcaagagttgttagcattgatagagaggaaactgactgaacaacaaactgtcgtgcaaagaagctatggacctttcgacagaaaatggagacctacctctatggattgtgaaaaggctgcagagccgtaggtatgggattcctccttcccctcttctatatgggattcatccttcccctcttctatatgctgctgagatcagtagcagtaaccagtttctgagtttgcatccctagagatggaaaccacacaatgtgtttgaatatgcgcttgtgcatgatgtatgatgtatcattcaaagagtatcttgatattctttctgcagaacatgaagaaactgtaggaagggaccgtatgagttttgatcaatgtcagtcactttaacagacattttgtactcatgcttcatgttgctagatatcatcttatctttatctt

SEQ ID NO: 32790 - DNA, 446 bp, Zea mays
  Clone ID: UC-ZMFLMO17022F02_FLI
ggcaaccctcctttgcctcagatacctgcccactacttgagaataaaggatgggagcatacccgcatcatccatccaaaagtacattatgcagaagctcagtcttgtaagtgaatccgaggttgaaataagctgctgcgggcagacagtggggaaccttgggcaacccgtgcgcaacctggtggagcggtggctgagggttggcccggcacgcccgctgcacaccgtgataggctcctccgggggagattacgtgatggtgataagctatgggcggccgaagtctgcgtcctcttgaaaacgcgcccgtcgtcaaccatcagggaagagttcttttttgagtgtcatatactcgatagcgttagcgtagcctgctgctcatcctctcaccgatgtttctaagattatgcttatctgttctttaagaaatcgtttgtttgtttgttc

SEQ ID NO: 32791 - DNA, 675 bp, Zea mays
  Clone ID: UC-ZMFLMO17022F08_FLI
ctcttcgtgccggcgtcccgcatcgccgacttcgaccgcggcgtcttccgtggcgtgctggggggccgcaccgccggcgccggcggccccgtcctcatctaccccatgaacaagcacaagtgggacccgaggagctcggcggtgaccccggacgaggaggtgttctacctggtggcgttcctgcggtcggcgctgccgggcgcgccggagagcctggaggcgctggcgcggcagaaccagcggatcctcgacttctgcgcgggcgcgggcatcggcgccaagcagtacctgccgggccacaaggcgcggcacgagtgggcggagcacttcggcgccgcgaggtgggaccggttcgcgaggctcaaggccgagttcgacccgcgggccatcctggcggcggggcagggcatcttcaggccgcccggctcgccggcgctcgcggccgactcgtaacgtaatccagctgcttatactaattattaggcgcgtttagtgtaaggtagaggtactagctacagcagtaaccatacaggattgtttagttagctccggttggttcatgtacaaatgtggggttgttaatcgcgtgctctgccatggctgctgtgatcggttctgtacaggggatgaggggagccaaatatgaacgtggcaaaatcgatacttcttataaag

SEQ ID NO: 32792 - DNA, 2232 bp, Zea mays
  Clone ID: UC-ZMFLMO17022F12_FLI
actggataaatagctataaaatgcttggtagttgcgtatttgaatcataatattccattcttggagccagtgacgcttgaggtcctgctcctttgcattttttggctaccttatgactaacagtctctctctctctctctcttttcagaaacaatggatatctgaagcatgaaaagtcaacccacctcactcttttaaacagttcggttaacacacttaatggctgcggtgtttgcatgacattctctttgagcttatatgggagcagtggctgtattggtaatttaagcagatctcagtcacttccagattctaaaccgaagcgatctttgagaaagaaatatcaggattcatcgactggaaacagaagacgatggcaatcgggtctagaagcaatggagaagaatgttagcatatctgtttctcttgaggggaatatctcttctattcccaattcaatagccaacgactctaaaacgtcaatggaaaacagggtagatacatcatttatcaaccatggtacgatatcattttgaaattttgttaccttgttgtatttaatgagttatatctgtgtttggatgcttacaacctaagtggattgagaatggtagcttgattgtaaggtaaatatgattgtagttgtttcatccgttagattttatagcatctttaatatgcagttaattgtgcttgtaccaacaccaatgtcgtatccaaattgtttctcttttgaacaagaactgttcatataggcttgtttttcttggaacgataaagaaaatcacatgtaaaggggttcattcagtactgttgtcatgttaaagtcagactacagaagattgtatcttgctctcttactttttgcaagggaaagctttttgttagcatgattttctgtggtcagttattcagacaataacacatttgttatagttattagcctggtcaatagtaccagtttttgcgggggatatggacgaatgaataggatttgatgccagagagtcatttgtataccaattataatatttgtttctgcagcggctgaagcatgggctgagatgagaagacaatgggttggacgccaggcagaagttctgagaaagaccccccgagagccagtgataaggttcctgacgctctttcatttgcatgaattatactctctccattctttttatttgtcgcgttttagtttaaaaataaactagcaggtgacaaatattcgagaacattatttgtcatgttttagttcaaaaatgaactagagggtgacaactattcgagaacggaggtagtaatttcctgtggggcacaatatgtaaattttaagaatctatagagaactagtcccattgccttgggtaggtgtttggtaaataagctagtttaaagatcctttgagatttctattatttgtgaaattttcttcacccctgcaaaaaatgtattgttaattacttaattgtagtttttaaaccaaaactagaaaacgaggtattgtagctaataacctagatagacgatatgttgagcgcctgatgcactaacaagccgtcaggagcttctagttctagcgaataagtgatgttagctcacactgaaggaagctttagttattggttcatgatagttagatagcttcttgattcatggtaggctgcaagctatatatgcaagagttcggttagattccatttcaactccagtgtcttttacattgcagttggtccacaacatatgatgacctcttgtcgacaagtgagcgttttccacaacgaatcccattatctgtaagatccctgagttaaagctttcctgcttctattggtcatttatgttatcagtttctgacttgcagagctcttgtaggagatggttgattttttggttgacatatggcacgaagaagggctctatgattagctgacctctgcctttctttacgccttacttttagaatgtggtcaacttcctccccacaaaatatgtgaccttcagaagaaatgaaaaaactacatactctatgaattagtcgcaacatttgaattagtcgcaacatttgaaattgaaaaaaaaactctcatgtgaaaaggtacaacagtgggttggtatatttggtgatgagttgtcaacggtttcttcatgttgaaggactcgatgacctgtcattcctgaatgaacgattgcttataagtaagaatataagggggaagggcattttttctc

SEQ ID NO: 32793 - DNA, 722 bp, Zea mays
  Clone ID: UC-ZMFLMO17022H09_FLI
acccaaactgccatgcgtgagaatagatagacagaaagaacaggaaccaaccaacacaagacacaacaagctgcagccgcggcaggcatggggcaccgcgccactgacaccgggccccaccaccattaccacccgacgcacactttatttagcccacgtcactcgcagaccgcaccggacaagtccacgcgacagtcactgctagctacgtaccgggctacgtacgacacacacacacagagagagacgccagtaaccgtagcgtactgaacagcaaaatcccgtgtcatactgccatgtacgcgcgcgagcgactaccccgccacgcgcgcacgccgatcccctgggccctggccgccgccgctgcgtgcgcacggcctcactcgctggccttctcgggctcctcaggagcagcagcctccgcctcggcggccggctcctggggaccagcaggagcaggagcctccggctcgtccgcggcgagctcctcgggagcagcagcctctgcctcggcgacaggctcggccgcggcgggctcctcggcaccagcaggaggagcagcctcctcctcggcggctgcctcctgctcggccgcgggagtctcctcgggaccagcaggagcagcagcctccgcctcggcggccggttcggccgcggcgggctcctcggcaccagcaggagcagcggcctccggctcggcggctgcctgctgctcggccgcc

SEQ ID NO: 32794 - DNA, 1429 bp, Zea mays
  Clone ID: UC-ZMFLMO17023A05_FLI
gtcgcccccgtctacaccgccgaggtggcgcccacctcggcgcgcggcttcctcacctccttcccggaggtgttcaacaacttcggcatcctcctcgggtacgtctccaacttcgccttcgcgcgcctccccgtccacctcagctggcgcgccatgttcctggtcggcgccgtgccgcccgtcttcctgggcgtcgccgtcctcgccatgccggagtcgccccgctggctcgtcatgcggggccgaatcgacgacgcgcgccgcgtgctgcagaagacctccgactcccccgccgaggccgaggagcgcctgctcgacatcaagaaggtggttggcatccccgagggcgtgtccgacgccgacgacgtggccgccatagtccgcgccagcggcaagggctcgtcgtcgtcgcgccacgacggggtgtggaaggagcttctcatcaacccttcccgccccgtgcgccgcatgctcatggcggggctcgggctcatgttcatccagcaggccacgggcgtggactgcgtggtcatgtacagcccgcgggtgttcgagcgggcgggcatcaagtccaagaccaactcgctgggcgcgtccatggcggtgggcgcgtgcaagaccttcttcatacccatctcgacgctgctcctggaccgcatcggccggcggccactgctgctggcgagcggcggcgggatggccatcttcctcttcacgctggccacgtccctgcacatgatggaccggcgccccgagggggaggccaccgcgctgggcgcggtcagcatcgcggccatgctgtcgttcgtggcgtcgttcgcgtccgggctgggccccgtcgcctgggtctactgctccgagatctacccgctgcggctgcgcgcgcaggccgccgccatcggcacggggctgaaccggatcatgagcggcgccaccaccatgtccttcctctcgctctccaacaccatcaccatctccggcagcttctacctctacgcctgcatcgccgccgcagggtgggtgttcatgtacttcttcctgccggagacgatgggcaagagcctggaggacaccgtgaagctcttcggcaaggacgcggacgacgaggacgtcagcgacatccgtcgtcacgtgcccactaagaagccgtctactgagctgagtgctcagcactgatcgagtaatgtgctacgcaacacgtgtcctcccgagtgtggccgaagcttatgttccgtaaagcttcgatgatgtagtataatatttttttttgtgtgtcggaactgtggtgaatctatgtatatcccgcgcctcttttgtttattagatttgtacattttttgttgatctcgtggcatggtgcgtgtgcgtagaaaaaatattattaaaaatatctatctctgcctcgtgtggcctacatgttatatttttg

SEQ ID NO: 32795 - DNA, 1952 bp, Zea mays
  Clone ID: UC-ZMFLMO17023A12_FLI
cgtggttcgttaggaaaggaaatcgattccccccgcatctgatctcttcggtgctagagaaatataggccgccgccgcctcctccttgttcggtgaaaggtgggcagttagggttgggagatctcttgactcacgacacgagcagcagaattcgtcgagggccgctggttgctgcgagaggtccgggccttcgtgggatcttgaaaattgaatgttctaatggagtccaagggtggcaagaagaagtctagcagtagtcgttcctccctgatgtacgaagctccccttggctacagcatcgaggatatccgccctgcaggcggcatcaagaagttctccgctgcttactcgaactgcgcgaggaagccatcctgatatctctgtcgtcatccccatcctagtagcgtagaaacctcctgcattttcattttgatctccctaatctctccggctagctgctttccagtgaccaaaagatatcagagaccacctcccgtggctgtctgccatctggctctgaaacgatggcagtcctacaagctgctgcccctccccctgtctctgtgattggattcgagggatttgagaagcgccttgagatcagcttctctgaggcacctgtcttggctgaccccagcggaaggggactgcgtgcgctctcgcgtgcccagatcgactctgttcttgaccttgctcggtgcaccattgtgtccgagctctcaaatgacgactttgactcttatgtcttatctgagtcgagcctgtttgtctacccgtacaagattgtgatcaagacctgtggaactacaaagcttctgctcgctattccgaggatccttgaacttgctgaagagctcctgttgccactcgctgcagttaaatactcccgtggaacgttcatattccctgaagcacaaccttccccacacaagaacttcgctgacgaggttgccttcctgaatcgcttcttcggtggcctcaagtccggtggcaatgcttatgtgattggtgactctgcgaagcccgggcagaagtggcacgtctactacgccgctgagcaccctgaggagcctgttgttactctagagatgtgcatgactgggctggacaagaagaaagcttctgtcttcttcaagaccactgctgatggttactcgctgtgcgccaaggagatgaccaagctctctggtatctcggacatcatcccagagatggagatctgtgacttcgacttcgagccctgtggctactccatgaatgctgttcatggccctgctttgtcgaccattcatgtgaccccagaggacggcttcagctatgcaagctacgaggtcatgggcttcaacccgggctctttctcttatggtgacctggttaagagggtgctgaggtgctttggtccaactgagttctctgtcaccgtgaccatcttcggtgatcgggacaatgcgaagacctgggggacgaaactggatgctgaggcctatgcttgcagcaacatggttgagcaggtgctgccgtttggtggcttgctcatctatcagagcttcactgttacggccgaaacgacccatgggtcgccgaggtcagtcctgcatgacttcgctggtgacattgtcaagaatcgctcagagagtgatgctccctgggaagctgatgctgtggatgagagcgaggaaagagatgtaaagaagatgaaatgctgatgtggtcgacgatagatcagattcagagttgctgccactggttatcttgtgaagcagccaagcctaattatttatgccacataaacctgtgctattgtaatgtgtcacatgcttatatttgcaataaacagctctaggtggtcagctttgtctgccgcaatgagcagtgtatcgatattgtggttttgaattgtttggatctaaataaagtccaatttcgatgccttttctattggcatctgcgtt

SEQ ID NO: 32796 - DNA, 3393 bp, Zea mays
  Clone ID: UC-ZMFLMO17023B01_FLI
catttctgggttttgggtcgtctccacgggctgggtttggggtcggtcggcggcggcggcggagctaggagtggaggcctgagatatactccaagcgggagtctgggcgctctctgcggtcggagaggcgcgggtgagatctacgagggccgctgcgtcgttctcgcagggccggcggaagacatgggtttcctctcggcgaagctgctgccgtcgtgcgagagcgtgtgcgtgtgctgccccgcgctgcgcccgagctcgcgccgccccgtcaagcgctacaagaagctgctcgccgagatattccccaagacgcccgatggtgctccgaatgagaggaaaatagtgaagttgtgcgagtatgctgcgaagaacccattgcgcataccaaagattgccaagtttctagagcagaggagtcacaaggagctgcgctctgcccatgtgaacttcgtcagaatcatcactgaagcttacagcaagctactcttcatttgtaaggagcagatggcatattttgccatcagcctagtgaatgtccttaccgagcttctagaaagcaagcaggagaatgttcacatccttggctgtcaaactttagcaaactttattaacagtcaggtagacaacacatatgcacgcaatattgaaagcttggtgcacaaagtatgtgcactttcacgtcgacaaggagaggatcacaggcttcttagggccgcaagcttgcagtgtctgtcagcaatgatctggttcatgaaggagcattcatacatatttgctgattttgatgagatagtgcattcagtgctggaaaattataggacagaggaatctaatggtggtggtgatgacagacatgcattgcagcataattgggttgatgaaatagcaaggtctgagggtagacctggtgtaggtggtggtaatgatgtgaatattaacactacaactattaggttgcggccagcaagaaattcgtcagctcttacaagggatgaacgtgactccccagaagtatggtcacatatttgtgtccaaaagcttgcagaactggccagagagagtacaaccatgcgtcgcattctagatccgatgctttcatactttgatatgaagaaacagtgggccccacgacatggcttggctttgcttgttttgtctgatatggcttatctggaaaagagttcaggcaatgaacagctgattctaaccaccatcatccggcacttggatcacaaaaatgttttacacgatcctcagacaaaatcagatattattcagacagcaacgtccttggcacgacaacttcgatctcgaggatttgctgttgaacttgtagtggcaggtgacttgtgcaagcacttaaggaaaacacttgaggccgtggaatcaggcaatgttgaagatcagaatttgaacgaaccccttcagattgtcttggaggactgtcttatggaagttgttagaggaattaatgacgtacggccactctatgatatgatggcaatcacattggagaatttgccttctatgccaactgttgccagagcaacccttggaagcttgctgatcatttcacacataatctcgttgacatcagtatcttccaacaatctgatggtatttccagaagcacttctccagcagatactgaagtccatgttacatactgatattgatactcgtgtgggagcacaccacatgttttctgctattattgtccgagggccaagccatctgcggagtgaatcagagtacctatatgaaacaaaaaagcagtctcggaatacatctgtatttgcttcagctactgctctactggagaagttaaggagagaaaaggagagtttgagttcagataagcctcgaaatatcatgcatgatgatgtgaaggaaatgaacatgcatgaagaggataaacgaaaaaacccagcttatttctctaagctggtttcctctttcattgaaagatgtgcaacacgaagttctgtagaggagaccaatattgccatgctaactgaagatcaaaccaaccaattgctgtcttcattctggattcaggcaaatcaaacagataataccccttttaattatgaggctattggacattcatacagcctaacagttctttcttcccgccttaagaattcaagcaatggcaatatcattcagtttttccaattgccattatctcttcgaagtgttgctttaaccccgagtgaagttctgccggcttattgccaacggtctatttttacattagcaatgagtatgctggcctttgctggaaaagtttgtcacgtcgctgaactgtcggacttgctaaggtgtttttcatcttccaaaattgacccttacctaagaataggtgaagacttgcaactctatgtaaggttgcaatcggatctaggcagctatggttctgaaagtgatcaagagattgccaaatccatgctttctgactgcaggacaaaagtagggattaacgatcatcgagtgcttgatgttattgcctctgcactttctaatttcattgagatgggcaaggatgtaatagtgaaggagctgactgagttgttcacgcctgaagagatgcctctgtttgggtcgaattcagcacttgactgggccaacttcaatgcacaagcattttctgatgaatccctttcttttgatgaggaatgttcaagaacctcttcagtagattgtggcttgcacgagtcaccaatcaccaacactgctagctctatctcaaagattactctaccacagtctgttccacatgttttaggtgtcggtcaattgttggaatcagcactacatgtggctggccaggttgcaggtgcatctgtttcaacctcacctcttccatatggtacaatgactagtcaatgtgaagcccttggattgggcaccaggaagaagctatcgagctggcttgtcaatggacacgaatcaaccccggacaatcctatgccaagccttcccactgcccatcattccatcattcccaaggtaaaccctgccacgttccgcacatcatctgaatcatgttctgcagtaaagctcccacctgccagccccttcgataacttcctgaaggctgcctatcgcacccagcccgagctgtgatcgatttacctaagaacaaccctcttcacgagtgctaggctgcagtaccaaagcatagggtactagattatctaaaggaacttatctatgacgttgttttagttgtagtagcgtaactatgtgtatctatctactagatgtctgtaacgtttgcatatgtatcatcttacgactgtgcctctgtagttgtaagccgcgagttctgtgtcgcatgttcagactgagttgtatgagaatactgagtatgcttggcactcctgt

SEQ ID NO: 32797 - DNA, 1501 bp, Zea mays
  Clone ID: UC-ZMFLMO17023C08_FLI
gccgcccacttctctcccacctcccctccactcttttgcttgtcgcggggttagaatcccatggcgctatcggccgagatccgcttcggccaccagatcccctatcccactacgacactgactcctacgaggaggaggaagaagaggaagaggaagacgaggaggagttcgagggggtggagggcggaggagatggatgaggtgacggtttcgtctccgctgatgctgccggcaacggaggccaggggaggggtgtccgtggtcgagatggtgatgggggcgcttcggaggtcgctcatgttgtgcagcagcagcgccggcgccggcgccggcgtgcgcgagccggagcaggaggaggacggggtgactcccccgggtggtatgcaaataggggggccaacggatgtgcggcacgtctcacacgtcaccttcgaccgcttcattggcttcctcgacctccccgctgacctcgagcccgacgtgcctcgccccgtgccgagcgcaaggatacgcgggaagaaagccaaggtcaatttccgggatgaagcggcggcagcaggtgctcagaagccagccgcaaccgcaactactccaactgcttgtgccagcgcagcgaggctaggtcctccaccgccgaagttccgtgctgacgaggttttcgggaacatgaacggtggcagcaacgatctgttcgcgattatgttcgcgttcagtgacagtagtagtcaggtcgttcgtgtggagccaggtgagggcgccgccggtttcctccccgcagtggaagtgttggacgacgagcctctgttgcccggcagtaagaggtctgcggctaacatgctgctgctctccggccagagcagcgactcgtatggctcttgtgacttggggtgggactgggacgatgacaccatgacctcagactacgcctcagtctttgctcctgctgctcccagtaacgttgtgccagcatggtacacgcaaggtggaccggcgtcgaagagaacgaggagcagctatggctacggtgtggcgatgctccagcagggagatggcgcgcaggccatgccgggcggctttgaccctgagacgaactaccagtaccagctgttgccttacgtcgtcgagagcagcccgtcggacggcgcgtcgacgcacgacatggactgccttcaaatgatgcgagctggtgatgttccacaggatggggcgagcagtggtggtggtggtggtggcggcggcgatatctggagccttgacgagctgctcatggccgctggcgcttactgagaaaagctatgtgcatcgcatgtactagacggttacttgttgtgccgtgaatggagtgtttctcagtttcgttttgcttttaaatttttttattattccaggtctcctgcttgtggtgatgatgcaggagagccatggtgggtaggtactatgcttttgctgccagtggaactgtaagacaatgtttatatagtatctactatgttggtgcgtc

SEQ ID NO: 32798 - DNA, 2631 bp, Zea mays
  Clone ID: UC-ZMFLMO17023C10_FLI
aaaagagccggaagcgagaaaaaaatcaataagggaggcgatgctccggctggccggatccttccctcgtctgccccctcccgtgcgccctatctccccagcccccgccccgtcccagctctcactccgccgcgttctcctcctcctctcctccgccggcttcagccccacttcctgttacagcagcccttccttcgcagcgatggcggcggcggcgccgccggtggccaagaaggtcccgcggcagctcgttgagcacggcgacgtccgcgtcgacaactactactggctccgcgacgactctcgatccgacccggacgtcctcgcgcacctccgcgccgagaacgactacaccgccgccgtcatgtccggtcagtcgggaacttgggatctactcacatgcgagatgcctttagcgtgctattaggcattagcttgagatctacccacatgcgatctattgttttgacatgacaattgacaatcacttgccagtgtttccaacttaccagattgtgatattgatattatatatcacttagaaattggaatgtagttgtatagcgtctgttcagacttcagtgtggttgctagctctctactcgggaacgtagtactctataatgtagtagtagacagtactacacgggttgtttccagtggattggtagtgcagatgattctgtgctgtcgtgagtagcctcagtcctcttctgctaaccctggtaactctcttggagatgtcaagcaacttgaggatgaaatatatgctgaaatcagaggaagaataaaggaagatgatatagatgcgcctcttcgcaaagggcggtactactattatgaaaggacattgactggcaaggagtatgtgcaacactgtaggcgtcccgtatcgactgatgctcctattacagtccacgatgtgatgcccacaggacctgatgcccctgatgagcatattatcctggatgagaatgttaaggctgagggccacgactactacagcatcggagctttcaaggtcagtcccaacaacaagctagttgcttacgctgaagacactaaaggtgatgaaatctacacggtctatgtcattgacacggagagtggagaatatgttgggcaaccacttaaaggaattacttctgacattgagtgggctggtgacgaccacctcgtttacattacaatggatagtatacttcggccagataaagtatggctacataagttagggtctgaccaatcaagtgatgcttgtttgtatcatgagaaagatgatacattttctctaggccttcaagcttctgaaagcaagagatatttatttgttgaatctggaagcaaaaacacaagctttatattctacctggacatacccaaacagaacaaggaacttgctgttttgacacctcgtgtgtatggcattgatacaacagctagtcatcgtggaaatcatttctttattaagaggcgaagtgatgaattctacaattctgaattggttgcttgtccactggataatgtagctgagaccactatactgctaccacatagagaaagtgtgaaaatacaagacttccagctctttgacaaccatattgctgtatatgagcgtgagaatggccttcccaaagtgatcgtatatcggctacctgctattggagagtcaattggacaactccagggaggtcgagcgattgattttattgatccaacatatgctgtggaccctgaggagtctcagtttcattcatctgttctacgatttcattatagctcaatgcggactccaccctctgtttatgactatgatatggattcaggggtgtctgtgctgaagaagatccatactattttaggcggattcaatgcatcaaattatgtaacagaaagaaaatgggctgctgctgctgatggcactcaggtccccatgtccattctatacagaaatgatcttgtgaagcttgatggctcagaccctatgctactctatggctatggctcctatgaggtggcttattgatgggtgctgtcctaaatatgaggcctgacttattcagggcagctgttgctggagtgccttttgttgatgttgtcacaactatgcttgatccaactatcccactgacaacagctgaatgggaggagtggggtgatccaagaaaagaagaattctattattacatgaaatcgtattctcctgttgacaatgtgatggcgcaagagtatcccaacattcttgtcactgcaggcttaaacgatccacgcgtgatgtactctgagcctgcgaaatacgtggcgaagctgagggagctgaagagagatgacaatcttgtgctgttcaagtgcgagctgggagctggacacttctccaaatcgggaaggttcgagaaattacaggaggatgcgtttacttatgcgttcatcctaaaggcgctgggcatgactcggaagctggcatcactgtgaattcgattggtgtgaggcacctggactggatttgtatcatggcctgccctcttggttgggagatggatggattctgatggaatatgcatttagatttgaatagggacacagatgttatgcaaaagagattgtttgaaactttgaattctgatttgcatt

SEQ ID NO: 32799 - DNA, 2348 bp, Zea mays
  Clone ID: UC-ZMFLMO17023D01_FLI
ctctctgcctcgtcctccctcctcctgcttcgtgcttccccttccccttctcgtctgcggcgccaagctcgagctcatcgccaccgaggtcgtttcgatctgggttttagcctatccgcgaggaaggtaaacgttggagacttcgtgatggctgctgcgaagtcgggcgtagacgtggaaacgagggacggcggcggcggctccttcagcgaggagaggtttgttgataagctcaacaagctcaacaacacaacagcgagcattcagacactttcacattggtgcatttttcaccgcaagagggccagaaggattgtggacacatgggaaaagcatttcagtactgcaacaaatgataagaaaatatcattcctgtttctatcaaatgatatcttgcaaaatagtaagcgcaagggaggagattatgtgcatgagttctggagggttctacccagattattgaaacatttctacgaaaatgggggagaagaagcaaagaaactggttgcaagactaataggaatttgggatgaccgcaaagtttttggaacccgtattgaaagtctgaaagacggcatttttggtgacaaccctcctatattcgatcacagtgggaatactaataattcaaatcctagctctaatcccttaaattccaaagttggaaggaaagattccagtacagtactaaaaaaactgactgttggtggtatgcctgaaaagattgtgactgcataccaatctgtgtttgatcagcattttgatgaagacgcagctttgaacaagtgtaagagtactgttagtgttctggaaatgctaaagaaagatatagaggatgctagcaccaaaggtgatccgcctgcctcaacaatgatttctgacctacaagaacaggaaacaatcctgaaacactgcattgcacaacttggaagtgtagatgcagcgaggatatcactgataaaccaattaaaagaagctctcaccgaacaggagtcaaagtcagaggttcttcgcagccagttgcaagttgctcgagcagaggctgaacatgccattcaacttaggcaacggtttggtggtgcggttgtcgcaaatggcacaggatctagttctagtccgctgctgatgtcttctcctcagatacagtcgctgaatccagcaccctcactcgcccctccaatcggtgcagccggagatgagcccaagagaacggcagcagcaatggccgacaagctggcatctctgtcagcgccggtgcaggtcctgagctccatcttctcatctttcgtcgccacacacggcgcttcgctatcttccatgaacagcggatctcctcccagagaccaactctccggggcaccgccgggcttccaggtcgaaaagaggcccaggcttgagagaaccgtgctggccagcgacatgggcgcgcctccattctccgtgcaagcaccacggctgcagcagccggttggagcgatgcccacacaagcagcggcacagatgaaccaagcgccaggcccattcgcaccaccgcctccaccaccaccgttgccgcctcttctgccaccgctcctgcaacagttcggtcaaagcgctggaggaatgatggggatgggaccgttcgggatgatggctggctccatgccgcctcctccgccgatgtccagcatcatgccagcaggttttccagcgccaagcggtccacctccacctccgcttccaccggctcagacccaaccccagcagcagcagcagcagtctcctcctcagccaccagcgccgcagcagtcagcagggttcttccagccatcagcaggcatggggtacttcccagcagtgcaggtgcagcaatctccgtccgcccaacgacaatgactcgatggtggcatgacatccatcggggcgggcttataaaaggcagcacctcgtgctaaattttgtacattagccataattacctggtgtcgagcttatacgtgactggccctgctgcaagagaagcagcaggaccaatggtcacgattagaaaaaaaaaggttgtagaataggcatgggggcttttgtttggtccgagttgttttaactcttcctggttgtgtcgtgtgtgcagtagttagactttgcattgatcccctgaggcgcaagaaagtggcgctggaattgttgcttaatagagctgccctctgatatagcagttcgcttttaggggctgggctgaagcagtgttagaacttaactggtcatagtgtcatagatatgatgtgaactgcaaatacttgtcctttttgtgacttaaatttattttctattttctatttagttttgaatagagagaagattttagcccc

SEQ ID NO: 32800 - DNA, 2657 bp, Zea mays
  Clone ID: UC-ZMFLMO17023D03_FLI
cgaagctttcccttacttctggagagaaaagcctccacggaccacggcttcagaagctgctttcatggagtcgtcgctggtggaggagcggcggcaaaacctgctggtgcgcgcgacggagcctgaggatcttgccaggtacacaggtgatgggtcagttgactttagaggttttcctattttaaagcataacacagggaactggagagcatgttcattgattcttggaactgaagtttgtgaacgtttggcctactatggaatctcaaaaagtttggtcacttacctttcaacaagactacatgaaggaaacgtttctgctgccaggaacttcacaacctggcaaggaacttgttatcttacaccacttattggagcaaccttagcagattcgtactggggaaagtacaggactattgctgttttctccactatttactttcttgtaagacacgaatgtgcatttacctcaagatacctgtagttgtgcctttgtgtattaatttttagggaagttaatgtattaagtgccctaaaattgtagtatgttgttttgcattggtatttacctattggttgtcaattaaagaaagattggataaatgttcacatatagcttttctgctatgacataagcaacttcataattgttgtgagcatttactggcatgatagttcattgaaaacatgcatgatgcgtcaattgcagacctacttgtgtttctctacctgccaattatgaatcttttatccttcttaagcaatcattcctgcagatattctgtgccaagtgctaatgactttttaatgtgcattcaatgaaggggatgtcggcattgacactttcagcatcagttccttctttccagccccctcaatgtgttgggtctatttgtccacaaccgaccttatcacagtatcttttatactttgttggattatacatgattgctctgggagctggtggtataaagccgtgtgtttcatcctttggggctgaccaatttgatgatactgatccagttgagaaagcaaagaaaggagctttcttcaattggttttatttctgcataaatattggttctttgatctctggcacagttcttatttgggtacaagagaattgtggatacagcattggctttgggatccctacttttttcattgccttggctattggaagcttttttataggttcagatatatataggtttcagataccgggaggaagcccacttacaagagcatgccaggtagttgtggcagccactcacaagcgaaaaacagatttgccggttgacagttctcttctctatgagctagatggtaagacttcagctattgaggggagtcgtaagctggagcacagtagtgaattcaggtatttttcttggttatcagtgacaattattttccctgtaagatatatccttttactcaacaaaggagaaaggcattgagaagttgtggtttaggttacatgtttggggaaaacaaatattcaaaaataaaagtttactgaaatgtatcaaatacagatattcatttatactgcacttttgttctgacattgcatgcttttaagcttgtgtcttggaacttcctggacacagcaaccttttttcagaactatgaaaggtaagcatacacaggatttgtacatatgcgcgaagactcacatgctgtcccagctgacacgtgctctttcctgaacagtttccttgacaaagcggcagtcattttgtggaatgaatgtgatggtcctcgcaattcatggagactttgcacagtcacacaagttgaagagcttaaaatactactgaggatgtttccaatctgggcaacaggaattgtgttcttcaccgtatgtgctcaaaactcatcgatgttcatagaacaggggatgaccctcgataaccaaattggtccattcaagattccagcagcaactctgtcgtccctagatgttatcagtgttgtcgtttgggttccaatttatgagaggttagttgtgcccatagccaggagattcagtgggaaagagagaggtttctcagaacttcaacggatggggatcggtctatttgtgtctacagtcgcagtggcagttgcagcgctagtcgagatcaatcgtctacaggtggcagtggcagaggacctggttcatcagaaggtacctgttcctatgagcatcctttggcaagcgcctcagtatttgctggtcggtgtgggcgaggtgttcacatcaattggtcaagctgagtttttctacaatcagtcaccagatgccatgagaagcttatgctcagctttcgctctcgttaccgtgtcacttggaagttatctcagctcattcatcttaagcctggtgtcatatttcacaactcggaatgggcaattggggtggatccctgataacttgaacgaaggccatcttgaccgctttttctggctgatagccggtctcagctcactaaatttccttgtttttatatattacgctcaacaatacaagtgcaagatagcttctgttgcttaaagttccttctccactttgcaatttacttgtacagcaaagctcaatgtacaatttgtttatgctgaaatactacagtgcgtacataatctcatgtgtcgtgtactgtgtacattactcc

SEQ ID NO: 32801 - DNA, 1237 bp, Zea mays
  Clone ID: UC-ZMFLMO17023D09_FLI
caagaatcaatcatgattctattttttatgaaaacaatgcaaaatatctaaggaaaatcttgagtatttcgcccctaactgcacgcgtggcctagccactgacgcggctccagtgcctataggtgacgccggtcataacaacaatactcaagggattcattgcttcagctgcacaccatatggatccttcattcctgcagcttgtaaaaccttgtttagtttaggaaacactccattgataaaactagaccaatcctaaaaggaataggtggctttattatatcagtattaagaagaaaataagcactcaaattcacctctaggacttgaacctaagtgttgtgggcgttcacaccctcaaccagctaggctcagcttccttgtctctttcgtgggctctatgatattacttattccataatattgtgctcagtggttagcgttgagtcatggcacttggcacttaatttgaattggtgtggccacttcagtctcatgctgggtaatatattagcataacaaatcttaccatgaacttcagatgggcgtcagcgccatgctttcataggtttaggcttccgggaaagacctgaagcatatgacttccaagctgccctacatgatcatatgaaatatttaaacaagaagaaggccgctgaagagatgattcagcattatgagaagcaatcttcagtggattacagcctcaaagaaggggagacattggttcttcagcttaaaaataaggaaacaggcaccaagacaaaatcgacattttttgagcaaggcctaaacaagctctccgttaacgaaaagacaagcgccaaggaggcccccgtctcccttaaactcccaccaccaccaccttcgcctgtctcaccgacggattctggagtcgctgcctcgcctttcaaagcagaatttcctccccaagagcaaccacctgctgaacccgtcagcagaaccagcgctctcccctccaaaggcgaacctgctccagagctaccagctgctgcagagaagatggagcaagaaaccgtggatgaagacttcggggacttccaggctgccgggtgatatcatgtatcttgtacatacatcatgttaccgagactttttttttctttctttctatttttggttttcaatcagttgtggcttctgccggcactctgttcctgtatagagagcttccatctcataacctacatacaaatacatggacaaacgttgtacc

SEQ ID NO: 32802 - DNA, 645 bp, Zea mays
  Clone ID: UC-ZMFLMO17023E05_FLI
atccgagctatttgatggagaaggtggctcctgatgagacagtgaaggaggaggcgagacaagaaacggtgaaaaagagtccaagcccaatgaagggaaagaaagtggggctgaaggtggaaccagggaagcaaaggtctccctctgtgctgaaggaggtgagggcaacgccgccgactccacagcggtttctatccccatcgccaaaccgcattaagaatgttaaacctggagggatcacagcaggctcgccactcaaaaaggcaccaaaggagaaggggacacctagtaaggacctggagagcaaaaaagatgctgtgaggcaaccctttggtgttaaggatatgaacaatacaagagcatgtgatgcagaagggagctccagcagcatgttttggttcttgaagccctgcactttccttgtggagtagcgtcataacactacaattttttaacgaacaacacttgatatagttagaatccattacttcattcatttccaaatattctctgttcctatttgatcgattcatttcatgggtactctatccgggaagtaaacaaaaagaatcatgtatagtcatacaggttgaaagtcttctccatatgtataattcgagatatagcaaaacgtggttctgctgc

SEQ ID NO: 32803 - DNA, 1128 bp, Zea mays
  Clone ID: UC-ZMFLMO17023E06_FLI
aggactcgctcgatctgttcgatcggatgacgagggtggagggcctggtgccaaatgccatcacgttcgtcgcggtgctcagtgcctgcaaccacggtggactggtcgacgaagggaggaggtactttgctgccatggtcagtgagcacgggatcaggccgaggatcgagcactacgggtgcatggtggacatccttgcacgggcggggttcatcgaggaggccctcgatgttgtggccgggatgaactgccgtcctgattccatcatctggaggagcctccttgacgcgtgctgcaagaggaatgctgggctggagctcagtgaggctatggccaagctggcgcttgatgtccctgacgacgctgtgagtggcgtctacgtccttctctcgagggtttacgcgtccgcgcagcggtggaacgatgtgggcatgatccggcaattgatgagccaagagggtttcaagaaggagccagggttcagctccattgaaatggatggatcagtgcaccagtttgtcgcgggtgacacttcgcatcctcagtcggaagagatatacgtgaagctggatgagatccaacagaggctcacatctgctggatacaagccggacttgtcggaggcacctatggtcgccgacattgaccgcaccaaaggcgccaccctgcgtttgcacagcgaacggctagccatatcatttggcctactcaatgcaacacctggggcacccattcggatcctgaagaaccttagagtgtgcaaagactgccacaccatcagcaagctcatatcgaagctatacaatgttgaaatcattgtgagggatcggattcggtttcatcacttcaaggatggatcatgttcttgtaaagattactggtgatccttgaacttgagccatgatgacctgcaatttggagagatcctgctcatgttctattagaagcgcctctgctggcatccaagagggagcttaatgcattttaagtgctgatggttacagcgaccttcaactttaagccgggagaaaagtggctggtggttgtttagcaagttgtgaattatagatggttgtccaccatgtgactgattatagaagctcatttgagcgttttttttcttgatct

SEQ ID NO: 32804 - DNA, 1874 bp, Zea mays
  Clone ID: UC-ZMFLMO17023E12_FLI
ccacttctcaccactgccgtctccttcccaaactcggctgccgtctcctttgattccacggcctgccacgcagcagcagcaaaactcctagtcaacccttcaactcgcctactactcatactagccccttcttttcttcgatctccgcaatctacagctttgcttctcccggctcgagcggctagggtttcgggagtgcgcggtgagacggcatgacaacgcggggagctaagcgcgcggccacctccgaccccgccgcacccgatttaccaagtaagagagtaatggacggaccctcttttgatgttcacagggcggagtcttcccatcagcatgtgatggcaggacccgctagtttagatcctcggcgggcggaggctgctagcaaacatgtgagggcacttaatacccagtttgcaagctgggttcaattgcagctgcaaaatcatccagctgaactttgggaggacggccttaaggattacatatcacatgcttctgaaatcatggaaaaattcaaggatgttgtcaactggctaaggcaaaatcaagcaggttcaatagttgtttcatccccaagctcactgaaggatgataagtccaatctgccagcagcagatgatagcaaactcttagtacaaccaagttcagataacaaacagaaggctccaattatggcttctagttcttcatcttttcagaactcaagcttaccgaaccttttttcatcgccttctcagcaaaaaacaccagattacagtggtatgtttgctgacaagaagaacacgtccagtgatagcagtaaaccagctttccagtttggtggaaataatgtcatatttggtggcaagaaggatgcacctgttgacagcagtaaacctttccagtttggtccgaataatggcatatttggtgacaagaaggatactaccagtgacagcagcaaacctttccattttggtgcaaacaagggcatatttggcgacaagaatacgacaagtggtgacagcagtaatccttttcagtttggtgcaaataatggttttccaacatccaatgcaccatctattttttcttcagttgcccaaagttttaacccacagagtccacctctgttttcaatgaatcaacaatcagtcatcccaggaaaccaaaatacttctgaagcttcagctgatgcagatgaagatgctgaacctgagaagccaagcagcccttctgtaaagaaggcagaagagaagggggtagttgttgttcatgaaaccaaatgcaaggtgtatgtcaagcatgatgatgccactaagggttggaaagacattggtgttggtcagctctctatcagaagtaaagaaggcacagagaaagcttccaaagaatccactcctaccattgttataagaaacgatgttggtaaaatcctcctgaatgctctgatctacaaggggataaaaatgaatcttcagaagaatacggttgcttcgatatttcatacttcagatgcacaatcaagtgaatcagctggtgacacagttgtagctcgaacatacctgttccgattgaaaaatgtagaggaggctacaaaactatcgacagcaatcaaggagaatgcgccctcagactagttcttacggcatggattatcatctcgaatctctgcttttggcacgagctgtaagatctgaaggggacaccaccgatggccactgcggcaggctaaaagatgccttgcagagtttctttctttctttttttgttctcctagctgcatcaagatatcttgcttgtaacttgtaaggctgactggctggttatgtattagtactttcatgtaccatcttttgcattgacaagattatcgagcatgcttacagccc

SEQ ID NO: 32805 - DNA, 3839 bp, Zea mays
  Clone ID: UC-ZMFLMO17023F10_FLI
ctcctggccatacgccataggaagaacaggacacggacggaggtgagggcaccactcggaaatcctgccatcctgctagctggaggggctgtagctggacagtgactgagagtgagaggcagcagcggtccggtggctggcctccttgctggatgctcgccgtcagggaggtacgacgagcacgaccgcctctccctcccgggagcgttccctctccggcgaggtccctcctccgggaaatgcggcggggcagttacaaatgacatcttcttcttcttctccttcgtaacctgctgcaaaggagggcaacctcctgcatttccgggttctctttccacgagaagggaagggggaaccggaggatgccggccaagtacctgggggcgttggcggaggacaggcgcccggatctctatcgccaggtgggctgcgtcaccgggatcttgcaggccttcgaccgccgccaccatctcgcctcctcccacaagaggctcctccccccaacaggccatgcacccagcaatccaagcaaagggggagaatgcacgagatattcaccccaggttgttctggagaagaactcgagtaaaacttgggctgatagccaaagagcaccagcaacagaactatctcaaacctcatattcatcatcaccctcttcgtcattctcatcccttgatggcaacaggtcaacacaacaagacctatcatccactgaccgaatgctatttccagagaggccgtttaagagctcgccgaagctcaagagttcttttgacagtgacaatggactcgactaccctgatgacgcgcttaccaagtccaagaacatgcccatagttcaatccagcctgccaactcttggtataagaaatcttgtgaaggattcaatctacaaggatagccatgaattgtcagtcagaattagcactgaagaagaagtaaaagatcacccatccaactgtggagatcaacctatgcaattgaatgggcctcaccatgacagtacacaaggaaaaagcaagggtctcatggacatcaacgaatcgcttcgagtgctagccaagctcagggaagcctcgtggactcctcctgaatctgttcatcatgcaagactctcatatgatgctcctcggttctcatacgatggaaaggaagcaacatcaaaattgagggaggtaccgaggttgtcattggacatcaaggaaggtcacctttggaatcgtgaaattgactctaggttggacccaagcttgagttctgcagacagaaacagcaacactgttactgggtccaatgcagctttcgagacccagcaggaacagcctgcctgcaagcggcttcctagcgttgttgcaaagctcatgggtttggaagagttgccagagcataatcaaagtacagcatcatcacatgcatgcaataccgttcaagagaacaagcaagatgccatgttgaactccttgagcatctcctaccagtacgagcatgctcctcaacaagaaaggaatcctgattcaactgtaagaaatttacccaactctaagttccctgtccaaactgcaccatggaagcaacaagaaaggattgtccttccacgaaaactgccaaagggatcaaaaggagcccacggaagagaacctgctgcaccatggaaccagctgaaggatcttgattttcagcaaccaaacaaagaccttagagcacttaaacagattttggattctgcaaaaggactattagaaaataagaaacgggaggaagcatttatgccaaagctatataatggaaaccatgatgaccaagagatggccagtgcgaacatgagactgaaccgtaacaccaacaacatgtggatgcctgaagagagcaacgctgaaagctctttcaaatcgcctattgtgataatgaaaccttcaaaatctgcaaacctttacagcaaagtggattcttctgtcttcccattaggaggttcatctgatctcccacagccacaaacaagcaatagcactgatagaaggaaagcttcaacgattaatagaaccgccaaagggcaatatgcgaaattgagtccaagggtgcctacttctcaaccccttgtttcttgtgacaggagatcatatggaaggaatgatgatagcagcaacaaccaaaaatctagttcactgctggtcactgagagctcaaccagaagacagcagctgccaaggaatagtagcgtaagtatgcaaaagaacaaaaattccactagcccaaaattactacagagaaaacttgatccagagcggagggctagaccacctattccttctgctgagtctaacaaaagcgaaaggcaatctggagataggaacaattcagaaacagtgtcaccccgaagcaaattcagaaggaaacttgtgcgcccacaaggtgatgatggcatgcccattggattgaacaacaggacaaggagcctgtatcagcatgacaatgatatgtccataaggtcagatggcagtataagtgttgcttcagagctggatattataagcaatgacagatctacaggagttaatatttctaactttgagcaaggcattggaactccatctggaaggaacccacagaaagtgaaaacctcatacgatgcaaatatggacgtgccatctgtagacccttcagctgctatttcggaacggcccagtccagtttctgtgttggactcttcatttgatcaggaggatttgttccctaccagcaggactccaaattcacttgctgttgatgatgagcgcgaaacattagaggaaccctggaaaccatctgtcgctatacagtccaagaacaataaactcgcaaatgttgcgagcttgcttgagaagctccagcagcttagcgtgaacaaggatgaggatgcacctccggttgaccatattgctttcttgtgtgagacagagagcccagaccaccgctacgtgtctgagatactgctggcctccggtcttctgatgaaagacctaggttcaggacagacaggtctccagctccactcctctggctacccgatcaaccctgacttgttccacgtgttggagcaaaggaaggctggatgggtcagtacacctgatggcatccatcagagcagaagcggcacaaaatctgatcccaggagagcgcaccggaagctgatgtttgacactgtgaatgagcttctccttcagaagtttgagaaggaaaccgccgtttatgcgctcagttccttcaccagagcgaaggatccacctgcaaagacttttagcgggcaacagctgccgaagttcatatcttcgggaattgaagaactggatatggagcgatcgtccatcagccagaaggacagcagcgtgatacctgatgcagagatcctgcggaggctgcagggatggacgagcttcagcaaggagctcccggggatggtgctggagatcgaaaggtcgatattcaaggagctggtggacgaggtggtgcatggggagtctgctgacggcccggagatgaaggcggctggcagacggagaaggcggctctttgcttgatacggtttgtttgaccatcgccatccaccatttggatgagcctgatttgtgaagctgtaactttgtttgtcttgccatgagagtgagaccctattttctcaagagaagagggagagagaggggatagcgcagatttggtgagagacccgaaaatgggcattcgttcgtgctatatatataccattgtttcttgactccttgtgatttactgtggatgatgctatttcagtaaaaaaaatggtcgaatgacagctgttttttgccatggaaaaggcaaattat

SEQ ID NO: 32806 - DNA, 1115 bp, Zea mays
  Clone ID: UC-ZMFLMO17023F11_FLI
cacagacgagccgacacaagcagttagctatagctgctagcctgatcgccaatggccaccgccggcagcaagcaaggaggaggctcgtccaagccgcctgcggctggtcaggagttggacccgaggtacgagtgggaggagaacgccagcagcttcatcctccgcatccacctctcaggcttcaggaaacaagatttcagggtgcaagtcgacggcgccggccgcctcaccgtccgtggccagcgctccgacgccgccgccaacgccaggcactcccgcttcaacaaggtcttccagctgccctccacctccaacctcgacgacatcgccggccgcttcgaccttggagtcctcacgctcaccgtgcccaagcgcctgcccgcgcccgcaaaggaagaccagcagcaggccaagaagcccgaggatgccgctgccgctgccgccaccaagcaggtggcgggagccaagggcgccaaatcggagccggagcagcagcacaaggaggaggcggcggcaaaggaagataagcccaaggcgaccgccgcagcacctgcaccggcagccgacacgacggcaaaggaagataagcccaaggccgccgccgcagcacctgcaccggcagccgacacgaagaagcagcccgagacgcaggccaacgcagagagcaaggcgacggatccgaccgaaagcctggcggagcggcgcaccgaggaagagcgggccaatgcaaatgctgcagctgcggcggagcaccagagaaaggcatgccgtggcttcaaggagcgcgtggcggaggagctccaggggctggcgggctccgagtgggcggagggccttgtggagacgatcaagaggaacagggaggtggtcgccgtcgccgtcgccgccttctccctcggcgtcttcgtctccagcaggctcttctccaggtccagcaggaactagaagccaaccatgcatgcatctctcttttgtgacaatcgtaatagcgcttgtcaccaccacaaactacgtatactgacacatacagtccatgatgtggatatatacatgcactgcacagacacaagtgaattgtaaacatgtttataaatgtatcagaaacaagtttatac

SEQ ID NO: 32807 - DNA, 744 bp, Zea mays
  Clone ID: UC-ZMFLMO17023F12_FLI
ggaggcagtgacaatgataaaatttggaagaatgatgttacttgtgtcaatatgattaggcttagtagagcatcgttctttcgcttttgtaaacttattagggatcgaggtttattacaagacactacacacatgtgtgttgagcaacaagttgctatgtttttacacacaattggccataatgttaggaatagagtagttgccactaattttggtaggtccggggaaaccgttagtcggtacttcaataaagtgcttcatgcaattggagagctacgcaccgacttcattaagccaccatcatcgacgacaccatctaaaattcaagggaacccacgctgggatccttattttaaggtagtgtttggtttgtttgcccaaattatattgattataggtagactgttgagaccttacatattgtcatcgtggttttgagcttgagcacaaggctaagtactattcttatttgctgaacaatcctaatgttgcacaagggtttgtggaggtgccattgctgtacaagcttagtatgcttactgagttcattaatggtaatatgtaggcttgctaggaatacttcattttgggtgacataaacttgtatgtcatgcttctatgtatccataaacaaggcactttgggaatacttcattttaggtgatatgaacttgtatgtcatgctaattgtatgcatgaacatggcactttggattatatgagtgttgtgatgacttgtggttt

SEQ ID NO: 32808 - DNA, 1083 bp, Zea mays
  Clone ID: UC-ZMFLMO17023G02_FLI
tgtagattcatcaggtgacaagtccaaacgaagtgtagtagagattaaaggccgcttttcagttacatctgagaatgtcgatcttgcaaaggttcaggaaggtccacttagtagcctctcacggaaatcaccagagggttcactgctaagaaaatctgccagcactggtgattgtttgattaatactaagctgatgcgtaacgctaatcagctgaaggaattctgcaatagttctgtatcatcttcagtattaattccccaccttaacaaccttgtgcaacagaccatgtttcagcaggatgtaatcatgaacctacttagtaacttgcaacaggatgagaaagttgatagaacacagcctggaatatcttctcaagtccgaacgatggagaatggtaaagtggctgatacagctaactctgagaaggaacggtcattacttgttaaaatttcagaattacagtctaggatgataacactgactgatgaactaattgcagctaagacaaaacatgttcagttgcagcaagagctaaatgctttgtactaccgagaagaaattgaggatgttagggatgaggatatcgaagaaacataatgtatgaattatctgcctctccctgagacagatcaattacccgcctctccctgaggtcaggggagaacaagagaaggaaagcggcagggagaactagcgatggaaagtggcgatgccgcaaatatttgctggatctagagaccagctgcggctctacggaatttgttctttgaaggttgccgtgcccctggcctgctgccatccagtgtgtataaccgtcttagttcgtttgtttttttgtgaccacaagattgaggcgtggtcatgcagctatttcggccatgcctatcattgggagtagctgtagtccgtaggctaccgggtggttatctatgcagaatttcagaagactgcaaaataaaactgtattttatctagcaataggatgtatattggcgcattcgttgatatgtatcatatagggctattcgcaaacatccaaacagagttgtttgcacatatctaataaagtatgcatttactgc

SEQ ID NO: 32809 - DNA, 1206 bp, Zea mays
  Clone ID: UC-ZMFLMO17023G10_FLI
cgagttgcagccgcaggttcaagcggcgggtggccgcaaggtggtggacgaggtgtccggctggctgcgcgttctggacgacggcagcgtcgaccgcacgtggaccggcccacccgaggtcctcccgatgatgcagcccgtggcgccgtacgacgtgccccgcgacgggcacacgctgcacgacctcccaggggagcccaatttccggatctacctccccgaggtcgacgacgaccgcaagggcgggcgcctgcccgtcatcgtgcacttccacggcggcggcttctgcttctcccacccgtcctggctcatgtaccaccaattctactcgcgtctcgcgtgcgccgttcctgccgtggtcgtctctgtcgagctcccgctcgcgcccgagcgacgcctgccagcgcacatcgacacggccgtcgccgcggtccgccggctccgctgcatcgcgctgtcggaggacggagctcttggtgacaaggcagctaagctcctccgtgaggccgccgacgtctcccgggtgttcctcgtcggcgacagctctggcgcgaacgtcagccacttcaccgccgcgcgtgtgggccaggacggcgctggcgtctgggcgcccctgcgcgtcgccgggtgcgttctgatccaaccgggattcgtgcgcgcaacaaggagccggtcggagctggaggtgggagagtcggtgttcttcacgctggacatgctggacaagtgccaggccatggcgctgcctgttggcgccaccaaggagcacccgttctcgtgccccatgggtccgcaggcgccgcccctggagtccgtgccgctcccgccgatgatggtggccgtcggcgagaaggacctcgtccgcgacacaaacctcgagtactgtgacgccctgcgcgccgccggtaaggaggtggaggtgttggtcagccgcggcatgagccatgcgttctacctcaacaagttcgccgttgacatggaccccagcacaggagagcggacgaaggagctgattgacgccatcgtgagcttcatcgcttcccactgaaggctgaagtgcaagaatgtaatttgcctgtgatatgcctgtgatgcgtgtctgtccaccaaggaggttaggaggagcacccgttcacgtctcgcctgcacatgtaacttgcgtttgcccctagtacccatataaatataacttcctccgttcacctc

SEQ ID NO: 32810 - DNA, 1117 bp, Zea mays
  Clone ID: UC-ZMFLMO17023G12_FLI
ggctagagtccagatgcttggaacaaaattgttactgaattcaacaagaagcatgagtatgtcacattcaacaagattcaaattcaggagaaggagagggaattgaaaagggattacaagatgttgaaagaggctagaaagcaaagtggcgtttcctggaatgagaaacgatgcatgattgttgctgatccaccaatatgggaaaacatcataaaatcatttcctagggccaagaaatttcaaaagaagtctttccctctctttgatgctcttggggaactatatgatgggcacattgctcaagggacctagaacataacatctacacaactaccacaagaatggaacacaatttcaaatgaagaagaacaagtgaacaccacaagaatggatgaggaaggcattattcaacaacaaccacaagaagaggattcaagattggaacaagatgaagatcctatgattgaaaggactgaacagaggtctactgcaacgagaaggtctactgcatcaacaatcaatcaagataaggaagcaaagaggatgaagaaggattctttggaaggacttgttgggagatatctagatctgaaatcaaaacaagttgaggatgagattacacaaatggcgaaaggaaaagaatctgctcaaggtaatgacttctccatcatgagatgcatttctgttcttagatccatgaatgtgacagcagatgagaagataaaagcagctgaggtgttcgacataccaaacaacagagagacatttatcagttttagtgttgatgaaccagaaactgccctcctatggttaagacggaagattgataagctctaagacaggaaatattggtcatatggagacagttctgcacattgttttgagtgctagtatgagctatatatatgttgcatttctccatgtttgggctcagcatgtaatagaactgaaggaaggttgttgcgagacttgtatggcatgtttaaatttctggataaaatctagcatatactaagtctattacatgcttaaatttttgaaaaaatatgtatcgagaattggatggaatgcttaaatttctagagaaatgacatgttctatgtttaaatttctggag

SEQ ID NO: 32811 - DNA, 2566 bp, Zea mays
  Clone ID: UC-ZMFLMO17024C01_FLI
ctggttttgattctgatcaggctgagagttctcctgatgcttccatgactgacattgctcccgttcttaatgagattgatccacttttgcgtgctgattccaatcgccccgatcctgttcctaatgatgattcagacacagattctcatgtctcagaggatcatcaaattgacgatgatagtaatgatgagggtgatgacattgatgctaaagataatgtggagggggagaaggaaaatgatgggaaggaagctgcatttctttggacagcagatgatgaaaagaatctgatggatcttggatattctgagatagaaaggaaccgcaggttggaaattttgatggctagacgaagatccaggaagaacatggcatttgaaatcgataacaacttgatagatgttcatagttctggctctggtacaagtttagatgatttgtcacgcttccgtgcacaggtacctcctattgcagtgcccaggaggaacccttttgaccttccatatgattctgaagaagcagcaattcctggctcagctccttcaatactgcatgcacggaagaacccgtttgaccttccccttgaacagtcaaatgacagtgttgttgtccatgcacatgatattttaaactctggagaacctgcgacttctcgtcgtgacatgatctttagaaggcatgaaagcttcaactttggaaggatggatgtgatccaggagaagcgtttttctagactcaagccatattttgttcctgaaactgtggaatggaatgcaagcaattttgaaagacagttcaatgataagtctgagtctaagatgagctctgttactaaatctgatattgcttcttcagttgctgatcaggaggatcataaggaccaagatgaaaaggaccttgcagatgttggaagtgaatgctcagatggtatcaactccatagatgttgaactagaccacagtgacatcgatgaccgtgagattgctctacagcaatttgtctttgaaagagcacaagaaagggaagcacatcttgtttcaactaaaggaaaaggacgtgaagaagattatgcaccagaatcagctgggagttcaacgatgccatttcatgcagtcactgacctgcttagctgggaagatggagatggtgacaacagccttggtgctaaaccttctttccagcttaacacagaagttaaatgctcagaatgggtttcttcttccaggccacccgtggagggagaatctgattctggggatcttccagagtaccttgatactgaagttgcatcaagctcaaacacagccatacttggtgcaaacaatgcagctgagaaaggtggaaatgttgatcgcatgtcatattcaaacgatgaaatgcctttagataacctgattcatcggtctatggagctgccttctgaatttttcactgaaacattgccagtcatatctagggacctacaccctatcccagaggagagagttgttgagaacttcaacgtgcaagaaaatcatgaagcagcaattttttactgattcagttgttgccttgactgggttgcatgtaattgaagagcactttgatgatggaactgacagaactctaagctctgaagttgtttcctcatatcctcgagctaatggtgtcacccaatctccatcaagtgagcatgcagaaatcttgaatccatttgttttgatggctgctgaacataataaggtggatataagcgacatgcatggcgaagcaactgccggatatctacttgattctgatgatgaggctggtaaaatctgtgctgagcctatggaaggcagtggaattgatgaaagtttcctgtctgaattggatgtggtgggagactttggagttgaaccgatgagactggaccagcaggtgacagatcaggcttctcatggtgataaacactaccgatagtgttactgcagattctgttattagtcctcagacatctgacgatgtctccttgatcatgtcgaaagttggtgctgaagaatccagggagcagtctccattggttgatgacctaaatggctccgaattatattaagaagaaaaaaatgtttggaatcataaacacacacaaaaacattcacaccaacaaactcagattacatgcacaccttgactaagtttagaacagtaaaaaaggaactcggactagacctctgatctccatttgatatgctatattggtttaatcacaaatacatgatcttcatatgactcccctaagaatgagcacttacaacttctcgtgatgctataaggacgcacttacagatttttgcgtaaacaacgagcatcctagttgtgttttttaccagcaggcgctgctactcctgtcatacttcaaccatttgtattcacatggtcttaatggtttgatgacagctatcctgttttttgttcttatctaaaacacagtcacgcttctgtcttgcattgtaatcgtatttttctgacacttgtgaacttggttgctcaggttcatgttgtctctgctaaatatgtagtgaagtgcgataatgatacttttgtg

SEQ ID NO: 32812 - DNA, 615 bp, Zea mays
  Clone ID: UC-ZMFLMO17024F10_FLI
cgcgaatcgaggccaaggggtacagcctgctgaaggagctcggcgcgacggcggtggaggaggtgttcacagcggggggaggagcgcagaacgaccagctcgcggcgctgagcgagcacatcgacccggccgtcccttcccctctcgactactaccccctgccgaagaaaggcgagaggttcccggtctccgacccagacatgatgccaaggctgcagccgcgccctgggagcgacgcggagtacctgcacggcatactggaatcgatcgcgcgaatcgaggccaaggggcccagcagactgaggcggcctatggagctgcactgctagcactcaagggcgccaagagcttggctggctagtgtgtcttgttgtgcttggtagggctggacgaaaaactcgtagctcgttaactcgctcgactcgactcaatagtggctcggctcgactcgactcgtttataatttgtaacgagttgagcttgtatttcaactcgttacgataacgagccagctcgagctggctcgcgagctgactcgcgagccaaacgagttgaagtaattagtcaaactacaataatcttggatccaaaatagttaatcttgtactctactat

SEQ ID NO: 32813 - DNA, 1114 bp, Zea mays
  Clone ID: UC-ZMFLMO17024G04_FLI
cgtgaaggctgctgtcggggctcctgacaagcttggcgactgtccctctcacaaagggtgctgctcactctggaggagaagaaggtcccttaccggatgaggctcattgacctcagtaacaagcctggatgacctttttcaggtttctgaagatcagcccagagggcaaggtgcccgtgtacaacagcggcgatggcaaatggattgctaattctgatgtgatcacccaagtcatcgaggagaagtacccagccccgtctctggcgacgcctccagaatacgcatcagtgggatcgaagattttcccatccttcgtcaagttcttgatgagcaaggatgccagcgacgacggttcggaagaggcacttgtgcgtgagctgcaggcgctggaggagcatctcaaagcccacgggcggccctacatcagcggggagagagtaacagccgccgacctcagcctggcgccgaagctcttccacctggtggtggcgctggagcatttcaagggctggaaggtgccagaaagcatgtccagcgtccacgcctacacccaggctatgttcagccgcgaatctttcatcaagactaagcccaccaaggagcacttgatcgcgggatgggcggcgaaggtgcccaagccgcccaacctcgtcgtgccttgctggctcatctgatcagtcgcagtcggtggtgcgttgctggttcattatgattgggttgggatacaacaataatgcagcgtgccatgttccgatcacttcccagttgtggtggccatgtttctatatcacctaacgctgccggttaggttcgggaccgtgggcatctgcatcgatcttttttttttcttttctttttaagattacacaccataacatggccttgtgcatctgcactcgtgatgggcatatttgtgacgtggaaatatcttccatcttaagcgcgcgctagtgagaatgttgggcgcaaagtaggcgcgcattacatggtgtggtcgtttgtgcgcacgatgtgttccgattccgatctctcgtggtggtaatgcgatgcagatattattctgtctgtcagtttatataattgctgtttttctctaataaaagaaagtttaatt

SEQ ID NO: 32814 - DNA, 1244 bp, Zea mays
  Clone ID: UC-ZMFLMO17024G05_FLI
gaaaacattgctggcaaaaacactggcaagatttgtgaacgtgcccttcgttatagctgatgcgacaagcctcactcaggctggatatgttggtgaggatgttgaatctattttgtataagctcctagcggctgctgatttcgacgtagctgctgcccagcagggaatcgtctatattgatgaagttgataaaataacaaagaaggctgaaagcatcaatcttagcagagatgtttcaggtgaaggtgtgcaacaagcattgttgaaaatgcttgaaggaacggttgttagtgttcctgagaaaggggccagaaggcacccaaggggtgacaatatccagattgataccaaaaacattctcttcatctgcggtggtgcttttgtggacttggagaaaactatttctgaaaggagacatgattcttcaattggtttccgagcgcaggttcgttcaaatatgcgatctggtggtgtcataaatgctgagattacatcatcgctactgaaatcagttgaaagtggcgatctcattgcgtatggactaatcccagagtttgttggtagatttccaattcttgttggtctatcctccctcagcgaagatcagcttgttgaggttctcacagagccaaagaatgcccttggcaggcagtataccaagttgttcgaaatgaatgacgtcaaattgcattttacggaggaggctttacggcttattgccaaaagagcaatatcgaagaatactggggctcgtggtttaaggtccatattagaaagtatattgacagaagctatgtatgagattccagagacacgaactggaaaagataaaatagatgctgtggttgttgacgaggagtctgttggatctgtaaatcagcatggaattggagctaagattctttgcggagaaaaagctttggatgtctatctggccaatcacaacaataaagaatcaacgggccaactccaggagagaccaaacggggaatcagagatcgatacggaagccccctctagagtggccagcatgtagaggttcctggcaacaataattatgtatataaataacttattgtctgccttgtaactgtaaccaattcaaatgtaaagtcgggccatataaattcatcatgtgaccggcgctgggttgtaatttgtcatgttgaatttcgggggactgaagcttgatcttgcagtatttacataaggaaagtaaagaggatcgctttgcgtctttgggc

SEQ ID NO: 32815 - DNA, 898 bp, Zea mays
  Clone ID: UC-ZMFLMO17024H02_FLI
gatcgaggactgctacatcgtctccggcgacgactgcgtggccgtgaagagcgggtgggacgagtacggcatcaggttcaacatgccgagccagcacatcgtcatccggaggctgacctgcgtctcccccacgagcgccatgatcgcgctgggcagcgagatgtccggcggcatccgcgacgtgcgcgccgaggacagcgtcgccatcaacacggagtcggccgtcagggtcaagtccggtgccgggaggggcggcttcgtcaaggacatcttcgtgcgcggcctcagcctccacaccatgaagtgggtgttctggatgaccggcaactacgggcagcaccccgacaacacgtccgaccccaacgccatgcccgaggtcaccggcatcaactacagcgacgtgttcgccgagaacgtgaccatggccggcaggatggagggcatccctaaggacccctacaccgggatctgcatatccaacgtgaccgcccgcctcgcgccggacgccaaggagctgcagtggaactgcaccaacgtcaagggggtcacctcccacgtctcgcccaagccgtgccctgagctcgccgcggagggcaagccgtgcgccttcccggaggaagagctcgtcatcggcccacccgagctgccgaagtgtagctattgaggccggttgccaaaagagatcattgatcatataggctcttcggtgatagtctagaaaagcagtatgagaaatgcagctgaaatacgtttgcattacagtgtccatctcacattactgcttcctccgattacaatgtctggcagtggtgtaacctgtgactacaaattatgcatcaagaagaaatcagcaaaacggacatgatcattgcaaacctttttcataggtgcacaagtt

SEQ ID NO: 32816 - DNA, 1453 bp, Zea mays
  Clone ID: UC-ZMFLMO17025A11_FLI
attcttcttcaagaagtaacatccagctggctcctctgccagattcttatgacctggataggggccttctcctatcagttcaagcaattcaggcattgttggagaacagaggataccctatcattgttgggattggtggtcctagtggatcgggaaagacaagtttagctcagaagatggcaaatataattggctgtgaagttgtaagcttggaaagttattacaagcctgaacaagtgagagattataagtatgatgattatagctcattggatattgctttgctcactgagaacattatggacataaaaaagaggcataaagcggaagttccttgcttcgactttgaaaattttagccgaaaggggttcaaggagcttcaagtatccgaggaaagtggagtggtcatctttgaaggtgtgtacactttacatcctgctataaggaaatttctggatttgtggattgcagttgttggtggagttcattcacaccttattgcaagaatacagagagacaagaatcgtgctggcttttctatttctcagactgaaatcatgaccactgtgtttccactgtttcagcaatacattgaaccacatcttgtccatgctcatcttaagattcaaaacgattttgatcctgtgctctctcctgaaagctcactttttgtgttaaaaagtaaaaaacagttaccaagctgttgcatatattgaagcttctgcggtgatttaccaagatggaaagattttaatagaagttgaccatctacaaggagtgtcgactccatatcttcaaattaaagggacaaataaagaaattgttacctctgctggttctgcactctgcttggatggttcatacacaacaaagagttatcttcaaattattttggagagcttaccagctgatggtaatgtatctattggtattcacaatcaacaagctgcaaggctgcaggaactggttgagttcatccagtcacagggagggagctttaattcagatttatcgtcaccaatacgagaaacttcctctacagatagtgtgattgatgatatgcagtccaggataaggaagcttgagagatggaatacgataaacatggttttgtggactatattattgtctgctcttgttggatattccctataccagaaaaaacgtcactaggttctctggcagttttactgatagggtaggacgcatacctcattcatggcgtctgcagaactgacttgcacgcttcaggcacaaagttgtaagtgctagagaaaatgaaaagcagcatgtagatacaagatctaagacgtgagagatggcctgcgctcatgccatccctgatggcagtcttatttgtttgatcactcaatgtctgtaataatcttctcgtatgagatccatcaaaaaaatttgtgcagttaatgtgtatgaagcactaacgttgataatc

SEQ ID NO: 32817 - DNA, 1656 bp, Zea mays
  Clone ID: UC-ZMFLMO17025B09_FLI
ggaaaaaaacagagtccaaaagaaggaacagggaggtgggggaaaagcgcagggacaaagaaaggaaagggacgcccgtctcgtcacgtcctccacccccgccgccatggctgccctgggcctgctcctcctcgccgtcgtcggtgccaccaacgccgcggcgccgggcggtagaatgtccatcatctcctacaacgaggagcacgccgcgcgcgggctggagcggacggagccggaggcccggacgctgtacgagctctggctcgccgagcacggccgcgcctacaacgcgctcggcgagcgcgaccgccgcttccgcgtgttctgggacaacctacgcttcgtcgacgcgcacaacgagcgcgccgcggagcacggcttccgcctcggcatgaaccagttcgccgacctcaccaacgacgagttccgcgccgcgtacctcggcgccaggatccccgccgcccggagaaggggaaccgccgtgggggagaggtaccgccacggcggtggcgccgaggagctgccggagagcgtcgactggagggagaagggcgccgttgcgcccgtcaagaaccaggggcagtgcggaagttgctgggctttctctgcagtaagctcagtagaaagcgttaaccaaattgttactggtgagatggtgaccttgtccgagcaggagcttgtagagtgctcgactgatggagggaacagcggctgcaatggtgggcttatggatgccgcatttgattttatcataaagaacgggggcattgatactgaaggagactacccttacaaagctgtggatgggaagtgtgacatcaacagggaaaatgccaaggttgtgagcatcgatggctttgaagatgtgcctgaaaacgacgagaaatcattgcagaaggcagttgctcaccagcccgtcagcgttgccattgaggctggtggccgggagttccagctgtacaaagcgggtgtctttagtggaacttgcaccacaaatcttgaccacggtgtcgtcgctgtcggctacggcaccgaaaatgggaaggactactggattgtccgcaactcttggggtgcaaagtggggcgaggatggttacatccgtatggagaggaacgtcaatgccaccactgggaagtgcgggattgctatgatggcatcctaccctaccaagaagggcgcaaaccctcccaagccgtctccaacccctccaacgccgccgcctcccccggttgcccctgacaatgtctgcgatgagaacttctcttgcgcagcgggcagcacctgctgctgtgcgtttggtttcaggaacgtctgcttggtctggggttgctgtccgatggaaggtgccacctgctgcaaggaccacgccagctgctgcccgccgggttaccctgtgtgcaacgtcagagccggaacttgctcagtgagcaagaacagcccgctgagcgtgaaggccttgaagcgcaccctcgccaagctgaacagcgcatgagctcgtccagacatcatggatctggagaggaatgggaccgcccggagcttttcagactctgcgtcctgatacaagctttcatagataacattatattgtatatctaagtattacttggcgtcccatgaatccgttgtaaatatcaagctataatttctact

SEQ ID NO: 32818 - DNA, 2678 bp, Zea mays
  Clone ID: UC-ZMFLMO17025B10_FLI
ccgtctctctctcctaacgaagaggagagggggcagaagaaaacctcgcgcgggggaggcgcgagaggaatcgcgggggccggaggagcagcggccggtggaggtggcgcgcgcggtggccgtccgagatggagtacatatcccctgagagaaatctggaggggacttgtggagatcctgggccgttatttgccgaccaaggtggcagcttgttggaccacttgggttatcaaggaggaggaattccacaacatgagtctccaacactggatcatggacttttggttgatccagctggtgcaattccgtatttatctacagattctccgcccttcatgaatgatcaaatcacctgcaatgttataaaatctgcttcagctagtccagaatcttgtacaaaacaacctcaagaacctcttaatatagaatctgatgtacagaatgacgcagctgaacaaaatgttcacaatagtaactctgaagaacagatcacttctctgggctgtgatgtacagcagaacacagaagtaattgatgaactgttgcctccaaagcttcctgaaagcagtggtaatgatatatcaaactttcaaccggaaactatatattctgatgcctaccatggtgactctttgttaactgaaaatagttgtaatagttatcagcttaacaatagtggtgctcctgctgctgatattccaaactctcctgcacttcagatggaaaatgaggagatgggaaagttacatgagacttctcacaatgaaaacagtgggtcagaggatgatcaaatgaatggtaggaagccttgccccattagtggtcgagacaatgagaagtttaacacttcagctgtacctccctcttgggaacagacaaagcaaaaaaaccctggtaccagaaatggaagttcaactccagacgatcaatttgattctcctccagacaggtttgcaagattggaaagggacacaccatctccagatgggagagtatcccctgaaaggtttgcaagactggaaagggataccccacctccagacggggatatatctcgtccaggtgaaagttcacgtgtccattctgagacgatggagatggagccagaatatcgcgccaatgatgataccccacctccagacgggaggatgtctcatccagttgaaagttcacatgtccattctaagaagatggagtcacaacaccgtgccaaagatgttggtgagttagctcgttttgaaagcccacaggtaagacatcggtcccgatcttctgaaaaacatgaccccagccgcaaaagaacctcttcaggggagttgtctccacatgcgcgtcagaattctcctgtagaaaggaaaagacggagagagtctcgacatggtgatgggtcacctcgacagagatctgcatctccccgaagaagatctacaccccctcgaagaagatctatatcccctcgaagatcctcacacaagaggagggaatcaccaagaaggggagactcacctaggaggaggcactcacctaggaggagggagtcaccaaggaagagagactcaccaaggaggagagactcaccaaggaggagggattcaccaaagaggaggagggactccccaaggaggagggataggtcaaaatcaaggtcaccttcaagaaaacatgacacttctagacataaaaaagaacatgacagatctcggtccaggtctccccactcaagggatcatcacagacgatctccaagaaggcattcaccaagacgcagatcacccccagccagtcatcgccatcattcaccaagaagacattggtcaccacctgccaacaggaagactggattgggtaagcctggaaagaatctctttattgcaggatttagctatgccaccactgagcgagatttggagaagaaattttgcaagtttggacgtgtaacaagtgcacgtgttgttcgtgataaacgaactggagattcccgtggctttggattcttatccttggataaggatgaggatgctgatgcagcaatccgtgcttgtgacgagactgagtggaatggaaggatcattcttgtggagaagtcaaaagcacctgcatggtgaatcttccgctttgggggtgcacacgccattgttcgagagggatctcattgcttcacctttcacagattttaccattcagaaaaaaagaaactaccggtatgacatactcggtacatgtcaaagttcacccgaacctggcttttgatgctgtactaggagtaagagtattaaataatgcacttccttgctgatagttgttgaaagaataagatgtaacgttgcaccttagcttgtttcagggccctgctgctgataagagggacttagtggtacttttagtgtctgcaacctctacacgtgaaatgtgatacgtgcctgttcgtgagctgtcagttctcttcttcaccttcgtctcgcgcccactgaatactgatggcatgaacggattccgggagactcaagctttgtggtgttgttgcgactcaagggttatgttagcagttcaataatctgcatattagctttttaatgttgtgcatcctctgaatgagggtttggaaaatgtcctatatagtttgtgttttggattccagatgttgtttaattatggtcacgacacgacacctatgcccc

SEQ ID NO: 32819 - DNA, 2160 bp, Zea mays
  Clone ID: UC-ZMFLMO17025D05_FLI
ttgctctctgccgcgcccctggcccctctgtgcgagctcgttccatagccggcttcgagctcgccctgctcggtcatggcgtggacaccagacgagctccctagtgctcgctcctctccagccgagctcctcccatctctccctcgcgtcttcctctccctgccatggacgccggagttccgctactcgccatggctgtcggacgagtctcttccgtctttgctcgacatcttcgagcttggttcatgcgtgcgcgctgcactactcccatggcgtgttcctgcgcccggctggatttccctgctgagctcggtcacatgcctgggcaccgtgttctgcacgctcgccggtttcttcgcctccatcagccgcggcaacgtgctcttgctggcgcccctagtcgcaactcgagttgtctttctggctggccaccagcgtgtcgtcgagggacgattcttcactattgcttctccacggccgtcaccttccatggccggcgttcccctctcttccattgccgcgatgctccctcgctcctgctgctcgccgtggccaacagcttcaaatccttgtagcatgtctccgcactttgcgtcatcgccgtcgtggtttttggagttcgtcgtgatgcgctgccgatgatctttgtatagcgggagatcttcgcaagttcacacagcttcgtggtacgtttattgactacgtgatacggaggatcagaactgagtcgaccacaagatgtcgtcgcgcgtgagtttctccacaagatgatgctgacggacgaaactgaagatggacagacgaagcaagtatcagaacaaaaggatgatcgccaagtggtcgtcgtctaacaaacactaacgtagtgtttattctaggcaagccccggtgcatgcaaccccttccttgtgtttttaaataatttttacacactttaagtctagtgaaatgtgcattaggtttataggagttgcttggaaccctttgatgcattgccttccttgatatccatacctttatagatacttctggtgaagtatcaaaatatgatttacaaaaatgcttagccctgctcagatcttgtggatagaggttgtcttttgcattaaggcctagctcaggggttatcctgaggaaagatggcttctacctgcaagaatattttcattgagagcgtgttgggatcttactgcaaagttccctttgatgctcttttcatcctaggaacataaacaatcctaaggatggaagtacttaaatcgggacttgggctaggaacaggtgatgttctacccaggttagttaaggattggatgcgtatgtaggcctgttgatcaaggactatattaactagccacatgccctggaaatgggacagggtaagcttgaacccggctattccatacatgaaaagacaatcgcgcactgggagtggagagatggcgagagtggcacgtaccctcctggcaaaggatcgcctaaaaagggtggtgtgctctcgggtggcgcggacctgttcatgcagtggaggatccgtggggatggtagacatgtaaggtttacgagaaacatatgtcgtgtggttagagatcctcaactgagtaaatcgattcggatcgccgttatatccccggagagtggagacttgatcgctgccctgcaacctaagtcaggatgtgaacctcatgaataaaaatgatgttgtattgatgagatggtgaaattagaccagatgcaaacagagtctattaatatttaatctggcattaaaatattgaaagtaaggactcactttagtaagctaattctgcaaaagtatctaagttgattcttgctaaagcctctccttgattcccaaatccagcatacccttgagagtcttttctttagtcgggtaagccttgctgagtaattccatactcagggttttattccctgttgtttttcaggatataactttgtgctgctgtgatggtgttaagtgccggtgggctcggccttcttataagtctaagtacctcttctatacttcttattgaggatggtcacttgagctagcatatatttcaaacttatacttttgtaatcactccgataaaataatgtaaattttttgtaacccgtaaaatttggtaataagatttccgctgcaaaaatgtt

SEQ ID NO: 32820 - DNA, 2343 bp, Zea mays
  Clone ID: UC-ZMFLMO17025D07_FLI
gaaaaaaccatttcttcagtcctgtaatgttgttccgattgcgtcaatgaaaaaactgtaatttttgaccggggagatggtagcactagcatgtggggattaaagttcctaaatgttcagtactgtcctaaacacttgttttatcttttttgagtggaagtccgacgtccgagaggggctcgccattgggcttggcatgggcacagtcatgctgctcctcttctgcggctactcgctggtgatttgatatggctctaagctgatcctggagatggtgtacaccggagccaaggtcacaacatgatctttgtagtcctcactggttctcttttctcaaattgaccatggtgttgtaaatttgatcaatgaagaagattcaagaattaccgttttactggattgccatgggatttcgccattcagatttccaatgcaaatgatgaggtcgtttatcactgtggttcaagaaaactacccgaatcgtcttggggtattgtttgtcatccgccttcctccagttgtcagagttattgcacagacatttcttcaaattgcaatatcacatggtatccgtggagatgaggacgacattgcctccaagtctgctccaccggcatccatcgacggtgcaagatccagcagatagattgatggcaaagaggacgactccatgtccaggcgtactccccgccttgcatcgagattgctaggtcataatcgaagggtttacagggaggagatctgaacatagctcttcaatcccaaagttaacatcgttggttaccataattcttactgcttgcaagcccttttagaatattactgctgcgaggttcttgcaagtccttgatgaagaagtcgaaggtgacgaacgccgaggccgtcatcctgatcgacgccaagaacctcacagcgcacctccttgtgatgctcttttctccaatgtcttctcttatctacatgcaggaaaaaatctacatgttgatggcgtggatcagaaaaatggtaagttttgcttcatagatgtattaatatttggaatctcaataaacccctcttgttttccgtctgctaacatattcgtatggaacccagcacaaaactcaacgagaataatgatgcaatgatacatacatgtccacagtccatacgttttttttgaagaaataacacttttctagatgagataattagcacatgtgcaattagccaattactgtcttgtgttatgtgagccattggatttgatttttatatcctagaaagtgattcatgttacacttgacctgagattcatggaaccaattggttgagctgcacattcaaattttatttgttttaatctaatgaataacaatttgttagcagtggaaggacaagatttaagatgcactgccatggttggcggtctatttactgcatctcgaagcggcttgcattcaaaggttctgcacctctaaatatttctggtcgtgaagctgtctatgaaaggaagatgaaaattcagcaagttggattgatttatctttcccccctatggctgattcagcaacctgtattaattagtctatttgacatttgatatttcaatgctgttataggactatattgtacatgaccttgaaggagctgaccatgtgacagaccttgatcataaccatgttgcagagttgaagatattaggactatattaaacattgctgcatatagcatcagacttagaagtcaaacaacatcaaacttatcatcagaagttatatctgtgatccagcaacaacttggtttccgtcgctgcccaaacttcagcagaggcgatctaagaagaagcaagcgtatcggctcatgttctgacggccgtgttcacgtggtgtaagatctgcattgtggaatccttcgcccggacaagagagattggatcctcccgtccagacaacctgatagaacgacagtgtataagaacagggctcttaggacgccttttgtcaagttgggtcataactctaccctgagaattgagatagatgatcatgtggtgcaagatattgagtccctaatctttgatgacacacataacaaatggtaagcgtctccgtggatggagcctgaagtatattcaaattcaaggcatgccacaaagcatctcgcgtgtgggatgctccggcgtgtggaaagtagaaaagccaaataaatgggtacatgtacagcaggcgtgagttcttaaatactcagattccttgtccataggcaaatgcatagttcatacgaatcagagtacacgatgcacacaacttgatgtctctatcgttgttttcaacatgatgaacatgcgaatttcgtggtatt

SEQ ID NO: 32821 - DNA, 3481 bp, Zea mays
  Clone ID: UC-ZMFLMO17025E05_FLI
cgcttctgtctctcttctgcccttctccaagaaaccggataatccatccatccatccatccgcgatccgccccgcccacccaaggaaggaacccgatcccgactcgccgcgggctcgatcccccgcgccgacggcgacgcgtggcaggcacggcaagcgcgccgcttcgccgacgtccgcgccgcctgggggcggaatgcgtcagctgtagaggacggccacggcacctttcagccttttcctcgtctgctcctcctctcgcccgggctcggtcggtcggtaacgactcctgctgtgctgtgctcgtgcagtcgtgctccagcctccggcagcgcctgctccgcaaacagttgcctctcctgtgtgtgctcaccaagggtcaaggggccagtccatccgcccgtccaggaaggaaatcgttcatccccagaagacaaagcgatccacttggataccggataagccctgtcctcgcgttgtcgattcccgcgacaggtcgcagtgaatgacgccagaaatcagcggcccttgaggcgaagacttccccccgccttcgctgctctccaccgatccgacgaaggcagcgctcgggcactgctgctggttccccttcgcccaattcggtctgacgcaggatctcagtttctgcggcggcggagtagtagggggcagacggtgattttctgattctctcaccttggctctgtggactaaatgtgacctgcaagagctaaaagtggcagcgattgacttccagatgagtccatttgtgctggccgtggtgagcgttgcattcctcaacttgctgttcctgcaagctcatggaagcggtttgcttctgagctgtggctcgaacagcactgtcgatgctgatgggcggagatggaccggcgacataacccctgaggggaattttaccttgagcagccctgggcttgcggcgtcactggtcgggaagagcagttctgatgagatattcggaccgctttacagctctgcccgtttcttcaacgcggcaacttggtataccattagtgtgctgccaggaagttactgtgtcaggttgcatttcttcccttcgaccttcgggaatttgagcgcaaacaactccgtgtttgatgtcacggcaaatgatttcaagcttgtttcaaaattcaatgcgtcagaggagattgcttggagagcctctgtgagcaattcggtcaccagtgcagttgtcaaggagtactttcttgtagtcggtgctcgtggcctgagcattgagtttgatccaagacctgggtcgtttgcctttgtgaatgcgattgaggtcatgctgaccccagataatttgttcaatgatacagtgagcaaagttggcagtgcaggcacgcagcttcctcttggtttgagcggcagaggtgttgagacaatgtaccggctgaacattggaggccctgcacttaaatcgcccagtgatcagtatctccacaggccatggtacactgacgaagcgttcatgttttctacaaatgctgctcagactgtgtctaatgcttcaagcatagtgtatgtatcaagcaatgattcgtcaattgcgccgattgatgtttacgagaccgcaagaatcatgggcaacaacatggttgtggacaagcggtttaacgtgtcgtggcggttctatgtccacccaaactttgattacttagtccgccttcatttctgtgagcttgtctatgacaagcccagccagaggatcttcaagatctacatcaataacaagactgctgctgagagctatgatgtgtatgctagggctggggggattaacaaagcatatcatgaggacttctttgacaactcgacacagcaggcagacacactttggcttcagctaggccctgactccatggccagcgcttcaggtgctgatgcacttctgaatggtgtggagatattcaagctcagcaaggattccgacctttcttatgtgcttggtcatattgacacgggcaaccagatggattcttcaaaaggggggaagattaaaggcctatgggaagaacttggtattggctcagcatcttttgttgcggttacaagcgttgttctgttctcatggtgttacataagaaagaaacgaaaagctgtcaacaaggaggcccctcccggctggcatccgttggttctccacgaggctatgaaaagcaccacagacgcccgtgcagccagtaaatcgtcgtcggctcggaacgcctctcccattggtcataggatgggaagaaggttcggcattgcggagatcagggcagccacgaagaacttcgatgagtccttagtcattggaactggagggtttggaaaggtctacaaaggtgagattgacgagggcgctacagtggccatcaagcgcgctaacacattgtgtggccagggcctgaaagaattcgagacggagatcgagatgctttccaagcttcggcaccggcaccttgtggcgatgatcggctactgcgaagagcagaaggagatgattctggtctacgaatacatggcgaaggggacactgagaagccatctgtacgggagcagccttcctcctctgacatggaagcaacggatcgacgcgtgcattggcgcggcccgcggcctccactacctccacacaggagcggaccgaggcataatccaccgggacgtgaagaccaccaacattctgctggacgacagtttcgtcgccaagatagccgacttcgggctgtcaagaaccggaccaacgctggaccaaacccatgtcagcaccgcggtgaggggaagcttcggatacctagaccccgagtacttccggaggcagcagctgacgcagaagtccgacgtgtactcgttcggagtggtgctcttcgaagttgcctgcgcgaggccagtgatagaccccacgttgcccaaggaccagatcaacctggcggagtgggcgatgaggtggcagcggcagcgctcgctggaggcgatcctcgaccctcgcctggacggcgacttctcgcccgagtccctgaagaagttcggcgagatcgcggagaaatgcctcgccgacgacggcaggagcaggccgtccatgggcgaggtcctgtggcacctcgagtacgtgctgcagctccacgaagcttacaggcggaatgtggtggagtccgaatcgttcgggagcggcgagctggggttcgctgatatatcatcatccttcttcagccttccccacgtcatcagggagggggaggaggaacaccaccaccgctcgaagaagccgtcaagtatcagagaggaactagacacacgtgagaacttctgacttcagcaaaacaaaaacaaaaaaaaatcttgctttgtagccatgatcatgatgtaaagttgtgttacatcattctctttagttttttttttttttttgcttcttattccattggggcgttctcttgcttgacaagagtagcataatagaatttttttt

SEQ ID NO: 32822 - DNA, 2468 bp, Zea mays
  Clone ID: UC-ZMFLMO17025F01_FLI
tcgctgctacctgcattcgtccccagcgcctgctgccaccctatccctgctccattccaaccgcgattattgtttcctttgtttgggttgacggtgcagttacatacatgaatgttttcagcgcagggctacagtgtcctcctccctgagaaattgcaaaccggcaggtggaacgtgtaccgatccgcgcgttcaccgttaaggctgataagtagattccctgacaccccagacattggaacgctgcatgacaatttcacgtatgcagttgagacatttacagactgtaagtacctgggaacaagaatcagagcagatggaacaattggagactacaaatggatgacatatggagaagctagcacgagcaggactgcagtaggttctggccttatatatcatggagttcgtgaaggtgcatgcattggtctgtattttgtaaacagacctgagtggattatagttgaccatgcttgttctgcatattcatatgtatctgtgccactttatgacacacttggcccagatgctgttcaattcattgtgaaccatgcagcggtggaagttatattctgtgtgcctcaaactctaagcactctgttaagttttatagctcaaatgccatgtgttcggcttatagtgttggtggagatgatgcaaatctgccatcaacgccagtaactactggagtgcaaatcataacttactccaggttgctcatccagggaaaggctagtcctcaacctttttgtcttccaaaacctgaagatgttgccactatctgttacactagtggcactactggcacaccgaagggagctgttctttctcatgggaacttaattgcaaatgtagcaggatcaagcctaaacattaagttttacccctccgatgtgtatatctcatatctgcctttggctcacatttacgagagggttaaccagattgcagcactgcactgtggtgttgccattggattctaccaaggggataatttgaagctcatggatgatctggctgctttgagaccgacaatattcgcaagtgttccccggttatataacagaatttatactgcgattacaaatgctgtgaaggagtctggtgggctgaaagaaaaattgtttcatactgcatacaatgccaagagacaagcaatccttaaagggaaaaatccatccccagtgtgggataagttggtatttaacaaaataaaagctaggcttggtggacgagtgagacttatgagttcaggtgcttctccactgtcagcagatgtcatggaattcctgaggatatgctttggtggtgaagttcttgaaggctatggaatgacggagacatcctgtatcatatctgcaatggatattggtgacagatcaattggtcatgttggatccccaactgcatcttgtgaggtgaaacttgtggatgtcccagaaatgaattatacatctgatgatcaaccttatcctcgtggagaaatttgtgttagaggacctataatattccagggttactataaggatgaagttcaaacaaaagaagtcattgatgaagatggttggttgcacactggagacataggtctgtggctacctggaggacgtttaaagatcatcgataggaaaaagaacattttcaagttagctcaaggagaatacatagctccagagaagattgaaaatgtctatgccaaatgcaagttcattgcccaatgttttatatatggcgacagtttcaactcttccttagttggtattgttgcagttgaaccagaggttatgaaggcttgggctgcatctgaagggatccagtgcgaagacttgaggcagctttgtgctgaccctagagcaagagctgcagtcctggccgacatggattctgttgggaaggaagcacagctaagaggttttgaatttgctaaagctgttcggcttgtcgctgagccattcacagtggacaatggtctcctcaccccaacattcaaggtcaaaaggcagcaagcaaagacatactttgcaaaggaaatttcagatatgtacgcggagctgcgggaggcagaggcacccaggtcgaagttgtaatgatcaattcaaggagaagcgacatatacaggcttacagatcatatgtctagaagaaacgtaatcatctttttactggcgcagcaaataatggttcctgcaatggtcaggaagagtcgagacggaggcagtgcttggtgcaaatcatatagatgaatcctcgttatgaacctctcaactgaatgccgttttcccttgtccaacgtgccaagccacgttagcctgatactaggtagagaggaaaaagatattctgcaaatgtaacagtgaacagttaacaatcgtggtgtgttgttgcatatctagttgatcggaacgacctagagaaatgtgaagaacacgaagcgcctttctgtttgaatttaaataaggattattcgcg

SEQ ID NO: 32823 - DNA, 600 bp, Zea mays
  Clone ID: UC-ZMFLMO17025F04_FLI
ggtcatatttagtcagaatctggtcgtcagaagaagcctcccccagtcagctcctgccgcaccagcagaaatcggaggcgttaacttcaagcgcttcaggaagagggaaatggtgtctggaaacagcttcaaggacctcattccgtttgcgcgggaaccatacagagagtcggaccacgaacgtggcagcacgatgaccgatttcatgcgggaggagaagcggcagaaacaaatggaggccattgcggaggatctcttcaacaacgcaaagtccaagaaaagagcagccgctggaagttcgattcacaccctactcaccggccacagatgatgagagccaggcaggcagcaggagatcacctctatatgcgatctgcatgctcatctgttagccacggcgttagaagccgaattagtgtaggacggctgtcggatatggattgtacctgaggtcatgttagatatgaatggttctgagggaaatattagctgtgattttggcattacgcgtcgggcaagtttagcgttagtctagaatttgaccaaacaagaggattttctccggttggatgttgcgagcacgagggttttcttgggttg

SEQ ID NO: 32824 - DNA, 1102 bp, Zea mays
  Clone ID: UC-ZMFLMO17025G08_FLI
gctttggaacatccttgggcgttcgccttcggtctcctaggcaacgtcatctccttcatgaccttcctggccccgataccgacgttctaccgcatctacaagagcaagtcgacggaaggtttccagtcggttccctacgtggttgcgctgttcagcgccatgctgtggatcttctacgcactgatcaagtccaatgagaccttcctcatcaccatcaacgccgccggctgcgttatcgagaccatctacatcgtcatgtacttcgtctacgcgcccaagaaagccaagctgttcacggccaagatcatggccctcctcaatggcggcgtctttggggtcatcctcctgctcacccttctcctcttcaagggtagtaagcgcgttgtgctgcttggctggatctgcgtcggcttctccgtcagtgtcttcgtcgcgccactaagcatcatgaggcgcgtgatccagacgaagagcgtagagtacatgcccttctccctctccctctcgctcaccctcagcgccgtcgtctggttcctctacggcctcctcatcaaggacaaatacgttgcgcttccaaacgtccttgggttcatcttcggcgtggtccagatggtgctctacgtgttctacatgaacaagacgccggtggcggctgccgtgggcaaggatgccggcaagcttccctcagctgcagacgaccacgtcctcgtcaacattgccaagctcaaccccgccctcccggagaggacctccgggacgatgatgcacccagtcacccagatggcggccgttcctgccaggagctgcgctgctgaagcaaccgcgccggcgatgctgcccaacagggacgtggtcgacgtcttcgtcagccgacacagccccgctgtccacgtggtctagcctctccatcatcgcaagcaagcatgaatcgagtcgagtccgaacgcataattaagcacccaatctattgaatatataaatacgcgcgccccaacatgtgcgccatatagccgtttattccaacccttagctttgtttaattctcaaatatgcaattcaagtaatgtactttcatgcaaccaggaatttcattttcccctcc

SEQ ID NO: 32825 - DNA, 804 bp, Zea mays
  Clone ID: UC-ZMFLMO17025G10_FLI
cacagttattagaggcttacttaaatattggcctgtgacaaacagctcaaaggaggtgatgttcttgggtgagttagaagaggttttagaggcaacacagcttgcagagttccaaagatgcatggttccactcttccgtcagattgcccgtagcatgaacagctctcatttccaggtggccgagcgggccttgtttctctggaacaatgaccatatcgaaaacctaatcaagcaaaactacaaggtgctattacctatcatctatccagcactcgagagaaactccagagatcactggaaccaagctgttcgtagcctgacgctgaatgtccgcaagatcttctctgatcacgattctgcatttttcggggagtgcgttcagaggttcagtgacgaggagctcaagcaggaggaatctgattcgaagcgagaagccctatggatgcgcttggaggaaatggccgccttaaaacctcgcgaaaacagtcccttaggcgcaccgaatggcaaacccagccaagctgctggctagaatagcccaccatatcagccgcagccgtgtaactctgactctgggttgtgattttagctttgggactttttttggcgttggtttgcctctggccctgttgtaggtgggtaggatgtgtttggttttgtcaggactgtatgttcaaagtgtacacatacagaggaatttgagagatttggcatgtgtagtaacattactcaggattaccatatagcccaataaacaacgtcgattttgattgcaaatacctagtttgggtggtttatataccg

SEQ ID NO: 32826 - DNA, 878 bp, Zea mays
  Clone ID: UC-ZMFLMO17025H09_FLI
gcagatctttgtgaagacactcactggcaagacaatcacccttgaggtggagtcttcggataccattgacaatgtcaaggccaagatccaggacaaggagggcatcccacccgaccagcagcgcctcatcttcgccggcaagcagctggaggatggccgcaccctggcggattacaacatccagaaggagagcactctccacctggtgctccgcctcaggggtggcatgcagatttttgtgaagacattgactggcaagaccatcaccttggaggtggagagctctgacaccattgacaatgtgaaggccaagatccaggacaaggagggcattcccccagaccagcagcgtctgatctttgcgggcaagcagctggaggatggccgcactctcgcggactacaacatccagaaggagagcacccttcaccttgttctccgcctcagaggtggtatgcagatctttgtaaagaccctgactggaaaaaccataaccctggaggttgagagctcggacaccatcgacaatgtgaaggcgaagatccaggacaaggagggcatccccccggaccagcagcgtctgatcttcgccggcaaacagctggaggatggccgcaccctagcagactacaacatccaaaaggagagcaccctccaccttgtgctccgtctccgtggtggtcagtaagtcatgggtcgtttaagctgccgatgtgcctgcgtcgtctggtgccctctctccatatggaggttgtcaaagtatctgctgttcgtgtcatgagtcgtgtcagtgttggtttaataatggaccggttgtgttgtgtgtgcgtactacccagaactatgacaaatcatgaataagtttgatgtttgaaatt

SEQ ID NO: 32827 - DNA, 890 bp, Zea mays
  Clone ID: UC-ZMFLMO17026D09_FLI
aattgagggagacagcaagcagcgatccgaagctcaatcaattcactcgaacctcttccccaaattttcgattagattctcgttgacaagaagactagaaccgaacctgaccatgtcgctgatccgccgcagcaacgtgttcgatcccttctccctcgacctctgggacccctttgagggcttccccttcggctccggcaacagcagcagtctcttccactcgttcccgcggaccagctcggagaccgcggccttcgctggcgcgcggatcgactggaaggagactccagaggcgcacgtgttcaaggccgacgtaccggggctgaagaaggaggaggtcaaggtggaggtcgaggacggcaacgtccttcagatcagcggcgagcgcaacaaggagcaggaggagaagacggacacctggcaccgcgtggagcggagcagcgggaggttcctgcgcaggttccgactgcccgagaacgccaagacggagcagatcacggccgccatggagaacggcgtgcttacagtcactgtgccgaaggaggacgccaagaagcctgaagtgaagtccattcagatctccggctagacctcggtctgcggtcgtcgtacctgcgtggtttgaggaacggcagttcgcctcggtcgttccgtgaaataaaattgggttacaagaattatggtgtttgtcaatatggtcgtaatgtcgtaggatggtgccatggtggaatgtggtcacaaactttgcgtatgttgggtctactggtggtgtctgaatctatgtatggatgtcatgagtttgtctactagagtcccagttcctgtggtgttcgtatgatgtatatcatgaggtaacgctatctaaaatttcttcattatggtattttttt

SEQ ID NO: 32828 - DNA, 729 bp, Zea mays
  Clone ID: UC-ZMFLMO17026E03_FLI
gatgcagaggctttattcgaatcactagagaagagcattgaccaaagttctactataccaaaatgcattgcttccaagtcaaacttgagaataagcgcggatggagtaggctccataagtggcaggttacttctaggtacggccgaagttatatcacctggtgaactcgtagatacaactggcgctggagatgcattcattggagcagttctatatggtttatgcaccagcatgccaccggagaggatgctaccttttgctgcacgagtggctggttgtggttgcagaggtctgggggctcgaaccagccttccccatcgcgcagacccacgcctggctggctattgatccgaattcagaagggctgcatcctccatgaccacctgcctgcaccccatccaatggttgtgaatattccagtcccgatcagatcaaataagtcatcaactattagcagcacatcaagactatcattgtgatagctattattttgcgatgattatgcaactatatggttccaacttgctagctccaggcataccaggcctgtgcaccttttacgggtgtagaaagttatacaaattccgattgtcacgaggtgtgccctaatcaaagctaaaggtgaaattatcaaaacgatacaaaatcgattgtaaagagttcttgaagttcccaaaaagacccattaaattttctatcaataaatgtagtctaatgtatcattcaccc

SEQ ID NO: 32829 - DNA, 1900 bp, Zea mays
  Clone ID: UC-ZMFLMO17026E12_FLI
cggaaaagaagaccatgtcttatcagacgaagaaggttcttctctagccgctcacaccaagtcaaatgctacagccaagcttgattttgacttgaatgaaggaatacctggggatgatgggcatcagtctgagacaactgcctcacctgttgtatgttcctcagcaatccatttaactgggcttttgccattcacttcgcctactacaagtgggttgccgccagctccaataacagtagctgctccagctaaaggaccctttgttcctcctgaaaacctactaagagcaaagccagagatcgggtggaaaggttcagcagctacgagtgcatttcgccctgctgaaccaaggaagattttggagatgcctgctgccacacgtgacattccagtatctcatgctgctgggaagcagtctcgtcccacgcttggtttcgatttgaatgttgcagatgaccaagctctcgaggaagattttccacagagttctgcacagactacctgttcagaatctggaaatacgagaagtcgagatggctcgtcacgaagtgctggtattgaacttgatctgaacagagctgatgaagttgcagacaatggccaatttgtaccaaatgcttcacacagagttgaagtcccattgttttcgacgagatcgttacctagagttttatctaatgctggcgcaaatagctcaagggactttgatcttaatagtggacccgacctttatgatgttggcactgaacctgcaccaaggagcctaccttctaaaaatacaagcagtattcaattcctaccacaagttcctgttaggatgaatagtgatgccatgagtaataatatatcaccatggcttgtctctaccagtccttgtggtccagtagctatacagtcttttttaccatctagagaacagccttacccattggaggcagcacctggagcccagcggattattgcgcctacagctgatggtggccaatttggaggtgatccctgcaggcctccagttatttcaacgtctccagcgatggtttttcatccgcctgcatatcagtatgcaggattctctttccctccaagtgttcaccttcaaacaccagcattttcaattggatcagcaacatttaataattctgcatctgcaggagttccatattttccaactctttcctcctctcttgttgggccagccggagcgttgccttcccaacattcaaggcagtatgccataaatcttgctgagggtagcagcagtagtgtacgtgacggtaatcggaaatgggaaagtcagggccttgatcttaactcaggccctggaagtatagatttagaaggaaaggatgaacggatgcctttaccagtcagacaaaatttgatcccacccctacatggctttgtggaggatcaaggaagaatttaccaaatgccagttgtaggaacaaagagaaaggaacctgatggcagttgggactcagaaaggtctacatacaagcagttaccatggcaatgagggctctgaaggagatcattttgcaccgactggtctgcgaatgagcatatcacctgcatgtagagcttggccggtgtgttcttcagtcactggactacactcaggggattcagccccatgacgatggcgtgggattgaggaaagcgaaaacttcctgtaattgttgtagattttttcttagctgttaggcttttggttctaatttactcaggagggtatggctgcggtggaggaatctttgtgatcctgagctctgtggccgctgtaattagaccgtccgctctgtttgttggtgataaactgttgagcacatgctggagctttacataagaatttagatgtgaccttgttccttgttggggaagcgttacgtcagctgaccat

SEQ ID NO: 32830 - DNA, 2566 bp, Zea mays
  Clone ID: UC-ZMFLMO17026G12_FLI
gccgatcggactcggctagtttcgccggccgcctccaactggtcctccgctgggcgcgagggctctttctctaggcccgtagatctgcgctgctgcgccctcgttgtcgtgaaaatcactatccgtctcttggatcgagcgatcctcccattcgcggcttcgccccacacgagtcgttccaaggagccgaaatttccagcccgcccggcaggggcaggcggtacggggattcgggctctgccctgcttttatcagcaactccactggccgctgaggttctgtaggagggcggtgcaccggtggggccaggggagcatgatgagggggcacacgtggctggcgcttctggtcgtggtggtgctcgcgttggcggacgcggcggcggggaggttcgtggtggagaagaacagcatccaggtgacgtcccccgacgagctcaagggcaagtacgagtgcgccatcggcaacttcggggtgccgcagtacgggggcaccctgcacggattggtcgagtacccaaagtccaaccggaaggcgtgccagagcttcgacatctcgttcaagcccaagcaggccgggggacgacccaccttcgtcctcgtcgaccgcggagaatgcttcttcacaaccaaggcatggaatgcacaaaacgctggagctgctgccgttcttgttgtggatgacaagtcggaacctctaatcacaatggacaacccagaagaaggcaaagagcacctagaaaacatcactattccctcagtgcttataacaaagaaattgggggaaagccttaagaaatccgcggaaaatggcgatatgcttagcgttcttctagactggagagaatcccttccccatcccgatgagcgtgtagagtatgagttctggacaaacagtaatgatgaatgtggtcctaaatgtgatatgcaaatggacttcgtgaagagctttagaggaactgcacaaatccttgagaaaaagggttacactcagtttactcctcattatatcacatggtattgtccagaagcttttgtcgatagcaagcaatgcaaatcacagtgcatcaatcatgggagatattgtgcaccagacccagagcaggattttagtcaagggtatgatggaagaaatgttgtggttcaaaatctacatcaaatttgtgtattcaagattgctaatgaaactggaaagccatggctgtggtgggattatgtgcatgatttcgcacttaggtgcccaatgaaggataagaaatacaatcatgactgtgccagcgatgttatcaagtcacttggattggacatcgagaaaataaacaagtgtgttggcgaccctgaagccaatgaggaaaacgtaattttaaaggcagaacaagatgcccaaattggtcatggtaaaaggggagatgtcacaatactaccaacccttgtcatcaacaacaggcaatacagaggtaagctggacaaagttgctgtcctgaaagcgatttgttcaggattcgaggagacaactgagcctgctgtttgtttgagcgaagaggttcaaacaaatgagtgtttggagaacaatgggggttgctggctggacaaagctaataatgttactgcatgcaaggatactttccgtgggcgtgtttgtgagtgccctattgtgagaggtgtaaaatttgttggtgatggatatatccattgtgaagcttccggtattggtagatgtgagatcaacaatggagggtgctggcaggaaagtaaagatgggaagacaatctctgcctgctcaaatgaagtatctgaaggttgtaaatgtccagtgggtttcaaaggtgatggagaaaaaagttgtgaagacattgatgaatgcaaagagaaactttactgtcagtgcaagggttgcagctgcaagaatacatggggaagctacgagtgcagctgtggtgatgacaatatgctatacatgagggagcatgacacttgcatcagcaaagagggaactgccactactgttggctggagcttcctctgggttattttctttggacttgtttttgctggggttggagcatacgccgtgtacaaatacaggctgaggagctacatggattcggagatccgtgccatcatggctcagtacatgcctctggataaccaagaaggagcaaaccagcatcaggtcgtgcacgccaatgatatctgaagcggcacgccttctctggagcagcatggaggcatttcacttgtgctgctgcatcattgggcatggggttttgcaaataggtcaaactaggctcaaagatacacgggttggtgcgaggagatcaagatcatcaactgtaccatgtgttaagagagatacgttgtgcacttcttgttacgcacggcacttggatagcatagggggatgaagatgataccaccattagtagaccttcgtttccttcagcttctcttagaacttacgggttcttgctgcctcttcgcatacatgtgaatactgtaaataccgttgcctgaataaaagcttcagcctgcaaggctacaagcaatataccaatgttctgactctg

SEQ ID NO: 32831 - DNA, 789 bp, Zea mays
  Clone ID: UC-ZMFLMO17026H05_FLI
cgcgcatcctaccaggagggtgggagacccaggcagcggaggtgtgcgaagctcgcttcgcaccacgcgctgcggcctgcggggcgagagatcgaggcctgagctagggtctggtggcggagatgtcgacgccggcgaggaagcgcctgatgcgggacttcaagcgccttcagcaggacccgcccgccggcatcagcggcgcgccgtacgacaacaatatcatgctctggaacgccgtcatattcgggccggatgacacgccgtgggatggaggcacgttcaagctgactctgcaatttacagaagattaccccaacaaacctccaactgttcggtttgtttcgaggatgtttcatccaaacatctatgcggatggaagcatctgtttggacatcctacaaaaccagtggagccctatatatgatgttgcggcaatattgacctctattcagtccctgctgtgtgacccaaacccaaattctcctgctaactctgaagcagccagaatgttcagcgagaacaagcgtgagtacaaccgcaaagttcgtgaggttgtggagcagagctggacagccgactaaaactttatccgcttcgccaggcggtgtaaataaagcatctgtctttcctacttggccggtctgttttaccgttagaaatcctcagctatcgttgtgttcttgtggttcagtcccttgttgtagtgatgcctgcgggttttcctaatgtagtgctgaacggtttcataaactcggatattggtgcatatgtaacagatatagctaagtc

SEQ ID NO: 32832 - DNA, 1196 bp, Zea mays
  Clone ID: UC-ZMFLMO17026H12_FLI
gcgcacggctacaagaaaaaaaaggagcggcgcgcggccaataggaaagcttcgcgcgcgccttgagagagctggagatggccggcgagcacgcgcacgcagcaacgtatggacaccagggcgcgcacacagggatcttcggctgggcacgagcacaggagcgagcttgagggcgagcaccatgggaagtagaggagctccacggtgagctcgcgcacacaaaattcgagcagaggccgctgacaaatccgagggagagaaagagaagcagggagggagccgagcaggaaatcaatggaagaacgccctgctcaccaccgcacgtctccacatggccggacagccaacgtgctgaccaccacggccagacctgcgccgctggcctggagcacgcacctggcgcggattgctcctcggtctgcagtcgcgcggtgtggaaaggagcaggaacacgcgcaccagggaactgagcggctgaagatgaagctgcgggagggggcggccatgggagaggagctgggcaaactgagtgccgtggaagatgagcgccggctgaggagggcgcggtccgagcctgaagccgtttgagtagaagctgggaactggcgtcgaggcgattgaggttttgggcaaatcccagggcgcaacttgagggcttgttcggtttcatctcaatccatgtggattggaggggattgagtgagtttaaatccatagcaagtcatattgtctactaaaattttccaatcccatccaatccatatgatgtaggaataaccgaacaagccctgaggtggaggacgagcagagccatggacaaaaaggagcaggggcacgattcggcgacattgcggaataaggggcgctcggccgggcgcctgagctggaggagaggagcaccggcagagagagcggaggccggggagaactggcggctgggcgagctgctcggtagagcaggaaatggagacggagctagcagctgtgagcggatgaggctgagggagaagttcggctggggaaagaagtccgcacccgtgaaaaaaatcaagcgagggccggctggaggatagagccgactaggatttttttagatttttctgttttcttcttaatttttttaataaagaaaattgctgatatattggattaagatttttagtgatgtaaagtgggtctgccagctatacggatac

SEQ ID NO: 32833 - DNA, 1636 bp, Zea mays
  Clone ID: UC-ZMFLMO17027B09_FLI
attgcggtcaaggcgtcaagtgtttgtgactggagcttgcagagtcagctaagttgcagttttcatgccgggactacagtgatcatcttgcacttgttcgtgcatatgatggatggagggaggctgaaagagaccgtgctggttatgactactgctggaaaaattttctttcggtgcaaacattgaaagcaatagattctcttcggcggcagtttctctttcttctgaaggatactggtttggttgacgaaaacatgactatgtgcaataaatggagtcgtgatgaaaatctagttcgggcggtaatttgtgcaggactgtatccaggtgtttcctctgttttgaacaaggagaaatccatctccctcaagacaatggaagatggacaggttatgctttattcgagttcagttaatggtaaagaaaccaagattccattcccctggctagttttcaatgagaaggtgaaagtgaattctgttttcctccgggattcaactgctatatctgattctatactgttgttattcggaggctgcataaaacaagggggcttggatggacacttaaaaatgcttggaggttatcttgagttcttcatgaatcgcgatcttgcttcaacttatgtgagtttgaagagagaacttgagaatttaatccattgcaagctccaaaacccaaggatggatatccaaacgagtgaagagctgctatcagccatccgtttgctggtgactgaggatccatgcagtgggcggttcgtgtacggccgacaggagccaagatcaaagaaagcaaagacgatgctttcgccatcctctctgagtgaggctggtggcaacggaggggataatgccaagaaccagctccagacttacctgacccgggccgggcacagcaaccccacctacaagacgaagcagatcaagagctatctcttcagatcgacggttgagttcaacggcatgcagttcgtggggcaaccgtgtgcaaacaagaaacttgcggagaaagatgccgcgagcgaggcactgaactggctcacaggagatggtggagcgattactgactctaggggggctcaggatgcagaccccatgtccttgctgatgcaaccaccgcgtaggcgtcgacatagccatcgtcggaggaactgattagcacgacatgcttttcttcctttttgatcgttttcttatttatgtagcattcgagaagcatagttaagcatagaaggtagcgaggaaaaaatgttatagactcttgaaatgtactacaatagttttgacgtgcagtgcctgtgaattttagagcatggttcgtcagtggtgacggtgagtgatgggctgatggcgtgcgagaatcgcagagaacactagctgtaacggtcgaagggtgatccaatttttttttttgctgtgggtactgaattcattatttgttggcgccatattaactgaagagttatgcgtagtgggcaagggcagccacgatgtatgtatttagactaaggtagtctaaatgagggggctcgtgtcaggtatcattgtatgttgtcagatgcggagaactggagactaagactatccgccggttttctctaaatttctaactctatatcaattttttttgtcac

SEQ ID NO: 32834 - DNA, 941 bp, Zea mays
  Clone ID: UC-ZMFLMO17027C06_FLI
aaaccctagcttccgtcacccacacagccggcgaggtggcttccatctcgctcgtgggccgatctcactgagcccccgccgttcttctctccacttcctgcgttctccagccgccgtcttcgctgataggctacgccgcccgctggcctgcgcgcgccgcagccttaccctgtgtgcaccctgttcctaaccctgcgtgtggccgccgccgactggcttgcgtgcgcccgcgcctccgcctaaccctgctagcttgcgcgcccaacgccagatgccctgagcccaccgccggctgtctgtgcacgcaagtgaacccatccggctacctgggcacgccatccgacctccctgcgaacctctgtatcggccgatattcctcaagaacacagtgcaaacagtaacacatcagcaagttcgagactgccaaaaatatgcaaggcagctggctggaaagaaccatcatttgactttgaagaacaaggacctccgcataacagagtattcacatgcaaggtgaccgtccacctggatgaactggtcaacaccattatggagtgtttcagcgaccccaaacctaagaagaaagctgcacgggagaacgccgcacaaggggcattatggtgccttgagcgctctggttatgtcaagtcatcttcagatgttcctgacctgtgcggccatcagcccttctgctagccagatctacccttgtaggagtattaatgttggtagacgggtgcagcttgttgctgtggcacagtggttatccatgcactgatgccatgatactcttgagaagttgagtcccttatgaatcttgagccggctgtgttggctcgtgtacctagtctctagctcgtttggttacatgcccaacgcctgcacttgtactgtgtaaaatactgaactccggcgatcaatgcaatcaaactggaactcct

SEQ ID NO: 32835 - DNA, 2669 bp, Zea mays
  Clone ID: UC-ZMFLMO17027D12_FLI
gggatttttctatctgaatatcatgatgagactgaagagcccttacaaccatatgaacctccaaaagtatttcaatggcgatcagaatttggaagtgaacttttaaagttgaggctggagggataccaatggagtacaccttttagtatcaatgctaatggagttatgtgtgtgctcatgaacagcacaacaggaaatgatcaggcttttgtcagggtaaatgtgagaagtggaacaaaaagttcacggcatgaagttgtatttcagcttgattgctggtccagcccatacagggtggagaatcgctccatgttcttgcctatacggtttcggcagtttggtggtgatgatcattcatggcgtaatctgcttccgaattcatcagcttccttctttttggaggacctgagcagaaggcatctattggaagttttggttgatggaactgaccctatgaactccatgacatatgacatcaatgtcgtaatggatcatcagccccttactaattcagatgcccttaagaaggccttacgtgtcactgtcttgaaggaggggaaattgaatgttattcaaattattgattggctgccagataatagaaatcgaggacagataactgaaaggatgttatcaccaatctttcagccatcagaggtcgactatgggcagtcatctcctgatctggatagtgaatttcatgttactttggaactaacggagcttggcatttctgtaattgaccatatgcctgaggaagttctttacctctcagtgcagcaactgttacttgcatactcatctggaattggctctggagtaaatcggctcaaaatgcggatgcattggattcaagttgataatcaattaccatttgttcctatgcctgtacttttctgtcctcaaaagattgaaaatcagtcagactatattttcaagttctctatgacagttcagaccaacaattctcttgatttttgtgtctatccttatgtcggtgtccaggttcctgacaattgtgtgttctttgttaacatccatgaaccaatcatttggcgcctccatgagatgattcaacacctaaaattcgataggatatatagcaatcaaccttcagctgtttcagtggaccccatactgaaaattgggcttctgaacatctccgagatccgatttagagtgtcaatggcaatgtccccaagccaaaggccaaggggagtatttgggttctggtcgtcgttgatgactgcattgggaaacatggagcatatgccggtccgtatagctcaaagataccgggaggaattgtgcatgcggcaaagtgcacttatgaactctgctatatctaacattcaaaaggatcttcttagccaacctcttcagctactttccggtgttgatattcttggtaatgcgagtagcgctctgagtaacatgagcaaggggatagctgcattgtctatggacaagaaattcattcagggccggatgagacaggatagcaaaggtgtggaagactttggggatgtcataagagatggaggtggtgctcttgcaaaaggcatcttcagaggtgtcacaggcatattgacaaagcccatcgagggtgcaaaatcttctggtgttgaaggttttgtgcaaggagttggaaagggtataattggcgcagctgcacaaccagttagcggagttcttgatcttttatcaaaaactactgaaggtgccaatgcggtaaaaatgaaaatatcatcagcgataatggctgaggagcagttgctgcgtaggcgtcttcctcgagctattggtgggaatagtttgctctatccttatgacggacacaaagctactggccaggctatcttgcatctagctgaatgtgctacattccttggtcaaattgatatttttaaaatccgaggaaagtttgcttctaccgatgcttatgaggatcattttttacttcctaaggggaagatttttttaatcactcacagaagagtactattgcttcagttaccaatgatgacccagcgtaagttcaatcctacgaaggatccttgttcagtaatatgggatgtattatgggatgatttggtaacagtggagatgacccatgggaaaaaagatcctccagattcctggccttctaagcttattttatacttgaaagctaaaccttcaaattcgaaggaaattgttcgtttggtcaagtgtaatcgaggttcagatcaagcatctatcatttactcggcaattgacaaagcttataaagcttacggtccaaactcgttgaaggaattcttgagatggaaggtaccaaggccatatgcccctcgcaatagtagtggccgaagtatccaagacttatcatttggttaaaaggtcaacacaaatgcacactttagtgttaaacacagtagaatcttaggatgaaggtattttaggttgacacttttggttaccaggcaaatgatatattctacatatacactataggtatcagaggataggtactttgccttcatgtaaatagatatattttaggaggcgccggtattcatgtaaatgtgaacatctctgttataaagaaaaaaataataatgcaaattatgcaagattcattgctgctgtcttgttgcaatgtttaatgtgttctcttgcgattgtct

SEQ ID NO: 32836 - DNA, 880 bp, Zea mays
  Clone ID: UC-ZMFLMO17027E09_FLI
gccggccgggtggccatcgtgacaggaggcgccgggggcatcggctcggcggtggccgcgcacctggcgtccctgggcgcccgcgtcgtggtcggcttcatcggcgacccggcccccgcggaccagctcgtggcggccctcaacaactcctcgccggcaggcaacagcgacccgcgcgccgtggcggtggcagcggacgtgtcggacccggcgcaggtggcgcggctgttcgacgcggcggaggcggcgttcgggccggagctgcacgtgctggtggccgcggcgggggtgcaggacgcgacgtacccgcggatcgcggacacgtcgcccgagcagtgggacctcgcgttcggcgtgaacacgcgcggcacgttcctgtgctgccgggaggcggcgcggcggctggcgcgcggcggcgcgggccgcatcgtcaccctctcgtcctccaacgtggggtcgctgcggcccgggtacggcgcgtacgctgccagcaaggcggccgtggaggccatgacaaaggtgctggccaaggagctgggcgggacggggatcacggtcaacgccgtggcgccgggccccgtggccacgcccatgttctacgcgggcaagtcggaggagcgcgtggccgccgccgcgcgcgagtgccccatggggaggctcgccgagccggcggacgtggcgcccgtggtggggttcctgtgcaccgacgccgccggctggatcaacgggcaggtcatccgagtcaacggcggctacgtgtgagtgtactgtgatgagagggaggaggcatagctagctagcttagcttggagtgtcagcgtgtcaccaaccgacaattacacgtgctccttcccttaataataataataataataataat

SEQ ID NO: 32837 - DNA, 1173 bp, Zea mays
  Clone ID: UC-ZMFLMO17027H03_FLI
aaaaaattttaaaatctttttattggatagtttacgtgagtattgttatgagccatcgcaacacacgagcaaccgactagtatataatggtagggcagattgtgcacagattcctgatctcacacgtccctctcgctatggatgttcacttgttctgttctatagacttttctgagttttctcgttgacgcaaagtagaaatgtacaagtttctctactccgaacgcatttcatggcaaacgcgggccgcggcctaccgcgcacacaaaaaaatcacaaatcaaaagcatactatcagcgcaaacgcgggccgctgcctaccgcgcacacaaaaaatcacaaatcaaaagcatactatcagcatagaggcatggttcctggggttcttgattcgaaatctccatctcatcgccatgcacacttccttctgtgcagcatcttcatattaatctcctccaacacagcaacgctatcatcagcgcaggccagcaataggtcagaggatgatcggcaagccctcctttgcttcaagtctggtctctccgggaactctgttggtgtcctaggatcatggagcaacgactcactgaacttctgcaactgggaaggggtcacctgcagcacggccatcccaatccgcgtggcatccttgaagctaaggtcagtgcaactcagaggaaaactgtcaagttgtgtagcaaatcttacttccctagtgcagatggatctctcaaacaattcgatttctggggagatacctgatgaaataggttcactacccctacttcagactttgattctctctgccaataagtttgaaggtagcatccctccatcattgggcatggctgcatctaacaattcattgcttaccactctaatcctctcgaagaaccgcctatcaggggagattccacatttccataagatggcatttctgcaatctcttggccttactggaaatcttctttccggaaacattccaccgtctttgggaaatatttcctccttaacttccatcctactagcagagaatagtttaagaggaccaattccagaaactttggctcaaatccccaagttggacattctagacctaagcaacaacatgttgtcagggaacgtccctgacctgctttacaatgtctcatcactcacatccttcaatataat

SEQ ID NO: 32838 - DNA, 531 bp, Zea mays
  Clone ID: UC-ZMFLMO17029A07_FLI
cagaggtagaggtagagggaaggccgacaagaaggtctactccttgcccggccagaagttcgatcctccggaggagagggagcctctcaggattttctacgagtcactgtccaagcagatcccctccagtgagatggctgaattctggttgatggagcatggtatgttgtctcctgagagagcaaggaaggcatatgaaaggaagcaaaagcggcagcagcaagtgaggatgggtaccccaatcaagtcttgtgcagtgagaaaagataataaacctgaaagttccaagaagccaggcattatggattccaaggcaaagagaagagttgattacagtgaggacgacgacgatgacttcattgtgaaaatgaagagatccaggggatgacatttactttacttgtaattttttttattaattatatcaagtacagataccaaaaagacatgctttatataagctagggtcctaattaattaaaccctgcaactgtacccgcatgcatcttgaatagatatactgaggtttgc

SEQ ID NO: 32839 - DNA, 1639 bp, Zea mays
  Clone ID: UC-ZMFLMO17029G01_FLI
gagtttatgaataaaatagggttgatgttgcctcagaagtactcacaacttgggagtgatggcttattggcttttgtgaataactttctgaaggagcacttcttgccagcaatatttgtagattaccgaaaatgcgttcagcaggccatatctagtccagcagcatttagaccacgtgtacatgcaacatcagcatatagttcatcggtggaacttggacgccctgtgcttcaagggcttctcgccattgatataatagccaaagaggttcttggatgggttcaattgatgccaaactatgcgactgagcttgtggagtatgtacgcacatttttagaacgtgctcatgagagatgtcgtgcatcatatatggaggctgtccttgaaaagcaaagttatattctcctttcaaggaatgacattgagagtttaatgcgcctggaaccagcaaacatttctttgcaaaattctactggtgaacatgataacaatgcaacaggtgcagaggcagtcgaagtagagattgaactaagtgatctcttattagatatgtgcccaataaaacaggaaaacttgatccatgacgaccagaaactgatattgttggcttctcttagtgactcattggaatatttagcagattcagttgaaaggcttggggaatcattcataagtccaccaaccacttcagagagcataaatcatagccatggtcgacatgcccgctcatctagtgcaattccaaaaagtctcgcgtctctggctaatgagtacagaaggttagctgttgattgtgtcagagtattgagattggaaatgcagctagaggcgatataccacatgcaggaaatgaccaaaagagaatacgtcgaagatcaagatgctgaagatcctgatgactttattatctcccttacaactcagattgcacgacgggatgaagaaatggctccttatatcacggaatcagaaaggaattacatatttggtgggatttccagtgttgctgctaatgcatcaataaaggcacttgctcaaatgaagtcaataaacttgttaggagtccagcaaatatgcaggaattcgatagctctggaacaggctcttgcagccataccttcaatagatagtgaagcagtccaacagcgattggatcgcgttcgaacgttctatgagttgttaaatttgccttttgagtctttgcttggattcatcgcagaacatgaatatttgttttctgctaaagaatacctgagtgttctaaaggtcaatgtgccgggtagagaaatacctgcggatgctgaacgacgcatctcacagattttgggtcactagatctaatcagacacaatggtgctatttttgactggttatgccttatgtgggctttggctaccaaatggttctccacctgtttccatggcggtgtttgtgtagatttagctggtttttgctatttagtaattttgtttccttttgtatttcacgtgatatattcttttgtatgtcttatcagttatcattgattgtaaatttgtagtgttccggataaaattttcattattgattattgtaaatgtgttatctgtctggatgcgatatttaataagctcatcagattcagtgtcctgtatggtgc

SEQ ID NO: 32840 - DNA, 1313 bp, Zea mays
  Clone ID: UC-ZMFLMO17029G06_FLI
gacccagctcgctcgtcccagctgatcaggtcgagcacctagtagcgacctgctcgatcatcagtgtagagtgtcggtaggtgtctgtctctcttggtggctggttgcaacggtcatggcgacgtcgtctcgtcgggtgcccttgctgctgctgtgcctgggcgtgctggtgtcctgctccttcgcggcgggcagcttggaccaggagctggacatcacgtggggcgacgggcggggcaaggtccttgacaacgggcggctgctgacgctgtcgctggaccgcacgtccggctccgggttccagtcccggcacgagtacctgttcggcaagatcgacatgcagctgcggctggtgccgggcaactccgccggcaccgtcaccgcctactacctgtcgtcgcagggcggcgcgcacgacgagatcgacttcgagttcctgggcaacgtgtccggcgagccctacacgctgcacaccaacgtgttcacgcgggggcaggggcagcgggagcagcagttccgcctctggttcgaccccaccgccgacttccacacctactccatcctctggaaccccaagcacgtcatcttcatggtggacgacatgcccatcagggacttccgcaacctggagagcaagggggtggcgttccccaagagccagccgatgcggctctactccagcctgtggaacgcggacgactgggcgacgcagggcgggcgcgtcaagacggactggtcccacgcccccttctccgcctcctaccgcgggttcaaggccgacgcttgcgtcgccgtcgcgggcggccggacccgctgcggcgccaccgtcggcaccgagggcaccggcgcccccgcctccgccgccggcgccggggactggtacaaccaggagctggacctcaccctgcagcagcggatgcgctgggtgcagcgcaagtacatgatctacaactactgcaccgaccccaagcgctaccagcagggcctccccgccgagtgctccatgcagtagcgcccggttattcctcgcccgtccaacaatggcgcgcgcgcgcgtgtgtgtgcatgtggtccgctctactgctaccgctacgacgatcggtgtcgatcaccggatcaaggcaagacgaaaggcatcgaaacatggtagataaataaaggacttgacgatttgtaacgcagtagctggtgcgtgcgtggtgtggtggtaagaaattcttctgctgcctgtgttcttgtagcctcctcgtcctcgcccaccctgttggtacgtgtacggtgtacgtagtctgccgccgcgcgctgttcgtgtt

SEQ ID NO: 32841 - DNA, 679 bp, Zea mays
  Clone ID: UC-ZMFLMO17029H05_FLI
gtgaagacattgactggcaagaccatcaccttggaggtggagtcgtctgacacaatcgataatgtcaaagccaagatccaggacaaggagggcattccaccggaccagcagcgcctgatctttgctggcaagcagctggaggatggccgtaccctcgccgactacaacatccagaaggagagcaccctccacctggtgctccgcttgcgaggtggtatgcagatctttgtgaagaccttgactggcaagaccataaccctggaggttgagagctccgacaccatcgacaacgtgaaggcgaagatccaggacaaagagggcatccccccagaccagcagcgtctgatcttcgccggcaagcagctggaggatggccgcaccctagcagactacaacatccagaaggagagcactctccacctggtgctccgcctccgcggtggtcagtaagccatggttcatttaagctgctgctgtacctgggtatctgcgtcgtctggtgccctctggtgtacctctatatggatgtcgtcgtctaataaacatctgtggtttgtgtgtcatgaatcgtggttgtggcttcgttggtttaatggacctgttgtgtcctctgtgttgtacccaaaactcttctgcagcagtatggcttgaatccttatgaagtttgatatttgaactt

SEQ ID NO: 32842 - DNA, 598 bp, Zea mays
  Clone ID: UC-ZMFLMO17030B04_FLI
tctccggaaaatcatagtgcagggaaggtcttccaagtcaactaaggttggcgacatcatgactgaagagaacaaactgatcacagtgaatcccgacaccaaggtcctgcaggcaatgcagctcatgacagaaaaccgcgtcagacacatcccggtgatcgacggcacggggatgctggggatggtctccatcggtgacgtcgtgcgcgcggtggtggccgagcacagggaggagctgaaccggctcaatgactacatccagggaggctactaggacggcgtgtgaagcgacgaccccctccgatcctgccagtcagtgaagtccgcctttgaaatccaataactcggaacaatgatgatgacgaaataggccgtgttttcttggacaatgatgttaagttcggcaatgttttcctttctcttttttcctactgcgtggtctatgtgtatattgccaaaggcatgcgtgagccatgcgccggccggtgctgtgctggggcgcagagaccatctgatggtggaaacaccggaaataagagcgtgccgctgtgtgtttcctttgaaggaatgaaaatggtgttcgtgttgtgcattgctt

SEQ ID NO: 32843 - DNA, 1083 bp, Zea mays
  Clone ID: UC-ZMFLMO17030B05_FLI
gcacaagccgacgccgcccacgtacaccccgagccccaaacccacgccgccgacgtacactcccaccccgacgccccccaagccgacgccacccacatacactcccgcccctacgccccacaaacccacaccaaaacccactcccactcctccgacgtacaccccgacccccaagcctccgacacctaagccgaccccgccgacgtacactccaagccccaaacctccgacgcccaagccgaccccaccgacgtacaccccttcccccaagcctccgacacctaagccgaccccgcctacgtacactccaagccctaagccaccggctaccaagcctcccacgcccaagccgaccccgccaacgtacaccccttcgccaaagcctccgacacccaagccgaccccgccgacgtacaccccttctcccaagcctccgacgcccaagccgaccccgccgacgtacactccaagccccaagcctcccacacacccgacgcccaagccgaccccaccgacgtacaccccttccccaaagcctccgacgcccaagccgaccccaccgacgtacaccccttccccaaagcctccgacacccaagccgaccccaccgacgtacactcccacaccgaagccgccggccaccaagccgcccacctacactccgacgccgccggtgtctcacacccccagcccgccgccaccatactactagaaagcgatgcctaccataccacactgctgtcagtctctggagcatttaggtggtctggatcaatggaagggttgtgtcctagccagccggcaaagatgagctgctgatggtaatgatgatgataagaggccactgctaccctactacgtaccctcctctttgtgtgctgccatccgtccccgttagacgatcgaggagagaataacgcagagctctctgctcccggcctgtcttctgccgtcccggccgtttaatttactagtgtgttcgtcctatatgtttagcagcagcaggtgtattgtgcgggtatgtaatggtattgcaactatattgggtgtaaaaccataataaatgtgggcaaatatgcaagg

SEQ ID NO: 32844 - DNA, 1425 bp, Zea mays
  Clone ID: UC-ZMFLMO17030C03_FLI
agcagaagacccctcaattgctggcatggttctggatagtgctttcgctaacttatatgacttaatgatggagcttgtagaagtttacaaaatacgagttcctaagttcacggttaagatggctgttcagtacatgcgatgcgtcattcagagaagagctaaatttgacataatggatcttaatgttgtccagtttgcacccaagacgtttattcctgcactatttggacatgcttcaaatgatatgtttattcagcctcatcacacagaccatattcatcaggcttatgcgggggataaaaatctaatcaaatttgagggtgatcacaattcgccaagaccccagttttattacgactctgtttcaatattcttctacaacgttcttcacccacctcagtttccttcaacctgcacacataaacttgataagtattataaccttggtgcttttaagggtgctgctggtactaatgagagcttattgtatgagatcatcaatggtctacgggcagctggcactgatgcaggaagttcatcagctgctacagctagtttcacgaatgctacaaaatcagtagttgaattgctgacagagagggtaaatcagctatctgttaaaaatgataatgacttggattttcttttggatgaaaaccataaccttactgagatggacggtaacacaggagagtgtcatttagaggataaatcaaacagacaaacagatgaatgctgttcgtataccagctcaaaccgagagagctggggaagatgttcttccttgggtggagctagtgatggattgtcatcaggcgaacagcctgagatacctaatcataagcttaagagcttgacactaagggctctagcaacaccactgagacgggtacgaaggaaacctctcgcgatcccgaaggagaagaatcgatcactgtggaagaggttgaaaaaggagaggcaacagatgggggaaaacatatcccagcgtctgcggttgtgtctccaaggccaggctcgacacaagagaaccaaatcgtcttgacaactgtggatacatatttagctcttggacaaatctgctaggaactcactgatgattcagcaaccgagccgcgccgcaatttggagcttctggcactcagcgccaatggtgccgtgtacattggttgaagattacctagaaatcttagatcatggattgtcccggacccaatgtgttaactgtcagtctttaatgttcgtttcttatgttttttttcaatgtaatcctgtaaaattgaaggctagaactgcccctgtacttgtggttgggggaggggcaccggttcgttgcttttttcaggatttgtgtagggtttggaggtcgagctgtatcgacagaatctcattttctatgttgctcggtaacgtctctgatttgct

SEQ ID NO: 32845 - DNA, 1626 bp, Zea mays
  Clone ID: UC-ZMFLMO17030D07_FLI
taaaaataatgttaatggtacctaataatagggttctgtttggctgcatgaataagcagcagctgcccttctactgctgctactgatctgagagagaagagaagcacacttgcaacagcgacagtttctttctacaagggatacaacatcaacttactcatcctatctcccatcccatcttgtatttttaattttattatgtggacagtataaaggagtggagacggtgtacatcctctttgtcaggtgccatgcgagggtgaaatgggatctgcaagcctacatgggctctgattgttctttccttcttttttcaattacatcggttcgattcaatctcagtacctagaaatgaatttgcgaaactgatgagccatcatgtggtttttcctacctgtcgtgacatggtctctgcagaatctgacattcctatttacagtacatgtacttactgatcgactctgattcagatgcttgatatttttaacgctgacaaaatttaccaggtctcgtgaatccttctaagcttctggctagcattgacgaacagatagcgaaagccagagaggagccatccaggagagaaatcatggagaagataaaaaatggttgctggcttgcgaggaagaaaatgcctggaggagtacaatatggtaggtataaattgtgggtttggatacatcgaacactaatttcaaatgtggaagacagataaagaccaggcaaactatattgaatgggagaggataaagcatatcaacaaatgagagggatatctcaaggtcatagctggtgtggataaaaacatcaatgtgacatcaaagggtggagatgatgagttctcagagctatatacattcaaatggactaccttattgatacctcctaccacctcgcttctattgaacttcattggtgttgttgttggcattttgggtgattgcattacctcccgaggcactgaggtcgttctcaatttatttggtagtgttgacttgatccttggcggcaacccctggactggtctttgagttgcagcagagcgttgtcactaggaacgccatgatacacgagtatgcgtgcgacaacgcggaggcgcaggagtgggcgttggagttgtttagtgcgatgcaggcggaagggttggcacaatagagtgagattatgttgcccatgttgtgctgtgttgggctggctccagggcgagactggctggtggagctttttaacgcgatgcaggcggaagtttgctcggaaggtgatagcatgtgcatatggactatacgcgatggattggataggtgaatcaattctgataagtgttggagcacaagagtggaattcaagtgtacacaatgtacatcaaaatggcgaacaatctatgtgacatcattttaacaagtgatccagaactcatttgactgacagacggtgccagcaaaggtgttatgcaaatgctgaacaccaacactagaaaataaggatggggaaataattgttctttaaaaagatggaatggcagggtaagatatgctaaagggaaaacatgatgtggctaaaagaaatagccctttggactttgtaatgcaaaacttcatttcacaaacaatcatttccttgttgaac

SEQ ID NO: 32846 - DNA, 1951 bp, Zea mays
  Clone ID: UC-ZMFLMO17030G08_FLI
tggatgggaagctgaagctcacagagtctctccttgaaagcaaagtaatggaggacctctttccttttcactcttgtccatttccctgttttgttttttttccttgtggaggagcagagcagattttgataatatgcaagattgcagaaccttgaagcaaagaaaatcaacgacgaaaaaaaagcagcgcttgccgcacagtttgcagctgaggcaacactacgaagggttcatgcggcacagaaggatgatgacatgcctcctattgaggccatccttgcaccactggaagctgagctgaaactggcccgtcaagagattgcaaaattacaagatgacaacagggcattggatcgtcttacaaagtctaaggaagcagctctgcttgaagcggaaaggacggttcagatggcactggcaaaagcttccttggtggatgatctgcaaaacaaaaaccaagagttgatgaaacagattgagatatgccaggaagagaacaaaatcttggatagaatgcaccgccagaaagttgctgaggttgaaaagctcacgcagactgtcagagagctagaagaatctgttcttgctggtggtgcagccgcaaatgctgtcagagactaccagcggaaagttcaggagatgaatgaggaaatgaaaactcttgatcgtgagctagctcgtgcaaaggtttcagcaaatagggttgcagtagtggtggcaaatgagtggaaagatggcgatgataaagtaatgcctgttaaacgatggctcgaggagcgaaggattctgcaaggagaaatgcagcaactccgggacaaacttgctattgcagaaagggctgcaagatcagaagctcaactgaaagagaagttccagctacgacttaaggtactcgaggaaggattgagaatgtctacatcgagaaccaatgtcagtggcacacgccgccagtctattggtggtgctgatggtttgtctaaggccaacggcttcctgtcaaaacgcccatcattccagatgagatcaccagtgtctaccacaacgactctagtgaaccatgcaaaaggagcgtccaagtcgtttgacggaggctgtagatcacttgaacgctataagggccatgtaaacgggaatggtatgaacgtatctaccgattccagtgaagataaagattcaaacaactcagatgagaagtgtaacgagtttgcatctgctgagtcggaggactcggtgtcaggtgttctatatgatatgttgcaaaaggaggtcatttctctaaggaaggcgtgccacgaaaaggatcagaacctgaaagacaaggacgacgcagttgagatgttggcaaagaaagtagatactttgacaaaagctatggagtcagatgccaagaaatcgaggcgcgagctagctgctatggagaaggagctggcagctgtgcgcttggagaaagagcaggataacagggcaagacgttttggtagttcaagcggttctgccagcagttcgcagctcccacctggcaggactttacctaggagcggctcggcgcgcaacatgtgaaggcatgtaggaattgaccgaatatggctttgatgatccttacttggattaggactggtgactgggaaggaacctctcattgtcctggagaagatggcatcagcggaagagcctcttctgcctacatctcgtggtcgcagggatgaactactttgtgtctaacatctccggctagtgttttcttttcttttgttttgacgacgtgtcattcggtggtgattgctgttgtttcttttcttttggcaatttgatgatctttgttggtgctgtataggtttggtgaggcgttgctcctttttcttctttggtttgtttgttcgacatatccgtcggtctggatgtttacgatgtaaaatgtacgcactgaagagttgcttatggtttgcctgat

SEQ ID NO: 32847 - DNA, 465 bp, Zea mays
  Clone ID: UC-ZMFLMO17030G11_FLI
gcttcactcaagcaactttacttattcaatttgcaggaacaaatgttttgtgaagcaaataagtgtcttcgaagaagactggaggagagcaaccaggttatatggcagcatgcgtgggagcaaagcgagcggcattctgaagtgcagccgcagcagctcaatggcaataacttcttccatcccctcgatggtgctggtgaacccacccttcagatagggtatccttcagaggcactgactagctcatgcatgaccaccttcctgcccccgtggttgccatgagatcgaactactgcgcaattccgaattaataagcatggccgcatgcagctgcctgtgctatacgttgtgcttggagtgtactttaaggttcttgcatggcaagtatgtgtgtaacatttgtgatgaacatggaaactatccacttaattctcgaataatcaatgaactgggtaagattgtaac

SEQ ID NO: 32848 - DNA, 1090 bp, Zea mays
  Clone ID: UC-ZMFLMO17030H12_FLI
gaaaggggtattgctttcccaacctgtgtatccgtcaatgacacagtttgccacttctcaccgcttgcaaccgatgatgccgttctggaagaaaatgacatggttaaaattgatatgggctgtcatattgatggctttattgctgtggtggcacatacacatgtaattacaaatgggcctgtcacaggaagggctggtgatgtgcttgctgctgccaacacagcagcagaagtcgcaatgcggcttgtgagacctgggaagaaaaataaggatgttactgaagcaattcagaaagttgctgctgcttatgattgcaaaattgtggaaggtgttcttagccatcaactgaaacaatttgtgattgatggtaacaaagttgtgctcagtgtctccaatgctgatacaaaggttgatgatgctgaatttgaagaaaatgaagtatatgcaatcgatattgtcaccagcactggggaggggaagcccaagttattggatgagaaacagaccaccatctacaaaagggccgtagacaagaattatcacttgaagatgaaagcgtcaaggtttattttcagtgagatcagccagaagttcccaatcatgccttttactgctagggcattagaagagaagcgtgcgcgtttaggcttggtggaatgcatgaaccatgaactattgcagccgtaccctgtacttcatgagaagccaggcgatcttgttgcacacataaagttcactgtgctgctgatgcccaatggatcagataagataacatcacatcctctacaggagttaaagcccaccaaatccattgaagacaatgcagagataaaggcatggcttgctttggggacgaaatcaaagaagaagggtggtgggaagaagaagaaaggcaagaaaggagatgcagcagaagcagatcccatggaggaggcgacaaacggtgctacaagccaagaataattctgatttttggaattactgccaccagcttttttcttgtttcttcgctgcatctgatggtgttatattacattcagttgtggaaaaattgagtactatttctagcttctaagaaatgaagcatcct

SEQ ID NO: 32849 - DNA, 1103 bp, Zea mays
  Clone ID: UC-ZMFLMO17031A07_FLI
tcttcttcttgttgttgttgctggtggcatgcagatcctgagcccgcagctggagccgctggcggaggcgcagcgcatgctggtgggcggcctgcagcacacgtcggcgcaggcggaggacgcgctgtcgcagggcatggagaagctgcagcagaacctcgcggagacccttacggccgaggccgacccgttcgggccccccgacccctacatgctgcagatggccaccgcggtgggcatactgaaagagctggtcaacttcgtgacccaggtaaaccggaccggtcgccaaagagccatccatcattccatctccatgtggatgcaaatgcaaggcctggcctggcctggccagctcgaacgcgcgcggcgtgtgtgtgtgtgtgtccctgttgcgctcacccgtacgtgcccggccgcctctgctcggcgcgctggctgtgcctgtgcctgtgcaggcggaccatctccggctgacgacgctgcagcagatgcacaagatcctgacgccgcggcaggcggccaggggcctcctggcgctcggcgactacttccagcgcctccgcacgctcagctcgatgtgggcggcgcgcccgcgggaggcggcggtcagctagatgcgcctgcggcgtggcaggccaaaagctcgctcactggtgaggcgaccgtaccaaagaacacgacgccgacgacgacgaagactaaagatgagtggtagcagttcgctgtatacttgccccccaatgcaaggtgtaaagcccagtggaggacgaagagatcgacctcgctgtacgacgaagaacggaagggatgcttctcggtcagcggcggcggcgatctcgctgtacaaggcgattagtagacgtacaaaatgtaaacggaaatcgattgatgggcggaagacaggtacgtatcttgttttcatacccgcggccggggccctcctagaggcgtactgtatgattgatgatgcgggccgtctacaactactactggtgttgggctatatgtatatttatatgtaatgtaatcacctgtaactagcgttggtcagattctaaagagcacggggcatgcaggtatggaacagttcagttcacctg

SEQ ID NO: 32850 - DNA, 1487 bp, Zea mays
  Clone ID: UC-ZMFLMO17031A12_FLI
agagttgaagaagctaaggatctgtttgcttctatctcgagaagtgggctggtgccttgtgctgtgacttacagtataatgatcacaaatcttctaaaagaaggattggtggaagaggcagaagatatgttttcatccatgcagaatgctggctgtgagcccgattctcgattgctgaatcatgtagtcagggaattactaaagaaaaatgaaatagtcagggctggagcttacctgtccaagattgacgagaggaatttctcacttgaacatttaaccgcaatgttgctggtcgatctcttctcaagcaaaggaacttgtagggaacaaataagatttctccctgcaaagtatcattttcttgcagaggccagtccgtgattgatatgttgattttttttggaatcagtccttgcacgcacctgtcacagttaaactagtatatgatcttaactaaaaccattggtttacttcatgttcatgtttctcggaagattttcttctcatttgacctgcttgatatgcagatgttcatttacttttgatccaatatatgcagagcgttttatgtttttcgaagcatattcgttccggtgctgatgtagctatgtgctctccgtacacaactgatgttgattctctcttgtagcatgttttatcatgtctgttaacacagccgatgttgcatttatgaggaatgacgttataactgctgggagaataatgtagcatgctgaatcctgttttgggccctggctgagccgcccagttcgtcatgaccagcaaggtaatgttcatctacatgtctagtttgctcatcttgtctttgagaagggacacccttagctgtttacattaacaaatagataacgttcttcctcattagtgattgcaaccaaaggcagtctggcctaatgctgtggcttgtaagggcaaagtggataccctgctgctgggtagtactagtatattgctgttcaaacctgcaaatatctgggatcagctgatggatgaaagaacaatcagtagtctctgggtaaaatatcatgcctgcgcaagcgagcggacatgagtgacaagaagcggtgagtgcctgcctgcctccatttaagggcctgttcgttctcatcttaatacatgtggattagatgagattagacgaaatggaagcagagcattgtggtcagaccaccaccatctccaagggagaacaaagagaaggcaagcagagcctgtgcacgtattggtcggttcagttgtgcggttgctctttttggctcttatcttcgtcgccattcttgtatttgtaggattgtggaaatgtaacccgttcaagttgctgcattagtagcagctagtagtatctgtgattcagaaatctaaaagttgtgacttgtgaggcagcctgctgccttgttcatgtagaatgaaccttgtgtagatgagttgcaaggtgtgagtgttccatatattattgtaaaaaaaac

SEQ ID NO: 32851 - DNA, 854 bp, Zea mays
  Clone ID: UC-ZMFLMO17031D04_FLI
ggagcatttaaagttggtaacataaccaatgagaatttcttctttgaaatcatcaatggtctacggccagcaaacactgcaggttgcagttcatcaaccgatgcacctaacatcccacatgatggcacatctgtaattgaattgttgtctgatagcatgaaccaactgtccattaagaatgagaatcacttggactttcttttagatgaaaaccacagcctgccagagattgatagtgatagtgttggatcacgattgcaggataaaagaagtaggcgcaatgaggagtcattttcattcacaagctctaacagagaaagttggggcagatgttcatctttaggagcagccagtgatgaatcattctcaggcgataataatgataagcagaatttgacagtcaaggctttggctacgcctgtaagacaaaaccagaggcaaagccagaggaaaccgattgagaaagctaagcagaagaagattcaagccctatggaagaagattaagcgcgaaaaggtggagatgggggacagcctatcttcgcgtttgaagatgtgcctagggcaatctccgcagcacaagaggaatagatcgtctggaaccattacaacttcatagctctgacaactctactgaaccactgattgtccaccatagattctcccttattctgacctactcattgccacgttgtaacctatataccctaggtgaatatatgctacatgaccgcattgtagcatgccaggatgttcgaaagctgagaaagcacttgtatcatctcttgtaattgcctgaaacaagtgtaattgccatctctggctcgttgtcgcatgcaatttcctttcccctct

SEQ ID NO: 32852 - DNA, 869 bp, Zea mays
  Clone ID: UC-ZMFLMO17031E02_FLI
cagcacatcctctcgccgctccgccacgaccgcatcgtccgcctcctgggcacctgcgccgacgacggcgagcgcatgctgctcacccagtacatgcccaacggctcgctccacgaccacctgcacgggcaccacctgtcgtcctcgtcggcgtcgccggtgacggcgtcctggaggactcgcgtccaggtgctgcttggcacggcgcgcgccgtcgagcacctccactgccacgccgtgccgctcatcatccacggcaacgtcgcctcctccaacgtcctcctggacgccgcctgggcgccgcgcctggccggcttcggcgcatcggtgtggcgcgcggccggcgtggactcccagcccgtggaggtcgccggcgccgcgtcgtgcggcgggtacgccgacccggagtactgcggcacgggccggatcaggccggcgagcgacgtttacggcctcggcgtgctgatgctcgaggtcctgacggggcaaccacctgtggtcagtgtctgggacgcggcgaagcagggcgtggtggccgtgaccttggcgtcgttcgcgctgccgagcatccaggccggccggcttggggacgtgctcgacaggcgtccggcgccgcagcagctccagccgctgcagctggtggccaacatggcggcgcgttgtctgcatatgcaggggggtagtcgcccggccatatcagacgtcgtcgccaacctcgagcaggcactccgcctcatatgaaagcatgtggacatctttgcttgtacacaagtgaacttgcttgtcgttcagctagctatgatgctcaaactgtgtctgtgtgtacgtttggtgcgagtcctcctagtagaccatggtagacttgcaac

SEQ ID NO: 32853 - DNA, 1521 bp, Zea mays
  Clone ID: UC-ZMFLMO17031F08_FLI
ctcactccgccaccgccctctacacctcgcgctcccaccgcccggtgtcagatctcgccgccgcgatgggctccgcccactcgtccgtctccaccgccggcggcgaagacgaagaagacgacgaggatccgtccgcggcagccgtttcctccgcgggcgcacaggcgccaccgcccgctctgtcgccgtcgccggtccgcgtgcccccggcctccgcgtccaaagtgctggagcaggagcccgaggtgctgccgtgcctcgccgcggactcgccgctctcgccgcagccctcggcggcgggcaccccgcgcctcctcgcgggtcccggcatcaaggtctgggacccctgccacgttctcctgcccccgccgccgccgtctccgcacgcagggaggcaggttgacgccgcggccatcgaggtcgttgtggtcagccacggcgagtgcgcagccgcgatgcgcccggaccttgtcggcggccggtggccggccacggcgctcacggcgcgcggggagcgtcaggcgcgcgcgctcgctgtgttcctgcgctcccgcggcgccaggctcgccgccgcctatgcgtctccgcttgaccgtgcgcgcgccaccgctgctctcgtctgtcgggaacttgatttcccagaggagcagatccaactatcagatgctttgactgaaatgagtcaaggtcagtgggagggctgcccaaaatccgaaatttataccccagaaatggtcaatctcatggaaagcacccagcctgatttctctgcaccatccggggagtcactcagacaggtacagtttcggatgatggaattcctcaaccggacagtcctaagactaccagaaaaggtggcaatgggggacacactgtcacaacaaaatgagttgaaggggttctctcggcagagctccagcaattctgtccaagatggccctccttgggattcgctttacaggctcaaccgacatagcctccaacgaaagaaatctgggaaaagccgactccagtttgtcacttcaggggacaatgaagctgaagatgatttctcccctaaagaagtaaatcagaggcatctccttcatgaaggaagtgttggcagctcagcagcgacctccattgctattttcagccacgtgacccccatccggtgcctcatcgcaggcctgctagactgcaaccctataatgtccaagagaatatgtatagacgattcctcggttacggttcttgagcattccctgaagacaggatggcagataaaaaggctgaatgatactgcacatctcaggcttctctagctgatcagtgtgtcactgtaaagaaactatctgatagcattctgcaaatcagatgctgaaaccacttgctgcacgcatgtactatgcggccatcacaagtgtggtctcgtcactgtatttcaattgtacctatcgaatgtttctactcaatgtagaagggttggcctgtactggcgttgtgtagtatttgttgttatttttatcaagattatttctc

SEQ ID NO: 32854 - DNA, 3369 bp, Zea mays
  Clone ID: UC-ZMFLMO17031G03_FLI
ggcaaagccaactgcctcctgatatccaagaagggacaagaggtaggaagatacttctttgcaagtagcaaactgatgtcctttcttggatatcaggaggcaaagccaactgcctctcagattaacaatgcaggagtgcatgacctacatgttaattctgtaggtcttcaccagcaaaccatctcaattgaggaaaagcaaattgcagtgccagttaattcagttgcattgtttaattcctctggtgattctcatcaacaaaaacttcagaaggatgaagctccaatagaagtgaatgcaaaggagtgccggaaatgcaatttgacgtttcatgaccagagcgcctatatgcaacatcagttgtcctttcaccaaaggaaagctaaaaggcgcagggttagtaaatctggagaattgggtaccaacatagatggaaactacgagaagactcagcagaagacctctggagaggtatctggcaattttggccacagcgctgcaaatgtaaggtatgaaggtctgagtccagcagaactgttagatggtcgaccatccttgatggcagtgccatgtggatctcaggagatcactatcttgcctcaacagggaaaagaaccttgtgtgttgcctcaacagggaaaagaaccgtctgtgttgcctcaaccgggaaaagaaccgtctgtgttgcctcaacagggaaaagaaccttctatgttgcctcaacaggggaaagaaccttctgtgttgcctcaacagggaaaagaaccttctgtgttgcctcaacagggaaaagaaccttctgagttgcctcagcagggaaaagaatcttcaggagatatctctgtgaatcagaaggaccctcttaaggagatgaatggctttcctgaacaggaaaaaggacttgttgctggagaacttgtctctgcacatcataaggaccctctaatggatattacagatgcatttgaaatgataaaaaaacatcctgccagagagccttcctctgggcatcatctggatactgtcgacaattctgatgatcataaaacccacaatgaagcatgtgacaatgttgtaacttctctttctattgatgctgaaaggaaattgggtgtttgcaactccatgaatgttcatgagaatatcagcttaaaagatccagaactttccaatgcagattattcccaaaagttcaataggtctgatgaaacttgtgatgtacataaagaggtttcttcaactgtgaatgatcctgatgaaagaaaatgcacagatgattcaacgaggtgtactaatatgtcctgtgatctactgcatggcaaaattgtcagttctcctgaagaacatgattttagtaaccagctagaaagtaacccactttcagtatctaggaatgagcctgatcttaattcaattggtacggaagtggatggtggcaatataacttgcaatgcggaaaaccccagaagcttcaaaagtgagaaatctgctgagctcaagattatggattgcgaaatgacttcttttaaagacagtgaaataaaaaatgatgtcagagtaagggatgtaaatctcaattcatgtttggattcaatatcttctcctatttctggtggaaacaatgaaacatctgatactcctgatgatgctattcgatcatccattatcgcccaatgcttcggtactacctctaatgatgacacggcttgtaaggatggaaactttgccaaccagaacgacacctgtaagggtgaaaattttgtcaaccagaaaaatgtcacaatgtaccaatctaatttgaccatggaacctatacctcgagctcaaataaatgtggattgtttcacttcttcctgttcaatgactcctgaaatcaaggactatggcaacagaggtgaagatcgtgcgaaagaagcactagtgaactcacaaaacatgacaagtaatgaaactggttttgatgctgaagcttataacagtgatatcttcaatggtactatcacagaaagtagtcttgcccagttgagtaatgtcattagtatgaaaaatgcttttgcaaactgttactcattatctgacctaaacacacttactggtggtactgcaactgatgatattgatatgcacaatattaggagttcttttgtcagctctaccagtcgcactgaaccaaatgagcactgcacgttggattttgatatcaagggttccatgcttgaggcattggaaaaatctgacagtgacttagataatcaatacaatgatgcaggcccttcttgtgactcactacctgctactgggacaagtgggactattgatgattttatgtccatgcaaaccaattttggtagctttacttctttggttcgtgctgttgaagatgttccactgagcaggattattcaagatcagcggtgtgatttgcaacttggatttggtggccccaagcagcagatgtatccaagctttgagcaacagctaaggatggcctcggctggagctccgccttatgggaccatcggcaggcatgaccctatacctgtaccagagccaacattgatgctaggttatgcaccgcagctaggtaactgcccccctccgttccagttgggctggggtccgtcttattcgaagatggttggcatgctccaatctgtgtgcgtgtggtgcaatagcccattccagcatttcggcaccgtcgctgagcagcaggcagattcacttggttacatttgcccgtcgtgcaagggaaagttttctggtcatcttggcatcaacggtccatctatttgaaatcagtttcttgtaacctgaactggtgctgctgccccaccatcaatttatagtctagttgatatgaatcgttttgtacttgtagtatgtatcctttaactcgtggctagtggtggaaacaggtttattcgaatcttacatttttggttattaaaactcaaccatcaagcagttgttgcgaacaaggaagctaagttgttggatacatacaagactgtgctctcaagagacactggtgggtactctgctgaagaaaagaccaattggcctgaagactaaattgtccatcttcaattgcagcaagagaaaggatctccatggcactggtggctggtgcatgtttgaggcttggatgatggcagaagtgtcatgtttttttatgttgaaccttgtttctaaatagtaagtctagacaattgttctgtttgaaatctgaatgaattgtggctggttgttggtggactggattacaggcaaaagtgtcatgttttttctatctttaaccttgtgtataatatagtaaaggacggatgattgctctatttgaaatatggagtaatggttgctagttgcctg

SEQ ID NO: 32855 - DNA, 1061 bp, Zea mays
  Clone ID: UC-ZMFLMO17033B08_FLI
tgacaagccggtcaccgtctttggcatcaggaaccctgaggaaatcccgtggggtgaggctggcgctgagtacgtcgtggagtccaccggcgtcttcactgacaaggacaaggctgctgcacatctcaagggtggtgccaagaaggttgttatctctgccccaagcaaagacgcacccatgtttgttgttggtgtcaatgaggacaagtacacctcggatgttaacattgtttccaatgctagctgcaccacaaactgccttgctccccttgctaaggtcattcatgacaacttcggcattgttgagggtctgatgacaactgttcatgccatcactgccacccagaaaactgttgacggaccctcagccaaggactggagaggtggcagggctgccagctttaacatcattccgagcagcaccggtgctgccaaggctgttggtaaagttctccctgatctgaatggcaagctcactggtatgtccttccgcgttcctactgtggatgtctcggttgttgacctcaccgtcagaatcgagaaggggcctcctatgaggatatcaagaaagctattaaggctgcttccgagggtccactcaagggtatcatgggttatgtggaggaggatctggtttctaccgacttccttggtgacagcaggtcgagcatcttcgacgccaaggccgggatcgctctgaacgaccacttcgtcaagcttgtctcgtggtacgacaacgagtggggctacagcaaccgcgtcgtcgacctgatccgccacatgttcaagacccagtagagggttttccccctgcttctcatggatggttgctgcttgtgtatgccgagaataaatgtggatgtcgccaggttcatgctgagtctggacatgttttgcacttttgtttccatttctgccatcatctgtggcagatccgctcgctaatatgggacctgagattagctttttgctgcttgtggtgaggttgcagttttgttatgtgtttctgtgttgttagtactcctatgatttaggtgttcgttatatagaattaaaccacc

SEQ ID NO: 32856 - DNA, 911 bp, Zea mays
  Clone ID: UC-ZMFLMO17033C03_FLI
gccagccagggtgccttccagtactttggcctgaaagaggaccagacaccccttatcctcatccaggatggtgactccaagaagttcttgaaggttcacgttgaggctgaccagatcgtcgcttggttgaaggagtactttgacggcaaattgacgccgttcaggaagtctgagcctattcctgaggtcaacaatgagcctgttaaggtggttgtcgctgacaacgtccacgacttcgtcttcaaatctggcaaaaatgtccttattgaattctatgccccctggtgcggacactgcaagaagctggcgcccatcttggacgaggcagccaccactctccagagcgacgaggaagtcgtgattgctaagatggacgcgactgccaatgacgttcccagtgagtttgacgtccaaggctacccgaccttgtacttcgtgaccccgagcgggaaggtgacatcctacgacagcggcaggacggcggacgacatcgtcgacttcatcaagaagagcaaggagaccgcaggcgccgccaccaccaccaccacccaggcgccaccggcatccgagaaggcagccgccgccgagcccgtcaaggacgagctgtgagcatccaaggtgtggacggctgtggctgcgtaagcatgggaggaaaacctggcgctaacgtgcctccaacgcctagtttttgcgggaccagagggagagagagagagggacggagttagagagagaggggatctgcgacgtgttttgctctgcggcggcatgtctgtgtatcccattgaggttatgtacacaattacaccgcggtcggtgggtgttttttagttaattatcacaagtgacagtagaaaggaacagattgtgatgaggttgaatggatgaataaatcgctagtccgccccgcc

SEQ ID NO: 32857 - DNA, 1634 bp, Zea mays
  Clone ID: UC-ZMFLMO17033C08_FLI
ctccctccctagtcgctccccaaatcggatctccaggccggcagaagttgagcggactgactggtcactgtagttcgatcgaatccgagtagggctgatacagttcgattcggcgggaggcatggcgtccgaaaagcacttcaagtacgtcatcctcggcggcggcgtcgcggcggggtacgcggcgcgggagttcgccaagcagggagttaagcctggggagcttgcaatcatctccaaggaggctgtggctccttacgagcgtcctgccctaagcaaaggttacctctttcctacgaatgctgcaagactcccaggattttatgtatgtgtgggaagtggtggagagaagctattgcctgagtggtactcagagaaaggcattgagctgatccttagtacagaaattgtcaaagctgatctttccaccaagactctgactagtgcagctggagcaaactttacatatgagatcttgctcattgctactggctcctcggtcataaagctcaccgattttggcacacaaggagctgattctaacaacattctatatctaagggaaattgatgatgctgacaagctggttgcagctatccaggcaaagaagggtggcaaggcagtggttgttggaggaggttatatcggcctcgaactgagtgcagccctgaagatcaatgactttgatgtcactatggtgtttcctgaaccttggtgcatgcctcgcctcttcactgccgatattgctgctttctatgaggcttactatactaacaaaggtgtaaagatcttgaagggcacgctagctgttggttttgatgctgatgccaatggtgatgtcactgcagttaagctaaaggatggcacagtacttgaagccgatattgttgttgtcggtgttggaggcagaccattgactactctcttcaagggtcaagttgctgaggagaagggtggaatcaagactgacgcttcctttgaaacaagcgttcctggagtatatgccattggtgatgtggctaccttccctttgaagatgtacaatgagttgaggagagtggaacatgttgaccattctagaaagtctgcagagcaggctgtaaaggcgatcaagggcaaagagtccggtgaaccagttccggagtatgactacctgccatacttctactcccgatcattcgacctggcgtggcaattctacggcgacaacgtgggcgaaaccatcctgtttggcgacagtgaccccacctccagcaagcccaagttcggctcgtactggatcaaggacggcaaggtcttgggcgccttcctggagggcgggtcaccggacgagaacaaggccattgccaaggtggcgaaaacccagccgccggtcgctaacctcgaggagctcaagaaggatggcctccagttcgccagcaagatctgagacgctcccgttccatgtaaaattccgtgtcatcgtgaaggttcttctggagctctggtcatgattgagaaatgttctgctacagatgttatactacatacgtgactacactacatgatatattcggttttctgattgtgatatctgtacgtggctacactcacatgtgagatttgaataagtcctgcagcctcagggctcagct

SEQ ID NO: 32858 - DNA, 855 bp, Zea mays
  Clone ID: UC-ZMFLMO17033D07_FLI
aaactgtcccgtaggagacgtgttttgcttggttttcttcatgccgctgctcatcttacttcggcagtgctactgatgctacttatggaattagctattgaaatctgcattcggaaccatctattagcaacatcaggttaccataccctttatgaatggtaccgaaaagtggaaagcgaacattttcctgatcccacaggacttcgcgctcgtctcgagcattggacctttggactttaccctgcatgtattaagtacctcatgtctgcattcgacatcccagaggttatggcagtaactagaagtacaatctgcaaaaaaggaatagagtcccttcccaggggaggtgccatcatctattatgtctgtgttttcctgtacttctgggtcttgtcaacacctgtcgtatcgctggtgtttgggagctacttatatttatgcataaactggttccatatccatttcgatgaggccttctcctcgctgcgcatagcaaactataaggcattcacacggctccacatcaagaaaaacggagaccttgaggtcttcaccctggctgtggacaaggtgccaaaggattggatgctggatccagactgggacatggaacccaagcagccattccagatgagctacaccaggaaattcccaagcaaatggagggctgcgtcgggccttgacccaatcaatgctgtgcgcattgttgaccggtttgtcatcccgcgaacgccctcaagtcctacaacaccaggaggctctgtttcaagtcctacaacaccaggaggctccgtttcaagtcctacaacaccaggaggctttatgagatgatgttcatgcatgagtgaataattc

SEQ ID NO: 32859 - DNA, 1295 bp, Zea mays
  Clone ID: UC-ZMFLMO17033D08_FLI
ccatcttcttccccagccgctgtgcccgtccccctgccaccaaggtccaaggtctccggagcgcgacctggctgcaacgcaggcaatggagtcgccgttccgcgcggacctgctgagggggaaggcggcgctggtcacgggcgggggctccggcatcggcttcgagatcgctgcgcagctcgcgcgccacggcgcacacgtcgcactcatgggccgccgccgcgaggtcctcgacaaggccgtcgccgcgctccggtccgagggcctcagggctgttggtttcgacggagatgtccgaaagcaagaggatgctgccagagtgatcgcagcaacggttgagcattttggcaaactggacattcttgtcaatggtgctgccggcaacttccttgcctccccggaggatttgaagcccaagggattccgaactgttattgacattgacactgtgggtacatacacaatgtgttatgaagccctcaagtatctcaaaaagggtggaccagggagaggtccttcctctggtggcctcatcattaatataagcgcaacgctgcaatacactgcagcttggtaccaaattcatgtctctgctgccaaggctggcgttgacagtatcacaagatcattggctctggaatggggaacagattacgacattagagtaaatggaattgcacctggaccaattcaagacactccaggaatgaggaaacttgcacctgaagaaatgggcaataaggggaaacgagaaacgatgccattatttaagcttggggagaaatgggacatagcaatggccgcactctatctagcttctgatgcaggaaaatatgtaaatggggctataattattgttgacggaggtctttggttgagtcgccctcgccatattcccaaggaggaagtgaaggcactctctaaagttgtcgagaagaaggttagggcatctggtgttggggtgccatccagcaaattgtgatggcatctttgactacgtagctcttcgatgtgttctgtacaacatatgtctatattgttgtcccactaatgttgtcagtttggctatgccaccagtccatgcagatgacttgttaagcggctgagcagtccatttggttgaagaaattcaaatatttattactgttgtcgtccaatttgtattagaaatagttgagatcggtatgggatattgggatcccaaccaagaggtgcgtattgccaaatatttacatgctgtctattcaggttgtcgattaaaagggtcatattaaagatttaacagtttgcgtctc

SEQ ID NO: 32860 - DNA, 2077 bp, Zea mays
  Clone ID: UC-ZMFLMO17033E03_FLI
cgccgctcttcttcccctgcttgctctgggttcctccattcctctccagtctccatcacaggagcacgcgacgcgcgccacaggaaggaagggaaaaaacatggcggcggcgaacggggacgcgtgccgcagcgtcggcggggtgccgcgcccgacgaaccccatggtgacgccgctgctcaccgacctgtaccagttcaccatggcctacgcctactggaaggccggcaagcacctcgaccgcgcagtctttgatctctacttccggaaaaatccatttggcggggagttcaccatcttcggtggcctcgaggaatgtataaggttcattgctaacttcaagttcacggaggaggaaatcaaatttcttcgatctgtcatgcctgcatgtgaggatgacttctttgagtacctccgttcgattgactgctcagacgtggaggtttatgccataccagagggttatgctgtgttccctaaagttccactgatgagaattgaaggacctgttgctgttgtccagcttcttgaaactccatttctaagtcttgtcaactatgcttctctggttaccacgaatgcggcacggcaccgacttgtagctgggaagtcaaagaatttacttgaatttggacttcgacgggctcaagggcctgatggaggaatcagtgcatcaagatattgttatatgggaggctttgatgcaacaagcaatgttgcagcaggaagattgtttgggataccaatacgtgggactcattcacatgcatttgtgagctccttcatgggtcttgatgaaattactgacaaaacacttactagttctgatggttcaaacacatgtgaagattttatctctctggtgcagaactggctgatcaggattcaggattctagttcattgcatggcacctttggagaaacgagccagagtgagttggctgcattcacgtcatatgcactggcatttccaaattccttcctggccttggttgacacatatgatgtcatgagaagcggagtgccaaacttctgtgctgttgctttggccctcaatgatatggggtataaggcagtcggaattaggttggactctggtgatttagcatacctatccgttgaggcccgcaagttcttccatgcagttgaaaaagaatttgtagttgttggctttgggaaaacaagtatcacagcaagcaatgatcttaatgaagaaactatagatgctctgaacaagcagggccatgaggtagatgcatttggtattggcacctacctagttacatgctatgcacaagctgcacttggttgtgtattcaaattagttgagattaacaaacagcctcgtattaaactttctgaagatgtcatgaaggtatcgataccatgtaagaaaaaatgctacagattgtatggcaaagaagggtatccgttggttgatataatgaccggagaagatgagccaggtccaaagattggtgaaaggctcctatgtcgtcaccctttcaatgaatcaaagagagcgtacgttgttccacagcatgttgaggaattattgaagtgctactggcctggaaattcatcgaattcacgggaggagcttccatccatccatgagattaggactcggtgtattcaccatctggaccgaatgaggccagaccatatgaggcggctgaacccgacgccttacaaggtaagcgtgagtgctaagctgtatgacttcatccatttcttgtggctcaacgaagcgcctgtcggagaactgcaatgatgaaatgaagtggcggtagggtcggatcccaaacctaactctaataagctgatccgcttatgggtgccgtcggagcaaataacaaactgttgccgccggtgcaatttctgcagtagttttacaatcgcctgcgctctagtaaaatgtgagtatgttctggtgcatctgtcaaaacagaccatagctgaagtgttacgtactgggaacaagaggatacccataccgagttgtatgactgaactaattgcaatgaggagcaatcactaaatttgagacaaatttacttgtcttgtcaattaccct

SEQ ID NO: 32861 - DNA, 1287 bp, Zea mays
  Clone ID: UC-ZMFLMO17034B07_FLI
tcgacttctactccaccatcacccgtgccaggtttgaggagctcaacatggacctgttcaggaagtgcatggagcctgttgagaagtgcctgagggatgccaagatggacaagagcaccgtccatgacgttgtacttgttggtggctccactaggatccccagggtgcagcaactgctccaggacttcttcaacggcaaggagctgtgcaagaacatcaaccccgatgaggctgtcgcctatggtgctgctgtccaggctgccatcctgagcggtgagggcaatgagaaggtgcaggacctgcttctgctggacgtcacccctctgtccctgggtctggagactgctggaggagttatgacagtgctgatcccgaggaacaccaccatccccaccaagaaggagcaggtattctccacctactcggacaaccagcccggtgtcctgatccaggtctacgagggtgagaggacccggacacgcgacaacaacctgctgggcaagttcgagctctccggcatcccccctgcaccccgtggtgtgccacagatcaccgtgtgctttgacatcgacgccaacggcatcctgaacgtgtctgccgaggacaagacaacggggcagaagaacaagatcacaatcaccaacgacaagggccgtctctccaaggaggagatcgagaagatggttcaggacgctgagaagtacaagtctgaggatgaggagcacaagaagaaggtggaggccaagaactcgctggagaactactcctacaacatgcgcaacacgatcaaggacgagaagattgcgtccaagctgccggccgatgacaagaagaagatcgaggacgccatcgacgcggccatcagctggctggacgccaaccagctcgccgaggcggacgagttcgaggacaagatgaaggagctggagagcctctgcaaccccatcatcgccaagatgtaccagggcgcgggtgaagacatgggcggcgctggcggcatggacgaggacgcccccgctggcagcggcggccctggccccaagatcgaggaggtggactaagcggtttgttgtcagtcttgagcgtgctgcagttgctggctggcccagtcgctgccgcgagttatcgtcgtcggtcggtgcggtgtgtccgcttaaactttatttgtggtgggctggtacttttgtggtggttattttttttggacctcgtgatagtcggtcggttccatgttatcgcggctactggcaaaccttaagtgatacggtaattcttcttttcggtatt

SEQ ID NO: 32862 - DNA, 1672 bp, Zea mays
  Clone ID: UC-ZMFLMO17034D10_FLI
ggggaaccaaatcttggacgggaacacatagatttctttggtggaggaaggaggagggcaacaagaggaggttacaggtagcccaatagatctactgctgttgagggagttgatgcaaagctgagttgctgcgcgttggctttctttagagatggcttcagctggtgttgccccttctgggtacaagaacagcagcagcaccagcattggtgccgaaaagttgcaagatcacatgaacgagctaaagattagagatgataaggaagttgaagcaaccataattaatgggaaagggaccgaaactgggcacataattgtcaccactactggtggcaagaatggtcaaccaaaacagacagtgagctacatggctgagcgcattgtaggtcaaggttcttttgggattgtcttccaggccaagtgtttggaaacgggtgagactgttgccataaagaaggttcttcaagacaagcgttacaagaaccgcgaactgcagaccatgcgcctccttgaccaccctaatgttgttgctttgaagcattgcttcttttcaacaactgagaaggatgagctttatctaaatttggtccttgagtatgttccggagacagttcatcgagttgtgaaacatcacaacaagatgcaccaacgcatgccacttatttatgtgaagctttatatgtaccagatatgtagagcattggcttacattcatggtactatcggtgtctgccacagagatattaagccacaaaatcttctggtgaacccacacacccaccagcttaaaatatgtgactttggtagtgcaaaagttctggtcaagggggaaccaaacatatcatacatctgctcgcgatactatagggctccagagctcatatttggtgccactgagtataccacagcgattgacatttggtctgctggttgtgttcttgctgagcttatgctagggcagcctttgtttccaggtgaaagtggtgtggaccaactcgtcgaaatcatcaaggtccttggtactccaacaagggaagaaattaaatgcatgaacccgaattacacagagtttaagttcccacaaatcaaagctcacccatggcacaaggtattcaacaaaaggatgccgccagaagctgttgatctggtctctcggctactccagtactccccaaatctgagatgcactgctgtggaggcgcttgtccacccattctttgacgagcttcgagatcctaatactcgtcttccaaatggccgcttcctgccaccccttttcaacttcaagcctcacgaattgaaaggagtcccagcagacattgttgcgaaattggttccagaacatgcgaagaagcaatgctcttatgttggatcgtgagatgaccgtgccttgggactggaacctgaggtcgcaatcgtgcatttcccctgggatgttggatgatcttgaggcatgcgagcctgtcgttgaagatgcaaggttacctacttgtacgacgtacgccaatgcgacctgtgtagctgtgagtagtctaatgttgcagtgacatgtaatggcgcacccccgtcctactaacagatgcttactggagattgccatagctgatcttgtaatttgttatagggcagtatgaatatatttatggtagcttgaatctatttgtggattcac

SEQ ID NO: 32863 - DNA, 1382 bp, Zea mays
  Clone ID: UC-ZMFLMO17035A03_FLI
caagaaaactagcaaagcacatgggggcaaatctaatccttcttggcgcaagaggaatccagatgaatcagctttggtggcaccaaattctgttgagcaagcagacgtctcttatgaatcaaaggaggttcagaacttcacctatcagaagcagcctgttgaacttggcaagcaagatacacagttaaaattcaatgtagatgctgctgctgaaaatagctcagctccagttcaaacagttccgctatctgtcggtggcgcaaaacaacatagtgcagctaacagacaaaggcgacagcatgttaaggctcaaagaaatgaagcaagtggctactcaaatgagagcaaaggtagagagggcaagaatgatgttgtctatcaatcagcaacaccggtcatggattcgaactcatccaatcacaggaatgtgccaagatctgatgtgaaaaacagcggcgtagtttcacactctagagcctggaagccgaaaaccaattcccatcctcaggacagctcagacggcaagattgctgttgacgggcaagtggattcccatggtggtaggcttgagatgaatacgtccaaagatacaattacccatctagtgaccagtagtgaaccgacgaaaaggagtgatgacaaagaggtctcacacagcaaacatgagaacctggcacgggaagatggtaaccagaagggtgagactgaacaggagcaggctaatcctacactacgtcgccaaggccagcccaatgcaaggtaccacaggggaggtgggtcacacaggggaagggggggttatgacactgggaggccaaaccatgtcacaaatgtggagaggcggaagggtggcagccatcttgaataccagccagtcggaccccaaaacaaagctgcagacttccaacagagcctgagcatggaagaacgaaccgaggggcctcctgcttctggacaagcgttcaggcagcgtggacacaacagggggctacgcccagcaggccgctttgtccagcgaaaccctgcttctacgcctaccactaattctcaccaaaatgaataatcttccgcggctgccacatccactgagcttcaggaactcgcgcttgttggtggcgtttcacaacagataggtttggatgcgcttgggtgcgcggcaggtgtccttctacgactaaactctactggtggtgagcattaggatcctgtaatgataatagtctttgtcccaagggcacctggaccctcacgtgtgattgtgggaatttgcctttgttggatgcaatgttggaacgtgtactaacagagttgttgtgtttgagaacttgatttaaatgttagcctttgatgctaatgagaacagaaagtgttggtttttgccc

SEQ ID NO: 32864 - DNA, 1148 bp, Zea mays
  Clone ID: UC-ZMFLMO17035A06_FLI
tggatttctgatatcagaggagctttgtcagtgggggttttgacatattaccttcagctttgggatttgatatctggcatcgagctgcagccggaggttgacgacaagcatatcttcagtattgccccgaatggtgtgtactcagccaaatcaacatatgaaggtctatttctgggatctgtgacatttggacactataaaagaatctggaaatcttgggcattgccaaaatgtcgtttcttcctttggttggttgcccataagagatgctggacaactgatagattggcaaagcgaggcctaaatcatccagagcaatgtcttctatgtgatcaagaggaagaaaatatggaccacctccttgtgcaatgttccttctcacgggaattctggtaccttttactcaggaaattcggtcttcactctcttgcaccacagccgactgcaaactccttcctgggatggtgggaagtggtgggaggagcagtccttggtctcacaaaaaagggccttaactcatcattttgggagcttggactttatggaatcatcgaaataaatgcatttttgatggctgcaatccaagtatgtccttatgtctcagagctgctgatgaggaaataagaagatggaaagtagctggggcaaaagacctcgctcatttggctgcacccttggtcaatatcctcacacatactgatgaaataaaactcaaagcaaaaaggattgccgcggtggaaaagaagaagcggtgtttaggaatgaagattctatctaccaaggaagcaagtggaggccttcaacggtgtgcagattatgttggtatgccaacagctcccagtgaatctaacaaggagccaaggcctgaagagtgtgtaaatgaactgggcattaaacaaccagtacagcatgttgcttccgaggagcaggaaggagttcaagatgatgccaaggcagatgcaaatgttatgaatgtttcttttggtaagggaaaatcagaagattcttttggcacaattaatggtaccaacagtggagataaaatagaatctcctagtggtttagcagaaagaacattgactcagcctaccactaagggttgcagtaagcagcgtggccgtagttctaatggtagaggaaacaggact

SEQ ID NO: 32865 - DNA, 567 bp, Zea mays
  Clone ID: UC-ZMFLMO17035A07_FLI
ggtgccctgatggaaaaaccatcgaagctgaagctgcccatggcacggttacccgtcatttccgtgtccaccagaaaggaggcgaaaccagcacgaacagcattgcttcgatctttgcatggacaagaggacttgcccacagggcaaagctcgacgacaacgctagactactcgacttcgctctcaaactcgaggctgcttgcgttgagaccgtggagtccgggaagatgactaaagatctggcgattcttgtccatggatcttccagcgtcacgagaagccattacctgaacaccgaggagttcatcgacgcagtcgctactgagctccgatcaagactgggagccaactgagcctacaagaaactttgcatggcgactttgaatgcttcgtcaccgtcaccgatctgctagtcgtcttttctgttatgaagaagtgaatgtgcgtcaccgcagtttcgatgcaagctaattatagatgtggtgtcacgtgagcgctcaaaataaaggatacacatgattaaattgtttttatgtcagtactaagctcagtcatcccccccccccc

SEQ ID NO: 32866 - DNA, 530 bp, Zea mays
  Clone ID: UC-ZMFLMO17035B12_FLI
gggcggtcggggaagtcgtgccggctgcggtggtgcaaccagctgtcgccgcaggtggagcgccgccccttcacgcccgaggaggacgccgcgatcctggccgcgcacgcccggctgggcaaccggtgggccgccatcgcgcgccttctcccggggcgcaccgacaacgccgttaagaaccacgacagcgcccggagccacttccaggagctctccccctcgtcgtccccgtcgccgcagtctactccacccgccttccctccgcaggcggctccgtctcagtcgtcgtacgcgttcagcggcgagctggttgccgcgatgcaggagatgatccgcgccgaggtgcgcaagtacatgtccggcgcggggctccgcgccggatgcgggcccggggccgtgggcgaggtgtgcatgccgcagctggtggagggtgtgatgcgcgccgccgcggagcgcgtcggcgtcgtcacacggccgtagaaacccggaaacggaccaaatcagatctgatcaatgcgaagcattgtgtt

SEQ ID NO: 32867 - DNA, 809 bp, Zea mays
  Clone ID: UC-ZMFLMO17035C03_FLI
cttcattcaggtcgagcgtggcagcctccccacccaggccgataagccggcatccttcatcgcactcggtttctcgtgcttactctgtctctagtaccccccactcccccaaccccttcagatctcacacaaacttacctggcgtcatccatgcaagcagaagcaccgcagaccttgcaaacatgtcgtctccccaccctcgcatctcacacttgtcgtcgtcgacacattccctcgtcggcagccacctatctccaccaatcagcataaggtatccattgccccattctcggcatgaatcgcccagtccacacgtcagttcgccctacatctcaaattctggctacggttcttcaagctactactaccttggcggctcgagccagcacgggtcgtacctgcggcggtgtggagagtcagggccaagcctgtctaccatggtccctcggtcgtcgcagcagcagttccagtcagaggcaaacgtggccgcaggcgcgtcgtctgcccagtcctcacggcagtcctacctgcgacgctgtggcgattcagacgccagcttgtctgacatggcgtcagcccagtcgttgccggggtgctgaggcagatgtgcactacaagatgcggcttgacctgtgcatacaatgaggcttgcagcgtcacataggtggggaaacatgtatagcatagacttcatgatcctgttcttgtctgtgagtggtatatggttctttttttgtgccttttattgtgtgcatctgacgtgacaggaacctgttgaagttgattctgttaacattttagtccgcacc

SEQ ID NO: 32868 - DNA, 670 bp, Zea mays
  Clone ID: UC-ZMFLMO17035D01_FLI
gtagggtgttaaatctgttacattctcggatgtagacaacactatgtaagtatatttacattaccatttcattggtctcactattatgtgctggtactagacactcctatttaatatcatacattttcatgtttcaaaaccataaaccaatagaagaaagaactgaaaagcagacgttgaatctggctctttaccagcttaatacaacaaatttacatcccaccatacttaactgttcaatcaaacttcattgtagggcaaagattttttaccatccaatactcctgaaagttcctccaacacattagaaaaccctgcaaaaaggttcttacaacacctttttccttttgaactgaaagcatttcctttacaatgccacatattcccacttaacacatgcctcataaaaaacatcaccacaggctcaaacagacctctgcaaaagttggcaaactgagttagcagatcgactcataagttcaatattagagacgaccttcttgacctatgttattggattatgtgttcattcaattgttgtagtgatctttatttgattggttccacgctatacatgttgtattgtgcctacgatgctaagtatttttgtttgcaactgtgactattatacaatatgagtactgttatatattgtcactcatacaatttc

SEQ ID NO: 32869 - DNA, 1562 bp, Zea mays
  Clone ID: UC-ZMFLMO17035D05_FLI
ggagagggagggctcttccagacacgcgaattgcctcacgcgaattgcaagcaacacattcccgtcccaccttctgcgagcacagagagagtgggagagcaggcctccgaaatcaccgaccgcagagatacacttgcacgggtgtgcgggcgatcagatttttggggagcgtcttcgcgactgctcgcgtgatctgcttcgtcttcttcccggcgaccgttcgagggactgcactgcgtacaccttcctgcatcgacttcgtacggctacatcgaacaaacacacgagatgactcgtgtgaatggagccactgatgccttgagcatcggtccctccgctgggcatttttccgctggtggttttgctgctgcgttaaaaccaagtgaaccttttgatgggacattttacaagagatggcgtagtaagatgatactgtggttgaccgcaatgaactgctatcacgccgcacaggggaaacccgaacagttcactcctgaagaggagagaatgttcgacgttgccgataacctgtttcgaggcgccgtgattggcgctcttgccaacaagtatgttgattcttatctaacgtgcacatctgcaaaagagttatgggatgcattagatgagaagtttggtgtttctgatgctggtagcgagctgtacatcatggagcagctgtttgactataagatggtggaaaaccgtcctgtagttgaacaggctcatgaaatacaggcactggctaaagaactcgaacaattcccatgtgtcttacctgacaagttcgtggccggcggtattatcgctaaactgccaccttcttggacggattttgctaccactctaaaacataagagacaagagtttagcgtggctgagcttattggttctcttgatgttgaggagagggcgagagcaaaagacactcgtggaaaaggagttgagacttctagtgccaatatggtacaaaagaagaactccaatgcatcacataataataaaaagaaaaacaagcaacagaatgccacgaagcccaagcaggcagcctcgttcaaaaagaagaacaaaggagctggttgctttgtttgcggaagtactgatcattgggcaagcgcttgtccagaccgcaaatttaagcaagagaaaaaaccagctcaagagaagaaaacagtaaacatggttgttagcgagactgcagaaggaacatcgggtgcaaagggactggagccttgctgatggggaacggatcacatgcgcgtgttcttggtgttggtacagtcattctgaagtttacttcgggaaagacggtgctattgaagaacgtgcagcatgtcccctccatcaaaaagaatctagttagtggctctcaattgtgccgagatggctacaaaattgtctttgagtctaataaatgtatactgtctaagtatggaacgtttgttggaaaaggctatgacagcggaggcttgttccgcttatctttgcatgatgcgtgtaataagtctgtgaacaatgttgtttcgaatgagtcgtatatttggcattcacgactttgtcatatc

SEQ ID NO: 32870 - DNA, 651 bp, Zea mays
  Clone ID: UC-ZMFLMO17035E11_FLI
ggtgagaagtacggattgatgaatgtgagctcgatggtccacacaaaggagaatagggacactactctaaacttggaaccttcaccagatctgctgaccaaagtgccatctctagtagaaagaaaggtctccaagcatcccccagtactcaagttgaaaaggactatggccaccaagacaaaaagtcatcttgtggtcaaaggagcttcaccgactccagcaactccaaatccacttcctccggtgctggtgctcaactattaaagtctttggggtttgattcaagatgagtacgtgttgctatctttgttgaatgaaccgggtacgaggatccccacggggataaaatccccgctcgagttgggtacaggaaaaaacctcccatgtggctcttcgagaaggcagggaatccccgccccctcgtggggacgtgtttgggggatcaaaccccaatgggtaattcctcgtagccatctctacatgtaagtcctattcatgtcatgtgagtgtttaattttgtgacgttttctatcatacgtggaggcatgttgtggcatttttaggagattgttaatgatgaaaaaagagtgccacaaaactatgaccatgaatgatatgtctctaatttatgatgagaagtcacaagacgtc

SEQ ID NO: 32871 - DNA, 3830 bp, Zea mays
  Clone ID: UC-ZMFLMO17035F11_FLI
gaaattgaaacagctccagttcataatgcaaaaacagttccttcagaagctggtgctatatctcctgtagtcgctgagggtaaggcctgtgcagctgctgatcttagctcattgaaagcttctgaagaagctgggtctcaaaatgatattgacaatggcaggctggaaacttcttcacgccaagctaatgctgattccatgaaattagaaattagtgatgacctaccagtgaagaaatggacataccatgatcataagtctgatttgctcagttctgtcacatctgcaaatagtgctatagccaaagaaattaatgaagtgctatttaaatcattgcctgctgatacacctcgccttgatttgtttgcatcaagtcatcttctgagccaaaggaagagtgatttgattgtcaaagaaaggcttggagtatgtaaaaccaggctgaggttgaaagagcagatgcttacaatgaagttcaaggcatattgtcacttgtggaaagacgtccaactattttctgcaaataaacagcgttcaaagtctaataagcgcactgatcagagcaaccgaacatcacaaattggatctcagaggcaacgctcctctaaccgctcgcgattaaccatgcctgctggtaatttaagtacattctcaactccagaaatgtcagatgttgcaatgaggttgttttcagagttcaaaattaagcggtgcagaaattacttgaaaatgcctgcactgattattgatgagaaagagaaggaatggttgaagcttatgaacaagaatggtctagttgaggatcctgttttagttgagaaggaacgggtgatgataaatccgtggactcaagaagaaaagaaaatttttatggagttgcttgctaaatttggcaaggatttctccaaaatcgccagtttcattacacataaatctaccgcagactgtgtggagttctactataagcatcataaatcagatagcttccgagaagtgaagaaactattggaccttcgtcaacagcaacccaccagcaattttcttggagcgaaatctggacataaatggaatcctgagtcaaatgctgcttcccttgatatgcttggggtagcatcagtaatagcagcccatggccttgaatatgcaaaacaagtggagaaaatttctgcgaaatccctcatccggactgcatatgggcccattgtgacttccgtggctaataaatcttctgataaggagtgcattgaccatgtgcctttgcacgagagagaatctgtagcagctgatgtactagcaggcatatgtggcactctctctcctgatggaatgggctcatgcattactagttctgctgatcctggacagaagattagcatgaaaagagtggagcatgtcttgtcccaagaaaatgacaaaaccgttgaggaggaagacacactctctgatcaagagtgtgaagttgacccagttgattggaatgacgacgagaagtcaattttcattgaggctatgaataactacggaaaggattttgctcggatctcgtcatgtgtgaagagcaagtcatatgaacaatgcaaagtgttctttagtaaggctcggaaatcactcggtttggatttgatccatcaaggggcagccgatgttagtatgccagctagtgataccaatggagggaagagcgatactgatgaggcctgcgctgtggaaatggattcagctatctgtagcacacagtcatgttcaaagattgcgatggatgtttgtcctactgaaggagccattggagggcctaactctgttataatctctaagcaggcagaagcatatatatcaaatgggtgcaatgctgatgttaaaattgaggaagatgagaaggtagctgataaaaattgcagcattgttgatgataagaggtccagtgatgctactcacgaagctggtcctattgacatcaattgcccaggaagcacagataagctgcaaggaactgatgatgtcgttgacctagtaaacatgcatagtaatagtggcatcagctcttcagctaagcatgcagtggccattcactcggaaatgagatccactttacattctgtagaggtccttcaaacagacaaaggcgaaggtactggtactgatttgtcctgggtggaagaatgttcacaccatgctctggataacacaccaatgaaaaatggaaattctggtgccccggctttcttggcttcagatagtggtatcaaggacaatgttcgcatctcaaacataactgctgcttccaccgttagtcctgcattcacttcaagttatcagcattctgtacctggagatatgcccctgccaaaaccaaagccacttgttaccccgcttaccccaaaggatttaatgcctgtgcagttcagttcagtgcttcctgaccccactgcaattcgtttcgagggcatagcctcaataactacgcccaacttcgaggacactggcaacagagtcagtggtgctctaggggctaaagagatgagcaagtacccagcttttagagacccatctggtaatcagcaaagcaccttgttttgtaatattgatggttatatgaatcatcgtctgacaactgaattaccatttttttctgaaagaactgcgagtggcactgtgaatacttcacaggcggatcggttgacccaaacaaaattgcagaatggcaggtccagcagcttgtgccttccaaacaattccgacggcattcaatggcccagagaccacgaaggaggactggaaggctctttgaggccttgctctcgcaatacaagctccgagggtgatgagcaacaaaagcggcctggtgatgtcaagttgtttggacagattctcagccatcagtcaaccctgcagagttctggcttgtcttgcaatggtaacaagagcaagcctccctcaccaaagattgacacatctgtgagatccatgaacaatccaatggaccgtgtggtttgttcttccaggcctggcaccactccacatctgggtctggaggaaagattggcgaggtgctatggtcatctggatggtagcacggcacagcccgagccactgctcatgatggcaaagcgccagcggtccttggccggcgtacagttttactcggctaagaacggcacgcttggtgtgttaccagattaccaacaaccttcgacgcagccacagcaatcagatcccaagcgtgtggaaaggttgtctgatccgcagaagaggaacgtgctggaactcatctcgggtttccagcagcccggcagagtcgcccgtttcgggggtgctggcatccttgtaagcggcaacgtctcggaccccatggctgctgctctcaaggctcagtatggtcccggttctaagattatgggcagcgacgtggattcttggacggacataggaagcaggtagcgccgtagcagctctactgcttgttctgttgctcattgtaccatatatttagttttggtgtaacttgaatgaaatcatcagaatatgagatgtggggggtggggagtgaatggctttcctgcccatactatctgtaggcttttggccagtagcagtcagggtttcgctgtttactggcattaacatttttactcttcttctgcagctccatacccttttggtatagcttgacatgccagcagtggcacagtgccgtaggttccctagaggtgaactagatgtttgtcagcatggtttgattttgccagcctatgcagaaaacctcacttggtctttgtaatgtggtaatgccctgtatcagtatcctagtctgatggagttttggttgagac

SEQ ID NO: 32872 - DNA, 2000 bp, Zea mays
  Clone ID: UC-ZMFLMO17036A07_FLI
cggcgtcgtctcctgtcctctccacgccaagcaacctccccaccccgccccaccctccatgctcgcctcgagatcttagcgggcagctccggagagcgccgacgagccccctgatccctcctcgccgccgccgccaaccgaccgggggaggagaggaggggaggggagcgatggagaccgccgactactccgggaagctcttcgtcggcggcatctcatgggagacggacgaggaccgcctccgcgagtacttcggccgcttcggtgaggtcactgaggccgtcatcatgcgggaccgcagcacgggccgcgctcgagggttcggtttcgtggtctttgctgacgccacggtcgccgagcgcgtcaccatcgaaaaacacatgatcgacggccgaatggtggaggccaagaaggctgttcccagggatgaccacagtattgtgagcaagagcaacacaagcagcatagggtcacctgggccgggccgtaccagaaagatctttgttggaggtctgccctcaaatgttacagaggctgacttcagggggtattttgagcagttcggtgtcataactgatgtggttgtgatgtatgatcacaacacacagagaccgaggggctttggattcatcacctatgattcagaagatgctgtggacaaagccctgcacaagagctttcatgagctaaatggtaaaatggttgaggtcaagaaggctgttccaaaggagcagtctcctggacctgttgcacgctcacctgcaggagtggggcagaactatgctatgaacagggttcatagcttcttgaatgacttcaaccaaggttacaatccgaaccctataggaggttatggcatgagggtggatggaaggtttggccagctttcaggtgcacgaaatgggctctcttcttttggcccaggttatgggatgggtatgaacgttgaaggtaggatgagtggaacttttggtgcaaactctggtttcatcagtaactccaatgggaggcaaatgggttcatacttcaatggaagttcgaatagattgagtagttctattgggtatcttggttatgactcaggatcgatgttgagttccatgtctaggaattttaatgcaggtgtaaactacccgatcaatcctacaaacatgagtgcttttgctgcccttggaaatgggggtggcgtcaattatatgggtctcccttctattgcccctgagttggcccagttgggcaacatttcaagccttgggtcagggaactttagccgtggagctggagttaataacttaagcttaccttctggctcctatgggaggagcaattcaactggtacaattggtgaacctttttctgcatcaggcaatgcatatgaagtgaacaacccagatacatatgggaacaactctatttatggtggaacatcctggaggttcccttcatctgaagttgacgtgccttctttcagtcatgatcttggaaatgttgatccgaatatgaaatcagacatatcagcaaattacatgggaaattattctgttagcaacaatcagccaagcagaggtatcacttcatagtgggagtattactacacattcatatatgacttgggatagatgaagcacccattcagtcaggcagccaggtgcgtgcatggcactgtgaatgggtgatatgtcaggttagttttgtctagctgaccagcggtgtggtttacaacaccaacatgctagagggggaggaagcggatacagaaacattttctgaggggcttcttttctttgagtcatgtttttagttttgattcctgcgcgtggctagctccttttggtttttgaatgagatgtgtagtggtgattattgcggcgcatattttagagatcgtggttcttccaacataagctggaaaaagaagtctgtatacggatgaacatgtataccaaccaaagggatgctgtattatcttgcccatttgttactacattagcctgtgtttt

SEQ ID NO: 32873 - DNA, 2095 bp, Zea mays
  Clone ID: UC-ZMFLMO17036C07_FLI
cggcgaatcgtcgtcgttgtcatcgtcgtcgcggctcctcaggaaggccaagtacggcgaagatgtcatcgttggcgtcatagactcaggcatctggccggaatccccgagcttcgacgacagcgggtacggccctgtgccgaaacggtggaaaggcgtgtgccagactggccaggcgttcaacgcgagcaactgcaaccggaaggtcatcggcgcgcggtggtacggcgccgacgtcagcgaggaggacctcaaggccgagtacaggtcggcgcgggacgccaacggccacggcacgcacacggcctctacgatcgccggctcgccggtgcggggcgcgagccacgctggcggcggcctagccgctggcatagcgcgcggaggggcaccgcgcgcgcggctggcgatatacaaggtctgccacgacgtcggcggcggcacgagctgcggcgacgcgtcgatcctcgcggccctcgacgccgccattggggatggcgtcgacgtgctatccttgtcgctgggaggaggcagtgacgaggtctacaggacgttgcacgtcgtggcggccgggatcaccgtggtgttctccgcagggaacgatggcccagtgccgcagtccgtcaccaacgccctgccgtggctcgtcacggtggcggccaccaccgtggatcgcaccttcccgacagtcgtcacgctcggcgacggagagacgaagctggtggggcaatcattgtattaccgcaaccgatcggcggcggcatcgacgagcaacgacgacttcgcttggcgccatttgatggctttcactggctgcgacgacgcggagaagctgcggtcggaaaacatcaccgggaaaatcatggtatgccgagcgccggagttcaagtccaactatcctcccacggcgcagtttagctgggccagccgagccgccatcgccggcggggccaagggcgtcatcttcgagcagtacagtaccgacgtcctcgacggccaggcctcctgccaaggccacctgccctgcgtcgtcgtggacaaagaaaccatatacacgatcctaaatagcgacagcaatgtggccaggatttcgccggcggcgaccatggtcgggccccaggtcgcctcaccgaggatcgcgacgttctcgtcgaggggccccagcgcagagttcccctccgtgctcaaggtgatgtatgcatgtgtatttgatgatctctcatcttcatgaatcaatgtatatatatatatcacaacgtgtctctgtttggacgacggacgacagcccgacatagctgcccctggagtgagcatcttggcagccaagcgtgactcgtacgtgctcctgtctgggacatccatggcatgccctcatgtctccgcagtcgtcgccttgctcaagtcggttcacccggactggtcacctgccatgatcaagtctgccattgttaccacagcgtcggtgaccgatcgattcggcctgccaatccaagccaactcggtgcaaaggaaaccggccgacgccttcgacatgggcggcggcctcatagcgccggacagggccatggaccccggcctagtgtacgacatccagccggaggaatacaaaagcttggacgaccgcgtcgaccgcctcaacctcccgtccatcgccgtgcccaacctcatgtacgactccgtcacggtctcgcgcaccgtcaccaacgtcgggccggtggaggcgacgtaccgggccgtggtcgaggcgccggccggcgtggcgatggacgtggcgccgccggtgatcaccttcgagagaggcggcgtcaggaacgccacgttcaaggtgacgttcgtggcgaagcagagagtgcagggcggctacgcgtttgggagcctgacgtggctggacgacgccaagcggcactcggtgaggatccccgtcgccgttcggaccgtcgtccgggacttcgtcgccgatgtgtctcgatgatgaacactgaacgatgtgtctgtcaaagaagaacactgtacgtctcgatgatcgtccatatatgcagtgccggtcctgacattttagaggcccagggcaagatttataaagaaggccctttataat

SEQ ID NO: 32874 - DNA, 730 bp, Zea mays
  Clone ID: UC-ZMFLMO17036C08_FLI
gttttgcacagtcatatgcacgatttgctggctataccctaacagtaaggatccgagcagttttcttagtttctaatactaaagtagttcaaatatacacacttgcaagaaacaagtgctacacattttcttcttttaggacaactgggtgatgaaaacagcacagattagtcatagataatttgtttccctcttcataactagtgcccatcttttgatgcctatgtgcatcctatgttaatgcctatactaactgatgtcttttgtaggattcaagcaaaaatatcaggatatgtgccttccacatttttaaggtatttgttgccaatccaaacaagcctcgtgagattattcaggttttggttgagaatcacagagaagtgttgaagctactccacaatctccccacaagcaaaggtgaagatgaacagcttgatgaggagagagatttaattatcaaagaaatcgagaagcttgtgcggttgtcagtataaaccctcaggaaattcgaacgtatccttgaagacatactgtgcaatatgctgccttgtatagagcttgtttttcatgtatggaaaaaaaagtttggccacaaattgcatttttcgcgagaacacttagcatttctgtcagaaaattattgtcgtgtagcagaatttgcaacaggaataatctgcattatggtgtggtgttgataccattaaggattggtgaaagtgcctgccatttg

SEQ ID NO: 32875 - DNA, 1576 bp, Zea mays
  Clone ID: UC-ZMFLMO17036C12_FLI
cgcctgcaccctctcacgagcgcccgctcgcccagatctagggttccatccgcgggcaagatgagcagcccccatggcggcctcgacgaccagatcgagcggctcatgcagtgcaagccgctcgctgagcccgaggtaagggctctgtgtgagaaggcaaaggagattctgatggaggaaagcaatgttcagcctgtaaagagtcctgttactatatgcggtgatattcatggacaatttcatgatcttgctgaactcttccgaattggtggaaagtgtccagatacgaactacctgtttatgggagattatgttgaccgtggttactactctgtcgaaactgtcacacttttggtgtctttaaaagttcgatatcctcagaggatcaccattctcagaggaaaccatgaaagccgacagattactcaagtttatgggttctatgacgaatgcttaaggaagtatggaaacgcaaatgtctggaaaacatttacagatctatttgattacttccccttgactgcattggtcgagtcagaaatattttgtttgcatggtggattatcgccatccattgagaccctcgacaacatccgcaacttcgaccgtgtccaagaagttcctcatgaaggtccaatgtgtgatcttctgtggtctgatccagatgatcgatgtggttggggtatttctccacgtggtgctgggtatacctttggacaggatatatcagagcagttcaaccataccaatagcctaaggcttattgctagagctcaccaattggttatggagggtttcaattgggctcatgagcaaaaggtcgtgactatatttagtgcacctaattattgctaccgctgtgggaacatggcatcaatcctagaagtggatgattgcagggaacatactttcatccagttcgagccagccccgagaaggggagagccagatgtaacccgtaggacacctgactattttctgtgatgcaaaagtgacgtggatctgcagcaaaggtttgatagataggcgcagtttcctggttgcagagatatataaatatatatctactatatatattggctggagttcctccgcgtgctattcttatattatttctcgcccatggcgctcttggctgtcgccggctgctttgctgcatcgtggttcaagtgtataccctactacagctggaaggactggatcgtgctcttacggtcttacctgtctctaactggttgattggcttagggtgggctgcggtggtgtgtgtgtgggttcaagcatcaggcagccatctgtattatgggaggaagtgttcccgttgtattcattttgttcccctttcttcctcatctgattttcttctcttttttttatttcttctctgtgattcttgtagagttcagaacttgtatggttctatgttgggccattagtttttttttaactctctttctctgactgccccgatttgccgtatagaattacatttctaagcgcaactagccaacctgtagcattttctgtcaccagcatttgaagttttgaactgagccctggtcgtgtccctgaggtt

SEQ ID NO: 32876 - DNA, 731 bp, Zea mays
  Clone ID: UC-ZMFLMO17036D06_FLI
ccaaggacgccggcacggcggagcctgccgctgtgacgacggagaggtcccttcctttggcgccggcgccggcgccaaagcacgcgtacgagcatgagtaccggccgccctactacgccgcgcccgcgcagccggtgctgagctaccacgcggcgcagcgcagctcgagcgtgtcgcacttcgcgccgcaggcgcagccggcgtactccacgcaacaggcgcacccgcatcaagcgtactactccgcgcagcagccacagccgcagcaggggaagcagtggtcgccgtcgtacctgtacatgccgtacccgcacgccgcggcgccggagccttactaccagcaggactactacggcccgcccgggatgcacgcgtcgcctatgcacgactcgtcgtaccgcatcttcgacgacgagaaccccaactcctgcagcgtcatgtgagaggagagcggatcggcgcggcccgggccgccgtggccagcagcagcaggtagttggggggaggcggcgccggtaccgcaatagccaatagagaaccctctctctctgtctctctctctctgtggttgtaagtagagtagcctgttgctttgctggcctcttccacttagtatagaggtcaaacctctctccatgcacgagcacgacagagctttttcttcgtttccttttaatatcttttttttactgtttctaatgataatgagatacgcacgcgcgtttacctgt

SEQ ID NO: 32877 - DNA, 603 bp, Zea mays
  Clone ID: UC-ZMFLMO17036D10_FLI
ctgcgctgatcccgcggaggatcagggagaccatacatgggtggggaaaggcgacgaggaagaagcgccggcgccgccgcggcgacgactcgacggtccgcacggagacgagcacggtgtgctcgctcacggacgacgacgaagacttcgaagacgaccaccaccaccaccaccacggaccgtcgtacgagaccccgagagccgggggccgcccgccgtacctgaagatcgagacgcatcgtcagtcgggcagcgggcacgacggccccaggcccggcggcaccccgtgcttccaccccagcggcagcggcagcgggcacgccatgctcctgcggcaggcctccgtctccgcgccgtcgtcgccgtcgtaccgcggaggcaataacgtgacaaggtcggcgtccatgcccgggatcgccgcgctgaggacaacgggctccggcacgccgacgcgcgtgagccatgaggagcccacttgatgcgcgcccgtgcatgccatggatggcttgctagtgcagacgtactgaggactgagctgctagtgtagcaccggatttgaaggtatatcgatatatatatacacacgaaaagatttggggtgac

SEQ ID NO: 32878 - DNA, 1335 bp, Zea mays
  Clone ID: UC-ZMFLMO17036D11_FLI
aaggtgaagctcaacatcgacaacatgttcgcggcgctcgagtccctcaagcaacaagggagggcggatgggccgtcctccaggaagaatcacggcgcagggcccgcactgcagcagtagcaggaaccgcctcaaaggaggcgcatggcgccatggtattgggcgagggcgtcggtgccgcgcatgcttgagttcgccgagagggcgccgagctcgagtgacgcggtgagggcatcaagctcgagctcaccatgagtctccacatcgctactgccatccactgtttcgctgccatttgcagcgactgtgctccagttcgatcgtttgggggaaaaggtgagtcctcccatttcctgtagatgcatggccgtggatgacggtaaatttatcaaattccaagctttacgggttagtcacaagcgtttactggggtagcggtatgcttccagtgaacaacaaggtaccctgtggaaagattaattattgcaattaatttactaagattacatatatattgttatttctgtgttggactgttggtttcatgttcacttttgtgtgtcgtcagccagcgattgctatgatgattacatcaaagtgtcaaactggtttataatattgatgatggatatacttgttttagaaaggtcatggagcttggttttcttgagaagacgattacaggtatcattgaggagttgattaagaggcacaagcaaattgatgcagttcatttcatacaagctttcagagccattcccccttcacctctgctgaagacatatattgaggaatttaaggatacaattgaaaataatggggatgcaactgttaattgtttattttcatttttttatcaacagacaaaatgagcagttgtacaagtatggggacacaaagtcatcccagaatatcatgcttttgtagctcaaaaaactcattaaagcgaacctgttgttctgggacaagctaaatttcccaccatttagagcttccatcaaaggtaccacaaccatctcatgttcaaacagctcctcctggaaatgcgcgccttcacctcatgccgaaacccattgaatgtcccttagaatctttttgtttgatttcgtggtggtggtggaggtggggaggaggaattgagttagttatcgcatgcccaagttcccggtttgtttcgagaggagaacagatgatcgattgcctccctgcttggttaaatgtgccatctaagatttcagaattgtaatgcaggggctggatttgatcaaaattgtcatcgtataagattggccttgtacttttttaaaaacatgcaaaacttacgcatcttcgctt

SEQ ID NO: 32879 - DNA, 1056 bp, Zea mays
  Clone ID: UC-ZMFLMO17036E04_FLI
cacgcagaggggattgatccgcaaggaagcgaaacgaaacgcaggcaaaagcgaccgaaaagggcgcaacgcaagcagtcagcagcgtttcctcttgcgttcgggcgagggcgaggcttgccgagcgagcgagcgacatgcttggggaccgcgaggagggcgacgaggagctgttcgagacggcatcgtccgtctccagcgccgacgccgactccgacgacgagggcgaccgcttccctagcgccggcgcggcggggggcgagggtccgtgcgaccagcaggaccgccgccgccgcgcgcccgtgccgcagccgcagccgcagccgctgcggaggatgaactcggacagcatctacgacatggcgtccatggtgtcgcagctagtcccagccaagtaagtgcacgcgcctcccgcctcccttccggcgacgcgaaatcacgccaggctccggttctgaagcttcgatatcgtcgtcgcgacttacagacagtactagtgattttttttttcctgctgacgaagcgaagaactgaactggtcctcctccgcaggaaagggctgtcgcggcactacgagggcaaggcccagtcgttcgcgtgcatgtcggaggtgcgctgcctggacgacctgcgcaagaaggacagcccctacaagcagaagaaggtcaagtcgtcgtgcaagggctacgtcgcgctgggagggatgatgatggccaacaagcccccctcctccggatcctgcgccggcctgggcctcgccgccgccaacgggttcaggacgtccccgattcaggacgggtaccagtaccaccagtaggcagggcaggctggcggcttggccagagagcactgcaactgcaactggaggaaggcgtttttgttcctcccgagggtcactgaactgtttttttcctctttctttccttccttcttcccgttctagactgcttgttctgccgggatttatttccttcacggacgcattagtctgtgagaaatttatgaggtggtgtgatttgttacttgttctgctagaggaacttaccgttgaccgtt

SEQ ID NO: 32880 - DNA, 1249 bp, Zea mays
  Clone ID: UC-ZMFLMO17036F11_FLI
tccctccatttcgtccttccaaccatggccgcgtgcctcccggctccagtccgcccactcctcacggtgcccttcctctatctcctccctgctcctctgccccagttcgagctgctcccatggcgccgttggccggatctccctggccgtgtgcccctgcgctcggtcgcctctcctgcagctcgctctctcctccctccatctctctcaagcgctagccgccgtggttccctcccctgggctctgctcgccggagcttcctgctcggccacgcccatgcccaacgcctagccgagcggcctcactgcacgttcctcctttctccaagttgagctccatctccctgcgcgcggtactctctccggcgtccagttttctccgcgccgaagttccctccatgtgttgcccagcaccagttcctctgtggccacgcgcatgaatccctgctagccagcatgctctggattcagccatggagcatctcctgcgtctctctctattcgctggccgagatccctgcctgcgcgctctgtttcttcttgccgagcgccactcgcccagccaaagccacccagccgaagtcccatggcgcttcttcggctgaatttcctgctcgcagccgcgaagtcccctgctcggccttcttcctcggtgtcgcgcgcccggttccagctcgcccctgacgcgcgcgcttctcagctcgtctctctctctgcacgccgagcggctcgcacaggtccttctctctgccccggctcgcggatctcccatgtgccacgcgcgccctcggccatgaaggacgccgcgcgccgctcagccttgtcatttccttgtcatgctcgcccagctctgttgccgcgccctgccttcgtggccgctgcgcacttgcctctgctcggcaccgagtctgtttgccgcggacgcgggtcgccgcgctgcgcaggctgctctctctagtcagactgtctccagcagcgtcccttaaatttcgtcccctaaaggaatattctttgttctttacagaacactctaaaagattttgtcctctatatattctccgtctccagcagcgtcctctaaattccgtcccctaaagctacagtgttaacagattcacattttccatttctttttcatttttctttgttttcttctcatttgacactatataaatgatacgaaaaaattgtatttattaattttgaaagtaataaattcgaaatatcaataataattacattgcttgttt

SEQ ID NO: 32881 - DNA, 966 bp, Zea mays
  Clone ID: UC-ZMFLMO17036G01_FLI
gtgagtgtcctcgaacaagatgtatgtagaggagtagcacatccggtggtgcaacgaccaggtgtactacctcgctgatgagcccggggtgcacttcatttggcagtccagccaagagtgatcggtactcaccatatcgcgcgcgttcgacgactattatatcaaggattgtggcgtcatctcgacaccggagaatgagatgaatgaacgtgagttatctgcgctgaaatctgtcattaagtgcattgaagagcacaaacttgagcagcagtaccctgtggatccacttcagaaaagggttttgcagctagagaaagcaaaggcagacaagaggatggctgttgaagcagcaaagccgcagtccaagaggcctcgtgccaatggatcggcctttgcaacccgtgctacaggctttgctgacaagagcttctactcagcaaccccagagaggcatccattcaatccttgcgagaggcagtttgtgtatggcgctgaggttcatcttcctcccatgatgacctcagcgtcttacacgatgcaacctgcccatggaccttattacggtaatggctacccagttcagtaccaggtctcgtatatccactaatggagacagccaggtgcaggtgctctttcctaacaatctagcttaacctgctgctctttgctgtagtcgtatcagttactctgcaagtttccctagctggaaatatttggaccactcaatgtgtgtgctctgagtggctgttgtggtaattttatgccctaatgacatgacataaattactcctaatatttagctatcgatgaatctcccaatgtacttcattcggcttgtgaaatgcctgtcactgaagaagcgcccaggggcatgaaaatatcatgtcgtcatggacgcctgccaaactgtcagttgcatcctgactggttgttgtttttagtttggtgtatcttttatgcccaagt

SEQ ID NO: 32882 - DNA, 1727 bp, Zea mays
  Clone ID: UC-ZMFLMO17036G10_FLI
gaagaaatgatgctgcttgggttcatatctctgcttctggctgcgacgtcaagaatcatttcggggatctgcatcgactccaagtactacaacagcagattctccccgtgcaccaaagaagaggtccaagaatcgataaatgcagagcatgccattgctcacgcgcgcaagcatctactggaggtcatcctgcaccattcaccgaggagaaatctgaaaactagttaccataaccatgaaggctgccgtgagggatatgagtcatttgtttcgcatgaaggtttggagcagctgcaccggtttatatttgtaatggctgtgactcatgtgacttatagctgcctgacgatgttactagcaatactcaagatccataaatggagaaaatgggaggatgaagcattcagggataatcatgaatcattttctcagatcgcatatgagtcagcaactagaaggcaaccagcacttaccaaatcctattcattccgctcttggagccaaaataatgtggtcatgtggcttgtttgctttattgcgcaatttggtcagtctgttgttcgagcagactatcttatcctccgcaagggttttataatgacccacaatcttccgccaacatatgatttccacaattacatgatacgctcaatggaagaggagtttgagaagattgtcggagtgagtggactgttgtggggcttcgttgttgcttttatgttatttaatgtagacggatccaacctgtacttttggatagcaattcttcctgtaactcttgttcttctggtgggtgcaaagctgcagcatgtgattgcgactctaacagcagagggcgcaaagatgagcacctacgggccaaggatacagccaagggatgatctcttttggttcaagaaaccagagtttctcctttggttgatacacttcgttctctttcagaatgccttcgagttggcttcgttcttctggttctggtggcaatttggttatgattcatgcttcatcaaaaaccaccttttggtatattgccgccttatactggggtttgctggacagttcctgtgcagttacagtacattacctgtatatgctctggtcactcagatggggtccaagtacaaggctgcgctgatcccgcggaggatcagggagaccatacatgggtggggaaaggcgacgaggaagaagcgccggcgccgccgcggcgacgactcgacggtccgcacggagacgagcacggtgtgctcgctcacggacgacgacgaagacttcgaagacgaccaccaccaccaccaccacggaccgtcgtacgagaccccgagagccgggggccgcccgccgtacctgaagatcgagacgcatcgtcagtcgggcagcgggcacgacggccccaggcccggcggcaccccgtgcttccaccccagcggcagcggcagcgggcacgccatgctcctgcggcaggcctccgtctccgcgccgtcgtcgccgtcgtaccgcggaggcaataacgtgacaaggtcggcgtccatgcccgggatcgccgcgctgaggacaacgggctccggcacgccgacgcgcgtgagccatgaggagcccacttgatgcgcgcccgtgcatgccatggatggcttgctagtgcagacgtactgaggactgagctgctagtgtagcaccggatttgaaggtatatcgatatatatatacacacgaaaagatttggggtg

SEQ ID NO: 32883 - DNA, 1719 bp, Zea mays
  Clone ID: UC-ZMFLMO17036H04_FLI
gcattgcctcccagtttccccatccccagctccgtttccgtctccggcaccaggaccagtgccacgccaaccaccgctacctgctccacgccaaacgccagttgctttgcagctactcgtgcagccgtgctcgccgcacacgattggcgccagtctttagttcaccggcaaagcttgttttcctttttcttttcttttcttttctacccttgggaagtctgaactgtactgccacgtatgtctgacctggcgtggatggacggcgcaggcttccgcgagcgcgcgggtgtaccacgtgacggactacggcgcggacccgaccggcgccgccgacgccacggcggcgatcagcaaggccatagctgacgcgttccgcccgcccaccaacgccaccatgaccggcggcatccccgacctcggcggcgccgaggtgcacctcgacggcggcacgtacctcatcaaggggcccctcacgctgccggcatccggcggcggcaacttcaagatccacagcgggtcgctgcgcgcgtccgacgacttcccgacggaccggtacctgatcgagctgtcggcggccaagagcagccggagctacgactacgagtacgccacgctgcgggacctgatgctggactgcagctaccgcggcggcggcgtggcggtggtggactcgctccgcgtcgccgtcgacaactgctacgtggcgcacttcgcgtccgacggcgtcgcggtgcgcggcggccacgagacgctcatccgcaacacctacctcggccagcacatgacggccgggggcgacccgggggagcgcggcttcacgggcacggccatccgcctcgacggcaacgacaactccgtgtccgacgtcgtcatcttctccgcggccacggggatcatggtcaccgcgccggccaactccatctccggcgtgcactgctacaacaaggccacgggcttcggcggcaccggcatccacctcaagatcccgggcctcacgcaggcgtggatcagcaactgctacatggactacaccagcatcgtcgccgaggaccccgtgctgctccacgtctccggatccttcttcctcggcgacgccaacgtcgtcctcaaggccgtcagcggcgtcgccaggggcgtccaggtcgtcggcaacatcttcagcggcagggacaagggcgtcgacatcgtgcagctggacggcgccttcgccaccgtggaccaggtgtacgtgcagcagaactccgccacggggatgaccgtcaggtccacctccgcgcgcgcatcgctccagggcaacgggacctcctggacgctcgacttctcgccggtgctgctgttcccggaccgcatcggccacgtgcagtactcgctcgtcgccggcgacgagttcccgggccacacgctccggaacgtgtccgggaaccaggtcgtggtcgccaccgacaaggccgtctcggccacggtccacgtcttggtggaccagaacagcgactgagataagataagagacactcgagagtgcctgcgtgcacgcagtatgcgtgctgctgcctgctcgcgcggctgctgcggagcaaggcgttattccttcgtttctttcttcttctcggaaatttcagccattcatgtcgtcgggaagatgacaattgtttgatgcgacaaaatgctccagaatgtatcattcttttgctgtatgaaatgaaatgattcagaagctcc

SEQ ID NO: 32884 - DNA, 1183 bp, Zea mays
  Clone ID: UC-ZMFLMO17036H07_FLI
gtgaaccacgagtcccggcagggcctccgcgagttcgtggcggagatcgcgtctatcggccggctccgccaccgcaacctggtccagctccagggctggtgccgccgccgcggcgaccttctcctcgtctacgactacatgcccaacggcagcctggaccgccacctcttcggcgaccacctcaaagcgtcgcgcctgacctggccggtccgctaccgcatcctccgcgacgtcgcgtcggcgctgctgtacctgcacgagggatgggagagcgtcgtcctccaccgcgacgtcaaggccagcaacgtgctcctcgacgccgacatgtcggcgcggctcggcgacttcggtctcgccaagctccacgagcgcgggaccaacccgagcacgacgcgcgtggtgggcaccctggggtacctggctcccgagctgacgcggacggggaaggccacgacggctgccgacgtgttcgcgttcggtgccctggtgctggaggtggtggccgggcggcatcccatagagccccgcgcgccgcccgaggagctggtgctggccgagtgggcgtgggagcggtacgcggcgggggaggtggagaaggtggtggacgcccggctcgccggcgcgtacgacttcgcggaggccgccgcggccgtgaaggtggggctgtggtgctcgcacccggcgccggcgacgcggcccaccatgcgggaggtggcgaggtaccttgacggcggggatgccagcgaggtgccggagcctcctcccccgcctcccatgccgccggcatactctggcgaggtcgggttcgacgatttcgtgcactcgtacccgtcgtcgtcgttcgagcgcgccgccgcagctggcggcggctgggacggcgggacccagatgtcggtcgccacgttccccttctcgtctctgtccatgcggtcatctcacgtcagcacgtgatgcatcgaaattcctgggcccgcttgccagtaagatgacgacttcgtcaaacataatagtgtgaccttggagctaacttgtttatatctgagctgtctattcttttactgcactcagtaacggcaaatggctgagtgacagttggtagcctcttatttaatctttttctttggagtttttgaggagtgtttggttcgaaattaagtatatgtaaaatcgaattttgaagggt

SEQ ID NO: 32885 - DNA, 1715 bp, Zea mays
  Clone ID: UC-ZMFLMO17036H09_FLI
ctgcttgggttcatatctctgcttctggctgcgacgtcaagtttcatttcggggatctgcatcgactccaagtactacaacagcagattctccccgtgcaccaaagaagaggtccaagaatcgataaatgcagagcatgccattgctcacgcgcgcaagcatctactggaggtcatcctgcaccattcaccgaggagaaatctgaaaactagttaccataaccatgaaggctgccgtgagggatatgagtcatttgtttcgcatgaaggtttggagcagctgcaccggtttatatttgtaatggctgtgactcatgtgacttatagctgcctgacgatgttactagcaatactcaagatccataaatggagaaaatgggaggatgaagcattcagggataatcatgaatcattttctcagatcgcatatgagtcagcaactagaaggcaaccagcacttaccaaatcctattcattccgctcttggagccaaaataatgtggtcatgtggcttgtttgctttattgcgcaatttggtcagtctgttgttcgagcagactatcttatcctccgcaagggttttataatgacccacaatcttccgccaacatatgatttccacaattacatgatacgctcaatggaagaggagtttgagaagattgtcggagtgagtggactgttgtggggcttcgttgttgcttttatgttatttaatgtagacggatccaacctgtacttttggatagcaattcttcctgtaactcttgttcttctggtgggtgcaaagctgcagcatgtgattgcgactctaacagcagagggcgcaaagatgagcacctacgggccaaggatacagccaagggatgatctcttttggttcaagaaaccagagtttctcctttggttgatacacttcgttctctttcagaatgccttcgagttggcttcgttcttctggttctggtggcaatttggttatgattcatgcttcatcaaaaaccaccttttggtatattgccgccttatactggggtttgctggacagttcctgtgcagttacagtacattacctgtatatgctctggtcactcagatggggtccaagtacaaggctgcgctgatcccgcggaggatcagggagaccatacatgggtggggaaaggcgacgaggaagaagcgccggcgccgccgcggcgacgactcgacggtccgcacggagacgagcacggtgtgctcgctcacggacgacgacgaagacttcgaagacgaccaccaccaccaccaccacggaccgtcgtacgagaccccgagagccgggggccgcccgccgtacctgaagatcgagacgcatcgtcagtcgggcagcgggcacgacggccccaggcccggcggcaccccgtgcttccaccccagcggcagcggcagcgggcacgccatgctcctgcggcaggcctccgtctccgcgccgtcgtcgccgtcgtaccgcggaggcaataacgtgacaaggtcggcgtccatgcccgggatcgccgcgctgaggacaacgggctccggcacgccgacgcgcgtgagccatgaggagcccacttgatgcgcgcccgtgcatgccatggatggcttgctagtgcagacgtactgaggactgagctgctagtgtagcaccggatttgaaggtatatcgatatatatatacacacgaaaagatttggggtg

SEQ ID NO: 32886 - DNA, 1933 bp, Zea mays
  Clone ID: UC-ZMFLMO17037B06_FLI
atttgcgactaatatttttctatgataatgaacaataaactaatacaattcggacaatgatgagcccaacacaagaatattgtacaattccaacaatagaaacaattgcaatcatcattcacgtatagtatgtacccaaacctttaggtgcacttgccgatgccacctagcaaaaaccgccgcataaacaaactcttccgagctatagcgcgcacctacataacgtgctcgccttccgcttcctccggccgatacatacgccaacgccgatgccgacgacgacgagcgcatcgacgacgagggcggcgcagcgccgccggagaagctgcaagggtccaccgccacgccagccatggtgctgctccttaggcctcgacccctccacggtcgccgccaccgccaccgctgccggccggagccccctccccgcaccgccgcaccaggtcgcgccgccgctctcccgccgcatccgctccccgggacgcgtatcccccatcgacgacccgaccttgcctgcctccgtgggttcgtctgtttccgtgcgactgtcgtccgtcaccgaatgcccgcctcctgccctgctgggtccgccgccgggcgctgtggagaagccgagggaaattctgaacctgaggctggtcgacaaaggcgtgatcttggaggtgaatgagttggagagggtgcgcggggagagcgaggtggtgaggaaggttgttggggaactaggcggcgagttgacggtggaagggatggtggaggtggaggccttcagggaagcggtggacatgatgttggaagacgaagacgaggccgctgcgatgaggcggctcgctcgtggtggtgtcgcgcgagccatcgacgtgctcgaggtgagctctccgctgttatattacgctgctactgcttgcttactgatttgtgctcaaattttactctttgtatgcctgttaactaccaagttgtctgaaaatgtgtactggttttatgctaactagtaaacaaattttactatcaaattttactctttatatgcctgttaacgagtaaacaaatttctcaggtatcattgtcactcgtgtttgacagaggggttaagagctgtgtaaggtacctggacgctgttccgtggagcgaatctgaagaggagacaatcaagaggctgatgtctcagcatccttcgtacaaggcagctttgagaaacctgctggcggcgaggctgcagcccgccgagaggcctgcctcgtcggcagaagcagaactggtcgttgaactggccgactccatcacgaaggggaccaacaacaacgcccggaaagagctgcggaaccgcatctgccattcgtgcctgaactctctggcgcgattgctgggagaagaatccccggagccggatcagacgtccttgccatcagttggaagaggaggagtaccggtaccgccacctgagactgagaccgagagcatctacaggctagtcgaggacatcaactggctgctgcagattctgatcgacaggcagatgggggaggagttcgtcgagctgtgggccgaccaaacgagcctcagcggcgtgcacggacgggcgtcgccgatggtgcgccacgagctgagccggatctcggccacggtcttcatcgccatggggagcggcaggctccagtgcgccggagccagacggttcggcgtcttccaggcctggttcaggccgatgctggcggacttcggttggctccggaggtaccccaagggcctgaacgtgacggccctggaggaagggatcgggcaggcgctgctgacgctcacgctggagcagcagcaggcgctgttcttggagtggttcggggctttcggcagccacggccgggagtgcccggacctgatgagagccttccaggtctggtggcggcggtcgttcgtgagatgagatcattag

SEQ ID NO: 32887 - DNA, 1622 bp, Zea mays
  Clone ID: UC-ZMFLMO17037B09_FLI
ggcggggttgttgtcgcttgtggccagccgccagcacaaggcgatcgagagtggtgaccaccagtaaactgcaaagtgcaaaccaaacaccgcccacgagaaagcggaggagggagcaatggcggagccgagccagcagcagcagctgcggtcgttcgtggaggtgccggcgggctcccacttccccatccagaacctgcccttcggggtcttccgccggcggggggtgcaggcgcaggcgccgctccccgcggtggccatcggggacttcgcgctcgacctcgccgccgtcgccgacgcggggctcttcgacgggcccgcgctctccggctccccgtgcttccaccaggagacgctcaacatgttcttggggatgggccggccggcgtggagggaggcgcgcgccacgctacagaaaatcctatcagccgacgagcccgtcttgcgtgacaacgaagcgctgaggaacaagtgtctggtaccaatgagtgatatagagatggttctaccaatcacggttggaggttacacggacttcttttgttctgtgcaccatgcaaggaattgtggattcatcttccgagggccgcagactccagtcaatccaaattggttttatcttccaataggatacaatgggcgggcatcatctatagttgtgtctggaaccgatgtcactaggcccaggggacaaggacatccaacaggaaactccgctccttattttggtccctcgcagaagcttgattttgagcttgagatggctgccattgttggtccagggaatgaattaggcaaacctattgatattaatgacgccgaagaacatatttttggcctaactttgatgaatgattggagtgccagagatatccaggcttgggagactatacctcttggacctttccttgggaaaagcttcagtaccacggtatcaccatggattgttaccctagatgctttgaagcctttcatgtgtgatgctcctaagcaggaacccgagcctttaccatacttagccgaaaagaatcacataaattatgacattcctcttgaagtctggattaagccgaaagatcaaaatgacgcatcaattgtcacaaaaactaatttcaagcatctgtattggacgctgacacagcagctagcacaccacaccatcaacggatgcaacatgaggccgggggatatatttgcgactggcacactgagtggacctgaacgggactccctcgggtgtctgctggagctgacatggaacgggcagaaggagataccggtggggaatttgacccgcaagttcctagaagatggagatgaagtcatcttgacaggatgttgcaagggtgaaggctacaacattggttttggaacctgcaccgggaaggttctgccggcacttccctgagccaacacgtcttggcatcagttctccggagtctcaatgatctcagctatcagagagttgtctcaacggtctcaactatcaaagagttcatgccgctatctagcaaggctgctatgtaactgaacaatatgaatatgggttgttttcctgggctgttgaaaatgaggagactgatgctctgttgtgcaataaaatcgcttcaccattttatacg

SEQ ID NO: 32888 - DNA, 456 bp, Zea mays
  Clone ID: UC-ZMFLMO17037C05_FLI
gaagagttaacttgggattatggcatcgattttgatgacatggaagggcccagtaaaccgttcagatgcatgtgtggaagtagatactgccgcgatccgaacaatccaaggaggatgggtagagcagctgctaagcgaaagtaggcagggagcgcggacttggttggagttgagcacaccaacttttgctgtgggggggtctggtttcgtgtttgatgtggagtaatgcagtaccatcacctcagctagtattaagtgtagataggtgtggatgattttggtgaatggtgttatggacggaaatgctgcaggctgagcgacctagtaacctatgccatgtagtggcatctaaattagcctgggattgtgtatgcgtaaaaagaacgcctaagacttaaccatgttattatgtcagcttggtacatggtgataaaaagaatctgaccatttcatgtc

SEQ ID NO: 32889 - DNA, 1097 bp, Zea mays
  Clone ID: UC-ZMFLMO17037C06_FLI
gccaactagtaccttcaaggttggtctgagttttttaattaatatattcattattcgcaagcctctcaatgcagtttgtagtttattcatatgcatcatggtagaaaataacgagacttttttgtatattgctgtgggcatctggcatgatgtttacttcaccttttatttttacttccttttgaaggctggaatcgagacagcaaagctctttctgaataaaggagacacggtcatttatactgctggccgggatcgcctagtccaaaaggcaattgttgctgaaagtggacctatgattgctactcccctcatgttgctggtgaataataggacagcaagcgccagtgaaatagttgcttcagcacttcatgacaattgcaaagctgttcttgttggcgaaaggacttttggcaaggtttgaaccacccaaaagaggatactgtgacgtttttctttccctgtgatcaacaggattatattatgccctttttgtgtctggtaactcatgtctagggtgatgcagggcttaatccaatctgtatttgaacttcatgatggttctggtattgtcgtcacagttggcaaatacgtgacaccaaaccacaaggatatcaatgggaatggaatagaaccggattacaatcgtcttcctgatttcaatgaagccaaagatttcctttcacgatgcggaattaaagaattaagctgacagacgtttgtggcagatttcaatgaagcattatattctgaaggttctctcacgggtcagacgacctaatatgatagaattgatatggaacagagctgatgctccgcctgactactacacgaccctctatgtcgcgcgccgctgataccataagcagcgtatcggcgagcgtcgacacagcctctacagtacagggcgaacatgttgctggtggcctctgctgcatggtgcaagaaatagagtacacgtggcgctcatctaaggcatcgcaaatggttgattcctaatccaacacaatatgtgaatagcttgtggtctgttcaaggcacttagtcaaaatatacttctgactaaatcctttttaattgtcggttcacgtcctgtc

SEQ ID NO: 32890 - DNA, 2484 bp, Zea mays
  Clone ID: UC-ZMFLMO17037D08_FLI
gtcgcgcgcttcgaccacgtcctactcgtcgcggcctccagggactgcacggtggccaagctccagagggaggtcgtgtccgtgctcgggctgcgcgacgcgcccacggagcaggcgcaggccgccgggatcctgagcttcctgagggacaagagcttcctgctgctgttggacagcgtgtgggaacgtctggacctggagagggtcggcatcccgcagcccctcggcatggctaacggcaaggtgaggaagatcatagtggcgtcgaggagcgaggccttgtgcgccgacatgggctgccgcaacaagatcaagatggagtgcttgaacgaggaggatgcgtggagcctgtttcaagctaatgttggcggcgacatcatccatggccacgctcaaattcctgcacttgctaaacaggtcgctgccgaatgcaagtgcttgcctttggccctcgtcaccgtcggccgcgcaatgtcaaataagcgcacaccagaggagtggtccaacgcactcgacaccctcaaggcatcgctccgctccggcacgcccggcttggacaagagcacgcacgcgctagtgaagttctgctacgacaacctggagagcgacatggtgagggaatgcctcctgacctgtgcgctatggccggaggaccacaacatctccaaggaggagctcgtgcagagctggataggactcggcctgctccccgatctcggcgacatcgaagaggcccacaggttcgggctctcggtgattgccatcatgatggccgcgtgcctgctggagcccggggacaaccaccgctacaacatgttcccgtcagacactcacgtcaggatgcacgatgtcgtgcgcgacgcggcgctccggctcgcgcccgccaagtggctggtccgcgcaggcgctgggctcagggagcccccgcgcgaggaggcgctgtggcggggcgcgcagcgcgtgtccctgatgcacaacaccatcgaggacgtgccggcgaaggtgggtggcgccctagcggacgcgcagccggcgtcgctgatgctccagtgcaacaaggccctgccgaagaggatgctccaggcgatccagcatttcaccaagctcacgtacctggacctcgaggacaccggcattcaggacgccttccccatggagatctgctgtttggtcagcttgaagcacctcaacctatccaagaacaagatcctgtcgctgccgatggagctgggcaacctgagccagctcgagtacttctacctgcgcgacaactactacatccagatcaccataccaccggggctgatctcgcggcttgggaagctgcaggtgctggaggttttcaccgcgagcatcgtctccgtcgcggacaactacgtcgcgccagtcattgacgacctcgagagcagcggcgcgcgcatggcgtcgctcggcatctggctcgacaccacccgcgacttggagcgcctcgcgcggctagcgccgggcgtgcgcgcccggtcgctgcacctgcgcaagttagaagggacgcgcgccctgccgctgctgtccgcggagcacgcgccggaacttgccggcgtgcaggagagcctgcgggagctggtggtctactcctccgacgtcgaggaggtcacggccgacgcgcacgtgcccatgctggaggtcatcaagtttgggttccttacgaagctgcgcgtcatggcgtggtcccacgccgccgggtccaacctccgcgaggtcgccatgggcgcgtgccacagtctaactcacctgacgtgggtgcagaacctcccctgcctagaatcgctgaacctcagcgggtgcaacgggctgacgagactgctgggtggcgcggaggacagcggcagcgccacggaggaggtgatcgtgttcccgcgtctgaagctgctggccctgctggggctgccgaagctggaggccgtgcgagtcgagggagagtgcgcgttcccggagctgcggcgcctgcagacgagggggtgcccgcggctgaagaggattcctatgcgcccggcgcgcgggcagcaaggtaccgtgcggatcgagtgcgacaagcactggtggaacgctctacagtgggcgggcgaggacgtcaaggcctgcttcgtccctgtgctgtgagtcatttcactaggcggacggagctgcaattttggcgccagttgatatgttcgacgaccacggtccacgggttgcaccacggttcaaggcaagatgagcgatgagattggaaatatctctcgaacagcgaaaaggcggtttgttttggatttcttctaagaacaattcaaattttggcttaattcccgttatgttgagaactggtgacctagttaaaggcgcttttgtcagtgctccggcttcttaaagacacttccggatctaattcctctagctctttggcttttctaaaaaagttgtagccattttataatttgtttagcaaaataacttatttctgtgtct

SEQ ID NO: 32891 - DNA, 1109 bp, Zea mays
  Clone ID: UC-ZMFLMO17037E05_FLI
ctcttcccggccgaaggagcaccgccccagccgatcttctctcccccacgccccatcaggccgtttctggctgctcttgggcctccctcgccctccctgacggccccgagctcgccctccatctccgccccagctcgcgccatctcggtgcctcgagctcgtcgtccgcgcttctgtggccactgccgggaagcatgaggaggaggcctgggatcgctggcttgcagaatgcggcggctactcgtgaccaattccggctggtcggggagaatgtggccaaggtgaggaccgatgtcatgaaggagcagcttgcgacgttccggtcacagctcgaggaattcgctcgcaagcataagagtgacatccgtaaaaacccagtattcagacagcagttccatgagatgtgcgcaaaagtcggagtagatccattggcatctaataaaggagtctgggcagaacttctagggattggtgacttctactatgaacttggggttcagatagttgacatatgcattgctaccagatcacataatggtggcttgattgacttactagatctccgcaaactgctcggtcagaagaggaaagctactcttgaatcattatctgaagatgactgtttgcgtgctataagcaagctaaaagtccttggtagtggttttgaagtaatttctgttgggaggagaaagcttgtgcgttcagttcctaccgaattaaataaagaccacagtgggatacttgggctagctcaggctgatggctatgtcacggtggaacaagttgaaaaggaattctcatggtctactgggcgtgcgattgatgctcttgaaactttgctcaaggaggggcttgctatgatcgacgatggccacagggatggcaagcgaagatattggttcccatgcgtcactgtcagctccgacacagcagctgttgaagtcaagtcataacctgtaagtaaaatgtcgattccacagtgtgttcacgtccccattccatgaggatgaggtggaaaccagtggcacggatgtgtgtaatgattggtatgttaagaattcagttggaacatcacactttgaatatgaaaggtggcatgattcttattt

SEQ ID NO: 32892 - DNA, 1495 bp, Zea mays
  Clone ID: UC-ZMFLMO17037E09_FLI
tcggctcctcgcgtgcgtgcttaccccggcgaatattcgaccacggaagccgcataacctccgtccatcccatccccgctcgcctctcctctcctcgccccgctctagacgatcgatggccgcgacggcggcggaggagatggagaggatggtggaggcggagtgggaggaggggaagcaggggatgaggaagaggaagcggtacgggctggtggagtaccgggcgctgccggcttacctgcgggacaacgagtacatccaccgccactaccgctgcgagtggccgctcccgcaggtgctgctctccgccttctccatccacaacgagaccctcaacgtctggacgcatcttataggatttttcatctttctcgctctgaccatatacacagcaacacaagttccaaatgcagtagatatccggagcttgcagcatttgccagatgtactgagaaaggctgatattcataagattcaggcagagcttgtgtcatgtcttccgtcgttacctcacctttcagatctacaaaagctgaaggatgagctgaagacctcttggaattctatggaggttcttccatctctgtcccgttggcatctcttggagttactcgcaaattgtctgccacacagatttacccatcccaatgaaacaagtttgtctgttcttcaaagcatgaaggaggatctagcaagcctgattgcaccgcaactgatcagaccaattgcgcggtggccattctatgccttcttgggaggagccatgttctgcctcctggccagcagcacttgccaccttctctcctgccattctcgccgcctagcatacattatgcttcggcttgattacgcaggcatcgcagctctaatcgccacatccttctaccctccagtatactattctttcatgtgctaccccttcttttgcaacctgtacctcagtttcataaccatcctaggagtggcaactatcgcgttctctctacttccggtcttccaaaatccggagttcagaaccatcagagcatgcctcttctttggcatgggtgcatctggcgtgatacctgttcttcacaagctagtactcttctggcaccaaccggaggcattgcacacgaccggatacgaaattctgatggggctcttctacgggctgggagcattggtatatgcggcacgggtacctgagcgctggatgcctgggaagtttgacatcgccgggcacagccaccagctgttccacgtcttggttgttgccggagcctacacacactaccacgcagggcttgtgtacctcaagtggagagacctgcaaggctgctgaaaggtactgcatcgttgaggatgtggatagattgtagattccgtgaattcaggctgaaggtcatggtctgttgtaaattgtaacagtaatcatgaaacaattgctacaagtctaccaggtagtcgggcttccattaataatcaattgaagactagtatttatgctattact

SEQ ID NO: 32893 - DNA, 1587 bp, Zea mays
  Clone ID: UC-ZMFLMO17037E11_FLI
gggatggccgagcccgccaaccggcggatggaggccgtccgccgtcacctccttctgccttcacccgcgccgcttcgccctaatccgttaagcagcctcgcggaggtggagcccagcccggtgatcattggcgggatggtgctggatatccatgccaagccttccgtgccgccccatcatggtaccactgtccctggaatggttaaatacatcagtggaggcgtagcaagaaatattgctgagtgcatgtcaaagcttgggacacaacccttcatgataagtgttgttggaaatgatttggcaggggacttccttttgaagtactggaggtcagctggattatgtacagaaggttgataatgttgcaaccccagtagtatcaaatgtgtttgacggtactggagaattaatcgctggagttgcaagtgttcaagcagttgaaaattttattacttcgagctggatttatcacttccgtaatcatattgctaatgcaccacttgtaatgcttgatgcgaatttatctcctgagtcacttaaagcagcttgcataatggcatatgaatttggggtgcctgtgttatttgagccagtctcagtggtgaagtgtcgaagaattgcaccagttgcagaatatataacttgcacttcccccaatgaaattgagcttgttgccatggcaaattcattatctccatcagtgaaatataattttcacaaaatagagcagttcaaggagaaagcagatactgttgaatatatttttgaaatgcttagcccagcaatgttcttcctacttgagaagggcatcaagttgcttatcgtgacacttggctcaaatggtgtttttgtttgttgcaaagagcacactaacttcatgaaagaccagcacaagtgcaaacagacgcctttctccagacagctacttgaaaaaatggacgggtgttttccatcaaacaatcttgctaatctgtgcagagaaagctcttcaagaacatgtgtttttcatttacctgcaatatcggcctctgtgataagcctcacaggtgctggcgattgtttggttggtggtgttctttcagctctatgtgcaggcttcgatatcatccggagcgttgcagttggggttgctatagcaaaggcatctgtggaatctgaagcaaacatacctgatgacatttctgctgcgagtattgcagatgatgcacaaagtgttttgcattctgctaaggtgctttggtgcaaatgaagaatagaaaaactaccatcccggtgtaaattgaagacagtcaggtggtattgttgaagctattgaactctgttactcttccaacggcacacggataagaatgaaatcgctatatatgatggattttttgttggaagaacagagggatcacaaatcagaattctttctactatagcatatatttttcatgtacactgtgggtgcaacttcgatcaagggagcaaattcttttgtattttcgagttagagagattatgtgatgaaaaattggttagcgtcaaatttgcaattgcaaagtgactaatataatgacataatataatacactgataagatat

SEQ ID NO: 32894 - DNA, 676 bp, Zea mays
  Clone ID: UC-ZMFLMO17037E12_FLI
cctgtctcttcctcatactgcgctaccgaagacgaaggcggcagcaaatacggtggcgatggaagcaaccgcgatgaggaggaggaggaagaggaggagtccatggtctccgatgccgcctctcatgcccctacgactgcaggcgccaccgcactgataccagctggcaggtacaaggagctgaagaagctcaagaaaaagcctttcggcaaagccctggaccatgacggttccctggaggatactgcgagctctccggtgaatagcccaaagtgttgtgtcacagctggaattgagtcctaaaaggaggtgcaacatcagggacctcaccaagggagtcgttggaattggcgatgatcacggcggggaggggatggacgtctgtacagatgcaacgaccacggaaggagcgaggcttggtgatcagtaccacacgagcatagctccatgtgcggagctgaaggacaaggggatttgtttgttccccttttccgtgctgctgcactaccatgggccaaactgaggaaaaaaacaatatgcgaatgaacagcatatgtagtgtttcgcaacttacactctatgcgcgcatgcatgtgtggtatgaacgaatgcaagaagaatgtgatactgtggatatatatatgtttttccttaatgaatatatgtgaatattact

SEQ ID NO: 32895 - DNA, 1675 bp, Zea mays
  Clone ID: UC-ZMFLMO17037F07_FLI
gtcctcagttgagagatttagatagaggggttgatgttgttgttgcaacacctggaaggttaaatgacatcttggagatgcgaaaggtgacaattggaagtgttgattcacttgttgctaatagttctattactcagcatatagagatcataacaccctcagaaaaacaacggcgcctggagcagatattacgatcccaggattcaggttcaaagatattaatattttgtaccaccaagaggatgtgtgaccaacttgcaaggacactcaccaggcagtttggagcttcggccattcatggtgacaagtcccaaagtgaaagggagaaggttctgaatcagtttcgatctgggcggtctcccattttagtggcaactgatgttgctgcgcgaggtttggacatcaaagatatcagggtagtgatcaactatgacttccccactggtgttgaagactacgttcacaggattggcaggacaggaagggctggtgccactggtgttgcatatacatttttttgtgatcaggattcaaaatatgctgctgacctaatcaaaattctggaaggggcaaaccaacgagtgccccgtgatttagaggatatggcttctcgtggcggtggacgaggtaggaagaggaaccattgggcatcccgccctgacaggggtggttcacgttctgaactggattcaaggtacagcagcagagatggactagcatcttctgggaaatcagagagtggtcgtggcagtcgtggaagggatgataatggtagccgtggcaggtacgaccctggtgaaaccgatgggcgatctcgtaggtctactagaggccgcagtagaagccgtagcaaaagtgacagtagaagccgtagcccaagtcccaagaagtcacgtcgtcatgaaggtagacgtagcaggactaagagcaggagcaggagcaggagccgtagaaatcatggtgctagccacagcaagagtcgcagccctgtcgctagccgtaggtatgaaaagactgcttcaggatctgctcggcctaactcggggcatgcagagcacaaaagccctccaagatctcactctagggatgaccatgtgaaccactctgaccacaaggatgaccacatggaagatgggaagatggaaagggttgatcttgatcgctcgcccagcccacacgatgacaagtctgctccatatagtcctgtgtacaatggcaaagccagtggctcaatgagccccaacggtcagccagaggcaggtgccaaatttgttgaaccttctgggaaacctgagcctgcatctccagtgcgctgcagcaaaggcagagatgatgatgaggaaggtatcatagacgaggatggagagattggtgaggatgatccgcgtgcaaatgcagctgtgcagaatggtaataactgacggagagtggcctgcatcttctgtgacaaccaagacttatctgttatgcaaaatgcagtcattccaatctgcaagtcctgaatacggaaatgcatttgtgtgccattaaatatctcgtagaacatgtgatactgatgcctctaccatcgatgaaccaaaactgttgatgcatgtcatgtcatgttgttaaacttaatgacattgttgtgttctggtgttttacagccagttctgtaagtgatttatgataaaat

SEQ ID NO: 32896 - DNA, 1358 bp, Zea mays
  Clone ID: UC-ZMFLMO17037F08_FLI
gtttcttttttccagagagcttgcataagttccctaggagggggaattcaggggttagttctgttcaagtccagcaggagtctgaggggcagaaacctgtcccacagaattctaaccagagtggccaaaattctgctcctgcaactggaatggaagcctctgcctccggcaatggtgatgctacgtcaaacaattcactcaattgtgcaccatgtacttccgcaccatcttcttcatctgttgttggtctcctccaaggctcagtaagttacagacaagaccatccaacaagcagtggcaatggtatctataatggcggaaacagtggtccagctgccaaggccaactcaacgaactccatgcaatcaaatggaccggcatcgtttcccttgccagcaccctcagcatcaaatggcaatatgatgcctgctccccagcactctagccaaatgaattcgccgaccatgccatcaagcctacctcctatgcaaacgcctgcaagtcggcctcaagaacccgagccaaacgagcctcaaagctcagtccagaggatactgcaagacctgatgatgcagtcccatattaacagcgttgggccagtgggaagcaatatgaagacagcaaacacggttggtcttaacggtgccaactccttagctggcaatcccatgacaaatagccctggaatcatcaacggaatgggattcggggctatgggtggccttggtcagcagatgagaacagcaatggggaacaacgcgttggcgatgaatggaagggccggcaccatgaatcacagcgcgcatgacctggcacagctgagccaccagcagcagcaacagcgagatttaggaaaccaattgctcgggggccttagggctgccaacagtttcaatagcctccagtacgactggaagtcgtctcagtagagtgagcaggagccagagagctcgcacctgatatttatactcgttgggtccatcactgacagcataaacgttacatccctcagaagcggcgggttcttatgttacagcaaaaaggaaacattagcaatgttacgacaagtgtctgtatggctgtgttcctttgtaatccgcaaataggaggaccgtacccaacccattgggggttgggggcaagtgtcggcggattccaaactggggggaagatcagagcgtctttcccctgttttttttcgggttggatgacgatgatttctctcttgcagtctgtgtaccatggctcaccgtactcttgtgtaccttttgatggccaagaatctcactgtagctgtgctatactatgtataagctgttatttactagtggaaagcatgaggaaaagtttctgaatct

SEQ ID NO: 32897 - DNA, 437 bp, Zea mays
  Clone ID: UC-ZMFLMO17037G05_FLI
ggaatagctcaaagggaggcaccccaagaaaagctcaaagcttatgagaagaggggtgcacttcagatcctgcatcggatgctgagaagctgagcctccagcagctgccatgatggtgtacagtgagttattgaaggttggaaacggagtggaggcttacatgtgtgtggggtcatttggtcttctagtttgtttctgttgtttcttgtaaatattagttgtgaagtggtaacctatgttcatgtggtgggttttgtttctgaccaatctgtgaaattaaggccaggccccgtttggcaggtctccggctcctcttaaaatggctccggctctggtttcagctccttcgcaggagccggtgttttttttttgtaaattgtttggcaaaacagatccttttgtgtttttgatttggtgtacgagacaagattatggtg

SEQ ID NO: 32898 - DNA, 1014 bp, Zea mays
  Clone ID: UC-ZMFLMO17037G07_FLI
ttggatctgtgtatcttggtacgctgcctgatggcagccgcatcgctgtaaagaagctagagggcataggacaagggaagaaagaattccgttctgaggtgaccatcattggcagcatacatcacatccatcttgttaaactccgaggcttttgcgctgaaggagcgcacaggctccttgcatacgagtacatggcaaaggggtctctagatagatggattttccaaaggaacgaggattcctccctgcttgactgggacacgaggtttagcatcgcccttggaacagccaaggggttggcgtacctccaccatgactgtgagtcgaagatcattcactgtgacatcaagcctgagaatgttctccttgacgacaacttcctcgcgaaggtgtcagacttcggcctcgccaagctgatgaccagggagcagagccatgtgttcacgacgctcaagggcactcggggctaccttgcacccgaatggatcaccaactatgccatctcagagaagtgcgacgtgtacagctacgggatggttctcctcgagataattagtgggaggaagagctatgatcctgtggaaggttcggagaaggctcacttcccctcctacgcttttaagaagctggaagaaggtgacctccgcgatatctccgactccaagctaaaatacaagggccaggatagccggattgagatggcaatcaaggtcgccttgtggtgcatccaggaggacttctatcagaggccatccatgtccaaggttgtccagatgctggaaggcgtctgcgacgtgccccagccaccaatgtcttcgcatattggataccggctgtacgcgaatgccttcaaatctagcagcgaagagggcacgtcgtctgggatgtcagactacaatagtgatgccttgctttctgctgtgcggctctccgggcccaggtgatatggttatgtacattgctctgctttagttagcatggcgaatcgatgatgtccaatttttggggaaggcc

SEQ ID NO: 32899 - DNA, 1378 bp, Zea mays
  Clone ID: UC-ZMFLMO17037G12_FLI
cctccatttcggcctctgtcccttgcaagttcaatctcacctccaaccatgggtaaagagaagtcccacatcaacattgtggttattggccatgtcgactctggcaagtcgaccaccacaggacaccttatctacaagcttggaggcattgacaagcgtgtgatcgagaggttcgagaaggaggctgctgaaatgaacaagcggtccttcaagtacgcgtgggtgctcgactatgatgttcgcatctcagaggttgagcgcctttttgggaagtatggaagggtggaacgagtggatctaaagacagggtttgcatttgtctacatggaagatgaacgcgatgctgaagatgctatcagtagacttgatggaattgattttggcagaaaaggaaggaggatcagggttgagtggacaaaggaggatcgcactgttggccgaaaaagcagctcaaggaggtctccaaccaatacaaaaccgaccaaaaccttgtttgtgatcaactttgacccgatcaacacaagaatccgagatctggagaggcacttcgataaatatggcagggtcgcaaatgtaagaatcaaaaagaactttgcctttatccagtttgaggtacaggaggatgctacaagagcattggagggtactaatggaagccatttcatggacagggtgatctctgttgagtatgcacttcgtgatgacgatgaaaaaggtgaaagagggaacgggtacagcccagacaggagaggtcgtgaaagatccccaggtagaaggcgttctcctagtccctacggtagaggacgggagagaggtagcccagattacgggagaagcaaggagagggggagcccagactatggcaggggaggacgcagccctgataatggcaggggagtaagcccagctggtggtggcagaggcgatcatgccaggggtggagggcgcagtcctgactatgatcgccagcgccgggaagctagtcctccaggttatgacaggtcccccagccgctcacctgggagggaggccagagagtagaagcagcgttccattccatgcctgtgttcaagcatcagatgaatgtgcaagttggtaatgttagccggcaggaaacttgtctactatgcgcgttagctcgtgtttgactttccacccatttcagtatgaagcgacctcagaatgtaactcgtgtagtagtattttttagtggtagctttcagtactggtttgaacctgttgttggctttattttctgagtaaaatgcaccactcgaactttactcattgtgtcacttgggttctgaactcagaaaaccaggtaaacggatcatgaaactttgttggcccatgtaaaaccattcaaagtcagttatat

SEQ ID NO: 32900 - DNA, 1372 bp, Zea mays
  Clone ID: UC-ZMFLMO17037H10_FLI
tagaaattaggatatatatccggttctacttgtttttcatgtagtttgatattgtcaactattgaaatcatgaaagtaaaagtgcaaaatgtgattggtaggtccatcacactaatcgccatttttgtccgaccccaaagatactgttgaaacacagtttttaaaaccttggtttaaacattgtttttatccagaatatgacatttcactgttttctttcgcataggttttaggtgatattgtagaaagtatagcaggtgctattcttattgacagcaaacttgatttggatttagtttggcgggtttttaaacctcttctttcaccaattgtcacacctgagaatttggagttgccccgattcagagaacttaatgagtggtctgacaagaatgggtactttattggaattaagtgtgaaaatcgaggagacagcacaatggctatccttaacttacaactcaaggatttgcttcttgtgaggcaaggttgtgggaagaataaagtagatgcgaaagcacatgcagcttccttattgcttagggatctagaggtacttccttttacgccccattcttttggtgaatcatgctgctggttgattcgggacatagcatgtattcttgttgtgttagcaggaaaaaggacttataattccaaggaatgcaagcagagtggaacaacttgaaaagaattctggtactgtaaaacattgcaacaacgtgcttgatgttatggacacacaaaacgtagcaccacctaggcaaaaggaagtagctgtgttaagtaccaccactcctggctctgttcttgataagccattggttgtgaaggttaagttgagcaaaggaggacctcgtatatcattgtacgagtcgtgtaaaaagcttcagtggccaatgccgacctttgaattcgtgaaggtcgaaccaagcgtgtgctcctcttcctgtggttcgtcacaaaaggttgcgccccaaggattcgcatttgcttcgacaataacgttgcatataccgaacggcgatgtcatcagcctcacaggagatgggcgtgcggataagaagagctcacaggattctgctgcgttgctcatgctctatgagctgcagcggcaacgtagattccaagttcaagaagtatgaggaatcacctcgtggttccatcaccaaagatgcaatgttaccgccaccggcgattattgcttgggcatcttggagtaatgtcaccgccaaatcagtctttagtcgtcagccgcacgggggtgtaagaaaataatgtacttcattctgattctaaattataagacaccccgaattatgtaatctaattatcataatgtcctataatttgaaatggagcggtgttggtt

SEQ ID NO: 32901 - DNA, 849 bp, Zea mays
  Clone ID: UC-ZMFLMO17038C03_FLI
tgagacagtatctagacaataagttgagaacttgctctcatgaatcctgcaaatttactggaacctatgaacaactgcgtgaacatgctaggactgcacacgttcttacaaagcctgctcatgtagatctgtccaggaaaagagcttgggatcgccttgagcgtgagcaggaggtcggtgatgttattagtgcaatcaggtcccaggtacctggggcaataatagttggtgactatgttattgagactagagatgacatgtccccagacatagactctggcgacgatgaaagtagtgaatggtggtcagaccaagttgaatcaccagatgctagacttgatcccccaagggtttggccacatgaagccctagggtcacctagcatttggtcagatgaaaggcgtaatttgggaaggataccacagaacaacagagtaccacccaggttttcattaggcagtaggcgacccctgcattcaggttggcaggggggtcgtcggtcaagcacacggaatcgactgcaacggggcttctcaaatcaccactctggacaccgtagcaactatcgtggacatcgtcacttgcttctggataggtcctatgttggtacccgagattcaggctccggcaggagcctaaattcatcggtggtgccaagcaggcggcagcggctgcggtacacgcacagaagccactactgatggaagcaatatcagttctacgtgtagagctttattggttgatccattcatgctatctttgtaaatatatgttaaggttatgtttttatttaatgtatttaatctgtgtaaacaatctatcccagatgcaaaaagaactacattattt

SEQ ID NO: 32902 - DNA, 1569 bp, Zea mays
  Clone ID: UC-ZMFLMO17038D04_FLI
ctttctgaaaatcggagcgatcactctagacaaagtattagttttcttggaagttctgtaggagaaccttcgaagattcaaacaaataggagtaacacttcacctagaagtcatgcaattgctgatacagggaggatttatcctgctgaatgttgtgctacacaaggagaaactcatgtaatcaatgttgaaaatgatacttctgaagagttccaattaggaagcacactaagacgtacaccgccaccaaaatggccaacacctgaccagaagcacagaagaagggtttctggagatgacaatcataatggaagtgttcctttgaaggataatacatatcatagccgcctggatttagaggtcatagctggtccatctcatggaataagctgttctcggcagtcaagtagaccttctatgctcccaataactcttggaagggttcccccaagtgatttagtgttgaaggactctgaagtatcagggaaacatgctcagataaactggaatggaaagacattaaaatgggaacttgtggacatgggcagcttgaatggaactttcttgaactcccaggcggttcaccatccaaatgctgggtctaggcattggggtgaacctgctgaacttgcacatggtgatattataactctagggacttcatctaaactgtctgtaagttcataatattcttccaacatctctagtttcttccaaatctggcaaaatattttatgaaccttttagtagttcaactatacagtctactaatcttacattgtatgtctcatagaagtttgaatcccttggaattgatcatagttgaagttgatatgtttctataattgtttgtatttgctcatatcaaatcctatatcttgatccttatgcttgatatcttcacaagtcctaatctgaaacacttcatcttttgtaggcttagatggccattataatcccatacatttagtccaaactgaatataaaaaattacagtgtcctactcatttttggggatcctgattgataagagcctcaaggatggagtggtggatgtcaaaaggtagggagataggattatcctagtcaaactagttttggggatgtagttttgaacattataagtgtatatgaccctcaggttggtctcagtgagagcgaggagaggaagttctgggaagacttagatagcatggttagagcagtacccaccaatgagaagcttttcataggagatctcaatggtcatgtaggttcaacacatacaggttatgagatggctcatagaggtttcgagtatggtagtagaaatcaatgagagaatattttggactttgctgtagcatacaacctagtgatagccaacaccttcagaaagagagtctcatttggtgacttttagcaatgcccatcgtttgagccatagttgttaaagtggtaagatgaggtaaggcgactgacctccttttgccttttaagtggtaaaacgtaaggcgaggcgacacattaaatatttaaaatagattaaatactgatatttgagaaaatgtttaggacaaaaatgctaat

SEQ ID NO: 32903 - DNA, 520 bp, Zea mays
  Clone ID: UC-ZMFLMO17038D06_FLI
ggggactggatgcttgttggagatgttccctgggagatgtttgtaggttcagtgaagaggctcaagatcatgagaacctcagacgccaaaggtctcggtccacgattccaagggtctcacagacccacagcagcttgcacgagaggcaggacgtgaaaccaccgatgtgcgtttggtgctaacaccgctggtgaagcttgaactgtatttgatatcacgtaacagtaacagcagcccatatcgctggcatagttgtgagattacggggctgtttggtttactgtctaaggcgccacaacatggctaacttttatgtctaagtttagttcttcaattcgaacgactaaacttaggcaacttcattgtgtctagtggaaatagtagaagttttttttttttgcttcttccctgtggtgccctcgttgagcttttcttatgggctatacgagcatcatcgcccccagctcttctgtccacgctgtttacctgtgaggaatggtcgcccaaagtgttggttttt

SEQ ID NO: 32904 - DNA, 2353 bp, Zea mays
  Clone ID: UC-ZMFLMO17038E11_FLI
ccgctcgctgttcaggaagggcgggaaaaccatggcgtcctccgccgcggcgcacagcggcgcgccaccggctgcgaagcgccctgcctccagcggacgggagggagatcagatggtcgtcacgccgctgggcgccggcagcgaggtgggccgttcctgcgtccacatgacattcaagggccgcaccgtcctcttcgactgcggcatccaccccgcgtactccggcatggcggcgctgccctacttcgacgagatcgacccgtccgccatagacgtcctcctcatcacccactttcacttggaccatgccgcctcgcttccgtacttcttggagaagaccacgttcaagggccgggtgtttatgacccacgccacaaaggctatttacaagctgctgctctcggattatgtcaaagtcagcaaagtgtccgtggaggatatgttgtatgatgagagtgacattgctcgctccatggataaaatcgaggttattgatttccaccagacattggaagttaatgggatacgcttctggtgctacactgctggccatgtgcttggtgccgccatgttcatggttgatattgctggcgtgcgcattctttacactggtgattactcccgtgaagaagaccgccacctacgagctgctgagctcccacagttctccccagacatttgcattattgagtcgacttatggtgtacagcaacatcagccccggattatacgtgagaagcgctttactgaggtcatccacaatactgtttcacaggggggtcgtgttcttatcccggcatttgcacttggcagagcacaagaactgttacttatcctcgatgagtattggtcaaaacacccagagctccataagattcctatctattacgcttcccctcttgccaagaggtgcatggctgtataccagacatacataaactccatgaatgaaaggatacgaaaccagtttgcacaatccaaccccttccatttcaagcatatcgagtccttgaatagcattgataactttcatgatgtgggtccttcagtggtgatggctagtccaggtggtctccagagtggtctctctaggcagcttttcgataagtggtgcacagataagaagaatgcttgtgttattcctggttatgttgtggaggggacccttgcaaagaccattatcaacgagccaagagaagtgacactggctaatgggctcactgctcctcttcatatgtcggtccactatatctctttttcagctcatgccgatttcccgcagacaagcaactttttggacgaacttcggccaccaaatattattctcgtgcatggagaagcaaatgaaatgtcaaggcttaaacaaaaacttattactcagtttgatggtacaaatacaaaaattgtgtctcccaagaactgccaatcagtggagatgtacttcacttgtgagaagatggccaagactattggcaggttggcagaacaagtaccagaaggtggagagtcttccagtggcctacttgtcaagaagggattcacatatcagattatggctcctgaagatctccgtgtgttcacgcagttatctacagctaacatcattcagcgtatcgcggtcccttactctggatcttttgaagtcataaggtacagactgaaacaaatatacgagagcgtggagtcagcaacagaggaatctgatgttccgacgttaatcgtgcatgaaagagtgacggttcgcctggattcagaaagttatgttacactgcagtggtcgtccgatcccatcagcgacatggtgtctgattctgtggtggctatggtcttgaacattggtcgggagggccccaaagttgttccggtcgaagaagcggtgaagaccaaagaggagacggagaaggctgctctaaaggtggtgtatgctcttatgacatcgcttttcggtgacgttaaagtcgcagaggaagggaaatttgtcatatctgtagatgggaatgtggcgcacttgtatgggaggagtggcgatgtcgaatgtgaaaatgctacgctgaaggaacggatcaagaccgccttccgtcgcatacagggcgccgtgagaccaatcccactttcagcctcttgataacttgtttgacatttcccatttgaacaaagtagcattctctgtttacaccagagtaccgggttttttttccctctctatcgaaaggaaccccagatgccttgtacggcatgctactcaagaggatttgattgttgatctgggattgcctctgtaaaatcacctgtaacattgtcatcctaacttgaaccacctccatcgttttcagtaaatttctacttaattttc

SEQ ID NO: 32905 - DNA, 2244 bp, Zea mays
  Clone ID: UC-ZMFLMO17038G05_FLI
caactgcaagaatgaccaggaagtcgcaaacattctagccagtggcatcaaactgcgcgagtacacaaaaggcgtcgagaataacatacgccaaatcgagctggattctatccaggattacattaaggaaagtgaaaatctagtttctctgcatgatcaaatttgtgattgtgacaatattttgttacaaatggaaacagttctgactggattccagacagaaattggttccataagttcagagataaaggtccttcaggagaaatctatggacatgggattaaagctgaaaaatcgtaaggctgcagaatctaaattgtcaaaatttgtcgaggatataatagtacctccaagaatgattgacataattgttgatggagaggtcaatgatgaatacatgaaaacacttgagactctaagcaaaaaaatcaaattcatcgatgctgaccccatggttaaatcatccaaggctctaaaagatgttcaacctgaggttgagagactacgacagaaagccgtctcaaagattttcgagtttgtcatccaaaagttctatgccttgagaaaaccaaagactaatattcagattctacagcagagtgttcttcttaaatacaagtacacgataaatttccttaaggaacatgctaaggagatatatgcagaagttcgtacggcgtatattgacaccatgaataaggtgctaagtgcacatttccgggcttacatacaagcattggagaaactacagatggacatagcaacttccactgatttgcttggtgttgaaaccagaagcacaggcttcattttctccattggaaaagaacctctgaaaacccgtccttcagtgtttgctctgggtgaacgaataaacattttgaaggaaatcgaccagccagcattgatacctcatatagctgaagcgaagtcacagaaatactcgtatgaagttcttttcagaagcttgcagaaacttcttattgatactgccacttcagaatacctgtttactgatgatttctttggcgaagaatccatattccatgatatatttgcaggaccgattcaagttgttgatgaacatttcaatactgtactcctgaactgttatgatgcaattggcataatgcttatgatcagaataattcatcagcaccagctcatcatgtttaagcggcgaatcccatgtttggactcttacctagacaaagttaatatgtcactctggcctcgcttcaagatggtgttcgacttgcatttgaacagcttgcgaaatgcaaatattaaaacactttgggaggatgatgtccatccacactatgttacaaggagatatgctgaatttacagcttctctagttcatctcaatgttgagcatggggacggtcagcttgatctaaatttggagcgattgcggatggccattgaggatttgcttgttaagttggccaagatgttttccaaaccgaagctacaaactgtctttctgataaacaactatgatttaacaatttccattttgaaggaagctggaactgagggtgggaaagcacaacaacacttcgaggaggttcttaagagcaacatcgcaatatatgtggaagagttgctcctggagcagttcagtagtttgatcagattcgtcaaatctcgtccagcggatgagacggctgcaaattccgagaaagccagcattgccgaagttgagccactggtaaaggatttcgcgagccggtataaggccgcgatcgagctgatgcactatgatgtgatcacatctttcagcaactttctttgcgggatggagatcttgagagcgacgctcgcacagctcctgctatactacaccaggctctccgagtgtgtcaagagaatcaacggcggctctgctctcaacaaggaccttgtctccatatcctccatcctgttcgaaatcaagaagtattctaggacgttttagttgtttcacccccttccatgtacactaggacggctagctgaggggtagctgtgtatccttactttgtaactggtatgtgcgactgcaggggaaacaagggcattttgtcgtggtttgtatcttcgtctgtgttacccgacttgacccctgcccctttccagcacagaactatgatctctaggctgtctccacagttatcctattctatcttctgtcctatcatctattttaaacttcattttgtaaacagtatcgattatagtgcaaatctacaattttat

SEQ ID NO: 32906 - DNA, 2142 bp, Zea mays
  Clone ID: UC-ZMFLMO17038G08_FLI
ggaaaagttgctaatgatgttgaaacagagcagatagtctttgaagaagaggctggttcctggaagggaagaatgagtgccgtagtacagatgcgaggatcaatccctctcttttggtcacaagaggcatctcgacttagtcctaagcctgatatttttgtgcagagatatgatcccacatatgaagcaacaaaattacattttgatgatctcgcccggcgatatggacatcctatcataatacttaatttgataaagactgttgaaaaaaggccacgtgaaatgatgctcaggcgtgaatattgtagagctgttgaatatcttaatcaaaatgtcccagaggagaagaagttgagattcatccactgggattttcataaatttgctaaaagcaaatctgcaaatgtactgggtgttttaggaaaagttgcgggtgaagcactggacctcactgggttttactacagcggaaagccaaaagtccagaaaaaaaggttaattcagcttagtcgaactagcactgcaagggatggctcccttgatataagggccagttctggagatctttcaaggctcagggatggctcccttgatataagggccagttctggagatctttcaaggctctctagtaatgctgaggcacttagttctacaggctttcaagatatgagaaatcaggctaacaaacaagagtttcttggtgatactccctgttaccaaactggagtgctccgtacaaattgcatagattgcctggatcgcacaaatgttgctcagtatgcatatggccttgctgctttggggaggcaacttcatgcaatgggactgacagatgttttaaaaatccaccctgatagcagcattgcttctgctttgatggaaatgtaccagagcatgggtgatgcacttgctcatcagtatggaggatctgcggcacataacacggttttccctgagaggcaagggaaatggaaggctactactcagtctcgggagttcctgaaatcaattaaacggtattacagtaatgcctacactgatggtgagaagcaggatgctataaatctatttctggggtattttcaaccacaagaaggaaaaccagctctttgggagctggatactgattactatcttcatgtgacgacagctggggatgatcttatgtctgatagctaccacttgagttctgcacctggaaataatgtgttcgtggggtctggtgctgcattgaaccctgggaccatattgagccctgtcccagcatgcaaagaggatttctcacggaagaagcttacttcattcgacaaacttatagaaagaacatgtagttctataaggaatgtaaggcttcattgtgacgctgatctaaagccaagtggaggtgttggaacttctggaatggcaccagatgcagctgagatacagcttaaaagccccaactggttgtttggtcaaaggaagcatacggagacaatttcaaccgcaagagttgccccagttgaaaacgtgaacgaggggaacagagacgagtcaaatgtgtccctttgtggggaactaatttggctatcctcctcagttgaatcatgcgaggaggacattttcagaaggtaccttgcattcacgacagcagatgtagagaatggctggtatggcggaacactactatatgaccgagatgaaaacagcggggcttacaggcactattctgagctctgccagggagctgtcatggatccctttgagcatgaccctgagaaagagcggcactacgcggaggcccttagcgtggatctcggcgatgcacgggtggaggccgaaatgcaggccgcgcttgatgactaccaggtcatagggtcggacctgagcatcatcccttcgtgcggagcactcgcagaggacccgagccagctgacgaggtggataattggagatgagaggctgcttgtgggtgctgctgcgcagtagaccggtggggttctgtcttctactcttctgtggaaggttgtacggagcaaccgattgccattcaccgacccagcctttgtgttctatagatactatacttccctgaaacaattactccaacacgtgcatgcaatttattgttgtgcagcaggtggtaatgctgctgggatt

SEQ ID NO: 32907 - DNA, 2619 bp, Zea mays
  Clone ID: UC-ZMFLMO17038H08_FLI
tgatgatgtcctttctccggaggcgtccggagcgtcgttccacgcttcctttattgattgtgttcggtagatgattcttggacatcggtttggtgttcggtggggctcaaatacggattctgaaggacttcaaaggtgcttgaatcagtacatcttaggtgctatcccagactaggctgcgatgggtttaccccaaccttcaacagtcgaggatgatgcgccaacagcactgcgcacctctatttcttgccctccacattctggaggagttagtgcctgtgatttggatgggcttcctgcgggaagctctagcagaagggtgctttcgtacccattgatacgtgattttgatagaaaggccacattagatgctcctaatgaatcaaatgggtattctaaagacggatgtgaatttgacgaacccgcagacctccatggactaaacattgattcaagaaatacaaattcttggtcttctcctaaattagtgccttctgtccatatgccggcaaggagggttgtaggctttgattctggttgtattggaggttctgatggggcagaaacggatatggtcgattcatctttggtcgacagaaattctcatttgccatttgatcagcatggacttcaagcaaagaaaagactgttctctccattgaaaaatgtgctcgttaaacagttcaatggtgatatgctcaaccttccttctggtgattctagatttaggcattctgattcagccgataaactatacagtactggtttccaagataataaaaaagccaacacgggatgcatcaatttgtttgaaacgcgggatactccagcctctaggtgctccagccggagcccagaatgggatgttactaggagcaattctaattcattcactgatggccctttacttgggagcaaggattatatatcctattatgatcatctagcagctagtgcaaaattagcacactctccgctttctctgtctcctctcagccctaaatatatgaacaaaattaaagtgacaggatctcaaagatatataatgaaagatcttgaggatgacttcctagatttaaaggaaagtggaggttctggcggagctaggatgccagaggtatcaaaaggatctaacttgttacatgatgaacttgatgttatgacacctaaatggggttcattgagaagataccgaaattggggccctgaatcttcccctacatctcccagaattgtttatggtcggagtttgtctttgcatgtaaggaggtcacttgttggctcctttgaggagtctcttttatctggtcgatactcgtatggaaaagacagtcagacaattgatggtttcttagctgttctaaatgtcactggtggtagtttcttccccacaactcagaaacttccattctcagtaacaagcatcgatgaggatagctccttactatactattcttctattgatcttgctgggaggttgccttcgaataacaccaaaagcccaaagctccaaagaagctacagtaataatgattcacggtcagcaaagagtcgtttacgcatccctgttaagggtcgcatacagctggtggtaagcaacccagagaagactccacttcatactttcttctgcaactatgacttgagtgacatgccttctggaaccaagactttcgtgcggcaaaaggtcactctctccccctctgccttgccttctaatccagtggaagaaggaagcaagacttgtgatgttaatgctggccacaaatcttctcagtcagtttcatctggaaatgaacctagcgaacagggagctcgttctgaatgctgcaacggtggacagaactgcaactcaaatgatgaatcagaaaaaggagatctgaaaacaagatgtcgatcattggatagtgattctaatgtatcaaataagtctagttctccaggaaataagaaagaccagtctgattctgatggttgctgctgtcaaatggataagtttggcatgggagaaaagaaatcatgctgctcaccttctaagatcaacgatagttcaggtggagctgtgcttcgttatgctttgcacctgcgatttctgtgcccctccaagaaaaaatccttgaaatcaatgcttcggtgcaaatctgatccatcaacggcaccatatagcagcaatacactacctgaggaagagcggaggttctatctctacaatgatcttagagttgtatttcctcaaaggcactcagatgcagatgaaggcaagctgcgagtggagcatgacttccccgccgatcccaagtactttgacataagcaactgatggttgcgctgctgcgccgcacaataagaatctgtaaatatgttatcaacttatcatgactaacttggtcaccagccgtttcatcttttcgccaacaaatgtacagatcaatgttccaataaaatgcaccatttagttgtgcctatatgttctttcctcctgatttcgaaaccgtcagagggctgttctgtcatgtttctgaacactagctgtcacctgttaaaactgatgctgatatgtctgtctcttccttgccatggggaaggaattttcctcatacacagctccaactaggactc

SEQ ID NO: 32908 - DNA, 1363 bp, Zea mays
  Clone ID: UC-ZMFLMO17039A06_FLI
ggcatcggcagccccgcgcggcagctgtacatggtgctggacaccggcagcgacgtcacctgggtgcagtgccagccctgcgccgactgctaccagcagtccgacccggtgttcgacccgtcgctctccgcctcctacgccgccgtctcctgcgactcccagcgctgccgggacctggacaccgcggcgtgccgcaacgccacgggcgcctgcctctacgaggtggcctacggcgacggctcctacaccgtgggcgacttcgccaccgagacgctcacgctgggggactccaccccggtcggcaacgtcgccatcgggtgcggccacgacaacgagggcctcttcgtcggcgccgcggggctgctggcgctgggcggcgggccgctctccttcccgtcccagatctccgcgtccaccttctcctactgcctcgtggaccgcgactccccggccgcgtccacgctccagttcggcgacggcgccgccgaggcgggcaccgtgacggcgcctctcgtgcgcagcccgcgcacgagcaccttctactacgtggcgctgtcgggcatctcggtgggcgggcagccgctgtccatcccggcctccgccttcgccatggacgccacgtcgggctcgggcggcgtcatcgtggactccggcaccgccgtgacgcggctccagtccgccgcctacgcggcgctccgcgacgccttcgtccagggcgcgccgtcgctgccccggacctccggggtgtcgctgttcgacacgtgctacgacctgtcggaccggacgagcgtggaggtgcccgcggtgtcgctgcggttcgagggcggcggcgcgctgcggctgccggcgaagaactacctgatccccgtggacggagccggcacctactgcctggcgttcgcgccgacgaacgcggccgtgtccatcatcgggaacgtgcagcagcagggcacccgcgtcagcttcgacaccgccaggggcgccgtcggcttcacccccaacaagtgctagcctagcctagcctaagcctgccttctggctaaccgtgccctgttagccacggttgtcagtagtaatgacaagccggtgtttaattagcgggagaatgattagatggggtaattaagcggtgggccctgccgggtctggggaggagcgaaaggcaaaggcgaggacagatgatgccattgccatgccagcctgtgtccggcgcgatgggtccagctccagcagtgtttctctctttctctcgagtatgcgtgcgtggagccttgtcatgacgaattagatcgtgggggctcccaagttaagagtatttatttttattttatttgctatgtcaagaaaatggaagtttccatcc

SEQ ID NO: 32909 - DNA, 778 bp, Zea mays
  Clone ID: UC-ZMFLMO17039E11_FLI
catccacgggatgctgaacgcgattgcgtggggcgtcctgatccccaccggcgccatcatcgcgcgctacctgcgcgtgttcgagtccgcggacccagcatggttctacctccacatcgcctgccagtgctccggctacgtcctcggcgtggccggctggggcctggggctgaagctgggcagcgagtccgccggcgtcacctaccagccccaccgcagcatcggcatcgccatcttctgcctggccaccctccaggtgctggcgctgctgctcaggcccgacaagaagaacaaatacaggctctactggaacatctaccatcactccgtcggctacgccgtcatcgtcctcagcgccgtcaacatcttcaaggggctccacatcctcgagccggccagcggctacaagaccgcctacattgtcatcctggccacgctcgccggcatcgcgctctgcctcgaggccatcacgtggcccatcgccatccggaagcgcaggcgcaacgccgacaaggcgtccggcggcaacggctggcagcagggtgcgtagtagggaccagatcgcccggcttgtgcttagttttgaatgcgagagagggatgtgatatcgatgtgctcatttcgttgttcagacttcagagggatcgttgctgcctgtgctttctttctcttcctgttattactacctctctagtctgtacttgtacgtagaagagtagctccttattttttttaattattagggttctataatggcatttgtacacattttttccct

SEQ ID NO: 32910 - DNA, 672 bp, Zea mays
  Clone ID: UC-ZMFLMO17039F09_FLI
gaccgaccagagtaccggacacgcagcgagggggaggaagaaggaagcaagagggaggaccgagcaggcctaggccctagggtagtcccgtccggtcccctgcggtgcaagtccggccggcgggcgggctgactgcctggcgtcggtagggggcgacggcgatctatatctgtcgatgggctactggtgggaccgcgtcgtgctgccggtgcggcgggcctggctcggcgtcgcgtcccgcttcggggttcgccagaccgggctgtggaggctgcggcaggaggtgagcacgtgcgagtacgaggacgtgcacgtgatgtgggagatgctgagccgcaccacggcgccggcgcctaggcggcccagccggttcgggccgcagccgcggccgtggggcagcaggttccgtctctgccgaggcttctagtgctgttgctgcggtgcggggtactagtgattccgcttcattttggcttctctctctctctcttgttctttggttttcgctgcttgtatgtaccgtcgtcgtccatccctcctggctctgagatgtacttccattcctcctcgtgtgtatccgtctccacccgcctgctgcagatgatataccggggcatgtgaatgaacagagctgatttcggtcgggtaataatcctgtcctctgtttcgacc

SEQ ID NO: 32911 - DNA, 1150 bp, Zea mays
  Clone ID: UC-ZMFLMO17039G01_FLI
cagaagatacttgaagagtgcaccaatgaccaaaggacacacatgattcgtgaaatcactaaagcacccataaagcttcataaagcttcttgcaatgtgcatgggacccgcgttgtgcagaaggttatagacaccatgaatacccctgaccaagtgtcaatgttagtgtccgccttaaatactggaatgatgtgtttaatgactgattcttatgggaatcatgttgtggaccactgcctgcagaaattgttacctgagcacaaggcattcattcttgaggctgctgcatcatgctatcttcaattagcaagagatcgtcatggttgctgtgtcctccagaaatgtattggtcattcaagtgatgaacagagaaacaacttgttgtgcaagataacatcaagtgcccttacactctcagaagatccgtatgggaactatgttattcagtttattctggacctcaatatcgaatggataacagtcagagtagtggatgagctggcaggtcactttggaaatctatccatgcagaagtgtggttcccatgttgtggagcattgcctgaagctagcgccacggctgatctgtgataggatcatcaacgaactcatgcatgatcctaaactgttggatatcatccttgatcagtatgggaactttgtgattcagacagcgcttaaacagtgtcagggtgaacatcatgctgcttttgttgaaactattaagccgcacactgctgtaatgcaaagtaacatgtatgggaagaaggttctttcaaggatatgcttgaagaacaagcactgccgatttgacctccattaacctagcatttttttttggcgaacgtgtcttcagagacagcagacgggacggaacccttgtacaattctgtgataacttgcagatcttacagatagtgtgtcttggcgaaaagggaaaaagatcttttctttcaagggaaattttggttggttaggggaagcattttgtcgctgccagtttagtgtaatttcgaatgtagaattagtatagtttcatctgcgtgtgatgatggtggtttacattgccggcgttgttatcagtactgtagtttaatgtacctgtcgaactgtgatatcagtaacatcgtgtaatgtgttagttgtccgat

SEQ ID NO: 32912 - DNA, 2298 bp, Zea mays
  Clone ID: UC-ZMFLMO17039G03_FLI
cccctcaacacggctccggcacgccgcgcgccgccttctgccgtgcgcccgccatcggccacccccgcccgccgcgccgccggctgttgcttctgcgccgccgcctcctcggcgtcgtcgccctccacctgggattggacccgatggagccgccacttcgacgaggtcgaccaggcggagagctacgcatccctcctccagttccagctagaggaggcggtggagaacgaggatttcgcggaggccgccaaactcaagagggacatcatagaggccaccggaaacgacgctgtagcccacgtcatggccgagctcaagaatgctatagaggaacagcggtaccaggacgcgtcaaggttgacaaggcttgctgggaccagcttggtaggttggtgggtgggatatgctaaggacactgatgattccatcgggagaattgtacgaataagccctggtgtcgggagatatgtggcgaagagctacaacccaaggcaattggtcactgcatcttcaggaactccattatttgaaattttccttgtcaaagaagatgatgagacatatacaatgaaggtggtacacatgcgaccaacaaaaggaacttcaggtgcaccatccatatcatcaacaataacagaaagcccagcaaaggtagagaatgaaaattcatcagaaagtagtgctatatctgacagtgttacagaggaggcaaatacagatactacggtaagaggaaatgaggatgctgaagagaaagcacaagatgttggtagcagcaaggatagtagtgtcgaaggattaaaaagtgttttgaatttttttaagtctcggattcctgaattcaaagttcaggtgataaatgttgatgtggctgaggaaactgaattagctgcaaattcgtctgaagaattagtgcaagatgatgtgaaaagtactccagaaagctcattggaagagccagccactgaggaactcgagcaggaggaagatgttccggaagaaaatacggatgaagaaagtaaaagcacggaagtgaagctttttattagtggagtggttcacaataaagaagatgctggagcaaaatcatatgttcgagttccagctgaaataaataacatggaaaaggactcctttgaactgtacattcctggagaaggttctgatcgtgatttggctgaaacaaaggctgcaaaacagaaagttgcagatatggctgctaaattagcctcagagcttatgccgtctgatgttgccaaggcattatggggtacagccaagagttcttcaaagataaataaagaagttcaggagcttttaaggcttacgttaagcaaggcccgagtcaagctgaccgaaaataccatttttaaacgaatcattatggacactaacagcacagatccatttaatggtctctatgtgggagcatttagtccatatggaccagaaattgtgcagcttcgtcggaagttcggccactggaacagtactgatgacgttgagtttttcgagtatgtcgaagcagtaaagttgactggtgatctgagtgttcctgctggccagataacgttccgtgctaagattgggaagggcaagcgacttgagaatcgaggagcatatccagaggaatttggtgtgattgccagttacaaaggtcagggtagaatagctcagcctggattcaaaaatcctcgatgggtggatggtgagctgttggtactcaatggcaagagtacaattccacaccttggaggcgcagagctcggtttcctgtatagtgtacctgagcagagttttctggttctcttcgatcggcttaatcttcccgagtgatgagactcctaaagggagcagactcctcacatgtagattgcatgaacgcgcagaggccggccacagctccaagtgaccgaaacaggtctggggggccgtttccccatcgtcttctgccctctgggcttcctgccaatcctttctccgcacctactttttaggagctcatgtgcttaactcgtttcagagtgtgagggaaagtcgacaccattgctggtctaaactaacggaggagtcttaatactaataatatatatgttatagcatggtagtttgctctccaatgccacagttgtagctgtattgggtatgggcatgacagttttgcgagttttacccgtcatcgttgatttcagtaattaccgaattgaataaaaatcgttctggtgtatcgtgatgttacaattataataatataaaacaaggcaaataaagtctcatgatttatgatcgtttttctct

SEQ ID NO: 32913 - DNA, 1911 bp, Zea mays
  Clone ID: UC-ZMFLMO17039G05_FLI
aaagtttagtcctaggactaaagtggggtgggaggactaattagaaccaaacatggcctaagtcttcctagaaaagtcttttagcactctcatcgtggcctacttgagaggcatacatgctaattacattcaagaccaaatcatccacgacaagcttgactaagataatcctatcttgcttcctcacatccaccacactgttcttgagactcttatcaatcaaaattcctactctatttgtatttgcgactgtcactgtgtaccaaagcttgaagccggtattgtccgcctctttcaccttctatcttcttacccttctatttaatctcttggacgcataagatatttacatgtctcctagtcgttgtctcaattgactcccttaacttacctgtaagcaacactacattgtcaaatgatgcattgaatatcaaaatttaaacatgtttaagtgtttctatttaaaaaatatttcgcatatgtgcaatgtttgcacctctcctgtatattcgggaaatatgttatttgcatacatactagaattacttagatgttttctccaaagcatggaaacctacataggctatataattttgaagcatattgatcgtcctgcacatcttggttccagtgaatacaaaaaagtgtaagacctttctctttctgtttatcaccttttgctgttgatgcatgactagtctcaactttatttttccgttggattttctgcattctttggtcacacacagttttgtacttgtgttgttactcaccaattcacactaaccttaatgaacctatgaaaaatgcatgcataaatttattttttagagaaaaaacatgtaactaagtggtattttactatctttgtttattcattatcttttgatgctttcatttgtaggtacggagaataatggaagggaaccatcggatgggaatggttgctattgattcggcaacgggtactgtagcagattgtggctgtgaggtggaaatttcagagtgtgaaccacttccagatgggcgcttttatttagaggtggaaggcacacgtcggtttcgtatcgtgcgatcatgggatcaagatggatatagagttgctgaagttgaatggttgaaagatatacctctgccagaaggttcacaagggagaagagaactaatggaactggccaatggagcttcagagctggccagggcatatatcagacatgctagagataccgtacggactgcaaggcgaacaagacatctggatcttgagggcatgcctgggccacaggacccggaaaaatttagtttctggctagccaacttgataagtttgaggccctcggatagattagatacgttacgccttcgcgacactagggagagaatttctagtagcatcagtttgctccgtgattccgaacaaggctgccgtgtacaatgacggaaacagtacaagaatcgtttccacagaccaattcgttcgtctaggagtatatcgatttggagctactccgtgattccgaacaaggctgccgtgtacaatgacggaaacagtacaagaatcgtttccacgtaccaattcgttcgtctaggagtatatcgatttggagctactccgtgattccgaacaaggctgccgtatacaatgacggaaacagtacaagaatcgtttccacagaccaattcgttcgtctaggagtatatcgatttggagctagggatgtaatatgatttagaaaatatccgtccagatccagactcgaagatggtgaatactggttcggatggaattttcggatatccggtctttttttgataacggatacaaatacggatattttattcggatatcgaattcgaatacaatatgtctgatatctgtcggatatcgaatatccggatattttctcggat

SEQ ID NO: 32914 - DNA, 629 bp, Zea mays
  Clone ID: UC-ZMFLMO17039H07_FLI
gtgattgattatattcatgatttatttattattaaacttttgtccgcaggccttacagaactgttttctttttagcggaataacatgtattgatgacttagttgtttggtgtagcattcaactctgtggtgaatacaaagaagggaaatacaagaacaaaaccactccctctttctaaaagacttcgcctagaagcacagagggtcctgaaggagcgtgttcaggacattgcagataagaaaggcatcaagctgagattttgtaatctcagagaatgtgaaagccacatctggtcgttggatagtccgtgtgagaagactagagctgaaattggatggccacaaggggttccatttgtccatccacatgacctcccaaacaaggcaaagcttgggtttttggaagcttacgaacctggatggacggcctcccaacaagaaatggaggaggcagcctcggtaatttttgatgtattaccagccttggatatgttttgaatttcagggttggtcaacagttcatttcttctacatgttgcagaagtagcaatgtatactgacaccaaaaaatgtagatacatagatgcagtattgacaacgtgtaaatgcaattacctgctgtttaaattg

SEQ ID NO: 32915 - DNA, 750 bp, Zea mays
  Clone ID: UC-ZMFLMO17040A03_FLI
gagaagcgctgcccggggaccgtctcctgcgccgacatcctcgccatcgccgccagggacgccgtctcgctggccaccaaggtggtgaccaagggcggctggagcagggacggcaacctctaccaggtggagaccggcaggcgggacggccgcgtgtccagagccaaggaggccgtcaagaacttgccggactccatggatggcatccgcaagctcatcaggaggttcgcttccaagaacctcagcgtcaaggatctcgctgttctctcaggcgcccacgcgatcggcaaatcgcactgcccgtcgatcgccaagcggctgcgcaacttcacggcgcaccgggacagcgacccgaccctggacggcgcgtacgcggcggagctgaggcggcagtgccggaggcgcagggacaacacgacggagctggagatggtgccggggagctctaccgcgttcggcacggcctactacggcctggtcgcggagcggagggcgctcttccactccgacgaggcgctgctcaggaacggggagaccagggcgctcgtctaccgctatagggacgcgccgtccgaggcggcgttcctcgcggacttcggggcgtccatgctcaacatgggcagggtgggcgtgctcaccggcgcccagggggagatcaggaagaggtgcgcctttgtcaactagctagcgatatgctggattgtactttgtaccctctcgccttaattaaaatttaaatgctggagtttc

SEQ ID NO: 32916 - DNA, 1029 bp, Zea mays
  Clone ID: UC-ZMFLMO17040A09_FLI
acggattatccgtttggacgcagtccgtgctgacgacgaatggatttcctactctccatcccaagctgcagtttccaaggagagggcaattgaatctgctaaagctgtttttctcaaagactatgaccacttagaaccatatcggatccatcatgcgtcacgccttgttgctattcttgaggcctacgcaatatatgaccaagaaattggatattgtcaaggaatgagtgacctgcttgcgcctctccttgctgttctagaggacgatgacgaggccttctggtgctttgctggttttatgaggaaagcccgccacaactttaggcttgatgaagtgggtatacgccggcaactcaatatggttgccaggataatcaaatacaaggacttccatctctacagacatttggagatgctccaagctgaagactgctttttcgtttacagaatggtggttgtgatgttccggagggaactcaccttcgagcagaccctatgtctctgggaggtgatgtgggctgatcaggcagcaaaccgcgccgagatcgcaaactcatcctggcgtaaattgcagttgggagcgcctccaacagatgatctgttactgtatgcgattgctgctagtgtgttgcagaagcggaaactgataatagaaagctacaacagcatggatgagatcataagggagtgtaacagcatggctgggcagctggacatttggaagctcctggacgatgcgcacgatcttgtggtgacccttcacgataggatcgagtagctgtggtgttcattgcttgcgctatttgtcacgttaccatacttccattatacccaaacactttgtatgaagtacgtaccaacagtgaatagaagcacgttgtggagttagctaggcagcaatggcagcatttgtttttaactgagcatgcatactggagaggtgggcaaagaccaaaggagcatgcatactggagaggtgggcaaaagatcaaagagccatttgaatctatcgttgtgacattgtctacc

SEQ ID NO: 32917 - DNA, 586 bp, Zea mays
  Clone ID: UC-ZMFLMO17040B01_FLI
gccaattatgtgaataattaatgatgcacttgatagatacatgtttctttgctttttttagtgctgcatagattgcccgaatcgcacaaatgttgcacaatatgcatatggtctttctgcttttgggaggcaacttcatgcaatgggactgacagatgcttcagaaatccaccctgatagagtatatattttttctgtttctttttttgcaattttgattatcttctcaccttctatctcaattgcagcatttgggcagtcatccacaagcatatttggccacaactcgtttggagcttcgtagggttagtattattgtaaatttttcgagcatgtttggacaactatcccattcaaatggtttacctatgtgatatatagaatttgtagcagcgcacgagttgttcgaaggctaaataattgtgtcactgcaccaggcatgactgactttgcagagtcattattgtcttctttggctctctccttggcaagatgtgttactgccattcacatatctgttgttcatagtaaattgtcttgaggagatagctacggtgaaatattctctattttgttccagctccgt

SEQ ID NO: 32918 - DNA, 1456 bp, Zea mays
  Clone ID: UC-ZMFLMO17040B08_FLI
cattttttgtggagtttttgatggccatggaccaaacggccatttggttgccaagagggtcagagatcttctccctgtaaagttgagtgcaaatttagggaagggtgaatgcaaagagatttctactagcgatgtcaagagtgggactactaaaggagttgcaaccgaacacagggttgaagatactgatgcttcccctggaaatgaagagaatggcgagtacccagaatttttcacagcactgagggcttcattcttgcaggcgttttatgtcatggacagggatctgaaggcacatagaaatattgattgtgaattcagtggtacaacagcagtcacagtaatcaagcagggacaaaatcttataattggcaacttgggagattctagagctgtcttgggcacaagaggtgaacataatcagctagttgctcttcagctgacagtggacctcaaacctagtatcccgaatactacccaaaataaagaaaaatgaatcatttacaggtgaagcagaacgaattaggcaacaaagtggcagagtattttctcttccagatgaaccagacgttgttcgtgtgtggcttccaactttcaactcgccagggttggccatggcaagatcatttggagacttctgtctgaagaaatatggaataatttctatgcctgatgttttctaccatcgcatcacggataaggatgaattcgttgtgctggcaactgacggggtgtgggatgtgctttccaatgctgaagctgttagcatcatcagcaatgctccttcacaggcctcagcagctcgatttctggttgaaaaggctcacagggcatggaggacacggtaccccacatcaaaaactgatgattgtgctgttgtctgcctctttctgaaaacagtagcagcaagtacatcctccagtgctgtaacaaaagattcggtgaagaacagagaaatgagcaatggtaagcattcattggctgttaaaacaagcaccaaggttcctgcaaatcttgttactgcaaaagatgagtggtcttttgttgatggttcctctgggtgtgtcgcgctgccaactttaccagagcccacttcagttgtgaaggatagctcaaaagattgagcttgcctgccaattgagatggcataatttttgctggaaatttgttcgccttcgtttgcaagcttgtgtgcatcagatttgttgtgacgtgaagaccagtgccagtttcattggcgagttgaggaagttattgcatagtggaatggataagtgtgcatattttgttctttttgtacagtattcaatcagtttagtgggatcagttggtagtaatgataactataataataccgtgcctattattgatggatgggggtgatcagatccatgcataggatgaagtttctcccttcttttgtaatataaatataaataattgtgtcggtttcagc

SEQ ID NO: 32919 - DNA, 1614 bp, Zea mays
  Clone ID: UC-ZMFLMO17040B10_FLI
gtggaagctttggatgtgctaattgagaagctaaaaccaaagatcaacttctgtaaggtagtggctgtttctgggagtgggcagcaacatggcagtgtttattggaagaagggcagccatgctgtgttatcctccttggatgctagtaaaagcttgttatctcaactcaaggatgcattttctacaatgaactcaccattatggatggatagtagcacaacaaagcaatgcagagaaatagagaatgcagttggaggtgcactggagttagcaaaactgacaggatctcgtgcgtatgaaagattcactggcccccagataaggaagatctatcagacagcgcctgatgtttatgaagataccgagagaatatctttggtgagctcgttcatggcatctatccttgttggaagctatgcaagtattgatgaaactgatggtgcggggatgaacttgatggatatcaagcaaaggacctggtcaaagtctgctttagaggcaactgctcctggacttgaagcaaagcttggaaatctggcaccagcatattcagctgctggccgaattgctccttattttgtagaaaggtttcagtttgataagaactgtttggtcattcagtggtctggagataatcctaatagccttgcaggtttaactctgaatacccctggtgatcttgccattagccttggtactagtgatacagtattcgggataacaacagaagctaaaccaagccttgaaggacatgttttccccaatcctgttgagcctaatggttatatggtcatgctatgctacaaaaatggctccttgaccagagaagatgtacgaaatcgctgtgcagacaaatcatgggacgtttttaacagctatctggagaaaacgccccctctaaatggtgggaagttaggattctactacaaagaccatgaaatcctccctccacttccagtgggtttccatcggtacactgtcgaaaacctcaacgacgtctcatcagacgctctgttggagcgtgaagtggaagaatttgacccaccgtccgaggttcgagccatcattgaaggccaaatgctgtcgatgcggggccacgccgagaggtttggcatgccgaaccctcccaaacggatcatagcaactggcggggcatcctccaacgaaagcatcctcaagtcagtcgcgcagatcttcggctgccctgtcttcacagtccagagacctgattcggcatcgctgggcgcagcgctgagagctgcccacgggtggctgtgcaacgcgcaaggtagcttcgtccccatctcgtgcctgtaccagggcaacctggagaagacctcccttggctcgaagctggcagtcccggccggggacaaggagcaggaccgggagctcctccagaagtacaccatcctgatgaggaagagaatggagatcgagagacgcctggtggagaagatcgggcgatcgtaggaaaaaaaactcatgaagcgctgctgaggctggcaggaccgaataatttgtgaataaatatggattatctcgatggtaggaaacaaattcatggcaggaccgaacaattcgtgaataaaagtggattatcgtccattatgc

SEQ ID NO: 32920 - DNA, 1745 bp, Zea mays
  Clone ID: UC-ZMFLMO17040C09_FLI
cagcaacaatacatttctcagtccatacctcatgatcgttccatgcagcagctttatgattcttcccatgggacaatacatacttcattgtcatctggtgaccgtatgaagctttgtcttcaaagaacagaagagattcttgatcttgctctgaagttacctggtcatggtaagcataatctacaactacatgcaagtgtgaaattgagagagacaggaaatattggtttgtcggaaagttgcgctactgccctaccactgccccatgaaatgatgggtcatgcagcttggaaagaatgttctgctagtctcacacagggctctgcagttgttgatgctctttcacaaaaagaaagtattgtagactcaccatctaagaaaactccaagttatggttttaacgattatagcaagatgactgtttttgaagttacaggttttcctcaaccatttcaaggtcttcagaaaccgaaaagtgtagcatctcatatctcaaatgaagttcatgaaatggatatttcctctgtccatcctcattcatggaaacctactccaggtgttagggctaaatcagtgttggaaattcaagcagaggaacgattggaaactcagagggaaatagccctggaaaatacaaaggtaactacaacaacagcttccgggctatctattcattgggttgatttggttgaaacttctgggcaacagtttggagatcaggctagacctatgtgtgataaaaaaaatggcaatatatcacagagtaacagaagtcatttacatgatttattggcaagagaggaactgataaagtcaaatgctaatgctggtgttatcataaacagtgctgatgatacatcttttcctcctctggcaccttctattactcagtctgatgctcatattcatgatggtgctgatttcattgagttcaagggcacaagaaagataagtaacagggggaagaaacccaaaggttctgcagttaaaaccccagcatcacatgcaaatgttatacctggaccagctactgatcctgcacaggtacgtgaaccatgttctctgagaaatattcaggtggaagaagaacaggaatcagctaatcttcagcaactagtaccagcatcatcccatgcaaaagggcctatggaccagcatattcatgggaacaattcatcctggcaaggttctgaatcacctccatcgaggggtaacgaactcctcaaaatgacttctcatgtttccagtcactccactcctaattcggaagagtatctgttttgggagcctcgtgagcatgcaaagcaagataagccgagactccaatcacctccgagttccgtggtcaatacaaggtctgctgcattggacattcagaagaaggggaagaaaggtacaaagctgagcacgtcagctttggggttcaaggttcagagcacccgtatcatgatgggtgagatcgcgcatgttgacgagtagatgtccagactgcacagaatttttatcatggtagtgagcttcctgaagaatgaagatgatgacagtttggcggctgaagttacgagaattcaaattgagcaactggcaaaggttttggttttcagaaggcttggttgtaacttgaaaatcgtataatgtttgttgctgggcggattttgttcgaaacattgagcctggaaggttgattccggtctaatttgcagaatggaatatttgagtgcttggttgtgaccgtttcctgaaac

SEQ ID NO: 32921 - DNA, 1326 bp, Zea mays
  Clone ID: UC-ZMFLMO17040E02_FLI
acgtgttcgtgagggcgaagtgggagagcaaaattacttctggcatgcagatgtcaacagatcctaaccactacggggtatttccacattcattctgcaaccaacatgtggtttcatttcagacgagttcagttaccagtgtatcaggagccataccagtttgtctagacacttccagtggaatgaatggcaatatggcgatgttgaacactacaacttcaacgattgtatccactggttcaccaaacatgagtgctgagtcttcttgcccgaacctcaagtatactgcaccgttggctgtggagtggtcctatccggagctgcaattgttgaatgatggcctcaacaagtatgcaaatgaaccaggaatcatgaagtacataaagatagcagccacgttaccagacaagacagtaagagatgttgccatgagatgccaatggatggcagcgagaaaagaagctacaagacgacggaaacctgaagaacattatcttggaaaaaagataaaagatagaaaggataaaatggctgagccgtcatcatggggtaccaatcctcctgttcagactgagatgagatcttcctcttctatgcctcctaacgccaaagacaatgggtttctctctgcagactctcaaattgatcatggaatgctaaatgtattggaagaaaatgctaagctactcaatcaaatagaagtaaatattttaacatcacaggcccataacaatattgaacttttccatcacgcaagaaggaacatcaatggtcttttacaaagcatgagccaaattcccggaataatgagcaagatgcccccattgcctatttcggtggatgaaaggctagctagctacatactccctcgtgctcctacggctcaagttcttggcagcagccatttgaaagaagaacgaagagtatggtaggccactgctagacagggaagcagctcaattttcagcagcagtttgaccaaaaatatctgaagagccatgtgcttgggagtctgcatggagaagcataggtgaaagaacgatctggcttttctgatggtctcaaagctacagaagcaacatgatccaccacttcaccacatggccttaaagaacgctgtctagcttgccttgtcaggatgctctgtattagtgatcaacaaatttgagatagggagagttttccgtaatctgcagttttcctcaccttggttgcacatatcgattctttttgggttttgtcctggtgatcgaggttaacagaagtgtagcgtagaaattgaactttggtatgaataattagcaggaaaagcgtagcctttttgtc

SEQ ID NO: 32922 - DNA, 1008 bp, Zea mays
  Clone ID: UC-ZMFLMO17040G03_FLI
ttcaaaagaagagctctaagggttattgctgatcacttgtcggctgaagaggttgaggacataaaggagatgttcaaggtgatggatactgataatgatggtatagtttcttatgaagagttaaagagtgggatcacaaattttggctctcatcttgcagaatcagaagtgcaaatgcttatcgaagctgtggatacaaatggtagaggagcactagattacggtgaatttttggctgtctcgctccatttacaaaggatggcaaatgacgagcaccttcggcgggccttcctatttttcgacaaggatggcaacggtttcatcgagcccgaggagcttcaggaagccctgatggaggacgggggagctgataccatggacgtggtcaatgacatattgcaagaagttgacacagacaaggatgggaaaattagctacgacgaatttgtagcgatgatgaaaactggcacggactggaggaaggcatcgcggcactattcaagagggcgcttcaatagccttagcataaagcttataaaagacgggtctgtaaagctgggtagcgagtgaggttgcagctctgcagccgatgctcttctcttctcttctcttctccacgcatcgcccctcgggcccactaagggcttgttcggttctaccccaatccatatggattgagggggattgagagggtttcaatccctagcaagtcaaaatccctcccaatccgtatcaatccccttcaatccatatggattgaaaataaccgaacaagccctaatgattatttgtggtccgggatttagatagtcggagcctccctgattggtttactggtgtaattagcagccttttccagtgtcgctggggagcatctgctgaaggattgcacacctgcatgcctgctcatctcctacggtgtagtacctgacgctcaaaatgttgtaaaaatgttttggtgttgacctcaaatataatgcaatttgctcgctggtaccgtgtgctgtc

SEQ ID NO: 32923 - DNA, 699 bp, Zea mays
  Clone ID: UC-ZMFLMO17041A05_FLI
acgggttcgccatggggtccgagggatcctcgggtccagttgtcgttcccagaaactttaggctgctagaagaactagaacgtggtgagaagggcattggtgatggaactgtgagctatgggatggacgatgctgatgacatatttatgcggtcctggacaggaactatcattggtcctcccaacactgttcacgagggacgaatctatcagttaaagctgttttgtgatacagattatccagataaaccaccgactgtccgattccagactcggatcaatatgacatgtgtgaaccaagaaactggattggttgaaccaagtctatttcctatgcttggaaagtgggaaagggaacatacgatggaggacattctgaccagcttaaaaagggagatgtcaactccacagaatcgcaggctgtatcaacctcatgaaggcaatgaagaccaaagagtagagcagaaaggggtgtctcttagatgtgtcatcatgtaatctatgtgcgttgcaatgtacagcattattgaattgagcagcgaggtgagagaccctctcaggaaatcatgtggttcgccttaatggtgccaccatcgcaataaaagcgtcgatgattgttaaaagtgcctgcacaccatgtaacgtgtaacccggttcgttcagattctgtgaaagacaacgagttcagtgtctgtttgtt

SEQ ID NO: 32924 - DNA, 904 bp, Zea mays
  Clone ID: UC-ZMFLMO17041B08_FLI
ggctcctcccacggcacgccgtgctccagctcggattccccctccatggcgcgcccgagcactccggctctctgctcgagctcgcccagctccctgctgcggtgactagcgctcagcgtccggctccctgggtgcttgccctgctcgccgccatcctgctggatcccctccacggcgcccgttcttcccgggtgtcttcctccaccgcgctctcctctgcaagcaactgggttctgctctgccctgggcgtcgttctcagtcactggtggaccgcgcgcccctctgtttgctggtcgtggctccctcatgctcgccgtcattcgatatgccgccacgtcctcgcctcgtctcggtagcgcgcctgccagtgtcgttcctcgctatgtcgagctccctccccgtcctgtccaattcgccgtgtgggtggaacctacgtgcacgctgtcatcgacaccatggtcgtctccctgtgcgttgtgtccctcgtctccagccgacgcactaaggaatgggcgtggagtatagaagaaagtgaagcccgaaatggtgctcgccaggcgctcaacaaaatgcctgaatcttgttcttccctactcaatctcgttgaaccccgaatcccggacgttagacaaaataagcgaggtccgtgtgcatcgctcatcaagtgctcgacacaaagagctgaatcagaatccttgccgtgttcgcggatagcgcgtcagatttagaatggtaagtcgattcaaaatttccgttagcttaattattgaagtagttctaattattgaagtagttcgatgaatgtgatgtgcttattttcgtgattttgaagcagtcgtgtcgcggtaggattaaatatatgtgaaatacgatgaagttagtaatgcgaaagatagattaagt

SEQ ID NO: 32925 - DNA, 1886 bp, Zea mays
  Clone ID: UC-ZMFLMO17041C02_FLI
ggccgaggaggtgcaggctccactttccgccaccatggcgtttatgttagtcgccgccgtccgcaaccatagcggaggcgacggcgccgccgcagctcgtattatttaactcctttacgaagagggaggagccattccagccccgggtagaggggaaggtagggatgtacgtctgtggcgtcactccctacgactttagccacatcggccacgcgcgtgcctacgtcgccttcgacgtcctctacaggtaccttaaattcttggggtatgaagttgaatatgtccgtaatttcacggatattgatgacaagattattaagcgtgccaatgaacgcggtgaaacagtaacaagtttgagtagccagtttatcaatgaatttcttcttgacatgactgagctccagtgcttgcctcctacctgcgagccacgggtaacagaacacattgagcatattataaagttgataacacagataatggacaatggcaaagcctatgctattgaaggagatgtttacttttcagttgaaagttttcctgaatatctcagtttatctggaagaaaatttgatcaaaatcaggcaggtgcacgggttgcttttgatacaagaaagcgcaatcctgcagacttcgcactctggaaagctgcaaaggagggtgaacctttttgggatagcccttggggccgtggaagaccaggctggcatattgaatgcagcgcaatgagtgctcactatttaggacatgtattcgatattcatggtggggggaaagatttgatttttcctcatcatgagaatgagcttgcacaaagccgcgcagcttatcctgagagcgaggtcaagtgctggatgcacaatggctttgttaacaaggatgataaaaaaatggcaaaatcagataataactttttcacgattagagatatcactgctctttaccatccaatggctttaagatttttcttgatgcgcacacattatagatcagatgttaaccattctgatcaagcgcttgagattgcatctgatcgtgtctactacatttatcagactttatatgactgtgaggaagtgttagctacatatcgtgaagagggtacctctctcccagtgccgtctgaggagcaaaatctgattggaaagcaccattcagaattcttgaaacatatgtcgaatgatcttaaaaccacagatgttctggaccgttgcttcatggagctgctaaaggccataaacagcagtctgaatgatttgaagaaactgcagcaaaaaatagaacagcaaaagaagaaacagcaacagcagaagaagcagcagaagcagcagcaacagaagcaacagcaattgcaaaaacagccagaagattatattcgagctctgattgcactggaaacagaacttaaaaacaaattgtctatacttggtctgatgccatcttcatctttggcagaggtactgaagcaattgaaggacaaatcattaaagcgagcagggctgactgaagaacaattgcaagagcagattgagcagagaaatgtcgcaaggaagaataagcagtttgagatatctgatggaatcaggaaaaaccttgctaccaaaggcatcgccctgatggacgagccttctggtacagtatggagaccatgcgaaccagagcggtctgaagagtcatgattagctcactgactcaacaagtgatggtggtgtaaaatgagatttttgcctgagggcagttatcacattttgaagactaacaaaaatcgccatctctggatgtggtattctagagggtaggggttccaggttgactcaccagttaaaacatgcatttctgcttgtataacaagcaatgaaccccgtatatatacttgacagtttgactcc

SEQ ID NO: 32926 - DNA, 1176 bp, Zea mays
  Clone ID: UC-ZMFLMO17041C12_FLI
attcatttgaataataagctgctgagcgcctccagttccataatctgctgctgctactgcgttgttctctctttttttgtatctgctgctgtttccaagtaacgttcttttgtgcttgtctatgttgtacactggttaatttagggtctgtttggctgagatagcctagggatagtactagttgggctaaagtttagcccagtttggcttggtagatggctaagtagttggaaatttggctaaaaaaatagctcatctattggcccctcttgtttggatgcaccagggccaatttttagctagcttctaatcagctcttgtatccaaaccattccttaataatagttccatttcaaatattttgctggttacatcaatatcatgttaactttgcccaagtgcaagaatgtgttcacattacagtttgtagtttgcttactgctttttgtggctgccatgatggacttctcgttaacctgagacatactatgaggatagcatctatccattcaaaaaccataactgagcagcattgtttgtctgaagatataacaagttgagggcgttacaatcttttgtgccctgcatcccagtttgtgcatgcctattttacaattttttgggttgcaatgatggctttctcgttaacctgatacatctttattccatgaaagacgcctaaattcaatcataactcaaggctgagaacctccaatctcactagtttgctatgttttgcttttcttgttctatctatgttttctggcgtctccaagtttgctatgtttctcttctcttgttctatctatgttttttggtgtctccatttggttctgtcaatctctattcaaattaaacagagctgcatgtgaatattaatatttccaccgaactcctaggttatgatgatatttgtttcattgacctgtgacgtgcttgctatttgttcttgcttcagtgttggatgttgcagcgatgtctttctcgctaacctgcaagattcttttcatcaaagcacttgatcaattcatggctcggactgagaatcggcactatcatttgtatttgatatgttttgcatttacttctgttttcttgtcttcctgctagtttgacttggatcatgtacaaaataaactattattttgagtatatatagtgtttttttagagtttt

SEQ ID NO: 32927 - DNA, 1454 bp, Zea mays
  Clone ID: UC-ZMFLMO17041D11_FLI
caagattgacgggctacgcctaattctccttgcttataattacgtctttcaaagttctgtagagccagcagacatacatatacaatatatgatatatgcatgtatatacgtaatgttatttagtacctaaagggaggctccattaatctgggggcctggttgagggcactgctcgacccctgccagggccggcgctgctgatagggctcgggtgagtgcaaatgtcagcttttcttccacggtttctgcccactgatcaactctccaaaataatcgatggagcatgacagtgttggaaccaaggaaacatcgggttcaacaaacttctcaacaaccagagcaatccacctatttcctgaaaacaagtgaaattagccaacatttctccaacagtccaagtcacacgattagagaaaacaagattgaactttcacatgaactttaaatatcccattttataggaaggtacagtatgactcatcaaacaattcaaaatcacaaatattaattgctcatatatgaacaacaaaaactccatctcaaatcaaaaaggctaaaataggttacattttcctctgtacggatcgcacgattgacaatcagttcatgtatgatatggccatatccctcaaacaactctgcagttttattctaatcctatatattaatgttttaaggatgtaaacatgcatccataaaatacgtgttaatctctagttctccactggatgcagcatggtagctagccttgatagcttgactttatacaatccctatatgtaaggtcgttatgctcggtctctaggttggataactcagaacaaacgtctttaccaaatcttatcttcttatagccagatgcaccgtaggtgacaaaagaaacgaactcactgacaaaaaacatgattacttgtatagcacgaggttgccacttgtcgaagccagcttgatcaactcatttcattccataaaccaaacaaaaataaagagtgagatgataatggacaatttcattccataaactaaataccactaagcctacagatgcgagcaatatcttgcacgaagcagctcaaagcaggaattattaaggctataagttgcttacatcagcttgggggacttcaacctgacactattggaccacctgatcgtggaccctggcctccgcatggttggctgtaacaacaagctcaacgccgggtacgccgcaaataggtacacacacgtggggtgtgggcgcctacgtggttggtcaccttcaccatggcagtgacatcataaattctaacaatgaaataaatcagcagaaacttgatgcataatgttggcagatgcaaaaagaaagaacaatggcagtgatgtgtaaactggcattgacatcttactttcactaaaatggatccaattgttgaaaggatttgagacacaagtgcctgtaagcatccaagagc

SEQ ID NO: 32928 - DNA, 732 bp, Zea mays
  Clone ID: UC-ZMFLMO17041E10_FLI
gggcgtcgtccctagacctctcagggttttttgaggaagaggacgtgtcccaaaggaagatcaggttcacgtccgcacaaccgcctgaggatttgttcgccgagatcgaacgctctgcgactgacatgggcttccatgttcacagagggcatagtaagcttaggctgacgcgaaactgcgaccggtcgaagaatcagaagaaccctatgtcgtcatcgtcgtcgtcgtttctagtctgcaccgaggtttttgagcttagcccctctttgtatgtcgtggagctcaacaagtcccatggcgaccctgcactgtacaggcagctctgtcagaggatctgcggtgacctaggtgtgctcgagatggaccagatctttgggacgaggccgccggtcgccgacgatctcgcgggcttggccttggcgttggagagacgatctgcgacgcctttggttgcgttgtgacgaaaggctgcccccgccggcccccctgaccgtgatgtttgtagcgtcagattatttagtgacgacgaagcagttcagctgcaacgcagctcggaacggttgtgtgatccctcccagaaatagaggacaaggtaaaagagtgtagccgtacacgtgtaggatcatgctccaatgtaaataaagtggtagtagccaccgatgtaaaactgaatgtaaaatctaagaaataaatcgtttatccagtacacagaagctctatagtgacggtact

SEQ ID NO: 32929 - DNA, 983 bp, Zea mays
  Clone ID: UC-ZMFLMO17041E11_FLI
gatcatttcaatgcgtcagatgcaaacgctgatggtttccttgataaaaccgagttcaatgatttccttaatccaagtgattcggataatcccaaaatcatcaatttgctctgcaaacaagaaataaggcagagggataaagatggtgatggaaagttaaactttgaagaatactttactgggctacatgaccatatacatggttatgatgacgagaatgcagatatttcccaaattgggaacataacagttgcgaaggatcggtttttcaaacttgacaaagataatgatgggtttatttcggagcatgaactagagcctgttcttgataagctctatctttctgaacgctattattctagacagcaagccatccatgctatttcagaggcagacaaagatcatgatgggaggctgactttggaagagatggttgagaacccttatgcattttatggcagtgtttatctcagcagcgacgacgacgacgaggactacttccacgacgaatttcgctgagaccaatattgttactatcctgacacacgcaaggaacacagctgacgagcatcaaggtgcgcacagaggttcggaacgtctagcatactatgtgtgatgcccgggctgggctgctgacagaatgggagagcttagagttagggccatggagtgaggaactagtttttagccgcttggttcttcatgttgtttgtgttaaatgaaacgacgacagcatcctagtaccggccaggcccagcagtgatggatgttacgcggcaagttgggtcacctttatctaggctgagctgcattggtctccatcctgatgttcctgcagcaggggaaatgtagttcaggagaacaatgagtggaggagcgtcatctctgtggcgagcggcttcagaaatctaacgggaacgtgttgtttggtgtccgaaatgtatgtgtgtgtgtgtatgctatgaattcaattatttctggcc

SEQ ID NO: 32930 - DNA, 1809 bp, Zea mays
  Clone ID: UC-ZMFLMO17041G02_FLI
gcgccccggagtggactacgacgagaccttcagccctgtcgtcaagttcgccaccgttcgcgtcgtccttgccctctcttgggactgggcgatccatcagctcgatgtcaagaatgccttcctccatgacactctaatggggtttgtctactgcagccagcccaccggcttcgtcgacgtcgctcgtccggatctagtctgtcggctgaaccgctccctatacggcctcaagcaggcgccgcgggcatggtacagtcgcttcacctcctacttagcctacatcggcttcgtcgaggccaagtcggacacatcccttttcatctagtttcccactgttatgtccaatactccctctggtcataaaacatatagtttaggacaatttagttaaatctttaaaactacaaacatcaataatgtttaattgttgatttaaaaacatgcaagttatatatagatttgtattaaaaaatcggctgaatctcataaattttaagtaattcaagaatatattgtagaagaaattagtggtcaatgatttgcatcaaagaccatgcgaagtcaaatgtggcaactacttctgaccagatgagagtatttttgtagaaaaaatcatttcaccgaaataatagtgactttcataccttaacacatcactctttttctccattttccttgtgtagatttttttctctcgaatatacaggagagttgtgtatcattgcattaagaacaaacatatagattacaattatgttttgtttgcttaaacatcactcattgttacctaaacaaccattctaggatgctttctctgctccactgctttcccttgataatgaaagaaccaataaacttctttgcatgttatgattcgtctcatggcataatcatgtgtcaacctcttattattctatggctctacacttctacctcactaggatcttttcgtactgaaattattctattcagttatgtcattcagctattgaataacatagtgcttcttttctgaaagcatcagccagcatattcctgtcatgcaaattaagttggatacagtaagcacttgtattctttattttactttctagatataattttgctttcactttaattgggcaaactttgtttcttccatgtatggttatctttgaacagcgctgtttatccatcggttacacacacagtttggacattttttatgggttatatcaatcagtatgaaagttttcttcccttctcagccatatctccatgaatctcggcatcgtcatgcaatgaagcgagtccgtggaccaggggggcgtttcctcaacaaaaaggagctccaggagcagcagctgaaggccctgccttcacttcagactccaacaggtggggtcagcaaaatggcctttggcaggaacctatgccctgaaagcagcacatctcactcgccttcgacgagctctacaatctcgagtgcttcaaactggagtggcacgctagctcatcaagagcacgttagcttcgcatctgctaataaattcctccccagcatgaacttccacgcggagaatggaggtgaaaagatggccatcaatggcgtccgccaccacacccctgtcctgaggtgaacagcctcaactgtgggggtgctgtgctggtaccatcactggcgcgctccggtgtgcccgtggcaattcatccttggcttatgatgtatcttataataatttgctttcactttcatatggaacttgtctcagattaaactcggtgatatttattgcaactgaatgactgaaataatctcatgtttcttac

SEQ ID NO: 32931 - DNA, 645 bp, Zea mays
  Clone ID: UC-ZMFLMO17041G06_FLI
ctcgtatctgctcctccgttcaggctcctcaggtccggtcgtcgccctgctccctggtgctccctgctagttgacctccgccaccatgccagtctggccatgtgttggccgtcggctccctggaaccagcgccccagccaccaacctccgctcacttcgacgacggaccgtgccgctggtccatccatggccgtgagtccacctccgccgagctgctagtctctagctcctccgaccattctgctcgcccgacaacttgtcacaactgggtctgctccatcggctcctcgtccggctttaacatcaccgtggccagcagccacttcaaattcgttcattccctacggggcatcacagtttgcgctaagcacgattgattccatctagttcacttgcactccaggtgtttgatgaatcatctgaaccgggactcgttgtcgtttccacgacttctgagtcaatttagtattagtgagccggtttgttaattctctagctagtttgatgtatgaatgtgttcgatatatttattggtttagtatattaattgcgatagtttttgtgtcatggtgcagatgtgtcgtgattgtattagatgtttgctaatgtctcatatatgagatgtatgttcgaattggtgacgtg

SEQ ID NO: 32932 - DNA, 664 bp, Zea mays
  Clone ID: UC-ZMFLMO17041G12_FLI
gaaatcttccgttctcaaaccaacctaggcaattcgccgcagcctctcaccctcgcgagtcccgacctcccgcagccgccgcacagatggcacccaaggcggagaagaagccggcggccaagaagcccgcggaggaggagcccgcgacagagaaggtggagaaggctccggcggggaagaagcccaaggccgagaagcgcctcccggcgggcaagtccaaggagggcggcgagggcaagaaggggaaaaagaaggcgaagaagtccgtggagacctacaagatctacatcttcaaggtgctgaagcaggtgcaccccgacatcggcatctcgtccaaggccatgtccatcatgaactccttcatcaacgacatcttcgagaagctcgcggccgagtccgccaagctggcgcgctacaacaagaagcccaccatcacctcccgcgagatccagacctcggtgcgcctcgtcctccccggcgagctcgccaagcacgccgtctccgagggcactaaggccgttacgaagttcacctcgtcttaggatccttgtaatggtcatgtgggcgtcggcggtaggcgtggctcagtttatgtgatactgctagcgatggatgatgatgatctgcgtgtaattgaattaaagaattgtgctgatctttctac

SEQ ID NO: 32933 - DNA, 1267 bp, Zea mays
  Clone ID: UC-ZMFLMO17042C10_FLI
tgcgtctggcgctgcaagaagtggctgggcctcggcatggagaccacgctggcgcgcagcgtccgccacgtcgaccgctacctctcggccgtcatcaaggcgcgcaagctcgagctctccgccgccacgaggaaggacctcctctcggccacgccgcacgacgacctcctctcgcgcttcatgcgcaaggggacctactccgacgagtcgctgcagcacgtggcgctcaacttcatcctcgccggccgcgacacctcctcggtggcgctctcctggttcttctggctggtctccacgcaccccgccgtggagcgcaacatcgtgcgcgagctgtgcgccgtcctggccgggtcccgcggcgtcgaggacccggcactgtggctcgccgcgcccttggacttcgaggagctcgaccgcctcgtctacctcaaggcggcgctctccgagacgctccgcctgtacccctccgtgcctgaggactccaagcacgtcgtcgccgacgacgtcctcccggacggcacgttcgtgccagcgggctcctcggtcacctactccatctactcggcggggcgcatgaagacggtgtggggggaggactgcctccagttccgccccgaacgctggctgtcggacgacggcaccaggttccagccccacgactcgtacaggttcgtggcgttcaacgccggcccgcggatatgcctgggcaaggacctcgcctacctgcagatgaagaacatcgccgggagcgtgctcctccgccaccgcctaaccgtcgcgccgggccaccgcgtcgagcagaaggtgtcgctcacgctcttcatgaagcacgggctccgcatggaggtgcgcccgcgcgacctcagcgtcgtcatcgacgagctccgcggcgccggggagtacgacgcggcggcaagagccaccgcggcctccgcatagaggttcgtgcagtgcaggtcgggaaggaaaccaacggacagattggaaacgtcaaatgaaaagttatgtagatattgacagtaagtaattaaagagtttggtgaggtatattactcaattgggaacaaaaatgcatgtgtaaaaagtccatatcattttgatttgcatttgaatgggaggacgaagaaaagcgggccggagagcaataataactctctcatgtaacctgacggggaggcgccaaattggtttcggcagcttgtgttaatgggccgccaaaactgttgttgtttgtaaaaacaaaactcaagcgatcattcattcgatc

SEQ ID NO: 32934 - DNA, 902 bp, Zea mays
  Clone ID: UC-ZMFLMO17042E04_FLI
cttgaggacgtcaaacatcctactgacagagagctaccgagccaaagtgtgctgttctgaactgtcaaaaagtggtaatatcgtgctattaaagggaacagggggctacattgatccagagtacttggagacctcagagctcactgccaaatctgatgtctactcttttggaataatactcttagaaatcatatcttctcatgggccacaagactgggatgtattgatgaaccaccggcaaagcagtgttgtacaatgggctcttgagaaattctatgacgacctcatgaatgagatattggattaccgtatggaggatcgcgtggatggagatgtggtcagggacttgctcagcttagcgttgagttgtgtggtttcgcgtggcgctgatcgcccaagcatcgtagttgtcggggagcgactgtggaaaatatggcaagatcatcgaagaaacgtaggggaacagcacgagtaccaaggaagctgggcagaatttatcgaacaagagggaatcctgaggcatcacaagtgtgtgctcaagagaagttgggagccttcaacaacgcagcaggattggtctgtgtatgttaggcagattgaattagttcaagaagcttacgataccccatggggagaggaaattttttcggggtctgtttcattggacgatatcacagtatattctcggtagaaagcttcaatacgattatattactcctgttttctccgcggtattatatgtgtagattggaggacaataacctatttgttctatttctgtttcattggacgataaatcatagtgtctcctcggtatgaactctgaaagtttcaactcgttgttttcctcactctatttattcagtgatattgctgttagaaaattacgcaatttcagtact

SEQ ID NO: 32935 - DNA, 1494 bp, Zea mays
  Clone ID: UC-ZMFLMO17042E09_FLI
gggggaagcaaccccccgcaccgcgaggccgcaaaagcaatcgcgaaagcgagcgcgaggcgagtcggccggcgaagggggcggatggcgcgcgggctgcgcggcgtccgcgacgacctatccgagctggggcgccacctgctcgacatcgcttgcttcctgcacccgctcctcaacccggcccacaccgactccccgccgcccacccccacgggccgccgccgccgcgcgcgccgctccccgtccccgcaccccgccgcgccgccgtcaccgtcgctcctcgcgggcatcctctccgacctcgccgagatcggcggctccttccgcggcggcttctcccgctcctcgccggcgcccgaccaccccgcccccgacgtgctcgagtcacagcaggccgcctcgtccccgtccccgcgtcagcctcctcctgctgctgccgaccagatcgcagatgatgtcgtgggagcagcgcgtgccctcgccgcgcggcccgaggcgtggatcgacttccccgtgctcgccctagatgagggttctgtaatttctggtatccaaagggatcatatggaatccattgaaaaacttgtcccagatttagcatctctacggggtaggctctgtccttcttacatggatgaagatatattctggaagatttactttaggttgcttgagtcaaacataaatgagcataattctgaggaagatatccggagcgtgccaaattctgtacatcacaacaatgagatagagtctgattctccacctcacgtctgtgagatagaaagtgtgaaaagcaaccaagaagggtaccaatcttcggatggtcgtgctttccccaagacaagatctgagcgaagcattgaccaatgggtatttgcaaagtcaaaatctgaggaaagcatggatcagtggtctgaaataccttcagatgtggaatccttcagagaaggtaaaaggtacctcagtagcgaggagctgagtgacgttgatagtgccaacgttgttgtcatggacaaatacatggattcagtcctctctgaccggaggaaccttccctacgctagctcctcggtgcgccgggattcagtcagacgaaaacctgcttcgtccgccgattacagccgccgacctccgcagccaactccacctgcatcgctgtcaaagaaggaatcgtgggatgtcattgaagattcggagttcgatatacttgacagttagtaattgagatctttgcgatctcaaggctgtttatccttctattttcttccatgtttccccacacttcacctcgtttgtaaatgtggacgtgcaggtggcgtcagtgatagtgggaaaggactaatgttctttttaccaatatattataacagtgtgtgcatataaatcttctgagctcgcaagctgtgagcctcccaggttaaaagtgtttatatgttggcatcattgtttgtttcagatattttattgcagaacagaaaattgccacctatc

SEQ ID NO: 32936 - DNA, 684 bp, Zea mays
  Clone ID: UC-ZMFLMO17042F07_FLI
ccggctccgtgcacgcccccgcggtgccgtccgtccttcacctcgtcaggcggcttggcgccaagcttgtcgtctccgtggaccgcagctgtgaccgcggcgagctgcccttcgccgcgcacttccagtcctgcgtgttcctgctcgagtccctggacgccgtcggcacgggccccgacatcaccgccaagatcgagcgcttcttgatccagccgaggatcgagaggtgtctggcggagaggtaccgcgccgcggcggcgggcgacaagacgccgccctggcgggcaatgctcgtgtcggccggcttcgtgccggtgcaggcaagcagcttggcggaggcgcaggcggaggcgttgctcaagaaggtgcccgtgcggggcttccgcgtcgagaagcgcgccggctcgctcgtcctgcattggcaacgcggggagctgctctccgtgtccgcctggagatgctagcacctcgctgctgctcaatctgccattatctgccattgtttaaggatcctgatatatgtatcttagatagaatccacaagtctgctcatgctttgtacaatcaaatgggggttatatggtgtatgaaatgttcccttcactcaggcattggatgcttgttttttctgtgaagttcatgatcatgagattcagaactatgaatggaaattaagttcctctt

SEQ ID NO: 32937 - DNA, 1554 bp, Zea mays
  Clone ID: UC-ZMFLMO17042G06_FLI
gcaggtagagccagccagtctagcttagccaccacactagtgtgatggcgaccaccggcggcggcaaggcggcactggtgctggggcggcttctgcttctgctgtgcgtgctcggccatggagctgcgcagcggtacaacgccatctggagcttcggcgactccatctccgacaccggcaacctctgcgtggggggcgggtgcccttcctggctcaccacggggcagccgccctacggggagaccttcttcggccgccccaccggacgctgctccgacggccgcgtcatcgtcgacttcctgggtatgtggctatgtgcacacacagacacaggacgtacgcaagagggatggaaacgacgaactggctgttggactggactgactcgctggtacactaacactgtaccgtacgtgtgcatggattatgcagccgagcactttgggctgcccctgctgccggcttcgaaagccggcggcgacttgaagaagggggcgaacatggcgatcatcggcgccaccaccatggactttgacttcttcaagtccatcggcctcagcgacaagatctggaacaacgggccgctggacacccaaatccagtggttcaggcagctgctcccctccgtgtgcgggaaggattgcaagaactacctgtccaagtccctgttcgtggtgggcgagttcggcggcaacgactacaacgcggcgctcttctcggggcggtccatggcggaggtgagagggtacgtgcccatggtggtgagcaagctcgtccgcggcctggaggcgatcgtgaggagcggagccgtggacgtggtggtgcccggggtgctccccatcggctgcttccccatctacctcaccctctacggcacctccaacgccgccgactacgaccgcgacggctgcctccgcgcctacaacggcctctcctcctaccacaacgcgctgctgcggcggagcctgtccggcctgcgcaggacgtacccgcacgcccggatcatgtacgccgacttctacacccaggtcacccacatgatccgggcccctcacaacttcgggctcaagtacggcctcaaggtctgctgcggcgccggcgggcagggccagtacggctacaacaacaaggcgcggtgcggcatggccggggccagcgcctgcgccgacccgggcaactacctcatctgggacggcatccacctcaccgaggcggcctaccgctccattgccgacggctggctcaagggcccctactgcagccctcccatccagcactgatcgagctagctgggccgggggactgaatagctaattaagctagcagcatattattcatgagtgacatcatcgtgctttgtttgtttacggctaattgccatgtgcatcatcctagcgctctagcaggttcatcaatgatgggtttgctatttggtttgtcaattagttgttcaattggtgaggaaggggtagctggtgtttcggcggtgtggtgggaacagtgatgaataaacgtgtaatggactgtttacaattagctacgacgtacgtgaac

SEQ ID NO: 32938 - DNA, 1285 bp, Zea mays
  Clone ID: UC-ZMFLMO17042G10_FLI
tgatggatgcgaagaaactattagtggcagtcacgatgatgatagcccagaaggccaggaaactagttccattaaggaacctgatgtagaaggtgacacacaggaagacaaacgtgtaaatcaagattcactcaagttgattgatgaagagtctgctcctcccaagtccccagcaaaatccgcgactgcaagttctagatcggagaggcctaaacgtgttgttccccgaccattttctctttctaatcaaagaagtttgtttggagtaaatggtggtgtggccaatccattggccaataaggataaatctggtgataaaagtagcatctctccagcaagcatgacaaagaagagtacgcagatggcacttaggaagactttgcagcctgagaaggtatttcatcctctggaagaggactcttgttctgtgacatcctcaactacaacatcaacaagagctggcagaactaagatgactgttcccgtcgctccttcatttgtgtgtgctaaccgtgctgacaagaggaaggagttctacacaaaattagaggagaaacataaagctttggaagcagagaaggacgaggctgaggccaggaaaaaggatgagcaagacgttgctttaaaacaactaaggaagtcattggtgattagagcgaaacccatgccaagcttctatcaagaagggcccccaccaaaggctgaactgaagaaggtgcctcctacccgtgccaaatcgccaaagtttacaagttcaaggagaaggagctgcagtgatacaccattgacacctggcggggaaaataccaacgcaacatctacccggccacatcgtcacagcatcgggagtcctagagacgctaacagagtacaacaatgctcgccaaagagcggtgtggcaaccaaaacaagatctgtcaaggctgagctgaaggccctctgaagagcatggagcagccgagtgatgtgtttctctgtacaaaccgaattgtctaaccgtttccatttccatgcatttttgcttctattttatacccaacatctccagcaaaagaaggctgtagggccaatgacgttgttcagcgccgctggaccttatccattttcttacattcgccttgtactcgtaagaactcttggtggcaccatgtgacattccatgtaaattacttgaggatccttgtagggagttcgtccggtgttttgctcctgttaagcccttggccttaactaatctgtgagctgaaaagactatcggaatggcactgttccgtttgatgcaaag

SEQ ID NO: 32939 - DNA, 432 bp, Zea mays
  Clone ID: UC-ZMFLMO17042H02_FLI
ccgacgccgccggtgtctcacacccccagcccgccgccaccatactactagaaagcgatgcctaccataccacactgctgtcagtctctggagcatttaggtggtctggatcaatggaagggttgtgtcctagccagccggcaaagatgagctgctgatggtaatgatgatgataagaggccactgctaccctactacgtaccctcctctttgtgtgctgccatccgtccccgttagacgatcgaggagagaataacgcagagctctctgctcccggcctgtcttctgccgtcccggccgtttaatttactagtgtgttcgtcctatatgtttagcagcagcaggtgtattgtgcgggtatgtaatggtattgcaactatattgggtgtaaaaccataataaatgtgggcaaatatgcaaggaaaaaaggct

SEQ ID NO: 32940 - DNA, 1538 bp, Zea mays
  Clone ID: UC-ZMFLMO17042H09_FLI
gaaagaagaagcggaggggaggcaggaatcgcctgcccgcgcctccatcgccctgccggcgacggcccacatgccgaccgcctacagcctccgcgcgccgccctccgcctcgcagcagcgcctcaggctgcccctaccgccgcccccgccgccgctgccgttttgcccgggtggaggggccgcccgccggaggaggggtgtcggggtggcgtctgcgtccgcgtcgcccttcgacgagctgcacgcgcgggggaggcccgtacatggaccctccaagaaatccatgctctggaacttgatccaggatatagagcccttggacctaagtgtcatccagaaagatgttgctcctgaaacagtagatgcaatgaagaggactatttctggcatgttgggtcttcttccatctgatcagttccgtgtcattgtagaagccctttggaatcccttcttcaagttattggtatcttcaattatgactgggtatactctgcgaaatgctgaatacaggctttcttttgaaagaaatctagaactgcctgaagaaggtgtagaatgcctaaaaagtgatgtcactgaagataatcatcataacatcaatttgggaagacctgtcactatttttagattatccgaagaagacatgcctcaggaccctggaaaaaccgatgaagcatcatcttatgaaaatatgggagaagagcttggtgacttaacaccacaggcagaggagtatattattcagatgcaatctcatttgaatgccatgaaaaaggagttacatgatctcaggagaaagaattctgccttacagatgcagcagtttgttggggaggaaaaaaacgacttgctggactatttgaggtcattaacaccagagaaggttgctgaactatcagaatcgacgtctcccggtgtgcaagaaactattcattctgtggttcatggtttgcttgctactctttcccccaaggtacattcaaaggcccctccaccgctagataacatttctggtggtgttctaaaccttgggggcgaggatgatgatcgtgcagaacttgtggagaatgcttccctcccatttcagcccctaatatctgttccccgtgattatcttgcacgtttgctgttctggtgcatgctgctgggtcactacattcggggtctggagtaccggttagagcttgctcggcttctgcgaatatccagcgtgggttctttctctggtggagatgatcatgttgtttgagggtaccacgtctactgatattcctcaccgggaagaatggaaaggaaagccctggtcaagaaatgggccatatggcagagctgcagaggtgtccgttacactgctgagctatatagttgtagttcctgtatattcagaaaacagtcactcggttgtaaagctagtgttacatatgcacgtgaaccattttctttttcttcctttgatgttgtgccgtataaaaagaatttggtggttcgttggtgtttatctcgtggtagcataataggcatccttgtattctagttgt

SEQ ID NO: 32941 - DNA, 727 bp, Zea mays
  Clone ID: UC-ZMFLMO17043A09_FLI
cgacctgttcgcgcgccccttccgcaagaagggctacatcccgctcaccacctacctccgcacctacaagatcggcgactacgtcgacgtcaaggtgaacggcgccgtccacaaggggatgccgcacaagttttaccacggccgcaccggtcgcgtctggaacgtcaccaagcgcgccatcggcgtcgagataaacaagcaggtgaatggtcgcatcatcaggaagcgtatccatgtccgcgtggagcatgtgcagccgtcccgctgcacagaagagttccgcctgaggaaggtgaagaatgaccagctgaaggcggatgcaaaggagcggggcgaggtcatcagcaccaagaggcagccgttgggccccaagcctggcttcatggttgaggggactaccatcgagaccgtcactcccatcccgtacgatgtggtcaatgatcttaagggaggatactaggttgtttgtttggtctttctacctgttctacatctgtgttactctagtgcgtacaattttgctcacactgagcagtatgaacctattgtgcgttcatgttgaaagatttcccgttctgtgcaaacctgagtttagaagaatgctatgccttgatctttgcttctgacaacaaagatttgcctttttcaacctcatacggtgctaattatgtatttatgttgtttgaaccgtgaagtggaaattgggaaagtatgtcacactagtacg

SEQ ID NO: 32942 - DNA, 924 bp, Zea mays
  Clone ID: UC-ZMFLMO17043C05_FLI
caccggcaaactcttccacttcgccagctccagcatgaagcaggtaatcgatcggtacgactctcattccaagactctccagaagtccgaaccgcagtcgtctcaactgcagtcacatatggatgacggcacttgtgcaaggctaaaggaggaacttgctgaaacaagccttaagctcaggcagatgagaggagaggagctccagaggctgagcgtccaacagctacaggagctcgagaagaccctcgaatccggcctcggctctgtactcaaaaccaagagccaaaaaatccttgacgagatcagcggtctggaaagaaagagaacgcagctgatcgaggagaactcaaggctgaaggagcaagtgacacggatgtcgaggatggagacgcagcttggcgccgacccagagttcgtgtacgaggaagggcagtcgtctgaatccgtgacgaacacgtcctatccgcgcccgtccaccgacaccgacgactgctccgacacatcgctcaggctcgggctaccattcttcagctccaagtgacggagatttggcatgtccggtagcggagcggtgccgatcgcttgcccttctccactctagataggtctggattgggggagagcagcagtgctggatcgggaagacccaagtgaccaacgcgtcgcatcagaataaggcattttgagtgctgtatgatgtgtgtattctggctctgaaagtgagacctgcttttgttataatacatacatacaggcagcatggcaatacgtgacggggtacccgctgcctgcagtccgtgacctgtctgtcgtctctgtttctagtactcgctataatcaccctgcaattacctgtagctggtcatcgttaggagaaattccagtccatgcaaatgaactcccagcacttgtgctcttcgcggt

SEQ ID NO: 32943 - DNA, 459 bp, Zea mays
  Clone ID: UC-ZMFLMO17043C11_FLI
aagtgggcttgctttagatgattgtctacacagtatgtgtagtatatcaatctgggtgccttttcagctacagaatctatgagcatggcgctcaggcaggcatatttctgcaccaattctgcaacattttggtgatgggttctgatgatgcattctgggattgctgaacgctgcatgagatccaggacaactctctttagttgggatgctgaaggttgacacctgttgaagaatgttggttgcataggcattgaatatggtccaggcatttccttgaaacccatttggactttggagttagttgtagagatctcaggtattgactaagctaagcaaaaacgagtttgtaattgtgttgtccagtgctagcgacattttgccaactacacctgttgtaaatgtaccagattgttgctgtgaatttgacaaccttaaaggaattattatactcttccagct

SEQ ID NO: 32944 - DNA, 1197 bp, Zea mays
  Clone ID: UC-ZMFLMO17043D01_FLI
tgcaacaacatcccattctcctccctccccgaatcccaggaccgcggctccccgtcgactgcgtcgctgctccggctcccaggagcgacccgagagagaagcgtcgccggcattgcatctcacctgcctccttcccaacgatagcgccgctccttcggttccccgtcgaggctccgggatttgtcggccccgttgctccgcggccttctctctagcaccggccggtggatctagcctcgggaggctggcaggagctagcggccacgacgcgtcgtggccccgtgctctcccaacgacggcgccgctgctccagctccccatcgacgcttcgggatttgtccgccctgctgttccgcggccttcggcgcacccctgctaccccgattgtccctgccctgttctcgctctctatggcgtgagcatcggccgacagatctagcctcgggaggcctcgcaagacctagcacccacgacgcactgtggccccatgctccgtagcccccctgctctgccagtttgagtgaatgtctggcggcgacaccacccctgctctcgtcgtccatcctgcctccatccaaccccctagcatgtcgtgtgcgagcagccccttcaatgcaggacatggatggcccaggtacgggtctgtgctgctcacccgctgcctcgagtgcgaatgtccagagccactagtgagcctcatatcgaaaaggtcaaagaatgacaactttggtagggaattcattaagtgtgaaagcaagccgcgtctagggaaggttcagaaaaaaatgcaaatttttcatgtggatggatgattacattaagatggtcgaagggacagggtttactagcggccttgggagatgatggcgtctaattttggggacgaacgagtgacgacaattaaggcagatgttagtgcgaactgggacatgtttactgcagaactgaagaagatgaataacaacttgagcgacttgaagaagatgtttggagttttgtatgcttccatgatttttattgccttgcttttctttgttacgaactatggttgcaagtgttaaatatgtatatgtatgatggacctccttgtgatgccattctagatgaccgggaagttgtgtattccttttaatgtgtatcatgaacaaaattgtcttggttacagtcttccagatgaatggcaacatgtgtattggc

SEQ ID NO: 32945 - DNA, 3074 bp, Zea mays
  Clone ID: UC-ZMFLMO17043E05_FLI
aacagtggtagctcagtctgaagaatttactcaatgttccttgcaggccggtaatcctacatggaacattgagtaaattcttcagactgagctaccactgtcaaaattgagtgaatgcctatgggtaacctcactcagttggcagcatctaagcgtggggatttcaggatgtgattgttccctcctcggttcgtatgtctctttctttataaaaaggagaatcctctagcattgcttgggcaatatagtgatgatgaagtggaagatgaggaagcagcagatcaacccactggtgaagctaaggggagtccaggagatgctagtgctcagttaactagtcagcgtgcggatatagctggtgataacagtgtggcaaaaattgaaccatcggcttctgtcggtgatcaacaagaagcagcacctcaagctggtgacgttaagaactacacccaaagtgttactgaagaaaacactatagctcctgagccaactgtacaagaagagagtgtgaaagcaactgaatctcttcccgattcatctggcatgcagattgttggtgatgtcggtggaaattggaaagcagtaatgcatgaacagagtaatcagtgttattactggaacacagttactggagaaacttcttgggatataccaaatggattagcttcaggagttgcaactgcatttgttccttctgatgtggactattcaaatgaagctcaaacccatgtccttccccacagcacactggaagcatatccaagtgatatgtctgttgggaacggcacaacttatcctaatttgggaatggcatgtggaagtgcacatgttactcaagatgcttatgcttatgctgctcctatcgccagtcatgagcctatggacattgatcccttgtatcttgcaaaatatggtgatggtttgctgcaaagattggacctgctggaaaggctctgtggctcgaacaaaggtcttgaattgataagaagagaaattgagatacggatgtcggacttaaatgcactttcatcttatggatcttctttgctcccattgtggttgcatgctgaggtgcacctgaagcaactagactcttctatttccaagctggaaatgaactatcatgcagattcagaacctaggaattcaaagacagaggttgctgaacacagggcacctgatgatgctgacttgataacaccctccaatggcgaggctttgaagtatgaagtttgtgctgggattactatcgatgcaaatatgaagattggtaagccagcttcaacgtctcagaattcacaagatagggataatgcagctgttcctccaaaaattgaatctgacaatgatgaagatatggatgtggaaatggaagttgatgaagataatgtcgaagagcaggcacagtgcagttctgtacctgaaaaggagcatcctccatcagaacagttgagttcatctaatttgccatcatttgaagttcctacacctcctgaggataattctgttcctccacctccgccagaagaggaatggattccacctccaccacctgaacacgaacacgaaccagctcctccagcttccccagaagagccggctgcatcatatgttcaggtggatacaattcctcagccatatatagctcaagaaaatgttggctatacaatttcaggaatggagtattatagtactgaaggtacaaatgccaattactatatgcaagtgagtgagcctcatgtccttcaagcacaacattcttattatgcaccagtatctgggagtggcatatctgtttctgttgatggcacatctattgccccagaatcttattatacctatccttcagtcactgtggctgcaagcgctgtagcagctgaacattctggatactacgcttcatcagtctctgccatttctagcagtgcagcagatatcaaaacaagctcagcttctcttgtttctgcaaatagcaattcggatctaaaaaatcctgataatgttatatccaatgatgcaagtattgtgcctttcacccaagctgtagtagcaacatcagctgcaggaacgacatctgttcttgaaagttctacacagccttctagcagcactacaaaccagaccaaagttattcgtaacaagaagcgggttgttggtattacatcgtctctgaggtctaataagaaggtttcaagtttggtagataagtggaaagctgcaaaagaggagcttcgtgatgaagaggaagatgagcctgaaactgctctagaggcattagaaaggaagcgacaaaaggaaatagaggagtggcggaaacaacagatagcttttggacatgctcaggaaaatgccaattttgttcctgttcgtggtgattggcgtgaccgtgtaaaacgcagaagggctgaagcaaaaaaggagtcaaaagatgacattgttgttgcatctttaagtagttccaaacagcataaaggatctcctgatctagcagagctttccaagggtcttcctactggttggcaggtaagtattctcgattgtatcatatcagatgctaacatagtgtgctgtgtttaaggtagcttccgctgcagcttccaagaatttgatatctattgcaagtttgtaactgatacaaagaagtgaacaatcgtgaaacactggtcatgagtgcaccctctgttcctgtgtagtgtactgtaaaaccttgtttatctgccatgccatgttttacaaagtggttagcactgcttatttgcgttatcctctctgtgcaggcatacttggatgagtctactaagcaggtctattatgggaacagtctcacgtctgagacgtcctgggagcggccaacaaatgaatgaagatctataaccttggtgtgcggtcaaccgaacgatacaagttgatttgacaatgtagttgatgctgttgaatgggcagcccaattttgtttggcagccaaccccatcctttagagcagaacaaaccacacctcaccaggagatggctgattatttcgctgtcttggtcacaaggcacaaaatttttgatgggataggttttgcttggct

SEQ ID NO: 32946 - DNA, 1305 bp, Zea mays
  Clone ID: UC-ZMFLMO17043F07_FLI
cacagtactgcaggaagtcttccaaagcattggtccagtagaagggtgcaagctcatcagaaaagaaaagtcatcctttggtttcattgactactatgaccgcagatatgctgcactggcaattttatctctcaatggcagacaactgtatggtcagccgattaaagtcaattgggcatatacaagtactccgagggaggacacatcaggtcattttaatatttttgttggggatctttgcccggaagtcactgatgctactttgtttgcatttttctctggatactctacttgctcagatgctagggttatgtgggaccagaaaacaggacgatccagagggtttggttttgtttctttcaggaaccagcaggatgctcaaagtgcgataaatgacttgaatgggaagtggcttgggaaccgtcaaattcgttgcaattgggcaacgaaaggtgctaatgctggtgaagagaaacaaattctggacactaaggttgacctgtcaaatggttcatcagaatctggaaaagagaatccaaatgatgatggtcctgaaaataaccctcagtttactactgtttatgttggcaatcttcctcacgaggctaccatgaatgatgtgcacctgtttttccattcactgggggctggttcaattgaggaagtccgtgtaactcgtgataaaggctttggctttgtgaggtacagcacccatgaggaggctgcattggcaattcagatgggtaatggccaacttattggcgggaggcagataaagtgttcctggggaagcaagccgactccacaagggacagcatccttgcctctgcctcccccagcactggcaccattctccactggagtgtcggccaccgacttgctggcctaccagcgcctgactctgagcaagatggcctcgaacccagccctaatgggtcagcacgccttgaagcaggtcgctgcattggggattggcggcggagccagccagtccatctatgatggcggcttccagggcatcaatactgccaccggcacaacttccgtccagcagcagcagcagctcatgtactactagagtactactactccatgaggcacccagctacctatcccttcaagaggaaggcgaggatgaatggatgatgccccttactatacccctatacatatagtagatgaagtcattactaggacctttttttccctaatctttttaagacccatctaagtaacatgtcctgtctatgctagctatataattgtgtatttctggatacataaaggcaaggttcttagtagtat

SEQ ID NO: 32947 - DNA, 258 bp, Zea mays
  Clone ID: UC-ZMFLMO17043G02_FLI
gtttatctccgccttaagaggtaggtgttctggtgctcggttgcgtagcagtaaagggagttttcgtcgtgatgctgctattactgaactgggaggtatgcgacttctatgagtagttgcttattagcctacagaaaatatagggatctggagactggttatgtttcatggctgttcttctttcaccggtaccattttatgacgaacgttgtatgactgattatcttcttgtttacgttactgctacggcatggcctc

SEQ ID NO: 32948 - DNA, 632 bp, Zea mays
  Clone ID: UC-ZMFLMO17043G08_FLI
ggaaaaaacaatctactgtggtggtgctggaaatggctcggctgcaaagatatgtaacaacatggcaatggcaatcagcatgcttggggtctccgaggcctttgctcttggccagaaccttgggatcaaagcaactactctcacagacattttcaactgttcaagcgctcgctgctggagtagcgatacatataatccagttcctggagttatggaaggtgtaccatcatcaaggaactatagtggtggtttcacttccaaattaatggccaaagatttggatttggccatggcttctgcatctggagttggcttcaaatgccccatgggttccaatgcacttgaaatttaccgaaaactatgcgaggatggttgtgaactcaaagacttctcgtgtgcattccgacattactattctggcaagaatgaagagtgatcttggatacgctgcaaaatttcctcctttcgaaatcaataaaacagcaaataaagttaggacctgattatgtcccatgaattgaaacattgaaaccaatatctagaaagtgtgtttccttgtttcattattagattactttctaattggtctaaattcctggaaccgaacaggaccttattggaaagtttacagt

SEQ ID NO: 32949 - DNA, 826 bp, Zea mays
  Clone ID: UC-ZMFLMO17044E03_FLI
gtcccaacaccacctcgcctgcgatcttcgtagcctccgtcgcgtcgagcatcgatcatgtcggcctactgcggaaagtacaaggatgagctcatcaagaatgctgcctacattggcacccccggcaagggtatccttgctgctgatgagtccactggcaccattggcaagcgcctttccaggctccgactccaagaaggtgacccctgaggtgattgctgagtacaccgtccgtaccctccagaggaccgtccctgctgctgtgcctgctgttgtcttcctctctggtggacagagcgaggaggaggccacccgcaacctcaatgccatgaacaagctcagcaccaagaagccgtggtccctgtctttctccttcggccgtgccctccaggcgagcaccctcaaggcctgggctggcaaggtggagaacctggagaaggctagagctgccttcctcgccaggtgcaaggccaactctgaggctaccctcggcacctacaagggtgatgctgccgccgacaccgagagcctccacgtcaaggactacaagtactgagttgcttctctttgcgtgcccgttttggaactcctgcctacgagctaggttgcggagtgtggtttgctcgttagagcttattttcggacatccaaaaaacatgcttcctatgtgggatgatggttatctttatatttgtatgttaattagtctctttgctgttaaatttcgtgtaagttggtcctgccgatggagaatcgagcagctccctttttttgttctatcaactatgctgtaattctggctatgtatcggcaaaaacaattctat

SEQ ID NO: 32950 - DNA, 1431 bp, Zea mays
  Clone ID: UC-ZMFLMO17044E08_FLI
ccgcccgcggcgtctgttcctttcgtgccgcttcgtggtggcgccgtggcgcccaccaccacctcacctctcaccacctatagcaataccacgagtccacgatccatggaatagactagactacaccgctcggccggtgacgacgacggcgacagccgacagtctatccccaactacgctctgcaccagcgccttatccgccgcctggggtttgttctggcgcggtggcagttgataaaggcggaagggattagagcaaggagagggatcggcgatgagcttcgcggatctggaggcgggggcgctgagggcgcccctcgggaggaaagcgagaggggggccaaacgacgcgagagcgctcgtcttccagataaccaccgcggtggcctcgtaccgccgcctcctcaactcgctcggcacgcccaaggacaccatcacgcttcgtgataacctgcacaagactagtcagaacatccttcaattagcaaaggatgcgaaagataagctccaaaaggctgctgaagcagacaagagcactgatacaagtgcagacaagaggatagctgatatgaagcttgccaaagattttgctgccacaatggaggagttcaggaaacttcagagtcttgcgattcagagggagacggcatataagccagttgttccacagaatacacagtcaaactattctacggatgagcgaagttctgaatctggtaatatgcctgagcagcgtgcgttactcgctgaatcaatgagacaagaggtgctgcaattggacaatgaaattgtttacaatgaagccataattgaggaaagggagcaagccattcaagatatccaacagcagattggtgaagtacatgaagtgttcaaagatcttgctacccttgtgcattcccaaggaatcataatcgaggaaatcgacatgaacattgaaaattctgcagcagtgaccaaagaggcaaagacagaggttgccaaagcagccaagactcagaaatcgaattcgtccctgatttgcttgcttatggtcatatttggggtcgtgctgcttgttgtgattatagttttggcagcttgagacatgcaacctttccacttacagagctattccgcggagttcagaattgaagattgttcgtggttcttgtctaaccatcatatcgtgtgccaaaaaaaaatgtcaccaacggattttagaagccccccgcttttacatttcatggcttgtgagtgagcggctctctttggcatgtcatgtcatgtgtgagtcctttttttcatggcttgccttgagtgaacactgatgttcttttgcttctttggatttcggaagttcgcttggtgtgatttttgtaaccctgtaagtatcccccccgtcaaataaagcaaagagatggttacgcgtatattgaatttgtttgttgg

SEQ ID NO: 32951 - DNA, 961 bp, Zea mays
  Clone ID: UC-ZMFLMO17044E09_FLI
tctggtgtggtgtggtgtttcagatattcaccaacggcgacaaggtccacgccgtgagagccctggagaggctgggcctggaggactgcttcgaggggatcatctgcttcgagaccctgaacccgccgtgcccgcctcagggagaccgggaggccgagatcttcgacatcgccggccacttcgcccgctccggcgccgccgccgagctgcccaagacccccgtcctgtgcaagcccaacgtcgacgccatggaggaggcgctcaggatcgccaacgtcaacccgcacaaggcggtaagcttccgagctcctctggcacccagcgcaatttccgttcctgctcctgacgttgcatccacgcctgacggacctatatattctatcctatttttctgcttgaccacgtccctgacgaaagcttacctttaccttacctggctgcagattttcttcgacgacagcgtacgcaacatccaggccgggaagcagatcggccttcacacagtgctggtgggcaagtcgcagcgggtgaaaggcgcggaccacgcgctggagagcatccacaacgtcagggaggcgctgccggggctgtgggaggaggccgagaaggcggaggacgtgctctacgccgagcgcgtcgccatggagacctcggtcaccgcgtaaacccctctctcgaatcctccggtgcaccgtcagcccaaccttctcgacatccaggaccgggacgatcgcataccactctctccccgagccagggctggtggtctcacgctggaactgaatccagccatggccgggccgagaatttccgacagcaagaaggggtgcagcatgtaaaggggggagcagatgatatcatgtttgggatgctcccagatatgtatagttatgtatcagccagttgtttgtaaattaccaataaatattagaagtaataagaaaaaatggagtttacttgt

SEQ ID NO: 32952 - DNA, 1231 bp, Zea mays
  Clone ID: UC-ZMFLMO17044F06_FLI
cttcgctttgcatccatggctctcgtcgccggctcctacgagcgcttcatatggggcttctcactcaaaaccctgacaaccccctccgccaccggcgcctcgctctccgagaccctcaccctcgcgccgctcttctcgtacccggcccacacgggcccggtgcgctgcgtggccgcggcgccgcgggcggggctggtggcctccggcggcgcggacgactccgtccgcctctacgacctcccttccgccgcggacctcggcccgctcctggacccctcggccgccgtctccgcgctcgccttctactcccggggccccgtgccgcggaacctcctggccgcctgcgacgacggctcgctccacatctacgacgccgacggcttcgcgctgctctccacgctccgcgccttcccgcgccacgaggccgccgaggcgctcgccgtgcacccgtcgggccgggtcgcgctcgccgtcggccgcgcgggggcgtttgccatgctcaacctcgtccgcggccgacgcagcttcgcatgccgcctcgagcaccctgcgtccgcgatcgcctacgctgaggacagggatggcggggaccgattcgtgatggctgccgagaacaaggtcagcgtgcacgactccgtggatgccagggttattcatgatatggactgtggcaagaaggtgctcgccatggcgcccgcaaagagtggggtcctttacactggtggcgaggaccgttgtattactgcatgggatctgtccagcggcaaggtctcctcacgcattgagggtgcccatgcaactcgtgtaaaaggggttgttgtttttggtaatagcaatgatggatcacagctctccaatctaatttcttctgcttcgtccgatggtgtcataaggatatgggacattcgaacaattgggaatggaaagcctactccattagcagaggctaatacaaaagcaaggctaacttgtcttgctggaacgtcactgaaatgactcaaggaacctacagtttgctaggcgtctgattctgcattgttagctgaattagaaaacctggaaatgaaagaagaaattgaaggtgaaagatctggcacgcgagcattatctgggtgcgtttggaacgtatccattatgtacaccgacatagtttggcatagtgtctgagctgcataacttatttatatttgattgcgcgacaagttttgcaatgagaaccgttttcagtact

SEQ ID NO: 32953 - DNA, 1737 bp, Zea mays
  Clone ID: UC-ZMFLMO17044F11_FLI
cgctgattgtgcgcacttgacatttggtagttttgtgtatggaacacttgatgcgtccttgacaacaaaacctcttgagagtcatggggatatcgtaacaattcctgacgatgattatgaccaatcagagggcagaatccatgacgatgaaagcaaggtaacattagcgcctgctgctaatgaatatgttacttctacgtcaaacagcaatgtagagaatcttgatattacatcagtacagcaatctgaagtcactagatccaatttcctggatgtcacgagcaatacggaatacaacctatcatcacccccagattatgcaacttcaagtgcagcgctgcaagattctacttcacagagttatctacaggaaaatcgacaattccagagcatttctcctctcccaagcttcatgcaaatacaaaatggtctcatgtcaccagcaattccaccattgcgcgaatttgatccagcattctcactattgctcactaatcctcctattatgcatggtacaacgtcatcatccatgagcagtgcaactgtttctacgcagccccaagagaatgccaatccagttggtttacccaaccctcaattgactcaatctcagccaagcaccagcattgctccagggcctccactccctcagcatcttcttcatccctatgctcaaacaacccttcctcttggatacgcaagcatgattggctatccatctcttccaccaagctatgcatatctcccacctgctgcttttcagcaaccatacatgaacagtggcatgttcctccaagcagcagcagcagttcccaactcaagtgtgaaataccctctgccgcagtacaaaagcaacattgcccttgctagcttaccacagccaggctctttgctctcaagctatgtcgggggctttggaactgcaaacaacatgcctggaaatttccctctgaaccaaagcacaacgtcggcaaccgcaactcttgggtttgatggaacggtcccgtcacatttggaagatggaaaccagtttgtttgtcttcagcagaacgagaaccctgcaatgtggatgcatggagctggttcacgagggatgcccccacttgcagccagtaccatgtatggctatcaagggcagagtcatcagaccggccttcggcagggccagctaccttcacaatatggctctgctctagggcagtcacagccgggcctgggccccgaacaccgaaatcctagcgatagtaacctaagtggtgctgctcaggctaaccagatgtggccaaacagctactgatccacccgaccaccccccttatcaacatctgtggaagacggtcttgttgtgtgcgcaaacgccagaggccatgcaaatgcctgtggcctgatccaggcacgcggataccagctgcgtgtgcatgagttgctgtcgtgacattttgagaggcgcaagagatatatgttggagcatgttccacctgtagggtttgtaggatatggccaaaaatgtagctggatctgttcattcaaattctgatagggaaagggccggtcgtttttcgttctatttcccccttttttttgtcgtttgcatatcttgtgacaataaaaccggaatatctaacacatcagcaccattagttccccgaggggagtgaaagatagtctgttgtctttgcatcaccagtattgcgcctgcctcgcttaaattttatgattgagatggttatttgatgg

SEQ ID NO: 32954 - DNA, 1594 bp, Zea mays
  Clone ID: UC-ZMFLMO17044H08_FLI
gggtgcccgcagcctcaccctgcactgcagccagcgacggcgcgagtccttgcgtgcgtctcccgccctcccaccctctcgccttgctttcctcagcgccttcgatctctctctcccctcgccactggtagccatatttggtgccagcgagcaccgagcagcgcgtcggcatggggatgaggaggcggcaggacgctgctgccatcttggggctcctgaagctcttcctcttccgcttggcggcgtcgcagtcgttcatcggggtcaactacgggacgatcgcggacaacctaccgccgccggcgtcgacggccagcctcctcatgtcgacgtccatcgccaagctccgcctgtacgagccacagccggacctggtcgcggcgctcgcgggctccaacatctccatcctgctgggcatacccaacggcgccgtcccgaacctcgcgtcatccccggccgccgccgcgtcctgggccgccgccaacatccccgccacgcttcccgtctcctccatctccgtcggaaacgagctgctcaactccggcgaccccacgctcgcgccccagctcctccccgccatgcagaacctgctcgccgcgctcccggctggctcgaccaccaagatctccaccgtgcactccatggccgtgctgtcggcgtcggacccgccgtcgtccggcgcgttccacccggacctcgccggcagcctggacccggtgctggacttcctgcaccagaacggcgcgccgttcatgatcaacccgtacccctacttcgcgtacgcctccgacacgcgcccggagacgctggccttctgcctgttccagcccaacgcgggccgcgtcgacgccgtgtcagggctcacctacaccaacatgttcgacgcgcagctggacgccatccgcgcggcgctggacgccaaggggtacagcgacgtggagatcgtcatcgccgagaccgggtggccgtacaagggtgacgccgacgaggccggcgccacggtggacaacgccaaggcctacaacagcaacctcgtggcgcacctcaagtcccaggtcggcacgccgcggacgccaggcaagtcggtggacacgtacatcttcgcgctctacgacgaggacctcaaggggggcccggagtccgagcgctccttcgggctgtacaagactgacctgacggcgaactacgacgtcgggctcgcaaaagacaatggcacggcggccccgaccagcttgactccggttccggcacagggcacgccgcagccgagcaaagggacgatgccgacggggtactgcgagaccacgtccgccgtgcccggcaccacgcaaggccaacagttgccgcagagcagctcgtgctacattcccggcggagctgagtcgcggcacgccacatggcagcttgttttattgggtgttttgctgttcttggtcaaggtagccggcaactagttacaacatctgtgtgcgacggaacgagtacagggttcgctctccacagttgtgcgtatggattcaccactgtcatagaattcacgaaagctgctaggcacgatcgaatgttgagccacacggttgcactgctttggcct

SEQ ID NO: 32955 - DNA, 2070 bp, Zea mays
  Clone ID: UC-ZMFLMO17044H10_FLI
atcgacaagtacatttttggaaaaaatcatgaactagattggcacacgcgttacaaaatgattaaagggatttgtgagggtttacattacctccacgagaatgacagagctccaattattcatttgaacttgaagccagcaaatgttttgctagacgcagccatggaacctaggatcacagattttggtttatcaaggcttattggtgaagggaatactagaatagtcaacacacacactcttggaccaatagggtacatggcacctgaataccgtgacatgggggaagtttcacgcaaggtagacatattcagcttgggtattcttatactagagattgtaactggtcaagacaatagtaccaaggttgactttatcgatcatgtatgtgaacactgcatggaagggccacaaataaaatttatgtatccctctctggaacctgaattacatgatcaggtagaactgtgcatcaaaattggcctagagtgtgtccagacagatcgaaaaaaaagacctactgcaggggacattatacgtaagctcgaggaaggaaccaaattgggccctacaccatcccgtgaaaatattactacagagcagcagcacaccacctcactcgatgttctcgatggagcgcagcacaccaacaatacaaatcatttattttaaaaatgattatttccttcaaggacaggtagcaaaaaggacaagcctgcacatgcatacttgggaaaacaaaggcaacaatactgcaagcaaaacatccccgattgatttaacaagaaattggtaagccacagatgttttcgtttgaactcctgaatgacatcacagaaagcttcagtccgggatgcctgcgtgggacaggtggatttggatatgtttatgaggggataccacatggtaacgagggagcgatggccgtgaagaggcttaaagaaaaaataggtatatcaccgaaacagtttgagaatgaggttcataatctgagcagaatcgagcacaggaatattgtacggcttataggctactgcgatgaaatacgggaaatactatctcatggtaagaacaagaatgatccacctattcgcgaacatattcaagaaaggttattgtgttacgagtatatgcctaagggaagccttgacaagataatttatgataacctcgattggcatacgcgatataaaataatagaaggtatttgccatggcttacattgtcttcacgagggtcaacaggatattcagattgcgcatttggacttaaaaccagcaaatatattacttgacagtgacatggttcctaaacttgctgattttggtatgtcaaggctcttcagtctcgaacaagtttatatccttgcttccaagcctatgggaacaattggctacatagcaccggaataccttgaccacaaaaaggtatcaacaaaggcagatatatatagtttcggcattgtagtactggaaatcgtaacacgaaaacagtgcccacgcagttacgcagacataaatgctcagcattttatccaccatctgcgtcaaaatttgacaaaagataactacgtcaaatccatgtacccggcccttgaagcggactgccttcagcaagtgaaactgtgcatagaaattgggctgaactgcgtggagaaggaacctacaaagagaccaactgccagggaaataatctctatgtttaatcagaaaaaggattcgagcagatctggggtatctaactgcatcgttaatgtgatcgaggcgtggctatcaaggcttccatggcatccttggcctctaactttgctccgtcagacttaagcttgatggcaacagcggtatttggaagatttgcaagggtgtccgcttgagttcctgcgatgcagcggaaggaagaaaaaaactagcagattaaaaatgagaatggggatcttgtatatctatttatgttttatccttttcatagaaaaattacaagccatgatttttatggtatattggcaatattatgtcaatgtaacattcaatgggcatcgaattaaaatataatctaagtattttttttcct

SEQ ID NO: 32956 - DNA, 1617 bp, Zea mays
  Clone ID: UC-ZMFLMO17045A02_FLI
gcgacgagttccgcatgtacgagttcaaggtccggcgttgcgcccgcgcgcgcagccacgactggaccgagtgccccttcgcgcacccgggggagaaggcgcggcggcgcgacccgcgcaggtaccactactcgggcgccgcctgcccggacttccgcaagggcgggtgcaggcgcggcgacgcctgcgacttcgcgcacggcgtcttcgagtgctggctccacccggcgcgctaccgcacccagccctgcaaggacggcacggcctgccgccgccgcgtctgcttcttcgcgcacaccccggaccagctgcgggtgctcccggccacgccgcagcagtctagcgccagccccaggggcgccggcgcgctgcccgagtcctacgacggctccccgctgcgtcgccaggcgttcgagagctacctcaccaagagcatcgtgtcctcgtcgccgaccagcacgctcctgtcgccgcccaagacgcccccgtcggagtcgccgccgctgtcgccggacggggccaccgccgccttccgccgcgggtcctggccgggcgccgggtcccccgtcaacgacgtcctggcctcgctccgccagctccgcctcggcacggccagttcgtccccgtccggcgggtggggcggctacccggcgtccgcggctgcctacgggtcgcccacggcgggcgggctctacagcctgccctccaccccgagggccacgccgacagcccttgccaccgccaccgcctccggctacatgcccaacctggagccgcttgacgtcagcttcggcggcggcgacgaggagcccgtggagagggtggagtccgggcgggccctccgcgccaaggtgttcgagcggctcagcagggagggcgctgtttcctgctacccagctgccggaaccggtggccccgacgtcgggtgggtctccgacctcatcaactgaggcggcttcggcggcgggtcggtgctgccatagcagtggagaaaggtggtggtaactggtaagccgtaacagacaaggatggcataaaaaaaaatgttcccgtttggttccagataattccgctaattaccctgtacatagatatctatcgccctgtgaatattctcggctggttgggtggagggctgatgctagggggtggatttgttttggggttcttgaggtagcggaaaatttccaaggaaaagaaaatatgtaagcaagtgtagatgtcgtaggcggcggcggcggcggcggtttgtgccctcttgtgtgctgcgaagcatggcgagggccgacggtgacgacgaagactggccggatttccagctttggtgttcctgtgattccgcagcaagttcagtttgatgttgtttcaagttgttccgtcgtctgtgcactatgcatccggccggctagttggcgattgcaacctgcttgtggattactaccccccattttgttgttgatgttgatgtaatctgtttattaagacccagcattcccctacagcttattttgttgtacttactatatatctttagtaggtgccgagatctaagttcacccgctattggaggtgaacttgccgtgtaatatttggatcaagtaaatggtttaatgtctt

SEQ ID NO: 32957 - DNA, 727 bp, Zea mays
  Clone ID: UC-ZMFLMO17045A04_FLI
gccgggacgtggcggcagacggcgacgttaggaagatgatggagattctgggaaggcagagaaagataaggaggataagaaggctaaagagaaggatggatcagagttgaagggttcaagtggtgagaaacaagagaaaatcaaagataagaaagagacaggagatggcaaagatgtgggggaggaagagaaacgcaagaagataggaaacaaagacaaagataagaaggataaaaaggccaaagaaaaggatgtatcggaaccaaagggtgacaaggatgaagatggtaagaagaaagaggccgatggcgatgaagacgaagaaggtaagaaggaggacaaggaaaagaaagagaagaagaggaaacacaagggtgcaaaggagaagacgaccgatccggtgaagctgaaggcaaaactggagaagatcgatgccaaattgcatgacctacaggccaagagagaagacatcctgaggcagctgaaaaagctggaagaaggcggcaagggaaacgcgaatgaagaggagcctgcacatgtgcaggaggacaaagggaaggatgttgtgcctgcacagatactggaacaggttggagagagcaaggtcgaggaacagaatcctgttgccacagcctgatcctgtggacctcctgtagcggttcatgtaacaataactctgatctggttttgcacacatgcattacacagtgtaaaggaatgcagccat

SEQ ID NO: 32958 - DNA, 1873 bp, Zea mays
  Clone ID: UC-ZMFLMO17045A07_FLI
gtggccgcctcctgctcttcgatctcgcgctgcgatggagcggtacgaggtgatcagggacatcggctcgggcaacttcggggtgacaaagctcgtccgggacgtcagtaccaaggagctcttcgccgtcaagttcatcgagagaggacaaaagattgatgagcatgttcagagggagattatgaaccaccggtccctgaagcacccaaacataattagattcaaggaggtaatttctcagacatcttggaaaggaaatgttctggtacgaatttgaagttggatgattggtagctacacacgtaagtgtcttcaaactgttacttttgatgcttttaaagaagaaaaatacagactttttatattctttgcctgttgaacgagatgtttgagccacacttgtgaacattgtgctggtgactgcacgttcttagaaccccattcatttaccacttatacttatctctcttttttttaataaaggagttgtctttgtcttgtacttatctctatgacattctttccattcatcattggacacctgctttagactgattgtcaaggtctaatcatcagaaaccatttctaggtaaaaaattaaagtagtacttagtttttcaggtcgtgctaactcccacgcatttggcaatagttatggaatatgctgctgggggtgagctatttgaaaggatctgcagtgcggggagatttagtgaggatgaggcaaggttcttcttccagcaactgatttcgggagtgagctattgccattccatgcaagtatgccatagagatctgaaactagaaaacactctcctagatggtagtgtcgcaccccggctcaagatctgtgatttcggttactccaagtcttctgtgctgcactctcaaccgaaatcaactgttggcacacctgcatacattgctccagaggtcctctctagaaaagagtacgatggaaaggttgctgatgtctggtcttgtggagtaacactatatgtgatgctcgtcggcgcgtatcctttcgaagaccctgatgacccgaagaacttccgcaagacgatcacgagaatactcagtgtacagtactcaattccagactacgttcgcgttacaatggagtgcggacatctgctgtctcggatatttgttggaaatcctgagcaggtacactttttctaatcttgaaattatttagcttacaaggacagacctagtgttagaggctctcacatggatagagtctatagagaagatcgagacaagccttttggccgcacatgcggagaggcggcttcaaatctgtgagctagtgactcagttcttaccactgtatcagacctgtccttctaagtgacaatctgtatcatctttcaccttacactcataatttgcgtcgccgcagagaataaccattcctgagatcaagaagcacccgtggttcctcaagaatctgcccatcgagatgaccgacgagtaccagcagagcatgcagttggcagacatgaacaccccggggcaaagcctggaggaggtgatggcgatcatccaggaggcgcggaagccaggggacgccatgaaccttgccgggcagctgccctgcctggggagcgtggaccttgacgacattgattttgacgatattgacgacatcgacactgagaacagcggcgacttcgtttgtgcagtgtgactgtgtgaggctcagcagggcaggagctagcttcctttgatcgttggtgtctgtagatccttgttgtgctatgcttccattcgttcctggatcagatatgttgttgtgtaaccgagaaaattggcgttgctgtggacaacagaaacagacccataaacttatgcggaaatctaccccccc

SEQ ID NO: 32959 - DNA, 1598 bp, Zea mays
  Clone ID: UC-ZMFLMO17045A12_FLI
tcaagtgcccagcgtcgtgctccccccagcctctgctcctctctctccctacgccctgtcgaagcccttctatggcgcgcgtggatttctcctcctccatccccagccagccagcgagctcctccctcctccctgcatccatggagctcggcgcccatctccatggctcgccctgcgtccagccgccgtgcccggttccgaggcttcttctctgcgcgtttcatctccagctcggcgaccacaacctctcccgccccatccccgacaatcttggtcgacccggcgctcgtgcaggaggttttcctggacaacatccttaacgtcaacctcggccaagctccggcagggcaggcagcccttggcgctggcttgcccaactccgtgccatgtaccaccgtcaacaaagttttctcctcgggaatgaaggctgtcatgttgcggctcaaagtattcagctgggaatcaatgatgtcgtggtcgctggtggcatggaaagcatgtcgaataccccaaaatatgggtgctgaattgtgttcagaccagcactcaatctcacgggaggtgcagaattcgtatgctatcctcagcaatgaacgtggcatagcagctcaggatagcggtgcattttcttggagagattagttgaatattggaggtttgtttatggttcatggccatggatgctgatgagccgtctcgagtcctgccgaagacagcgcctgtcctcgtcaccaaccctgctcgcccggatccgtaactccctagttcaagtcggctgattcgtgtgctggggagccgttctcagttgctcgccgtggtcggctgctgctccctaatcgcctcagccacaacctcactgtcgttcttcagctcgctgcgcgctaagctcccttgtcgtagttttctcgtgcgcagcgtttcgtggtccctcgtcgtgccgagttatcctctgcacgcagtcgtgtcctattttctgctcgccagcgtgtcctctcggctcgctcggctttaattcccaatcgcgtcgtcgatctcgtcgtttgccgtcgagtcgtcaaacacgtcatccccggctcgatccccacctcaccagcttaccccagacttcaatcgaaggtcgtcgtcgttcgtgcatccccaagaaatcccaagaatcgggtgaagacgaagttagcagcgcgatattccccaagcgctcgacaaattatctggatcggaaaatcactaccgatcttgcggcttcgtgtcagctgttgaaacggtaagctgatgaattattcagaatagttcgattgttgaatgaattcatgtgttagtgcgaggctcattaaggtgctcaataaattgcgtaagtcacgaaactctcgtcgacttcgctgtttttgcgattatcgagccagattcggttatagcgagttatttcgctattccggtcacttagctgaattagtggatcgagtagaaattttggtaggcgtgtgtgatgataaaatattttaatcacttctatagatttatgtatatttatgataaagaaatatttaattaattgttgatatgtaaaatatgtggggagagaaataaaattaaattagttc

SEQ ID NO: 32960 - DNA, 1617 bp, Zea mays; identical to SEQ ID NO: 32956
  Clone ID: UC-ZMFLMO17045B02_FLI

SEQ ID NO: 32961 - DNA, 2031 bp, Zea mays
  Clone ID: UC-ZMFLMO17045C09_FLI
aatattttatcttcctgaatctccaagatggctcgttagcaaaggtcggatggcagaggcaaaaaaggtgttgcaaaagttacgggggaaagacgatgtctcaggtgaattgtcccttcttctcgaagggttggaggttggaggagacacttccattgaagagtacatcattggacctgccaccgaggcagccgatgatcttgttactgacggtgataaggaacaaatcacactttatgggcctgaagaaggccagtcatggattgctcgaccttccaagggacccagcatgcttggaagtgtgctttctcttgcatctcgtcatgggagcatggtgaaccagagtgtaccccttatggatccgattgtgacactttttggtagtgtccatgagaatatgcctcaagctggaggaagtatgaggagcacattgtttccaaactttggaagtatgttcagtgtcacagatcagcatgccaaaaatgagcagtgggatgaagagaatcttcatagggatgacgaggagtacgcatctgatggtgcaggaggtgactatgaggacaatctccatagcccattgctgtccaggcaggcaacaggtgcggaagggaaggacattgtgcaccatggtcaccgtggaagtgctttgagcatgagaaggcaaagcctcttaggggagggtggagatggtgtgagcagcactgatatcggtgggggatggcagcttgcttggaaatggtcagagaaggaaggtgagaatggtagaaaggaaggtggtttcaaaagagtctacttgcaccaagagggagttcctggctcaagaaggggctcaattgtttcacttcccggtggtggcgatgttcttgagggtagtgagtttgtacatgctgctgctttagtaagtcagtcagcacttttctcaaagggtcttgctgaaccacgcatgtcagatgctgccatggttcacccatctgaggtagctgccaaaggttcacgttggaaagatttgtttgaacctggagtgaggcgtgccctgttagtcggtgttggaattcagatccttcaacagtttgctggaataaacggtgttctgtactataccccacaaattcttgagcaagctggtgtggcagttattctttccaaatttggtctcagctcggcatcagcatccatcttgatcagttctctcactaccttactaatgcttccttgcattggctttgccatgctgcttatggatctttccggaagaaggtttttgctgctaggcacaattccaatcttgatagcatctctagttatcctggttgtgtccaatctaattgatttgggtacactagcccatgctttgctctccaccgtcagtgttatcgtctacttctgctgcttcgttatgggatttggtcccatccccaacattttatgtgcagagatctttccaaccagggttcgtggcctctgtattgccatttgtgcctttacattctggatcggagatatcatcgtcacctacagccttcctgtgatgctgaatgctattggactggcgggtgttttcagcatatatgcagtcgtatgcttgatttcctttgtgttcgtcttccttaaggtccctgagacaaaggggatgccccttgaggttattaccgaattctttgcagttggtgcgaagcaagcggctgcaaaagcctaatttctttggtacctttgcgtgcaactattgcactataagttagaaacttgaaggggtttcaccaagaagctcggagaattactttggatttgtgtaaatgttaagggaacgaacatctgctcatgctcctcaaacggtaaaaaagagtccctcaatggcaaataggagtcgttaagttgtcaatgtcatttaccatatgttttacctatttgtactgtattataagtcaagctattcaacgctggttgttgctagaaatctttagaacaaagatgataatgatctgatctgatgttataatattcaaatctcaaataaagaaaatatcgtttctc

SEQ ID NO: 32962 - DNA, 1042 bp, Zea mays
  Clone ID: UC-ZMFLMO17045D12_FLI
gtgagaaacgcgaggtcacgagatatggcggacggcaagcgaggggaggattcggccgtggcgttgaagacctcgccgtcgtcggcggtgatggctgggggtttacgcggcgttagcaaccctctggaggagtggagcgggcgcgtgaaggcgattgaggccgggttccgcgcgtggatggcgaagcaacccatccaaatcgaggccgcggtgaccacggccgtgggggcggtgcagggcggggctctgggtgggctcatgggctcgctcacagctgacggcgggtcgccgttccccatcccgcagccgccgcccaacgccaacccagaggccatggcgtcgttcaagcaggcccaggctttagctggtggacccttggtgcaagcccggaactttgcagtcatgaccggcgcaaacgcaggcatatcttgtgtcatgagaaggatacgagggaaagaggatatccagggcagcatggcagctgctttcggttctggtgctcttttctccatagtgagcggaatgggaactcctaatccagtagcaaatgcagttacaactggtgttgcttttgcagtatttcaaggtggctttttcatgatcgggcagaaattctcaaagccaccaagtgaagatacatactactctcggacaagaagcatgctgcacaaactgggtcttgaaaagtatgagaagaatttcaagaggggtctcctcaatgatcaaacattaccactccttacggacagtgctctgagagatgtgaagatccctcctggacccagacttctcatactcgaccaaattaaaagggaccccgagctggttcgagcaaagtagcagtcacaattgtcgacagctggttctttctgggttgcatagggtttgaaagcgatgccgtctctagtttcttaataaactttctaggcaagcaagcaagaatttagttgtgctgtagttaattgttttttggccgatcagtttgcatcgatcctattaaattctgaacaacaggtatttatatgcatcttattcaaatttt

SEQ ID NO: 32963 - DNA, 855 bp, Zea mays
  Clone ID: UC-ZMFLMO17045E08_FLI
cagcaatagatgaaagcagattgcaatatatactccaaaatcaaaataatctgtgaactgaaagtattcaagggatatcagatgttgtaggtcgtggctgcattgatggtgaggaaatggggcagcgagttatattgcctgcatctcatattggcggacgacgatacatgtttcagaattatcatgatgggctagcaatttgccgagtctacggtccaccagatttctttgtgacgtttacgtgcaatccaaattggccagaaatagtagagagcctctttgaacctggccaaaaagcttcagatagatcagatatcattactagagtttttcatttaaaacttgatgatcttttaggtgatattcgatctggagatatctttggtcgacagttggcagttctatatactattgagtttcaaaagcgtgggctgcctcatgtccacgtcattttttgggtatcaactgatacttcacagccaacgcctgcacttattgactccgttataactgcagaaattcctgatccagaaaaggaccctttaggctatgcattgattgtcgagcatatgatccatggtccatgtggtcctaaccatatgaatgctccatgtatgaaaaatggaatatgctcaaaaggttatccaaaagattttcaagaagaaacaacaatagatgggaatggtttcacagtttatagaagaagaaacaatggtcgtttcattgacaaaggaggtgttaggttcgataacagatcagtagtaccaactaaccttttgctgctgaaaagattccaagctcatataaatgttgaatggtgcaacaaaagtatttttataaaatatcttttcaaat

SEQ ID NO: 32964 - DNA, 2320 bp, Zea mays
  Clone ID: UC-ZMFLMO17045E10_FLI
gttgaaggatgcgttagaactagagcaactcatcagttacctaataaataaggaaaattctgaaggagtaatattgcttggtcatagtactggatgccaggatattgtgcattatatgcgcacaaactttgcctgttcgaaagcggtttctggggtcatcttgcaggtattttccctgcccatgctcttgctctgaatgcccaggtagaggaataaaagttatttaaattttatgtgtgctaaatctctctctgaatgtaattcttactgatcaactttggaacatgttaagaagacttgattatatttattggtattaactttataatttaatgatatctttgttgtaacttctacaagtactctgaatgttgtgacaagtgtccgaacaagtgatggggacaccgatgactttccaattaacataggactacatcaagggtcggctttgagcccttatcttttcgctttggtgatagatgaggtcacaagggacatacaaggagatataccgtggtgtatgctttttgccgatgatgtggtacttattgaggagagtaggagtggtgtttcgcaaaagttggaattgtggaggcagacgctggaagcaaaaggttttaggcttagtaggtctaaaacggagtatatgaagtgtgatttcagtgccatggggtatgaagatggcgatgttagtcttgatgggcaagtggtacccaagaaagacacttttcgttacttaggatcaatgcttcagaaggatggagacatcgatgaggatgtcagtcatagaattaaagctggatggttgaagtggcggcaagcggcgggtgtcttatgcgacccccgggtgccacacaaactaaaaggcaaattctacaggacagcaatccggccggctatgtggtatggagcagaatgttggcccactaaaagacgacatgtccaacaactgtgtgtggcagagatgcgtatgttgcgctggatatgtggccacacaaggagagaccgagtccggaatgatgacatacgagagagagtaggagtggcgccaattgaggagaagcttatgcaacatcgtttgagatggtttggacatatccaacgaagacctgaagaggcaccagtgcatatcggaataattaggcgtcccgagaatgtgaagagaggtagaggtcgaccaaccttgacgtggacagaggcagtgaagagggacctgaaggagtggaatattgataaagagctcgccgtggatagaaaggggtggaagtgtgcaattcacgtgccagaaccttgatttatagttccgcttttcctccttaatcgtttgaccttttcttgtgcccatttagaccttgctggttcttgtgggttttatctcttttatgtgttcccccgtttcgtcgttttcggttctcctttgcctttgtttcccctgttttctttgggggttgagctctgaggttttcatacggggtttcatctctagcctaccccaacgtgcttgggacaaaaggctttgttgttgttgttgtttgttgtaacttctatcattttctattcctcaggccccagtaagtgacagggagtatagagcaactcttccggaaacagctgaaatgatagacctggcagccaaattgattagcgagggccgtggaatggatttgatgcctagaaaagcaaactcagatgctcctattactgcctacaggtaccactccctttgttcatatatgggtgatgatgacatgttcagttcagatctaagtgaagatcagctgaggcagagacttggtcatatgtcaaccacacagtgccaggttattttttcaatgggggatgaatatgtacctgaatatgttgataagagggctctagtagacaggctatgtagggcgctgggaggtgcagagaaagtcgagatagaatggggaaaccatgctctgtccaacagagtgcaagaagcagttgtggccattgtagattttgtcaagagggaggggcccaaaggctgggacgacccatggagctagatacagcagttataatctcatttgtaactagtttgtgcttttcctcctctctcttttctccaattgtaacatctttcttttgcattattattggtccatttttcaatagtgatatgctctttttcttataaccccccctcccctaaaaaaaacatgcatcgcgttctcattctggtatggtgtatcacatatgtaaattgcgttcagaatcttgattatcaggctgtctttggtggatcatgtaaaataggggttgtgatagtttgaaacagaggatgatatagggg

SEQ ID NO: 32965 - DNA, 2980 bp, Zea mays
  Clone ID: UC-ZMFLMO17045F04_FLI
aagaaggtgagcagaagctacatgatgtagtatttgcaaaaaccaaacagtgggagaagataaaggccgagttcgaagcaaaattacttgaatttgaacaggaactcataagggctggtgctgagaatgatgcactcacaagatcacttcaagaacgggcagaactattgatgaaaattgatgaggaaaaaggtcaagctgaagctgagatcgaaattttaaaaagcacaattcaatcaggtgaaagggagataaattcgctaaaatatgaattgcatgttgtctccaaagagcttgaaatccgcaatgaagaaaagaatatgagtgtgcgctcagctgatgtagcaactaaacagcaccaggaagatgtcaagaaaatatcaaaactcgaagctgaatgccaaagattacgcggccttgttcgaaagaagttacctggccctgctgcactagctcaaatgaaaatggaggtggagagcttgggtagagaatatggagaccacagagtacgaagatcccctgcaaagaattctagttttcatcggcctatgtctcctgttcctgattatgcaatggagaacatacatcacatgcagagagacaatgagtttctgactgctcgtttattaacaatggaagaagaaaccaagatgcttaaagaggcattggcaaagagaaacagtgagctgcaatcttcaagaagcatgtatgctaagacaacaggaaagctccgaagcttggaagttcaaatgttgactggaaacaaacataagagtccatcaactccaaacatggatattcactttgatggtgcatttagccaaaatggaagcaacccacctagcatgacttccatgtctgaagatggggtagatgatgaaggaagttgtacagaatcttggaccaatgctctggtatctgagccctgtcaattcaaaaaagagaaggcagccaagagcagcacgacagaaagctccaataggttggagctcatggatgacttcttagagatggagagattagcatgtctgtcttctgaagttaatggcaatggcagtactgttgacaagatgaaggtagacaatgttggggctacttttgctggctttactgaaagagatggtgttaaagatttgcagtcagcttcaccaatgtcagaaactccatctaataaacagtgtctgtctgagaaatctccgcttttgaatttccagtcaagaatatcttccttactggattctgaatcaccagagaataatgctggaaaggtacttgatagcatcagaaacattctaaaggatattgaagatgaggcagattcggtgaatgtaaatgggactcatccttcagatgggaccttaagttcagagagcaaatttgccatggatcaagatcttaagaatgccatattgaaaattctagactttgtgaagttacttgatcaagaaatctccaagtttcaaggccagtcacctgattatgatggactatgtgagaaaacacaacagttctctgcattagtcgataaagttctgtcaaacgttgatgttctaaatgatattgtcatagcactgtctgttatcttgtcagaaactagccagattaagttcacattgttgagagacaatagcaatgaagcagaaagtaataacttagattgtgttgataaagtgactctacttgaaaataaggtgcagcttgagccagtaaaagacaatgttcctggtatctgcccactgttgcctcattcatcttctgatcctgagtttgaggggcctgctgatgctagattcgatgttaagactgcagtgaaggtgtactcgccggaggaatatgaacaacttaaatctgagaaggcaaatttggagggagaactagcaaagtgcaacaaaataatagaagaaacaatggctaggttaagtgatatggagaaaaaactggaagacctgacatctaagttggctgacagtgagaaatcaaatagcttgaatgagacacagttgaagtgtatggctgaatcctacaagtcacttgaatcaaggaaaattgaattagaaaatgagatagaagcgttacggtccagaatagatgctctaacagctgaactctttgatgaaagacagagtcatcaggaggacttagttaaatacagagatctcgaggagaagatggaaaggtatgagatggagaggagttcaattcttgtggatgaggacccagacaacaagtcaaagcaggagagagagatagcggctgcagcagaaaagctggcagagtgccaggagaccatattgattcttggccgtcagctgcaagctatgcgtcctccagccgagtcgctaggctcttcacctaatcggcaacgcatggaggagtttctgaaggatgcggcaggaacaaccgcaggagaatatttccagaaaccttcaggccaacctgatacagaccaggatatgcttgggacaggaaatgtgtctccgatcagtgggtacaagacacacatgatcccttctgatgcggacgttagccctttcccttctccaaacacctccaagcgcccgaagcatcgatcgagatcctcttcgtcttcctcattcaccaaccaccagttgccagacaaacagaaccgaggattcagtcggttcttcgcgaagagcaaagagtgaaactattccggatcgcggtgttaggtttgttgatttttggcgccaattgggtgggatggtggtcatgaatttctgtagagctagtgagggatgcttgcttgtgcgttctctcaggtcaggtgattcctttgggttgctggaataatactcagcttgcagtcgagcgggttgtggcgagagtgtgtgggggaatatttaagttgtcagtctcttctgctagagcttttctgggtttctgtgtgctcgaaacctcactaaaacctcactgtacatgtgcttacttgcttgaaggagcttggctgttggtttgtgtt

SEQ ID NO: 32966 - DNA, 2071 bp, Zea mays
  Clone ID: UC-ZMFLMO17045F09_FLI
tgaacttaagtccagtgagaatgagcgacccttgtgtggagttgcttctaaggagaatccaattcagctggctgcaggcagagctcagcaagagcctccaccatccaatgtggaagataaagtagaaaatgatcaatttttttttgaaggcatagttcaaagaaatccttctagtagacttgtaaaaggcagcgagtcatttgctattgttgcttttggaattcagatactgcagcatcctcagttctcaaaactttgttgggctacgtcaaagctacgggaaggcccctgcactgatataaatggaccatggaaaggctggccatttaattcctgtttgttgcagagcagcaccttacctggtaaatcactaaatggaggggacaatgttgtaaagggaaaggaaaagtctgtctgtgtgagagggctggttgctgttggcttattagcttatagaggtgtctatgggtctgttattgaagtttgtgctgaggtgagaaaggtgttgggactgttagtcggacagattcaaactaaaattttggaaaagagaaatcaattccggtattttcgaatcctatctcaagtagcttatctagatgatattgtgaacagttgggcatacacctaccaaagaacacatgttgatacccggacaggaacatcccgcatgaagagttcaagtgccaaagaatgtcaaaggaccaagtatgctgcaggaaccaatgtacaagttgctcctgttgccatccctgctgaggttcaagacattccagcccaacacactcaggatcatgaagttgttcctggtcctactgaggtgcaaggcaatccggttaagcatactgcagaacaacctggaagctattcgatggactgtgaccttgataatcatgtgaactctgtttccagcaaggatgcagtagaacacgatcatgtccattcagctttacctgatgtgcataggggcaatacacatgcagatacagtaacaaatgacggagaacctattggagcaaacaacaatgggaaagtgtccaggttaacctacggtgaagataaattcagaccaggtattcaaagatctgaaaaccacacagaatctatggaaggtttaggctgtttgcaaagggcaggagattccgttggatccccagcaagtattaacaatacagaattaccaaagaacaatgtttcttctgaagctcatattgatgataatgagttgaggagaaatgatcttgtgaatgatgttgaatcaaattcgatcgatggtaaacatgacaccatgatgaatctttcagttccaaaaatttcatgtctctacaaatgttgttctccatgtttccaatctatttataagatggttcatggtattatttcaaatactctaaggcctaatctgcattgcttaacagctgatgatatgcatgacattctgtcatcatggtgcttgaatctattagggtctgttagaaagttgtacagctcacatgatgaggccagctgcacagaagattttgttagaatgtccaataaagaaacccacttagagcattgtgcttgtcagagtgatatctatctttcaagagaatgtgtatgccacttggaaagcaatggggatgttgaaactgcaaatactgattgtcatcctctatcaggacaaagcttaagttttttctttaaagatggtgtatggatgccgttggatctcaccgcggaaacaaaacttcattgcagcttcaggagattctgtgtttgctcgatattaggaacagtttctatgctcagctagatcctcagttcatgatattgtctgatgcagttgcaaaagtacatatagtactctaatgctctaagtgtggctccagttgtgcacataacacaacatcatcaggatgtctttggttgattggaacttctcatccttgatgcaacttttgggcaagcttttattgcacataaattgcctctacctgttatggtcattagtggaaaactggctgttgtagttgcttcgtagactgaatatttaaaaagaagctaagatattagtcttcattttttttcc

SEQ ID NO: 32967 - DNA, 2351 bp, Zea mays
  Clone ID: UC-ZMFLMO17045G10_FLI
ccacctcggtggttgtggcacgcctcgcgggcgaggcctcgcagcccaaggtcctaccttctgcgaatggagtctcatccgagagctattggcgggtagctgctacgcgccgttggcagggccgcggtgtccggtgctgcgcggccggtttccgcggtgggggcgccgacgccgacgccgtgatcgccagcgaggactttgtggggttctttcgggaggcgtggccgtacatccggggccaccgtgggagcaccttcgtggtggtcatctccagcgaggtcgtgtgcgggccgcacttctaccgcgttctgcaggacatatcacttctccatggtctggggattaaatttgttcttgttccaggaacacatattcaaattgataagctgttgtcagaaagagggaagaaggccaagtatgttggtcagtacagaattactgatgaagatgcaagaaaggctgcaatggatgcagctggtagaatacgattgacaatagaagctaaactttctcctggtcctccaatgttaaatcttcgtaggcatggtgttattggacgctggcatggtcttgtggatagcattgcaagtggcaatttccttggtgctaagagaagaggggtggttaatggtattgactacggattcaccggggaagttacgaaaatagacgtttcacggataagagaaaggcttgatagtgatagcatagttgttatcagcaacatgggcttcagttcatcgggagatgtgttaaattgcaacacctacgaggttgctactgcatgtgctttagccttggaggcagataaacttatctgcgttgtagatggtcaggtatttgatgatcatggacgggccattcaatacatgtctattgaggaggctgatttgttgattagaaagcgtgctaggcaaagtgatattgctgcaagttatgtcaaggttgtggatgaggaaggcatcaattctttgcataaaggggacgacagaccatcattgagtcccaaggcttacataaatgggtatgctgcttcttttcgaaacggattgggttttaacaatggaaatggtatttattctggcgagcaagggtttgctattggtggtgaagagcggttaagcagatcaaatgctgatccttttaaaaacgggttgggttttaacaatggaaatggtatttactctggtgagcaagggttcgctattggtggtgaagagaggttaagcagatcaaatggctatctttctgagttggtcgcggcagcatatgtgtgccatggtggtgttcaaagagttcatattatagatggatgtgttgatggatcacttctattagaattgtttacgagagatggagcaggaacaatgattgctagggatgtttatgaaggaacaaggatggctacagcggaagatcttcctggcattagaaaaattattcggccgctggaggattctggtgttttggtgcggagaacagatgcacagcttcttgaagcgctagagtcattctatgttgttgaaagagatggttcaatcattgcttgtgctgctctatttccattccctgaggaacaatctggtgaagttgctgcaattgctgtatctgaagaatgccgaggaagaggtcagggggacaagttacttgattacgtggaaaagatggcattatccctgggtctcaagaaattattcttgcttactacacgaactgcagattggtttgtgcgacgtggcttttcagagtgctcaattggatctatccctgagcagaggagaaaacgtatcaacttgtcccgtggatccaagtattacataaagcagctgtagccaaagcctgctgggattatcgccaacaattttgtcatcaggtgactcagcagcatgcacagagtttggttccacacttccacttaattaagatggtaccagccaagattacaccaatttcgcggttgcccaaaggcatataattgcacaaagaaacaaaacaccattttactgtcactgtgtttgaaagatggttgtctttgtttaagtatgtgacagaagtttgttttgccaatagaatcaaggcagagaagaaatagctgattgaattatatgtagaccctatttaacaagcaataccaaagatgaagtgctcgtacagtatcatctctggttggtgcctcattgtgtgcatcatagatgattgaacttgccttttccactcatagctgattggccttatcttttctacttttgttgagagaaaaaaaagagctagtgaaacaattggttctcttgtatcagatgtcaaagtatccttgaatgaaaacaaaaaatatgaagtgctcgtctgttatc

SEQ ID NO: 32968 - DNA, 1268 bp, Zea mays
  Clone ID: UC-ZMFLMO17045H05_FLI
gtctcgagtctcgtccacccgtcgtcctcctagctcctctactcgccagtcgccatgggcaagattaagatcggaatcaacggcttcggaaggatcggcaggctcgtggccagggtcgccctccagagcgaggatgtcgagctcgtcgccgtcaacgaccccttcatcaccacggactacatgacctacatgttcaagtacgacaccgtccacggccactggaagcacagcgacatcacactcaaggactccaagacccttctcttcggtgacaagccggtcaccgtctttggcatcaggaaccctgaggaaatcccgtggggtgaggctggcgctgagtacgtcgtggagtccaccggcgtcttcactgacaaggacaaggctgctgcacatctcaagggtggtgccaagaaggttgttatctctgccccaagcaaagacgcacccatgtttgttgttggtgtcaatgaggacaagtacacctcggatgttaacattgtttccaatgctagctgcaccacaaactgccttgctccccttgctaaggtcattcatgacaacttcggcattgttgagggtctgatgacaactgttcatgccatcactgccacccagaaaactgttgacggaccctcagccaaggactggagaggtggcagggctgccagctttaacatcattccgagcagcaccggtgctgccaaggctgttggtaaagttctccctgatctgaatggcaagctcactggtatgtccttccgcgttcctactgtggatgtctcggttgttgacctcaccgtcagaatcgagaagggggcctcctatgaggatatcaagaaagctattaaggctgcttccgagggtccactcaagggtatcatgggttatgtggaggaggatctggtttctaccgacttccttggtgacagcaggtcgagcatcttcgacgccaaggccgggatcgctctgaacgaccacttcgtcaagcttgtctcgtggtacgacaacgagtggggctacagcaaccgcgtcgtcgacctgatccgccacatgttcaagacccagtagagggttttccccctgcttctcatggatggttgctgcttgtgtatgccgagaataaatgtggatgtcgccaggttcatgctgagtctggacatgttttgcacttttgtttccatttctgccatcatctgtggcagatccgctcgctaatatgggacctgagattagctttttgctgcttgtggtgaggttgcagttttgtt

SEQ ID NO: 32969 - DNA, 1371 bp, Zea mays
  Clone ID: UC-ZMFLMO17046B05_FLI
cagaacttatatccatgcttttggatttgaaaccacgattcttgagatttcctggaggttgttttgtagaaggtgactggctaagaaatgcattcagatggagagagtcaattggtccatgggaagagaggcctggacacttcggggatgtttggcattactggactgatgatgggcttggatattatgagttccttcagcttgcggaggacctgggtgctgccccaatctgggtattcaacaatggaataagccacaatgatgaagttgatactgtagctattgccccttttgtaaaggatgtattggacagtctggaatttgcaagggggagtgcagattcaacatggggctctgttagggctgcaatggggcaccctgaacctttcctggtcaaacatgtcgcaattggaaaatgaagattgcgggaaaaagttctaccgtggtaattacctcaaattctacaatgctataagagaggcctatccagacattcagatgatttcaaactgtgatggttcatctagaccacttgaccatcctgcggatttgtatgatttccatgtctatactgattctaagactttgtttaacatgaggagcacatttgacagaacatctcgtagtggacctaaggcttttgtgagcgagtacgctgtctggagaagtgacgcgggtagaggcagtcttcttgcttcgttggctgaagctgctttcctcactggtctggagaagaacagtgatattgttcagatggcaagttacgcaccactcttcgtgaacgacaatgaccaaacgtggaacccggacgctatcgtcttcaactcctggcagcactatggaactcctagctactggatgcagacgattttccgcgagtccagcggcgccatgatccatccggttaatatcagttcccggtactcgagttcgctggccgcgtctgcgatcacgtggcaagatgcagagaatagcttcctgagagtgaaggtcgtgaactttgggtcggacaccgttaacctcacggtctccacgagcggactcggggccagcgtcaacgcgctgggatcaaccgccaccgtcctcacgtctggcaacgtcatggacgagaactccttcagtaacccgaacaaggttgcgccggtgaaaagccagctgagcaacgccgcggagcagatgcaggtcacgctggctcctcactccttcaccgccttcgatctggcgctggctgagcccaagcttgtggcggagatatgatgtgtgtgctgttagcgatcttgatcgataaaaaggctttgtactggtgtactacgtactgttgcttcatgaaataaaaaccacatcaggtttttgcttggtgttggttggttt

SEQ ID NO: 32970 - DNA, 1636 bp, Zea mays
  Clone ID: UC-ZMFLMO17046B08_FLI
gatcgaaccacggcctcacatactcgcgcatatggcgacaatggcagggcgtcttgttgcccggacgtcgtcctcctcggccaagcgccagcggttcagctccgctgttctcctcctcgctctcttccagagctcgtggtgctacgacgacgcggcggcgacgacgacggtggattacggttacaacaacgagcacgaggccgaccgggtggcgttcctccccgggcagccgaggagccctccggtgtcgcagttcgccgggtacgtcaccgtgaacgagcgcaacgggagggcgctcttctactggttcttcgaggcccagacgtcgccggcgcacaagcctctcctactctggctcaatggaggacctggttgctcgtccgttgggtacggagctgcttctgagttggggcctctcagagtcaacagacacggggcagggcttgagttcaacaattttgcgtggaacaaagaggccaacttgctcttcctagagtctcctgctggggttggcttctcctacaccaacacatcatccgacctcaccaaactggatgatgctttcgtagctgaagatgcatacagcttcctagtaaattggctcaaaaggtttccgcagtataggagccacgaattttatatctccggggagagctacgcaggtcactatgtgccacaacttgctgaacttgtctatgacaggaacaagggcaacaccaacacacacatcaaccttaaaggtttcatggtcggtaatccactaactgacgactactacgactcaaaggggctggctgaatatgcttggagccactcagtagtgtcagacgaagtttacgagcgcatcaagaaggtctgcgacttcagggtctcaaactggaccgatgactgcgatacagcgatgatcgccgtgttcagccagtaccaggagatcgacatctacaacatctacgcgcccagatgcaacctccctccgtcgtcagctgcacttgcacttgctgttgacaaggcagtcgtagccaacagacaggcgaaggatcaggatgttctccggatatgacccgtgctactcttcgaacgcggaaaagtacttcaacgatgcaggtgtgcagacggcattccatgcgaatgccagtggagctcggaaatgggaagtttgcagtgattcaattttgaggtcatacaatttctcggtgctttctgtcttaccaatctactctaagctcatcaaagcaggactgagagtgtggctctacagtggggatgcagatggtagggtcccggtgatcggatcgcggtattgcgtggaagccctgggcctgcctgtcaagacgcagtggcaaccatggtacctgaacaaacaggttgcgggcagatttgtggagtaccatggcatgacgatggtgacgatcagaggagcagggcatttggtgcctctcaacaaacctgcagaagggctcgcactcatcgacacattccttcagggcaaacagcttcccacacacagatgacaagagtacttagggttgtgattgtgatgagggttattgttttcaaaaaaaaaatcaaggattggacaaactatgtgccccacacacacgggctaatcagtaaggatttcatttccagtttctgc

SEQ ID NO: 32971 - DNA, 1039 bp, Zea mays
  Clone ID: UC-ZMFLMO17046E03_FLI
gcagtgccgattacggatggaaatctaggccagtctcttgatgacacaaacgatgatttgggagccagagagccttatatcagaactgatcccgaggtttgtgaagaatgtattggcgaaagggagagctgtgcattggtggaaaaactcaactatcaaaatgaagatatccacgtttactttgtccatggaaaagaagcaccaaagtctattaaagaagcatctaaagctgttactgtaccagatcgtcggacatcgaagcgttcccggagaacaagctctggaaactcaatcagtttgaaagtctctggctctacatctgtctatcagttgaaactgatgatatgggaatctttagggattgttaaggagaaccaaatgcttcacaaaggctctgttgagattgaagatgattttgctactcttgctgataagagtatttttcctggggattttctctgggtcagagactctgaaatatatgagaaccgtgacattgcagatgagatttcagaacaaaaggatgatatgctacaggctgaggaaggctttcgaggaactctgttgacatcaactgtctcagctcagctttgtcaggatatagcttttagtgaatgagttcccacatcagatatgtagctgcatatctgctgacttaagctggtgaagcctgctgggagaaggccgattgattcatgattatggtggttctggcagccgccgaggtggaaatttttgtcgaccccttatctccatgctcagtcaagctaaggttgtttagcgaggaaaatgtatggggtacctactgtagttaaggccccgtttggtttgagggactaaagattagtccctccattttagttccatttagttcctagattgccaaacggtaggactaaaaatgagactaaactgttttagtccctagtctctcaaaatgtggctaaaaagactaaaccatattaattccacatttgcccatcatttagttcaattgtactaatagcacgagaatgttaaagacaattttagtcttctt

SEQ ID NO: 32972 - DNA, 1527 bp, Zea mays
  Clone ID: UC-ZMFLMO17046F10_FLI
cccagataatcttctgaagtttctgagttccacaacaaattcttttgatggaaactcaggcctctgtatctcttgcagcaccagtgattcttcttgcatgggagctaatgttctgaaaccttgtggcgggtcaaagaaaagagcagtgcatggccgattcaaaattgttctcattgttcttggctcattatttgtgggagcagttctggtactcatactcttttgcatccttctgaaatctcgagatcagaagaagaatagtgaggaagcagtcagtcatatgtttgaaggttcctcatctaaattaaatgaggttatagaggcaactgaaagttttgatgacaagtatatcattggtaaaggtggtcacggaaccgtttacaaggcaacactgaggtcaggggatgtttatgctataaagaaacttgtgatttctgcacacaaaggttcatacaaaagcatggttggagaactgaagacactaggtaaaatcaagcacaggaacttgattaagctgaaagaatcttggttgagaaatgacaatggattcatactgtatgattttatggaaaaaggtagccttcatgatgttctacatgtagttcagccagcaccagccttggactggtgtgtgcggtatgacatagccctcggcactgcccatgggttagcatatctacatgatgactgccgccctgcgatcattcatcgcgacatcaagccaagtaatatactgctggacaaggacatggtgccacatatttcagattttggcattgcaaagctcttggagcagccttctactgctcctcagaccactggtgtcgttggcaccattggatatatggccccagagttagcgttctccaccaagagcagcatggagtccgacgtgtacagctacggcgtggtgctgctggagctgctcacgaggagggcggcggtggatccctcgtttcccgacggcacggacatagtcagctgggcgtcgtccgccctgaacggcaccgacaaaatcgaggccgtctgcgacccggctctcatggaggaagtcttcggcacggtggagatggaggaggtgagtaaggtcctgtcagtggcgctgcggtgcgcggccagggaggcgagccaaaggccctccatgaccgccgtcgtgaaggagctgacggatgcacggcctgccactggcggcggccggtcgttgtccaagtcgaagcaggggaaaccaggatcgcaatccaacagcagcgcctaccggcagtaggatctctgactctgccgagctgtttggggacaccaactttactcaacttgtagtctctactctataggtaccctcgcttggtgtacatcctgattggttagttggcaaagattagttgtagttcaaatgaaacggagagatgctggactcgtgtcagtgcgagtgaagcaagctgcttgttctgaaatctgtggactgtggcttgtccgtggcttccagggacgggaccaggagagaatgggtattcgaaattgtactaaagg

SEQ ID NO: 32973 - DNA, 1939 bp, Zea mays
  Clone ID: UC-ZMFLMO17046G12_FLI
tcgccgccgtggtccgctgtcgcacacgccctcctgcccctccgctcccctcccagatcccgtgatccgctgccgtgatccgatgccgcacccgccatcaacgccctcctccccctctgctcccctcccagatctcgtgatccgctgcgaggccgccatcaacgccctcctccccctccgctcagctcccctcccaggatctcggcgcgctttcatcgccgccttgatggtccacggctgcacccacatacgacatcgcctgtccgcacgcaagcttctgcctgcgcccacctgtgtgcatagatgtgtgcccccgcccacctcttctgcgcccaatctttacccgtcgtccgcgccgctgttccatcctcgcacccacgcccgagatccacatgtgccgcaccccagccgtgctccggatgctgcaccgcccttccatcctccgcatgcagcaccatgttggccgccgccctgaaacctcgctaccacggagctgcaagcccccgcttccaaaccagcaccatgcagacttccaatttgttttttgtttggagcactgttgattttttctcgtttttttgagaacattacattgcccgtctttcactgttcaacttttcttaattaaccatttacatttaccaaaaacttattcaacttttcactgttcaagttcaatttgttttgtgcagtattgatctgttgtgcagtgtatactttgaggttcggttggccgatcttgcgatcgaataccaaaaacttgtgtggtactctgttgctgaataaaacttggatcaggttaccccaaccccaatggcatttaccgagccgatggaggcgaacctgctacgccaagtgctggactatccccccagtgctctgtccatccctccttcagcttcattgatggttgcactgctctactatactataagtgaattgagttaaagcattttttgttcgactactgtttggtgcatgcaacttaatatggctgatttttagtctttctattttagtttataaattgtcaatcacagggattaaaagagactaaaagtaaggtttcaggttctatttctatccatctttaattaagggctgaaacgatactgtcttgattcctaattcacctaatattcctagaccaagaacgactcgggttaatggtcagggatgccaaattgtttcagtaaaactaagcaagctcgtatgatgattatgtacctacttgagaacaaattgtctaaaacatatctgctactacacttcagtaaaacaattgatcacacacaagaagttcagatcagaaagcaggctgtcgctactcccgtcaggttctcggatggttcccgtcaagggctgaccatggagaagagcacagtggtggtcagtgtccctgttgttgtcatggccgagactgctgagaccgactacagctcgagcttctcgatgcagagtcccagaaagatgttgggaagggtgataaatcaagggataagggaactgctgagaagtttgcaatatatcagaagcatcgttcttcgttggcagacactgttcaattcaggaggccagctgctccaacttccagtgtgaatgctgatattgtgggaacatccactctgcagtctgcatctctaccgaaacaagaaccctcaacagctacatccaagagctatactttcagagaaggtgatagggtgcgttatgtgggtccagctcagttatcctcattgtcacaaaggctcctctccttttgctggcttcgctgttggaagcgagacatcatgtggtgtggataacgtccttgcagagcacgtgaactcaaatttcactctaatgtcagctagctgctacatagtgcacttctgtatattatgagtatgtatacagaattttaaagtatgaatacatgtgttttaaagcttggacaacc

SEQ ID NO: 32974 - DNA, 1449 bp, Zea mays
  Clone ID: UC-ZMFLMO17047A09_FLI
cctcaagctcctgcttttccattgctctgcgtctgcgtctgcgtctgcgtctgcactgcttcgcgtctccctccccccgcctccgcccccgccccggcaaaaaagcaaaacacggccatggaaggctacgaccgcgagttctaccagttcagcgaccagctgcgcctgcagacggccgccttctcgggcctctccctcggcgactccatctggtcccccgccggccggcgcaacaacagcaacgacgtcctcttcgccgcctccgcgtcgcccgccgacgccgccgccaagagcaacgccgtcgtcgggctcaagctcaacgacggagggcccggcctcatcggctccgggaagctggccttcggcggcggcgccggaggcggcggcaccaacaaggccgaccgctacaacaacaacaacctccccaacaccgacaacaagaccgtgtacaacaccagcaacagcttcatgggcaacggcagcagctacgccaagaacaacaacaacaacgccgacatgctggcgttcgacaagatggggagctacggctacaacggcggcggtaataccaacaacaacagcaacggcgtggaggtgaagagctacttcaacaagtccgccgggagggcggcgagcaacaacaacaacaacaacaacagccacgccggcggcggcaacaagaagggcggcgccggggagtacggcaggaagaagcacgccaagagcgagggcgcggcggcggcggcggccacggacaagcagcggttcaagacgctgccggcgtcggaggcgctgccgcggggccaggccatcggcgggtacatcttcgtctgcaacaacgacaccatggacgagaacctcaggagggagctgttcgggctgccgtccaggtacagggactctgtgcgtgctatccgcccgggactgcccctcttcctctacaactactccacgcaccagctccacggcatcttcgaggccgcgagcttcggcgggaccaacatcgacccgacggcgtgggaggacaagaagtgccccggcgagtcgcgcttccctgcgcaggtgcgggtggcaacgcggaagatctacgacccgctggaggaggacgccttccgccccatcctgcaccactacgacgggcccaagttccggctcgagctctccgtcaccgaggccctcgcgctcctcgacatcttcgccgacaaggacgacgcctgatcgatccccatcggatctgtcgtcgggccactcgaagctcggatgcatgaaggaacaaacaataataacggatggatgggcatgtatatcgtcatgcgcatgtcaatcccacgacgagacgagaagagacgggagtatccgcatcaccacggtggtcggtggagtagtatattaataattaatatagtatgtccacctttgtttgatactactaagggctatgtattgagg

SEQ ID NO: 32975 - DNA, 1294 bp, Zea mays
  Clone ID: UC-ZMFLMO17047B05_FLI
atcggtttgtgccccatgccatcggcgaccatgtgaagaactccgtgccctggttgccgcactccggacgctggcgcgccctcagaaagatcatggcaactgagctgttcgcgccgcaccgcctcgaggcgctccagcatctacgccgccagaaggtggaggaactcgtgggccacgtccggctactggcactgcagggacgggcggtggacgtcggcagcgtggcgttcaccacgtccctgaatcttctctcgcgcacaattttctcctgcgacctgacgaacctcgacgaccacaccggatcggcgaaagaattccaagaggtggtgacagagatcatggaggttgccgcgagtcccaacctgtcggatttgttcccagcgctggcttgcgccgatctgcaaggattgcgacggagactggcaaagctctttgcacggctgcaccaggtgttcgacgtggaggtcgaccggaggttgtgcgagcgtgatgctggcgatcgccggaagaatgacttcctcgacctgttgcttgacaccgacggagggacggcagcgttggaccgcgactcgctcctgtcattattcacggatttgtttgctgcaggaagtgatacgagctccagcacagtggaatgggcactgacggagttgcttagaaacccagtcccaatggctaaaacgtgcgatgagctcctggcagccactggcgcggcaagaaacattgaagaatctgaaatcgagcagctgccctacctccaagccgtggtaaaagaaacttttcggctgcatcctcccgtcccactgctgttgccgcgacgagctggggccgccacgcgagcaatgggtcacacgattcccaaaggcgcacgcgtgctggtaaatgtgtgggcgatggggcgggacggagacgtttggccagatccagagaagtttatgccagaacgattcctgggaaggcctacggattttagaggtggagacttggaactcataccgtttggtgcaggacgcaggatctgtcctgggatgccactggccagcaggatggtgcatctggtccttgcatcgttgttgaatcagttcagatggaggcttcccgccgaggtcgaaagagatgggactgacgaaatggctgagagttttggtgtcactctaaagaaggcgtcgcctctttgtgctatagccacacctgtttgaatgagaagcccagatcgacagggtcaaaaaaaaagtattgagtgttcttctgttgaataatgtttcttgcaagtcattgaagtcattacgagtct

SEQ ID NO: 32976 - DNA, 1369 bp, Zea mays
  Clone ID: UC-ZMFLMO17047E05_FLI
acaacgcccatcactcgcgccgtacatcctgcctcctcccgcgcgcgcgcgcgcgtgcacgctagctagctgccggtcgcctcgccaccatggtgttcgacgcgagcggcagcaggtcggcggcggcggcgtcggggaaccctctccgcgtgatcctgacgcgcgggttcgcgcggcaggtgctcgcggggcggtggttgacggtgttcgcgagcctgctcatcatggcgtcctccggcgcgacgtacatcttcgggagctactccggcacgctcaagtcgtcgctcgggtacgaccagcgcacgctcaacaccgtgtccttcttcaaggacctcggcgccaacctgggcgtcttctcggggctcatcaacgaggtgaccccgccgtgggtggtgctggccatgggcgccgccatgaacctgtccgggtacctcatggtgtacctggccgtgtccgggcgcaccgcgccgccgccgctgtggctcgtgtgcctctacttcttcgtgggcgccaactcgcagtcgttcgccaacaccggcgcgctcgtgacctgcgtcaagaacttccccgacagccgcggggtggtgctcggcatcctcaagggcttcgtcggcctcagcggcgccgtgtacacgcagctgtacctggccctgtacggcggcgacgacgccgagtcgctgatcctcctcgtcgcctggctccccgcggcggtgtccgtcgtgttcgtccacaccatccggtacatgccgtacccgcgccgccgtggcggcgggcaggagacgagcagctccgactccgaccccttcttctgcttcctctacctctccatcgcgctggcgtgcttcctcctcgtcatgatcgtggtgcagaagcaggtgcccttctcccgcgccgcgtacggcttggccgccacgccgctgctcatcctcctcctcatgcccctcggcgtcgtcgtcaagcaggagtacaagatctaccgggagcgccagctcgacgccgccgacccgccgccgccgaccatcgtctccgcgtcggcaacggacgccatcaagaaaacagagcagcagccggcgtcgtcgtcgttctgtgggtgcgtgaggaccatgttccgtccgccggctcgtggggaggactacacgatcctgcaggcgctggtgagcgtggacatgctggtgctgttcgtggcgacaatctgcggcgtgggcgggacgctgacggcgatcgacaacatggggcagatcggcgagtcgctgggctaccccgccaggagcgtcaacacgttcgtgtccctgatcagcatctggaactacgcggggcgcgtgacggcgggctacgcctcggaggcggcgctggcccggtaccgcgtgcc

SEQ ID NO: 32977 - DNA, 1123 bp, Zea mays
  Clone ID: UC-ZMFLMO17047F09_FLI
cacgcgcagcagcagcagcagcagcagcacggggcgcccatccagcgccagggctccttcacgctgccccgcacactcagccagaagacggtcgacgaggtctggcgcgagatcgtgagcctcaccagcggcgaggacgcgcagcaggttgcggctcccgctcccgctcccgcgcccgagcccgagcccgcgcccgcgcccgcgccgctgccggcgcaggcgcaggcgcagcagacgctggggtccatgactctggaggagttcctggtacgcgccggcgtggttcgtgaggacatgggggggcaccagaccctcctgctgcagccgcacgcgcaggggcttttctcccaggggaatgcggtcgcgccgcagaccctgcagctgggaaacgggatggtggccggggtcgtcgggcagggcctcggaggaggggtgacggtggcggctccgacgacgccggtcgtgttcaacgggttgggaaaggtggaggcgggtgatctgtcgtcgctgtcgccggtgccgtatccgttcgacactgcgctgaggatgcggaagggacccaccgtcgagaaggtggtggagaggaggcagcgccgcatgatcaagaacagggagtcggccgccaggtcgcgtgcgaggaagcaggcgtacataatggagctggaagctgaggtggcaaaactcaaggaccagaatgaggagttgcagaaaaagcaggttgaaatgctaaagaagcaaaaggatgaggtcctggagcgaatcaacagccaacatggaccaaaggcaaagaagctttgcctgcgccgcaccctgactggcccatggtagcctgctgaagcttgcacaaaattgaccgaagtcaagatcgtcgggccagatgtgcccgtgtgtatatatcagatgaagtcaagagtactgagtaccccgttacccctgtagaccgccgctacttcagagctgccgttcttgttctgtgacgtgggtagtctgcgcctgacagttcgctgtttaggttcggttgcgcgatcctcacatgaacaatgaggcgtgccatctaatttgtttattaactcactcctatctatggtgagataatgcaagtaacctggagtatgtttggttg

SEQ ID NO: 32978 - DNA, 1562 bp, Zea mays
  Clone ID: UC-ZMFLMO17048B05_FLI
aagcaatcttacagaatcagctttagtgaaagatatttacactacatctcaggctgtttcagcacctattgttgtgcccagagacattttagaggacaaaacagtaagcaatgttcgtcgagggactggagagacagctgcagtcccagatgattttcggatccctgttcacagaagaaaaccctcacttagtggcagtgctgctgatagtgatagctcatcaagatcagtgttcactgaacctgatgtttgctcagagggtttgtctagcttaaaattctcctttgggctaactccatatcacaagaaagaagaatttggcgatgtggataatgaaggtattgcacaaatagcagaaaagatggaaagaacagtgtcgctggaccattctcagcagttaaatgatgataaatcctttgaatcaccatgctcaacaacagagactgccaaggtcaaatatgttagaggagttgctgtgccactggggaaaacaaagtctcttgttgagagatgggaaaaaagagagacttctagcactgattattcaccacaaactggttcttgtggtgatcgggcatcgagaaatgacaaccatccattccatctggcggaaccaagtacaacatttgaaaaggacctgtcaactgtagatgaagcgatggctcctgtcaatttagtgcggaaccatgatgaattcctaaatgctgtaaaacttcggctgacaaaactagagatgatgcggcatgtctttgaacaaagtggtattaaaggagcaattgctgcagtggcaaagctacctgacaatgctgttcaagcagatgttgttagtgctctcaaaggaaagcttgatcttttcaacctggaatttttctcaaattttctgcctgttcttgctgggttactgtgtagcaagactgaaaggcatgctatggtctctttggaaatgttgttggatcttataaagatttttggaccagtaattcattcagcattatcagcaaatttaggcgttggagttgacattcaggctgagcagaggttgcaacgttgttcacggtgctttaaccatttgcaaaagatccaacagagtctgaatccattgattctgcggggtggtcaaacagcacaacttgcacaagaactaagtctttcattgcaagatttggtggtgatctaggcaagatgatgtacaatgtatacgacagagtagataccattggttttggcgaaaagtgcccacagttgtgtagcttgtaattttgtcatagctttgcaagtgggttttgcaactgtgttttaacattgggctggcattcagcctggtcccctgttgtaaatgtgagcctagccgtgaatgagtctgtaattagccagccacatctgctgtgtgagcagccctgaacaaaaagactagttgaaaggaaacaaccgcaaaggggatcattttggttacaccccaggtggtaggatggctcatgtagcatgcggtgattggcaattccattctttgaaagcatctgtgtttaacgtatattttgtagaagtaaattgagttatgccat

SEQ ID NO: 32979 - DNA, 2394 bp, Zea mays
  Clone ID: UC-ZMFLMO17048B07_FLI
gtgcagctgtagcacaggcaaatatcacgaggacaaatcatatcatgtttacaatgggaacagacttcaaataccaatacgcagagagttggttcagaaatatggacaaactaattcactatgtgaacaaggatggccgtatcaatgctctttattccacaccttcgatttataccgatgcaaaatatgctgcaaatgagcagtggcctctcaagaccaatgatttcttcccatatgcagacaacccaaatgcctattggacgggttactttacaagcagacctgccttaaaacgatatgtccgcacgatgagtgggtattacctggcagctagacaactggagttctttaaagggagatatagctcaggtctctcaacggatagtctaggtgatgctctagctcttgcacagcaccatgatgctgttacaggaacagagaaacaacatgttgcaaatgattatgcaaagagattgtcaattggatatacacaagcccaggagctcgtttcaacttctcttgcttgcttgacagagtctggctcaaaatcacgttgtgcatccccagtgacaaaattttcacaatgtcttctgctaaatgttacgtattgccctccttctgagatggacttaacgaaaggaaaaagcttggttgttcttgtatacaactcgcttgggtggaaacaagaagacgtcattcgtataccggttttcagtgattcgattgtcgttcatgattctgaaggacgagaaattgaatcacaacttctgcctatagctacagcctcgttgaacataagagaaaagcatgtcaaggcttacctgggcacaacgccaggtgcaaagcccaagttttggcttgcttttcctgtgtctgttccacctcttggtttcaatacttatttcgtctcaaacttgaagaaatcagcacatatttcttcgaagtccactcagtactcacctcaaggaagtgaaagtagtaatctacaagttggtcaaggcaacttgaaacttcaatataatgaagctggaaaattatccctgtactccgatagtaagactatggttcaagcaaactttgagcagaaatacaagtattatattggacaggatggaaatggaagtgatcctcaggcttctggagcatacatattccgccctaatggcacagttccaatcagtactgatgggcaggtttctctcacagttctgcgtgggcccatattggatgaagtgcaccagcagataaattcatggatttatcagattaccagggtttacaaggagaaggactttttggaaactgaatttatagttgggcccataccagtagatgatggaaatggaaaagaagtagcaactgaaattgttacaaacatggtgacaaacaaaacattctacactgattccagtggacgtgatttcatcaaaaggataagagattatcgatcggagtggaagattgaagtgcaccagcctattgctggaaactattatcctgttaatcttggcatctatgtggaggatggcagcaaagagctgtctgtactggtagacaggtcaattggaggttccagtataaaggatggacaaatagagctaatgctacacaggaggctactccatgatgatgggaaaggagtcgccgaggcgctaaatgaaacagtctgtctcgataagcaatgtgaaggactcatcatacaaggaaaatactatgtcaaaatagaccaacaaggagaaggagctcgatggcgtaggacatttggccagaaaatatactcccctctccttcttgctttcacagagcaggatggaggcaactgggcgaattcacatgtttcaaaattctctgcgatggattcaacttacagcttgcctgataatgttgcaatgcttacccttcaggagcttgaagatggaagtgttctccttcggtttgctcatctatatgaggccggggaggacaaggatctttcgtctttagcgagtatcgacctcaagagagtgttcccggagaagaagattggcaaggtcatcgagacaagcttatcggcaaaccaagaacgcgcagccatggagaagaagcgtttgaaatggaaggcgcaaggttctgcggcggacgagaaggtggttcggggtggccctgtggatccttcgaagctcgtcgttgagctggggccaatggagatccgcacattcatcgtcagctttgatcacatcagtgacaagcaacagctctaatcgtctccgactagacgactaggtctggatgaagttgtcgtgcggcttcgaaataaaaaataataatgtggcctgctgtgtacctgtggttcaacccatgatatggcctgctgtgggtcagcacggttctaaagctaaggacattttataaggc

SEQ ID NO: 32980 - DNA, 1145 bp, Zea mays
  Clone ID: UC-ZMFLMO17048C02_FLI
aagaattggcctatatttgccaggagataaagaatcctcttagtggcatccggtttaccaactctctattgcagatgactgatttaaatgatgaccagaggcagttccttgaaactagctctgcttgtgagaaacagatgtccaagattgttaaggatgccagtctcaaaagtattgaggatggctctttggtgcttgagaaaagtgagttttctcttggagacgttatgaatgctgttgtcagccaaacaatgtcattgttgaggcagagggatttacaacttattcgagatatccctgatgaaatcaaggatgcatcagcatatggtgatcaatttagaattcaacaagttttggctgacttcttgctaagcatggcacagtctgctccatccgagaatggctgggtagaaatacaagtcagaccaaatgtaaaacagaattatgacggaacagatacagagcttttcatcttcaggtttgcctgccctggtgagggcctccccgctgacattgtccaggatatgttcagcaattcccaatggtcaacccaagaaggcgtaggactaagcacatgcaggaaaatcctcaaattgatgggcggcgaggtccaatacatcagggagtcagagcggagtttcttcctcatcgtccttgagctgccccaacctcgtctagcagctggtagagaaaatcagctgatatgttaagatctgcgctgacaccacctaacttctaggtcgattaggtaacttaggtggtgtttgtttgggattataatctgcctaaattatataatcagtgttagttcaaaataaggtagattatataatctggtcagattataatcccaaacaaatagacccttagctccctgataagagggtgcctaatttacaagaagcctggaaacaaatgaatgctgccatggcaattcaatggttgagtgttgatgaggaggctgtttttcggtgcgccgctgtaagtttgggtatccatgctgtggtttcaagatcagagttcatggcagatagttatgtacacaggcggcaaatttggttcttagcttaggttgatgaccagtttcacttagtacatcttatatgtatataatatgttatgtactccgcataaggagttgtttc

SEQ ID NO: 32981 - DNA, 1219 bp, Zea mays
  Clone ID: UC-ZMFLMO17048D05_FLI
agttgggcgaacttgccatgtccacaggcaagctagagatggcagaggaatgccttcttcaagcaaaggacttaagtggcttgttgctactgtactcatctcttggagatgctgaaggaattgaaaagcttgcttctttggcaaaagaacacggaaaaaacaatgttgctttcctctgcctttttatgcttggtaaagttgaagattgcatacagttgcttgtagacagtaaccgtatacctgaagctgcattactggcgcgttcatatcttcctagcaaagtaccagagatagtggcaatttggagagacgacctgagtaaaattaatccaaaagctgcagagtctctagcagatccttctgaatatccaaatctatttgaagactggcaggttgctctaactgtagaaaaaagtgttgcgtctcagaggggcaattatcttcctgctgaccagtacttgaatcatgctgagaagtcagacatgactattgtggaagctttcaaaaggatgcaggttgttcagcatgaggaacctgaagatgtggctgaggaaaatggagaacttgatcaacaggcatttgaagagactgaaatgcagaatacagatgatgatgctgatgaacctgaagagacagttttagtaaatgggaacaagggtgaggaacatcagggtacggacaatgaaggagctttatctgcctagaattcttggcaaatatgggaaccccaagttttgcctacgtgctaactcaacatgaataggggctgaaagaagcacagctcattggctgcaaatttttttttctgagggtaacaaatgtgggccccctgttttactctgaagcaccggaactggtgatgctggaccgcctgatgcttgtcatatagaaggtcgctatactttttggtgtcaatctgcccatccagtcatgcttctttttgtaaacaacgtaggcaattctttcttcttggaacgtttgcagacccaatttccatgccgtgaaatcaatggatcgggtgtggggccagctgcaatgaatagtgtttgaataattggtatagaggtatgtagtaaaaatatgccagattaccataggagatgacagcttttgttacccattcattgtaatgaccttattcgataaggttacgtgtagtctacgattgcagttgcgggccgggagttttttcccatgttatgtagcatcattctatcgg

SEQ ID NO: 32982 - DNA, 1360 bp, Zea mays
  Clone ID: UC-ZMFLMO17048F09_FLI
ggggaacaatgtgcatgggccattggtaatgttgctggtgaaggagcagagctgagaaacacattacttgctcaaggtgctttgtggcctcttgcccgtttgatgctgtcaaataagggttccacaacaaggactgctgcttgggcattgtcaaatctcatcaaggggcctgattccaaggctgcgaatgaacttattggtatcgacggcataccgaatgcaatcattcggaacttggaaaaggcggatgaagaacttgcaactgaggtggcatgggtggttgtctatctttcagcactttcagaaaaagctaccagcctaatagtaagaagttcgatgccacagttgctgatcgggcgccttctagcatctgaaaacttgcagttgctcattccggtacttcgcggtttaggaaatcttgtagctggtgatggttacatggttgattcagtcctaattgttggaaacagtgtcacagatcaagccttatcaagtcttatcaagtgtttgaagagcgaccatagggttctcaagaaggtatgttaccctttcatttgctaactaagtttattttaatttggactctaaaaggataaataattcgttgctttgtcttctatatatatatttttgaactgcttatataggaggcatcatgggccatgtcaaatatagcagcgggcagttttgagcacaaaaaactgatatttgctagtgaggcgactcctttgctgatgcacctcctcaggactgcacagtttgacatccgcagggaagcagcatacacgctgggcaacctgtgtgttgtcccagcaggcagtggtaaccccccaagtataatcgttgagcatttagttgccatcgtagatggtggagcccttccaggatttataaatttggtgaggtcggccgatatagagagtgcgagacttgggcttcagttcctggaactggtgatgagaggataccctgacagccagggcccaaagctcgtggagacagaggacggcattgaggccatggagaggttccagttccatgagaacgagatgatgaggaatatggcgaatggtttggttgataaatactttggcgaagactatggcctgtgagttgtgccgccgatacatctgggtaaacgcgtggagctatttgtgggtttgaaatgtaacgatcctggaacagaaggatgcgccgttcatcatggtttccatgcaatttagcccctaatatatagctggaaatgtgaatgtgttgaaactgaccgtgaactggagatgttaagtgtggataccttagatagacatagactgacatcttgcacagtacttcctctatctcaaaatatttttcgtctcgt

SEQ ID NO: 32983 - DNA, 1167 bp, Zea mays
  Clone ID: UC-ZMFLMO17048G02_FLI
ggtttgggcatgtccaccggagacctccagaggcaccggtgcatagaggcatcataagaagggacaataatgtgaaaagaggtagaagtcgaccaaacttaacatgagaagaggcaatcaaaagggacttgaaggaatgtaatatcccaatagagatgtgtttggatagaagtgtttggaaagaagctatccacgtgctcgaaccgtgattaggtctttttctttttagtactctcaaaagcttgtcctctcccctttctctctctttctctttttggtgacatcttgttgggtttcaactctagcctactctaacttgcttgggactaaaatactatgttgatgttgatgtacagttggtcatgttttttaggtcagaattaggtgtgcatctctaatcatttaccaacaaatgcagatcttcttcaatcctgagatttactctgccgatttctccactcctttgcccgagttgattgacaactgtgttcagtctgcaccaattgacacaaggagagctctgtacaagaatatagtattatctggtggatcaaccatgtttaaagacttccacaagagactccaaactgatataaagaagatagtggatgaccgtgttgctgcgactaatgcccgtcatcgtgtggaagtgagacctattgaagtcaacgtggttgcccatccaatacagagttacgcggtttggttcggggggtcactagctgcatctaaccctgacttctttgagttttgccacacaaaggaggactacgaggaacatggagccagcatctgcagaacaagccccgttttcaaaggaatgtactgattttttcctcacgacccatcctctagttggtgactctagttggtgagctcatttaggtttcttcgacagaatatagtcaattttgattcttttttggtgcgttccaaccattgtcgggccaccctgattaggtatgtagctctgtttgtactagttgtttgttttgtgttctgcgtcgaatgttgtgtatagccaacagtttggttcctgttcgaggtgcttcattgtagccagaacctcggacagtttagaggaaaaatatttggttattcttttacattagcttgttcagacagatttacgggactcttattaataagaagtcaaatttaggactc

SEQ ID NO: 32984 - DNA, 1780 bp, Zea mays
  Clone ID: UC-ZMFLMO17048G12_FLI
tggaagcaaagacaaaaaggtaagtacctcaatcaatgacaacaatgcatctcgtgcttcagaggagaatacccctgctagtgggtcgggcgaggcatctgaagctttacctgttgagactaagccgcgccctgtattgaagcaactatgtgaacagatggacaccaaaggccttctgaaatttctttcagaaaactgtagaaaacttgctagctttcgtgatgaactttctgttgcactaaaatgtgcaactgatcctgcacgcttcgtgcttaattccctggagggtttcttcccaccagaccaaactaattcacctgggagtaaacataatgcccttgaggtccagcgcaagagctgcattcttttaatggaagctatagcacctgcactagggatgaaggagcctggtggcgacgacccttggagctctgaaattaaggagcaagccaaggaaattgccgaagagtggaagagtaagttagctgagattgacctggatgcttctaatggctattcattggaggcacaggctttcctgcagcttcttacaacttttaatgttgattcggtgcttgacgaagatgaactatgcaagatcgtagttgctgtctctcgtcgcaagcagactgctgtatcctgtcgctctcttggtcttaatgagaaagtaccaggtatcattgaggagttggttaagcggcacaggcaaattgatgcagttcatttcatacaagcttttgggctttcagagacattcccccctgcacctctgctgaagacatatgttgaggaacaaaaggatacaattgaaaataatggcgatgcaactgcgatctcattaacggatgaccccaaatctagggagctaattgctttgagggctgtgattaagtgtatcgaagagcataagcttcagaaggagtgttcacttggacctctccagaagcgtgtttctgagctgaagcccaagggtgagaaaaggtcatcaagtgatgctgggcgtacttatgcaaagaagcctcgaggccctggcatttcatttcctaggagacctgccggttctgttggttcagctgctcgcaggcctccatttccgggctatacctggcagcgtgctcctgcgccgatgccctcccgtggtcctgctcccgtgccctcccgtgcccctcttcctgcccctcttcctgatagatatggagctgctgaccggtaccattacacaccaccagccccagcatacgactctggtgcattttcgtcttacagtgaacctttcagcgccccaaaaccattccagtacactccagggtcagtggcagcatcatacaattcaagcccctataaagtcgcttatggtggcccaggagcaccagtcagaagcacctatccaggttatgccggcgcatctgggccggctgcttccagcagctatgcaaattatatgggatccgtatatcgccctccccagcaaccatagattcgactcctccctcaaaaatgttgtgctggtgatgcaagacatggaaaccagtccctcccatccaactcccatggcggagatgtaaacttgagctattttcttgtttcatcgtccacaacagtgggttttggaggtgtatactgatgctctcatgtccagctacatctacatgtaccttgcactcttgtttgcttttagctgtgcttattcctgagtcgttgaatgttttatattttctttccacaagtctgtctcatgtagggaactgtctcatctaggaatataactcctttacttgct

SEQ ID NO: 32985 - DNA, 1053 bp, Zea mays
  Clone ID: UC-ZMFLMO17050A04_FLI
gaccatatccccacgcaaaggccaaggccaagcgagacagggagggaggagaagtaaccaagtgtctcaagcaaccctaccgcccgcccgccggccgcttcatttcatttcctccactccatactcaccacgacacaccgccctcttcccttctcttctctcaagaaagaaccagctagcgcgcgcgcgcacatacaagcctgaagcctccccatacccgccatgtctgcgtcgccggagttctacaagccagcgccgccggcgttctcgccgtgcagctcgccgctcctgctgcacggggcaggggcggcggtgggagcagtagccgaggagagcgccgccgcaaccgtgtcgcaggatgaggaggaggactaccgctgccgtacgccgacgggcggggagagccaggtgaggccgccagggacctgcccgccggcgccgcggaagccgcgggcgcccgcggcccccgcgccgtgccggaagcgcctgttcgaggtggaggtgttcagcctgcggcttgaggagctggagcgcctcttctggcgcccgcgccccgcggcgccgccgccgccgccgcccgctcagaagaagcgccggagggtggcctgcccggagcccaagaagagatagtagctagcttggtgtggcagccggtgctagtagtagtagtagtgtagtacaggtcgtgtagcagcggtagctagctaggtgcagagccaagtggttttggcttggatcgatcacatacagcagcttattattaggatcggaggtccatggtaggggggtgcttaggagaggactgctgtacttgtactgctacagctcgtcggcacatctctctagctagtttcctctatctatagctcacaatcagttcctgtagttgctagatgctgttcagtgtgtgtatgtggtgatgatagtgtcatggtgtcaaaaggtgtagcgcaatactagctagctagctagctgtaggcaggagctgcatgccctgaatctccattcttccatgtagcccctgtgtgtaacgaagaagctaagctcacttgt

SEQ ID NO: 32986 - DNA, 1515 bp, Zea mays
  Clone ID: UC-ZMFLMO17050A11_FLI
gtgatgtcaagggagttgacgaagctaaagctgaacttgaggaaattgttcactacctacgagatcctaagcgttttacatgccttggtggaaagcttcctaaaggtgttttgctggtgggaccacctggaactggaaaaactatgctggcaagggctatagctggggaagctggtgttcctttcttctcatgcagcggtagtgaatttgaggagatgtttgtgggtgtcggggctaaaagagtgagggacctgttcaatgcagcaaaaaaatgttctccttgtataatattcattgatgagattgacgcgattggtgggagcagaaatcccaaggatcaacaatacatgaagatgaccttgaatcagttgcttgttgaactagatggctttaagcagaatggcggggtcattgtcattgctgccactaacttccctcagtcacttgacaaggcgcttgttaggcctgggcgcttcgaccgtcatattgtggttcctaatccagatgttgagggccggcggcagatcctggaggctcatatgtcaaaggttttaagagctgatgatgtggatctgatgatcattgcaaggggaactcctggtttctcaggtgcagatcttgcgaacttggtgaatgtagctgctctgaaggccgctatggatgaagcaaaagctgttacgatgcaggaccttgaatatgcgaaggacaggatcatgatgggcagtgagcgcaaatcagcagttatatctgatgaatccaggaagattactgcgtatcacgagggagggcatgcccttgttgcgatccacacagagggcgctcaccctgttcacaaggctacaattgttccgaggggagtttctcttggtatggttatacagctcccagagaaggaccagcatagcgtttcaagaaagcagatgctggcgaggctggatgtgtgcatgggaggaagagtggctgaggagcttatatttggggaaagcgaggtaaccaccggttcctcgtctgacctaaactacgcgactaggctggcaagagccatggtgaccaagtatggtatgagtaagcgtgtgggtcttgtttcctacagtgagaatagtgttagcggccaaacaagtgtgattgataaggaggtgaaggaaattctggagaaggcgtacaataacgcaaaggcaattctgacaactcacgataaggagcttcatatgctagcgaacgcccttcttgagcatgagacactgtctggagcgcagatcaagaaattactgccacaggtggacaatagtaacaataagcagaagaaggctgccaaggtgccgcagaagacaccggcagccagagccaagggagttgcacaagaggcggcagggaaagccaagggagttgcaggtacagcagcggtggcacaagaagcggcaacagcgaacaccgagggaggtgcaggtacagcagcggtgccacaagaagcggcaacgtcggtggcagcgaaagccaagggagttgccggtacag

SEQ ID NO: 32987 - DNA, 2006 bp, Zea mays
  Clone ID: UC-ZMFLMO17050B08_FLI
gcgcaactggccctcgctagatgtagctggggcgctctctaccgccgctagggtttctaccgccgccgtcgatgggcgccctcaccgacagccggaagcgtctctcggcggaccactgcctctcggccgaccaccgcctcccctacccctcctccccgccgtcccttacccctcccttcaagcgggccaagctctccccaattcctgaacacgatccctccacctccgatttcccgcctatccgtccctctccccaaatcatccactccgctgcggcggcatccacctcctccacgccgggcccatccccctcttctaccaccgcttccaccccgcttccgcacaggcgccgactcccaccgccgccattccagcgctcgatccacggcccccagcggatcctccgcgtcttccagcttggaggggccgcacgggcccacgccgccggccactcatggttctccccgcaatcacccccgcctcgtcctctcggactccagcagtacgttgagctcgtcaacagcgtcacccacccggcgccgcccactcccgccgccattaccaatgctacgaggcaggcggaggcggcgcccttcgaggtggtcgccatcgaggaggatgaggacgagaggaagcagcagaacgaggaggaggtgatggggagcgtggtagtgagaagggtgccaccatacaaggagctgtacgaggcgtcgcgacagaagcgggatgccaagctcaagacgctcgagtttgaggtgcggctcactgagcagggccgtcttagccttgagcggcttgccgaggccctcccgcgaattacgccaaagaaggaggaggtgcctgaaccttttgttcctcttactgatgaggatgaagaaatgattcgtcaggctcttcatggcaagaacagacatgagaggttagcagtacatgaaccttcaaatattgtgataacgagggagatcatgcagtgcttgaataaccaggagtggctaaatgatgaggctatcaatttgtatcttgatcttcttaaagaaagggaactaagagaaccttgcaggttcttaaaatgtcatttcttcaacacctttttctacaagaagtgggtatgattataaagctgttagaagatggacaacaaaaaggaagttagggtacagtctaattgattgtgacaagatatttgttcccatacacaaggaagtccattggtgtttagcagtcatcaacatcagggacaaaaagtttcagtatctagactcacttggtggcatggacatgaaggtcttgaatgtcttggccaagtatattgtggatgaggtcaaagacaaaagtggtcaacagatggatgtgctcttatggaagcaggaaggtgtcaaaaaccttcctttgcaggagaatggatgggactgcggcatgtttatgctcaaatacattgacttctacagcagagatatggacctcattttcggacagaagcaaatgcattacttccgcaggaggacagcgaaggaaatactgagtttgagagctgaataaaccttggaggacatcataagtcattttggctatgttcagaattgttggaatatgtacttaacaaatgggtgcagcggcttaaaggtatagcactgagtgcaaggaatttggaagttctccggttgcacaacggcaccaagtgatggccaagcaaccggttggaattttgcatgagcacagtggtgtctttaagttttgccagtgagcatttgcagggcataaatgggtggaatgaggcttctcctggcattagattgcaatgagattcctcagagacagcgggattatggatgatttgaaactatatatagcagtgatcttgagcttcctgtgaggtgtgagctgaccaagtgagcaatcaccggtttaggctgtatgcccagcttcggtgcagagttttgtataatgttcaaatcccttttgttctttatgtttgtatttattttttaaatagtgctaattccctt

SEQ ID NO: 32988 - DNA, 1315 bp, Zea mays
  Clone ID: UC-ZMFLMO17050B12_FLI
ttcctgttcctacgcgccgagatcgcgtgtagctttcccagctcgtcgttcttccctgcgcgcgcaagttctctgttgggcgcgcgcgaagctctctattcgccatcgaatcgcctgctcgctgtccgtaccgacgaaatttcctcgccgtgcgttctggcatcggctgctgccgatctcgccataaagttcacaagcgctccttgctcggctcatttcgtcgtgggcaatttttccacgcctcaaatccgtgctgcttgccccgtgtgcgctcgctcttcgtccatcgggtttcgcgcgtgttcacgtttgctgtcgagtcgtcgaacccgttatcccctgctcaacctcacttcgccagctcgccctagatataatcccgtcgtcgttcgtgcatccccaagaaatcccaagaatcgggtgaagacaaagctagccgagtggtattcaccaagtacgcgacaaaagctcgaacatcctgcgcgactcaagttcggttcgtcaaaattatttagccaaggagaagatcttcatcaattgattaccgaagaaaagaaggcccctggatgacgtcaaccggaacccgtaatcgtgcttgcgactatcgcgtcgaattagtcagggtaagttgtttcgtattcccgttaattaggtctataaatagagtaaatggaattattgatctcaataaatgttattaatttagcatgcgtatattgtgatgatcgatttagataaatcagtaaatcaagtaattaagatacatagtttagagagttaataaaaagctaggaataaaaatagattttctagtgtaatatgtcaatttggttaatggatgtagtcaatgccctgctgtgatatccatggtgcttaatgcttggttttaaagtgtttcatcctttttagtgtagattatctatactatattcgtgctcatacatgtgcatcgtgcatctcatgaggtacgataaataatcacgtgacgcggaagacgacccaagttgaccccaagcgcgggctaatccgcaggctgaagctgatgaatcaacctgaagacggttaaatcaagcaagtgctcggtcgaaggacactcgtcaagcggacgtcacctaacaacactaacctagtgttactcaggttatagtcttgtgctgctattgatggtgttaagtgccggtgggctcggccttcttatataagtatactccgtctttaccttcttattgaggatggtcgtttgagctagcatatatttcaaacatatacttttgtaatcactccgataaaataatataaaatttttataacttgt

SEQ ID NO: 32989 - DNA, 642 bp, Zea mays
  Clone ID: UC-ZMFLMO17050D05_FLI
gcagaactacatgtgcaggttcacatgatccctccatccacctttataaagtgtatttttatctgaacataatcccttcataaggtttgaccaacaactatgtcaaattatatgcttgtctagtgtacagaagttatatctatagattcatattttaaaatgcttttgtatgtttttgatcctatagcaattaacccataatataagagaaattaaaggctctatgcatgcagcactctctggatggattactgttgtattgcttcctgccacacggctacctgaatacttgggtcaatttcagtggcagggcagatttattctgattatatgtttactggaattttgacaggaccttctgaggcgagacatcagcaggcagcatggtggtttctcattagttttagtactggtggttgctattctgggaatactgctagggttcctcatgaagagatgagcgcatgtaatgacttatcttgtctggcttttctgaactaaacaaaattgtatgtgctctgtgtgcgcttgttgttgtacaagtcagtggtctgtttatcataggatctgatgcctattgtaattttctgattcatattataaactttagccaatcaataagtcatagttaccaacaccagc

SEQ ID NO: 32990 - DNA, 1424 bp, Zea mays
  Clone ID: UC-ZMFLMO17050D11_FLI
caagcgcactctagcaatggcttctgaggttgtccgccctagcgacgccgagctactaaaggcacaagccgacatatggcggctcagcctctcctacctcacgcccctgtcactgaggtgcgccgtggagcttggcatccctacggcgatctaccgccatggcggggctgcctcagccgctgagctggtcacggcgctgtctctcccctccactaagctgccgttcctccgccgcctgctgcggctcctcgccgcgtcgggcgtgttcaccgtcgacaagcagagctcggaggaggagcggtaccgcatcagccccgtgtcctacctcctggtggacggcatccctcacgaggaccacatgaaccacaccgctctggtgctcacctgcacctcgacgcgctacatcgaggcggggatagggctggcggagtggttcaagagggacgtggtcacgtcaccgttcgaggagctgcacggggcgactctgttccacgagagcatggggagcctcgacgcagatttccacgacatggcgagcgaggccttggacgcccacgacaacttcggcatcgagatagctatgcgggagttcagggacttgttcgaggggatccagtccatgacctactgctgcggtaacttcggtgatgacaagggtgccagggccattgtcaaagccttcccacacataaaatgcactgtgctggcccctcccaagatcattgccaccaaaccggccgatggagcgatgataaactatgtcgaaggtgacatgttcagtttcattccacctgctcaaactgtcgtgctaaagcttgtgctgcaccacctgaccgatgaggagtgcgtcaagctcctggctcaatgccggaaggcgattccttcacggaaggatggcgggaaagttataatcggtgatattatgattgaccactctgggcctatgctggaaactcacctcctgatggacatcggcatgatgaccatgacaaaaggacggcagagagatgaaaaagaatggagcgagctcttcaccaaagcagggttcagcgaatacaagatcctgaaggaatttggagctcgtgttgccttcgaagtctatccgtgagattgcacctggactatacatatatatttacatacatatatgtatgtgtgtgggtgccttgcgtggcttggcgtgatgatgtcataaataaagagggtgggtgtgcttgcggtattcatggatggccatggatctgagcacatgacgttggatgctttcttaaggctctcgtggatcttctatatttggaagaagctgtaaaataatatatcgccatctagtgttggcgttggcttgtatgtactttgtacctgctttgttattttgtgtaatatcgagtaacctaatgtatacttgcttactactatcactaccg

SEQ ID NO: 32991 - DNA, 782 bp, Zea mays
  Clone ID: UC-ZMFLMO17050D12_FLI
ctctgttggacgaggccatggcgatactctcgatactgtccagtcaccccgagggcaaggccgcgatcggggcggccgagcccgtccccgtgcttgtggagatgatcggaagcgggtcgccgaggaacagagagaatgctgcggctgtgatgctgcatctgtccgtgcagtccgtgcatctagcccgggcgcaggagtgcggcatcatggtcccgctacgggacctggccctgaatggcacggagagggggaggagaaaggcggtgcagctccttgagcgaatgagcagattcctggttcggcaacaagagggtatcagctcccatgagcagatgttggacgagctcgaacgtcaacttgatgccttcggacctggtgttacagaggccgatatccttgaacaatcgggacttctttaacccacggttgcatgatgatgatgatgaatctatcttcgccacaatactatcaaaagaggtcttcttttggggatagtactaccaaaagagtttatgctgaaccagagttcttttatggcgacgttctatcggtactgatgcttatctgtccgtccggtttggcttcttccatgcttgtgtgctgaagctcccatcgctccatcagtttctgggaacgtaaggtagcacataatgatgagatgtgtacagtctactatgtatgctgctccagacgtcatatagctatgatatgagtagaaatgtacattttttttcactatggtactataaaaatgaggagttttagcggcggacttgatcagt

SEQ ID NO: 32992 - DNA, 727 bp, Zea mays
  Clone ID: UC-ZMFLMO17050E08_FLI
cgtcatcaagccagtcatccccgagcagtacctcgacgagaagacaatcttccacctcaacccgtctggccgcttcgtcatcggcggacctcacggcgacgccggcctcactggccggaagatcatcatcgacacctacggtggctggggagcccacggcgggggcgccttctccggcaaggacccgaccaaggtggaccgcagcggggcctacgtcgcgaggcaggctgccaagagcatcgtcgccgccggcctcgcccgccgcgccatcgtccaggtctcctacgccatcggcgtgcccgagcccctatcggtgttcgtggacacgtacggcaccggcgcgatccccgacaaggagatcctgaagatcgtgaaggagaacttcgacttcaggcccggcatgatcatcatcaacctcgacctcaagaaaggcggcaacgggcgctacctcaagacggcggcctacgggcactttgggagggacgaccccgacttcacctgggaggtggtgaagcccctcaaggcggagaagccgtcttctgcatgaggcgcctcctctgtttcggaagaagcttttggtctggtctgcctgcgctctatcatgcttttttatggctcctacgtgttgtgattcttgatctgccccttgcttatcatttgtactgtactgtcactgtcctaataagtggtacgtgtgcggggtcgtattgtgtctgcttattcacct

SEQ ID NO: 32993 - DNA, 1887 bp, Zea mays
  Clone ID: UC-ZMFLMO17050F06_FLI
acgggagagaggacgttcatttccgcgtcgtctccgcccgcagccggcagccccaccacccaccacatggccgccatgccgggtggggcccacggcgccggcgccgcggacccgatgcaggtggaccagccgctcccccctgccgccgcaggcacagcacacgcccccgccgacgccaagggagtgatccggtcacaggtcatataatctcgacaaccattggagggaagaatggagagcctaaaaggactatcagctacatggcagagagagttgtgggaactggatcatttggaatcgtcttccaggcaaaatgtctggagactggtgagactgttgcgattaagaaggttttgcaggacaagcgctacaagaacagggagctacaaatcatgcgatccatggatcactgcaatgttgtttccttgaagcattgcttcttctctaccacaagcagagatgaacttttccttaacttagtgatggagtttgttaccgagtcattatatcgggtgttgaaacattacagcaatatgaaccagaggatgccactcatttatgtcaaattatatacctaccagatatttcgaggcttagcctatattcacacagtacctggagtttgccacagggatgtgaaaccacaaaatcttttggttgatccactgactcaccaagtgaagatatgtgattttgggagtgccaaaatgttggtcaaaggtgaagcaaacatatcatatatatgttcacgttattaccgtgctccagagctcatatttggggcaactgagtacacaacatcaattgatatttggtcagctggatgtgttcttgctgagctgcttcttggccagcctctcttccctggtgaaagtgctgtggatcagcttgttgagataataaaggttcttggtactccaacgcgcgaggaaatccgatgtatgaatccaaactacaccgagtttagatttcctcagatcaaagctcacccatggcacaagattttccacaagcggatgcctccagaagctatagatctcgcttcacgcttgctccagtattcaccaaatctaagatgcactgctcttgaagcgtgtgcacatccattctttgacgatttgcgagaaccacatgcgaggttgccaaatggacggccatttcctccactgttcaactttaaacaggaactagcaaatgcctccccagagctcatcaacaggttgatcccagaccatgctaggcggcatcttgggctcacattattgcccgctactggaccataggcgaaggctctatggtggtgcttcgttgtgcggaaggcaacctgcattcaaggtgtagaatctgacaattattggaaggtcaaacatgagctggcgcgtaaggagaggtggtttcaaagtgagcaggtgaagctatatggattcgcatgggtctgttcgagactattcactccactttcaacttcgccacccaaataaaaacacggttctacgaactctgcttctgctctagaaaatgggtaaaggtcaaagcagtgaggacacgtgtcatctgaagagcaagttggtacctggaatctcgagtcccagaacgagaagaagaggtagaagtaactgaagagcaagtgcaaccacctttggacactcaggccgggaatagtttctacttcgacatttgtggatccgagcctgaatcacctgtaaacgaaggtcaagaacaggtactgcaggatgaagcgcgtggaggatgctgcgatgtgttcgtgagaggtctaggtcgtcgtctcccagtcaactttgggttgctggaccgttgtctccttataatgtaattatttattttgtatagaactcctgttatatataaagatgtgacattcgatcc

SEQ ID NO: 32994 - DNA, 987 bp, Zea mays
  Clone ID: UC-ZMFLMO17050G01_FLI
agcatactgaaaaggtgtaactaataatcagccaatcaaggaaaacacacctgactattgagccactgatgtggggtttcattatatcggggcgtattggaaaccttagctaatagtgttaattagatatctccacaacttagttccatgtcaagaagctaagcagaaattagttttaattctattgacgtactatatattactttggctgctgttaccatcttccatgtcattgttctgttctttaaattatatagtatatgatatctataagaacttgaagtttgtataggggaacgagtacgtggcaaacttctgctgctctgataaggttcaatttattaacagttcttctgtaaagcatagaaacgcttacttttaacacagaaaatcaatgacaaaggtctggattttttatgaaactgaaaatggagataggagtcaagcatttataatgtaactgatgctttgcctgttgttatgcagcttgtggtgaacagtacttatttatatcatgttattaggttttttttccattttcctcaaaattctattgggttgtgtatggcaggaacagaaggagggcagtgaagctcggtttccttgattgctagcagtattatcttgtgtcatagtggacccgctttcgtccagcggtggtgccaatatttagaagcatcacctggcctgggcagatgtagtgtgcgtcttatagtctctgctttagatgtgcaatgtaacgaagctttagcacagtatgaactagaccgcataaaagaatccatgtccattccgccagtaatacgagcgggttggtatctgactccttagagtcaaaagtctgtacaattgtatcgtcgctccaaagcaaaaaaaaacaataataatgtgctggagaagcggcgatgacttcacattgtacacctttaccagctggaatttgacagaagtttggaaactgttcttgtcaattgcaaacaaaaaaat

SEQ ID NO: 32995 - DNA, 2357 bp, Zea mays
  Clone ID: UC-ZMFLMO17050G08_FLI
agactgggagatagagagaggagagggagggtttcctcaaagagaacccgaacccaaacccaagcagaaaacactagcgtttcctcaccagggcgtccatcccagcagccatggcgatggcgtacaagatggcgacggaggggatgaacgtgaaggaggagtgccagcgctggttcatggagatgaagtggaagaaggtgcaccgcttcgtggtgtacaagatcgacgagcggtcgcgcgccgtgctggtggacaaggtgggcggccccggggaagggtacgaggagctcgtggccgcgctgcccggcgacgactgccgctacgccgtcttcgacttcgacttcgtcaccgtcgacaactgccagaagagcaagatcttcttcatcgcctggtaaatcctgggccactcgccttccattccccgtcgatctctctctctctctctctctctcaaacaaaccaattcctcctcccctcctcgtaaaatctcgatctatctcttccctgctataatttggttgttaggaaaggtaataccgctaaacatgggaaactgaagcgcgaagaaccgattcattcggtacggggatgctggaacgatcaggtccaaaaacgtggtatgcattcatgtacagagtaaccttgccacggtacactgtccagaaaggcgtgaacccaacccacacggtagcagcgccagccaactgcccgaaacttgtgtatgttaacctgccaagtttttctgtggaagcatttcacgcagcagcttgaaagatgcgcaggcgaaccatagagctacggcagccctggcaccaaatccccgttcgtcttttgcaccgttggaacaaaacctgggtttcgtgacagtagtatcgtaaataacatgacaactggaactgctgtcggtccgattaaaaatgcgacggcatcttgcatctgaaaagtcagcacgatctcgaagctgtttggcaaatctgacagaatgcgcatattagactagcttgtctaaaggatttggatttgaattcctaccccatagtagacgaaggcaattaggcaatctagagcatgtcctgccgtttgtctcaaggaaagcggacctgtcgtcttgagccttgggaggcaccacacaaattactcaattcacaattgagtagaaatctacggatccaatgttcaatcagtgccgcatccttatctgagaaagcaggaaggtgcgccacgctttttcggttatttctccacaggaaagagagagaaaaaaagttgcttgtggcactcatcgccccgcaccccgctgcctttagtcggtcgagatcatgacggggaccaaactttcctgatgagcagcagcagcagctctctggccaggcctccctttcgccctgtcactcttgtctcgagcgctcctctagtctctctacacgaatttttttttaccaaagcctccagtgctaaggacgccggttattttatcagatctgatctagcctgaatccacctgttgtcaagatccgtcagcccaccgaaagcaagcatcgcccacgatgacagccataggcaaaactgcccaatccgccattttgtgagccatacaatttctttttttataacaaggcgtcagcaggagagcaactatatttatatacatcttccctgatctgtccctgtccggcaacaagaacagcaccaatcaggatctcatcactacgagtaatcggcacgaccgaattatttaactactgttttatcttgtcaacttgctccagcatccaattgttaaagcactactatggtatggctgagctggcgactgctgctgtcttgctggtcaccggcggcgtcgaggatcagggccaagatcctgtacgcgacatcgaagcaaggcctgcggcggctgctggacggggtccactacgaggtgcaggccaccgacccctccgagatgggcttcgacgtcatcagaggccgcgcgcaatgaggcccgcgctgcgctctgctcctatttacgtacttacctgtgcgggggcgtgttctcctactactcactgctcagtagtcatctgcgttcgtgtgtgtgtgtgtgtgtgtgatccgccggatgctaattggcgtcggtgtgctcccgtagcgatcgatgcggccaatctgacgaggcttcgcgtgtgtttgctttgctattttcggttctcgggagagatggtgcaggcgtggtgtgttgatgttgatgggtggagtagaagctcaggggagtggcagcggactaatgaaacgtccacctctgcgacgtagaattccactgaaaaaatgctccagtgtaccataagctgcttcagatttgatcgtgttttctctcc

SEQ ID NO: 32996 - DNA, 538 bp, Zea mays
  Clone ID: UC-ZMFLMO17051A04_FLI
ccaagatcctatccaaggtaatcgagtactgcaacaagcacgtacatgccgccgccgccgccgccgccgcctcgaaggccggttccgacgacgtgggtgccgcctccgccaacagcaccgccgcctccggtgaggacctcaagaactgggatgcggacttcgtcaaggtcgaccaggccacgcttttcgacctcatcttggctgttgctgacatgatcaagggcaagacaccagaagagattcgcaagaccttcaacatcaagaatgacttcacccctgaggaggaagaggagatccgcagggagaaccagtgggccttcgagtaaggaggtgctggatctattgatgcctaagtttcgtggtgtctactactatgtctactttatgttgtcctaatggttgtaagtattttgggagtcactttgcttgcgaatgtctcgcgtaagacttatgtggtcaatggtcggttattaacttattaccatgaaagcacttcgtctgctgccctaagaggtttagtcccatttgcattataacc

SEQ ID NO: 32997 - DNA, 675 bp, Zea mays
  Clone ID: UC-ZMFLMO17051B01_FLI
ggcatttctcccctcatcccgttcctgaaaacggatctgaggccgtcgtcttccactgggtcgcgctcctgttcgctccgtcgtcagaaatgcaggcagcgccagcaggtcttgcttcacgctcctcgcggatggtggcccctccggcccgcgccgatgcagttgaagctccttccgaagcacaaagattaaatagagtttggaatggtcttttagacgccattagacacatgcaagtctcagccgatgagttgaggaggttgaccagacgcaaccatgtgcctgagtatgtagagtacctacgcaaaaatagattatgaagcccatgtgagtgctgttactgaaattgcacaaggtctagaccacgtgagcacagatttggcggaagttcttattggtccacaacctcttcttgaagattatgaagcccttggtttgtacgatgatttccaatgcgatggtgaagatatctctgtggactcggatgagatcaatgatcgtcgtctatcgcatatgaacgagcgtatatgagatatttgtttgcgagagagttcagtttgccattgatgtctgtagcttatgaagcccttagttagttgccactgttgttcctggtacttgtatgaattgggttatgaaaatgaagagttgtgttatgagttgtattttgtgatc

SEQ ID NO: 32998 - DNA, 1127 bp, Zea mays
  Clone ID: UC-ZMFLMO17051B11_FLI
gaggcctcggctaagcttgagcttcccctccctcccctccagcgctccagctcccctccatcctcggccaaaaattctgcggcgagctccgatccggtccgactactaacccacgccgcagaagccgcgcgacctgatcgcgcgggggtcgaggagaggggaagcgcggcgccgcggttgcctgccaccgtaccgccgcaggagaaggaagaggagcccgtatccctccgccccgctgcccgccggaccgatggactccgagcactggatctcgcgcctggccgccgcgaagcgcttctacgcggcgcagctcggccacagcgatcgggccgggatggatgagctggagatggacgaggaggtcaggcccgagttcccctgcccctactgctacgaggaccacgacgtcggatccctctgcgcgcacctggaggaggagcacccgttcgaaccccaagccgcggcctgccctgtctgctctgagatggttacgaaggatatggttaaccatattactacgcaacatggatatttattcaagaatcgccgccggctgcgcagattcatcattccaggcagccaggccctctctttgctgagccgagatctacgggaagcccacttgcaggtgctcctcggaggaggcggacagagatccagcgacaacagcagcagcagcgccacgaacatttcggctgatcctcttctgtcgtcgttcggccttggcttccctacctcagacgcggagcaagcatccaagtcgactgtttccattcctgatgatgctacgacggtgaaagaagcgcccgctcaggcacggaagctaagtatcgattcgtcgctcacaagtgaagaaagggagctgaagcggaagcaagcccgcgtcagagccacgttcgtgcaggacctgctgctctctactctattcggcgactgatgacgaaccagagcgagcctggtattatcactggaaggtgcagagttgatgtgggcgtgatgtatctttctaagttattgtaagccggtctctgtcttcacaactgacgatctgtgtgtggtacgcaccacgcacgcaagtcgcggttgtgcgtgtacgtctgaactctggagcattggtttgttgtacc

SEQ ID NO: 32999 - DNA, 2269 bp, Zea mays
  Clone ID: UC-ZMFLMO17051C08_FLI
gcgtgctgtgctccattggtgagttccggtagcgttcataagctggcaggcatggttttccttacaagaacttgaagcacataaaaggggaactctttcctcaaagggagtcgatcagatatattatcgcatgactgatggagaacaatatggctgcaatttttcatgtaaagatatataacctatatggaaaaaacgatactactttaccttgttcctctctagcaggttcttgcagagacttgcaataggcaagcaaggaaaagggagttgcgtcgagcgtgagcgataggggggggggggtaaagtggtttaatagctgcccgactcgctagacaccttttagtgttcacatgtgttgtaggatataaaggtttttgcctagcttctaagttctgaattttcatcatgtaggtcatatccgtcctctgctgaagacaaaattcgtgaggtgtaataactttcaacaatgttgttcacgcctattgcagaattggatcttaaaagtacaaatgctgcaataagagtgcgtatcattagaaagtgggaattccgaggcgcaacaaatgatgggcctttgcgccatgtcaacctcatcttagctgatgaacagggcacagccatccacgctgagattcaagcccccctagtagctgacaaaggctcactaatccaaattgacaaagtctatgagctcaaacgctttcgtgtcactccatccagaaactattacaaacctgttgacaacagtatgatgatacaattcactctttacactcaagcaaagttagtccaagatccaccacccacctttccaagatacgcctacaaactcacatctttcgaaaatataggcaacaatgttgacaataaaacgtacttgatcgatgttctaggaatcttgacagaaattggctctttacaccatgttggttacaacaactcaaatatcatcagagacatatttctcaaagacataaacaatacctctacaaaagtgacgctttggggacaccaagcatctagcttctctgtcgacaacaactgcgacgagaatgataacaaacctgttgtcgtactgtttgttggatgccttgctaaacgattcaaaggagaagcatatctaagtgccacggcagcatgtacatggtacttcaacccagacattcctgaagcccaggtgtattacagcaagttgctaaacactaagcttcaaatgatacgccctcaagcgactgagcaagaattccaggcttctcaaacactcaacatcgaagacaggaccattgaacaactacttcagctagatccggatatgttccctgaacaaggtttcaaatgcactgtcactatatcacgcctcgtacaagatggtagatggtggttcccatcctgtatcaagtgcaacaagtcttcatcccagacatctactgggtaccaatgcacaacatgcaatgggacagaaactgagttcagatacaaactcagcttcattgccactgatggaacatccgaagcagaattcttttgctttgatactatagctaaacgaatagtaggaaaatcttgtcaaaccctttttagcacatcagatgtttctcggggtcctcctccagacctagctgccattgtctccctcaaattcacatttgcagttaccatcaacatgtctgcattctctgtcacaaatcgagtcttttctatcctttctgtcctaacaaatcatggaagacaagcatcgataccatatgccacacaaaacctttcccaacaacagatgttaacacaagacaacacacttgatgtcaaaaccacacaagaatctccagcaacatcgtttgccaaactatccacttctaccaaacaagaaaatgtgccacgacgcagacttacgtattctgagatgctacaggacacaaatgttgatgaacaggtttcagctgaactcaataaagacagcctcgcgtcacctcctaagaagatcaagagtgcacagctaggttctacatcaacgatctgatgatgttctcatgaaggtattatgacgagaatcattacttttggagcgaatcatcacttttggagcgcaaatgcttttgtgtatatataaccaaactgctgaaactttagcagtgctgtagatattgaacagatctccggtcgttgaaccgctaatgatgtaatatataaatttgtacaaacctacgaacaagtcggttgactatgcaactaccgtacctgctataattatcacctctgcattgtcttt

SEQ ID NO: 33000 - DNA, 1657 bp, Zea mays
  Clone ID: UC-ZMFLMO17051C11_FLI
gtgaacctcctcgctgacacgtcgccccgcccccgagccgacttcccgatgccaccctcgcacaagatcccaatgtggcaatggcgaccagcgacgggcggtcaacgccaccgcgccgcctgtgaacccatggtgagaagtgtggtatcgatctagagccgaaggacttccccaacaccccttcctccatcggcgtgacatcggccagctcatctgcgacgacgaggcatcttcgaccgacttcccgacaccccattctccatcaatgcggctccagtaccccttcctccatcggcgcatcaacatccaattcatctacgacgacaaggcatcttcgacaaaccacgccctactacaagtggtgtcagtccatctcagccgatgtcgtgcgcatgtgagatctagggagaggaagaggaggaagggttgtggggaccgagggtgcgagatggcggattcacttgcaactacaagaaaataaagagcgagagatttacagaaacctccagagccgcggaggaggaggagattaggaggatctctacggcgctgacggattagttaaggaacgaaagatcacatcgtgtccggtaaccagattcagatgtgggcaccatgcgtgggtgcagggccaggccgaggtgaaagagattcgacgattgagaatacatcaaagaataaaaatgtggaactcggattttcagatgaagagcgtgaccaagaacttcctgattttccatcatttattccattcttacctcctctgagtgcagctaacctaaaggtctactatgccacacgtttcaccatcatagttgggataatggtgttcgatggttttcatgcaccaatcaagttaaacttggtctaggggcacatcttatgaagactccatccgcagcattcatctgtcgatgtagttgagaagtgcactcaggttatacatccagtaaagagcaagacatttgaaagcttatgggccagctgtgttgctattgatgcaagcgaaagttggctgatgaattctctatgcctacttctagagtgatgttcaaagaggttgacgctccttcaccatccccagctttgtgaaatggaccacgggtagccatttaggatgacaaagccacaagggtgtccttcatcaaggctatgctagaagcctcagacttgtgtctgaggaaaattcataaaaatggtacacagaaggctgggaagaaagtggaagaggaatttagcacttgccctctgtcggtcctaatgatgagcgttaagaacaacaccaagatactgaaagcaaacatggcttgttcaatcgggcagcggcagcagaggggtggggccaatgacggagacggagaggagaacccatcgatttggtggcataagtgggagctcatcgaggccggtgcgtttgggcaggtctaccacaggatttatttgcccttctagggatcagcagatcccacacctattacatgatctgtccttctagaatagaatctgctctctatcttctgaaccagtactgccttcttcaatatcagccaccggccggtccacctcttcaataatcgtccttcatcgcccttcagttgtgagttgtgacatactatttatattcggatctgatctattacaaatatacatgcatatt

SEQ ID NO: 33001 - DNA, 1036 bp, Zea mays
  Clone ID: UC-ZMFLMO17051D09_FLI
caaaggctctggcagcctactactttggctcagaggaggctatgattaggcttgacatgagtgagttcatggagagacatactgtctccaagcttattggatcacctccaggttatgttgggtacactgagggaggccaactaactgaagcagtccgtcgccgcccatacacagttgttctctttgatgagattgagaaggcacatcctgatgttttcaacatgatgcttcagatattagaagatgggcgattaactgatagcaaggggcgcacagttgacttcaagaacacactattgatcatgacatctaatgtgggaagcagtgtcattgagaaaggaggccgcaagatcgggtttgaccttgactatgatgagaaagacaccagctataacaggatcaagagcctgaccgaggagttgaagcagtatttccggccagagttcttgaacagattggatgagatgattgtattccggcagctgactaaattggaggtgaaggagattgctgacattatgctgaaagaagtgtttgacaggctgaaggccaaggagattaatctccaggtcacggagaagttccgagatagagttgttgacgaaggttataacccgagctatggtgccagacctttgcggcgtgctatcatgaggcttctggaggatagtctggcagagaagatgctggctggtgaggtgaaagaaggtgactctgccatcgttgatgtggattcagatggcaaggtgatagtcctgaatggtggtagcggtgttgctgagccactggaacctgctctcagtacctaaccgaggtcaaaatcatcattggtccgaaatatggccttctttacaagtcagctgggtttctcgtgatggtaaaaactagactgacattacttggccgcccattagttgctttatctttcgtttattttcttttttgttggaagtgaggcagtagggttgctatggaaatgaatagatggagaagcatttagcagacatataatatatgctagacttttgagttgcct

SEQ ID NO: 33002 - DNA, 2236 bp, Zea mays
  Clone ID: UC-ZMFLMO17051E11_FLI
ggcggggagcttcgcgtgcggcgtggacgatggcgcgcgcgccgtgctggccgccggcgctgtcggccacatcactcgcctcctcgctcaccccgacgagaaggttgtggatgcatgcgcacgtgctcttagaatgatatatcaatcaagattagctccaaagtttgatgttaatagtggggaaaacgtggattttgttctttcccttttggacagtgagaacgagaatgtcacagagctggctgctgctattgtatctcactcttgtgagagtggtgcagaacaattgtcactatgcagtgctggagttccacagaaacttgttagtctttttggatgttctatgaatctacgagatgcttgtttaggttctatcattgcagttattcaaaataaccaagatgttgcttcaagatttgcatcaacggaccatggaaaaggttttcgttcagtagttgggttaatacatgatcggagtccacgcacaagattacttgcttgcctctgcttgattgcacttgggcatgcttctcctgatcattttcaggacaatcagattaagaccaagttgattatggttttacttgagctaattgaagaacctggtcatgtaggagatgaagctcccttggcattaaccaccctgattaaagacagcttcgaactgcagagacaagctcttacaacgaacgcagttgagaagctcagcaaccatctactagcaaatccattggggacaaggcgagcagtgaccatattacttgcgctatctgaactttgctcaaaacttgaagagtcaagatctcaactgatgtcggttgaggtatcaaccttactccttgaggcattgaaacatgattgggctgatatccgtgttgcagcatgttcatgtctgaagaatatctccaggtcaccaaagatactcagtggaggtcgattatcctgcgatacagttatcggtcccctggtccagcttttaaatgactcatctacttcagtccaggttgctgcccttggtgccatttgcaatattgccgttaatttgacacccaggaaatcagttcttcttcactccggggttgtctcacaacttgttcatttgtcaaagtccatggatccaatgttgaggctaaaatctgtatgtgctctcaggaatattatgttccttcttagtcctaaggataaagacttcattgttaaggagttgaccttatctactctttcaagcctcatatgtgattctgaacattttgttcaagaacaaacattggcacttgtgcacaatcttgttgatggatatgtggtctctgctaattatgtcattggtgaagatggaatggttatggatgctattgcaagacaactgaacaatgcatctgctccgggagtatgcattcagggtatgtatgtgcttgcaaacattgctgcgggaaacgagtggaacaaggaagctgtgatgaatgttcttctgcctcacagagcagatcgcatcaaaccgtcgtttgcagtgaactttctgaaaagcaaggatagacagttgcgagttgccacactgtggtgcgttctgaacttgatgtacccaaaatgtgaagcctcatctggtagagctgtcagactacagagtgctggagtgatcctacaagtgaaaagaatgataaatgacccctgcttggattgcaagcttagagttcgtatggtgcttgaccactgcttggacaacgctgatgattgtttcatgtgaacaacctgtatttcaccgtggcaacccaagtttacggaactatattcagatcaggaaagaggaaaccagtgtgcttcagatccaaatatatgccactgaacagtggacatgagcacctgcagaaagcttttgctgatctctgcgggtcttaaagagccagctgccttttttgcaccatgagaacctgacaaccggcatctgttgtgcatattgtccattaccttgttgtgaccgatgttgtctagtgaacttgggctgcctgctcgcagtctgaaaggctttaggcgctatggatccagaaatcccatttttcccagtgcctgccgaacctggtgcatgcttttgaagttgagtctgtaaatgagtgactgctgtcactgttgtacaaaatttgtatttctgttccaataaggccgtatttaacatgcacctatgagttagatgtccatggattcccatgttctatgaaaataaagaagatgcaagtttctatgc

SEQ ID NO: 33003 - DNA, 4542 bp, Zea mays
  Clone ID: UC-ZMFLMO17051F02_FLI
cccgaagttgtgccttccacccttgcctcacacttcaaaggtatcccgtattcgtacgggagactttttttatgatgatcgtaccatgttggaaattaaaaacccctctagattagccttccaaaatctgggtgacctggagaatttgatagctaaggatccactactcttttcatttatggaccttaaaaagctacattccttgagacgtatatgggtcaatagatgcgatgaaacatttttgagaggactggatgatggtgttgcgatacccacagtccaatctctcgaacttggacaatttacacctaccaaaaattctttgtcaaatgtattcaaatgttttccagcactttcttctttggatgtgatggcatcaccatcggatgaggaccccgaggaagtggtactgcattttccaccctctagctcgctgagagatgtcaccttcaatgggtgtaagaatctgatcctacctatggaggaaggagctggattctgtggcctcacgtcgctcgagtccgtggccataaaggaatgtaacaagctgttctctcggtggtccatcggaggacgagcagctcagactcagagcatcatcaaccctctccccccctacttgaggacactctccctttattatatggaaactctgcctcaggaagctctgctcccgaatttgacatctcttgagaaactcacactacataattgtcttggttgtgagcaaagcaccgagccgatggctctgcccgcgaatctaacatctcttaccagtctagagttatttaattgcagaaatatcacaatggatggatttgatcctcgcatcacattcagcatcaagagtctttgggtggaaaatcagagaaatcatgggactgatccgtattctgtagcagcagatctacttgtaacggtggtgaggaccaaaacaatgccggacgtttccttcaaactggtgagactttatgtggacaacatctcgggagtgcttgttgctcccatctgcaggctgctctctgctaccctcgagaagttaagcttcagtaatgattggcggacggagaacttcacgaaagagcaggacgaggcgcttcagctcctcacgtctctcgaatcccttggtttctatgactgcagggctctgcagtctctcccccaaggactgcatcgccttccttctctccagcaaataattatccgtgggcctcaaaacatcatatcactgcctaaggagggcctccccgattcactacgactactacaaataactaactgttgtgccgagatttatgaggcatgccagcaattgaagggaacaaggccagatatagatgtatttgccttcaaagctgatgtgcaaaattgaatacctgcttctgcatgtctttcgcacagacagctctgcttcagcatgcctttcactctacaggtaaatactgtgaaaaccttttcctatacgtgagatagttgatcttcatcgattctccagccaggatgatgtcttattgaatgatgtgttggtcgtggttagcacaaaattcagtaggacagtccgaatcgggagactcatctagtatttagattgcaaccctgttggcctgtcgatctcgtgaggtcgtgaggtcccataggtctgtgtagtgagcctaaaaaaggtctgtgctgtggttgatccaattcgaccctggttggggacatcggcctctcctggtattggtgcaccggatgccagacacgcgacaagatccagctccatcatcggccggaggatgacaagtcacgctggaaccaagtcatggagaatttttttgatgtgctcttcgccagagtcaatggtattggagtgattcaacaggagctgaaaacccaaatggagcagaacaatctcaaggttgacaaatgctctgaggaacaacagtcgaccgggaaatatatatcatttggcctcaacaccagatcgctgtccaaggagggcctccctgcgagagctggagatatatgattgttgtgccggcatttatgaggaatgccaaaaattaaggggagcgaggccacatatagaagtaaatactgtgaaaacctcttcctatacatgagatagtcgaccttcatcaattctccagccaggatgatgttttattggatgatgcgttggtcgtggttggcacaaaactcagtaggacattttcattggtgctacacatcattcatgaccataaatgagaacaagcttgggttgtggaaaatttcagaaagtaaaggcctataactctcgttgatcatttcagaaccactggaatcaagacatcatatagcaccacaagccatacctttgattattttaaaactactgcacctctttgattcttttagtcagctgaaacatatttgcatcctactgatacattgttgcatgagaaattgaggctggcccaggaaggctcaacatatgtttgtgaataaagcttttagtgaaagatagtagattttcatcagttcactaccacgatgctgtctcaatggatgagaacgccatggaagacagtgacctagaagaagacagcaacctcatctaagttgaaaatgtgttgcccgtggttaaagaaaatcctgcagatgaacagcgccaccctccctgttctctccagacctgaatctctgatggtcatttttgagctgatcagctattggggtcgtgtgataagcttaattaaccacttgtcatggtcttcacaaatcaacaagtgagcggccttcgcatgctgcattcaagcaagggaccggctagccatgctccacctgccattcagtttgttggtgaggaattaatcagcaatcatgttgaccggtatgcagatggagcagaaaatctagatgaagcggatggatacatatcgatcatgaggtggcatagacaggctagaggccacacttcacttcatccatgccatggttccatgatactatgataggcaaaggaagatccaagacaacacaaaagtacaaatagttatacaagcaaaaaaaattgggtcttgttgttatgtgcctcccattttccaatccagaattaatatgacatttttttactgaaactggttggatcaaagcccaggggaaaaaaggaaaatgacaactacaattgtgtgtgtgtgtgtgtttttgaaagaaggtagttgcacggtgatgatgtgctcacttgaggatttcttcagcttttttagtctctatttctccccagggaatatatatcattggggctcgaaacatcagattactgccgaagaagggactacagtacattgatctgtaggactacagttcatcataatgttacacatagtctcacttttagcaaccctggcgcatctagaaaatatcaggcctataactatcgctgatcatttgaaaaccactggaaggcaggagatgcagcaccacaagtcataactttgatcatttgaaaactattgcggctccttttgatttcatcaaccagttgagtggatgaaagaccaaaaaatgctttggaagaaaggcccataattatggataataaggcatccagtatcatataggaaacaaaggaaattcaaattggatggaaacctagacgtgctcggcttgaagtatacaaagaacagctcttgctagaaaccaagcaaaaaacgggtcaggactgaagaatatgatgacttgatttgcatcgtaccgaagacattgctggccgggaaattgagtctggattaggaaaactcaacataagcttgtgaataacgcatccggtgaaagatagtagattttcatcaattcactaaccatgatgttgtcgcgttggatgagaacggcatggaagacagtgaactataagaagactgcaacctcatctaagctgagaatgtgttgcccgtggttgaagaaagtcttgcagatgaacaacactatcctcctaccctagctaggcctgaatctctaaagcaaacatttttcaaagaaccttctaaagaggtgtatcctgtttacctgtcatatgtcattgttgagctgatcggcaattggagtcgtgtgataagcttaactgaccacgtgtttgtcgcgatcttcaaaaatcaacaagtgagaagccttcgcatgctgcattagatcaagcaagcgaccgactggccaattggccatgctccacctgcggccactcagtttgttggggaggaattaatcaccagccatgttgggcggcatgcagtggagcagaacatccagacgaagcggatggatacatgatcgatcatgagttggtgcagacacaggccagaggccatattccaattcatacattccatgataagcaaaggaagatccaagacaacacaaatatacaaatagttagttatacaagcaaaaaaaaatgggtcctgttgttttgtgcctcccattttctagtccagaattaatatgacgatttttcactaaaactggttggatcagagaccaggaaaaaaaaaggaaaatgacaactacagctgtgtgttttttttc

SEQ ID NO: 33004 - DNA, 936 bp, Zea mays
  Clone ID: UC-ZMFLMO17051F03_FLI
gaacataatggcaggagctctgcctctcaattaagaagaatagaattgatccagttttaaggaaaaccggacccaaaacctacacagggcgcacggtagaaaaaccggtgaaggccctaacaaaccacctagacaacagcagcctcacacacacaaacacatctagagtcattgttgccaagctcaaacacaagggacgagcagctccgactccccaagacgagccgcacactgccaaagcaactcgacgacgcctaaatccagacaccgacgcaaggaataagatcacggcgcgccatcgttgccaagcctcgcacaccccacacgaggcagctccgattcttcgccacgagcaaagatccacaacgccgaactccgggagaaaacagacgcctaaaacgacaatggccccgacaccaccgagccaagcggagtgacaaagagcctccacaacgccgacgaacacacaaactagaggtcttctgggctgtgccttcaagaaggagaaacgaagtcgaaaagtcgtcgccgcccgcctggtaccaaccaagcaaagtttcctccgaagacctcctgtcgtccgccgacccaccaacccagcaaccccaaccttcagagccccaacgtcggacgagcaccagcgaaagtccccaagaaggccgaggcgagggttcccgcattgtggtgagaggtccaaggacagcaccctcaatagggcaggggtggcgcccgcgggcgtcaccgctgtccgcccgcaagcgggcatggctttcgccagaggccctcccaccacacgccccaacgcacggagctagccgcccctgcagaaggcgccgcagacagctgcagatccggcgacggccaacgccccaaccaaggcaagtacaggcaagccacgccgccaccacagcgggccagccgcacgcgtgggtgccg

SEQ ID NO: 33005 - DNA, 1765 bp, Zea mays
  Clone ID: UC-ZMFLMO17051F08_FLI
cccacacgcagctcgaatcccggcaagtgagcggcggaggcagggacggccatggcatgcagtgggtgcagctgcgaggcggcggcgggggcgatggcgtcggaggcgtacctggagggggcgccggtgcgggaggcgcgggagctggtggcggagctctgtcggcacttctacgcgcagggatgggtcacgggcaccggcggcagcatcaccgtcaaggtcaacgaccccgccgtgccgctcgccgaccgcctcatcgttatgtcaccctccggtgtgcagaaggagaggatggtagcagaggacatgtatgtgatggctgcagatgggaagtgctttctgcgcctgtagcaaagccatggccaaacaagcctcctaagtgcacggactgtgctcctctgttcatgaaggcgtatctgatgagaggagctggggctgtcattcacagccatggaatagagacttgcatcgcaacaatgctcatccctggtgcaaaggagttcagagtgacccacatggaaatgatcaaaggaatcaaaggtcatggctaccatgatgaattggtcattcctattattgagaataccccttatgagtatgagctcactgactccctaagtgaggcgattgcagcatacccaaaggcaactgctgtgcttgtaaggaaccacggaatatatgtatggggggagtcttggatcaatgccaagacacaggctgaatgctaccattatcttttagatgcttgcatcaagctctatcagctaggtattgattggacaacccctgaacatggttcaataaacaatccaaggagaccgcacagcattttgagccctgaaatttgtaatggatgtcatgctgctgattcatcaaagtgtgttgtactagacattgaggggacaaccactccaatatcatttgtgactgatgtcatgttcccttatgctcgtgataatgtacgaaaacatctgacttctacatttgattttgaggaaactaaagaagacatcaaactattgcgcatccaaattgaagatgatctacgaaatggagttgctggggctgttccagttccacctgatgagggtggcaaagaagaggttatcaattcattggttgccaatgttgaatcaatgattaaagcagaccggaagatcacatcattgaaacaacttcagggtcatatttggaggattggatttcaaaagaaagagctacagggagttgtctttgaggatgttcctgtggcgctaaagaactggcatgctagtggcataaaggtctacatatactcaagtggaagtagagaagcacaaaggcttctatttggcaatacaacatacggtgacctgcgaaagttcctgtgtgggtattttgataccacaactggaaacaaaagagaaacaaggagttattttgagatctctcagtcactcggcgtggacagtccatctcaaatcttattcataaccgatgtcttccaagaagccattgctgctaaaaacgctggttttgaggtgataatctccattcgcccgggaaatgccccacttcctgacaatcatggtttccgcactatcaaatcattcagcgagatctgaggaatctggtgatctggacatgtctagatatatgtaattcgcgagtgctttagcccgcggaccagttcatgcagtagaagcattatagcaccgcagcatgtcaaaacgatgtgacgtaacaataagttacatggcgaaataaaaactttggttcgttgtgt

SEQ ID NO: 33006 - DNA, 2529 bp, Zea mays
  Clone ID: UC-ZMFLMO17051G01_FLI
ccgaccgaccaccctctcctctcctctcttcctcttcctcttcctcttcgtcgcaccaccaccaccaccaccctccctctcctcgcctcccaaaaaaggcgcggcaccaaaaggcgcgagagagaggcacggggaccgcccgcctcgctcgcctgcgcaccggattcgtcgctgcggcggtggttgcagcggcggcggcctggcggggagatgtcttcgcgctcggggtccacgggcggagggagcaccggcggcggcagcagcgcggggggaggcggcgcggtgccgctggccgtgctgctcaggcgggaggtggccagcgagcgcaccgcgtcggagcgcccggagctgcactggggcctcttcagccaggccaagaagggcgaggacttcaccttcctcaagcccgaatgcgagcgcgtccctgacgtcccgtcctcctccttctccgccttcggcctgtttgatgggcataatgggaacggagccgcaatttacaccaaggagaatctcttgaacaacatcttgagtgcggtcccagccgatctgaacagggaagactggcttgctgcactcccaagagcgctggttgctgcattcgtcaaaaccgataaggatttccagactaaagcacgttcttcagggacaactgtgacatttgtcataatagatggattggtcatcactgttgcatcagttggtgattcccgttgtgtactacaagctgaaggttcaatttatcacctatcctctgatcatcggttcgatgcaagcaaagaggaggttgatcgtgtaacagaatgcggaggtgatgttggaaggctaaatgttgttggtggtgctgagattggcccccttagatgttggcctggaggtttgtgcctatcaaggtcaattggagatcaagatgttggtgaatttatcgttccagttcctcttgtgaagcaagttaaggtatcactgtttaattcttcacatcagcttcgcaggactgcacttattttgctttgaaatcttatgccttaccctttcctcttgatctccaatattactaataaagttacagtttctccaagtctctcctaatatgtgtagctattcagcattatgtcaatatcttcagcattcagaccgtattctgcctcataatatgtgtagctatctactgcgggtggccgactcattattgcaagtgatggtgtttgggatgtcttgtctccagaagtagcttttaactgttcacgtgaacttcctccagtgcctgcagctgagcaaatcgttaaagtaacctcctttctatgtgcagccataaatcttgaacgatactcttatttacatatctgaaacttttgcagactgctgtgcaatcaaaagggctgagggatgataccacctgtattgttgttgatataatagtagaaaaaaacaactcttccatgccacttgctaaaaggcaaccaggaattggtgtcttcaaaaatatgttcggcaagaaaaaatcatcggattcatcatcccattcccattcagatagagaatatatggatccagataacgtggaggaaatatttgaggatgggtgtgcgcttctttctagacggctggattctgaataccctgttcgaaatatgttcaaactgttcatatgtgccatttgtcaagtagagttaaagccaaaccaaggtatatctgtacatgaagattcatcacaacctgggagcttgcgtcgctgggatggtccattcctttgccagagctgtcaggaaaagaaagaagcaatggagggaaagcgtcgttcacgagattcatcaagaaacagtgggtaagtgaatagttgacatgtgtagagtgatcaggtaactactgaccagcaacaccccagcaccaccattttgcagcatttcttctgttggcacttccttgatcacattcacatgtaatatctgggagttctgatctagaactagattgaagtattgaattgctactgtggaggtggctgctgcttatagctctcatcccaagtgaggagtatgccttgtcctcagcaaggtccttgcccaggaatgtaggcagctttactcagccctttgaccttgatggcacatacaggttgaaagattaacgatgccaaaatgatatggcttgtacattctaaggtccattgctgcgacgatcttcttatagagttctgacaaatagctatggcactgtttctgaattagaactaggcgcttacatcaattcttccccgttcgagctagccttaatttatggctagagaccttagtattatcagtccctgctgaggtccagccttcgctgacaccaatgtaattgtcatctaaaatattctttcaagcagctgtgattcatcagcaagacattagttgtcatgtacaatgtacaaaatcttgctaacaagacagagtcctacaatgtacaaaatcttgctaaaatattctgtttcgtcattacttggatgaaaatcaattggtgtctcaattggaggaaagaaattgttctaat

SEQ ID NO: 33007 - DNA, 1382 bp, Zea mays
  Clone ID: UC-ZMFLMO17051G08_FLI
caattacaggaggtgatgcattcatttatggtcactctgttcgaagcactgtgggaatgtcaaacatccgtaggatgatcggagtctgcccacagtttgatatcctgtgggatgcattaacagctaaagagcacatggaattgtttgccagcatcaagggattgcatccagcagcaatcacattagtagcagaagagtcattagccaaagtaaagctcagccaagtaactaatgctcgagcaggcagctacagcggaggaatgaagcgccggctaagtgttgcgatcgcactgattggtgacccaaaattggtttttctcgatgaacctactactggcatggatccaataacaaggaggcatgtctgggacatcatagaggaggccaagaaaggaagagctattgtcttgaccacccattccatggaggaggctgatattcttggtgaccggatagctataatggcaaaggggaaactgcggtgcatcgggacatcaataaggctgaagtcgaaatttggaacaggatacattgctaatgttaatttctctgggaatggccacatgcagagccccaacatcaacagcaacactgaggctccggttaatccgaacatagaagctgtcaaatggttcttcaaggaacggcttgatgttaatccaaaagaggagagcaggacattcttgacatttgtcatccctcatcacaaagaaccacttctgacgagattctttggagagttgcaagacagggaaggggagtttggaatatcagacattcaactcggtctgacaacacttgaagaggtgttcctgaacattgcaaagcaggcagagctggagacctctactgctgaaggtaccctggtgactctcaacctgtcatcaggaacaacaattcagattcccaagggggctcgtttcgttggtattcctggaactgagacagaggagcatccaagaggcatcatggttgaggtgtactgggatcaggatgaaaatggatcgctctgcatttctgggcactctgacgagatgcccgtgccagttcatgctgagctgaggaggcctccgtcactttctcgtagggcctcaatggaccgtggacgtccagttgggtatatgattgacctgaaccaggtcccatgaaaaaaaagatgagtccaggtgcaacgtttagattggttttgatgcagattatctggtacatatagtatataggaatcttgtattcgtgtctttgtattagaagtcgtaaccttgtattgcagtagtaattggtaaagacatgctttgtaaaatatcctatagtgtaacacaatattttctgttgtgtggcaaacaaaggctcgaaaaatgacgcaatagaattacatggtaact

SEQ ID NO: 33008 - DNA, 1027 bp, Zea mays
  Clone ID: UC-ZMFLMO17051G09_FLI
cgggtgactcgatcggccgcgcgcgatgtctgcgacgcagccgtggaggtcgctgctctgctgcgcggcggcgggatacgacgacgccgacgagccgccgccgtcgtcgcgggggcagaggaagggccggagcaggagggaccgggaccgggagcggctccagctgctgctgctgccgtcgtcctcgtcggcggcgtcgcgggtgtcgctgtcgagcctggggggttcgtcggggacgctgacgcccgaggacctgtccctgacgctgtcgggctccagcctgcacgccttcacctgcgccgagctgagggcgacgcgacccacgtaacaacgcgcgtcatggggaccaacgggtacgcggcgccagagtacatcatgacggggcacctcaccgccaagagcgacgtctacagcttcggggtagtgctgctggagctcctgacgggccgtcggtccgtcgatcggtctcggcggcccagggagcagagcctggtggactgggccagaccctacctcaagaagcccgacaagctctaccgggtcatggatccagccatggagtgccagtactcgtgccaaggggccggacgcgccgctatggtggcgtacaagtgcctgagccagaaccccaagtccaggcccaccatgagggaggtggtccaggccctggagcccgtcctggacatgaacgactaccttcaaataggctcgtttgtgttcaccgtcgtggtggaagacagcaacgacgacgacagccaaggcaagatggtcgacgtgacgatagagacgacggtggaggagaagcgccagagccaccaggaccggcaccggcagaagttccccaactcgcttgtcaatgccgacgtggtgctgcaccgggacggcgacctggggaagcacattgccgcgctgcggcggcaccggaggacgtccagctacgtcaaggagagaggggcgtagaagcgtagcatatagccttcagggtgaattggcaggcatggcgcgtactagtgtttaggagagaatc

SEQ ID NO: 33009 - DNA, 1453 bp, Zea mays
  Clone ID: UC-ZMFLMO17051G10_FLI
ctcctcgtcgtcgtccatcctggctcccgcgccggcgccggcgccggcggtgacgcgcagcatcaccatcgcccgcccgccgtcgctctccgtcgagtcctacagctcctcctccgtcccgtcctccccggccagcacgcccgactcgccgctcgccgcaggtgggctccctctgtttttggtcgcctcgccgccccgttcttgggctacaaatcgtttctgtttctagttatgtctgcgcactgctgcgcagcagcgcaggactggatctccgacgaaatgggggcagtaaaagggatggaaaaaaagtatataaattttgacgttctattcacgttggttttttttcttctacgccctcttaagcgcgacgcagtcacagatctgccgctgcacagcacgcaatgccttcgtgatagcagatgatggttcgtgggaacttgggtggggagggtgccgttgccgtgtgattgtcaggaccacccagactagctagacattcatttgctggtgcgtttggtgctgtgataacaaagggttcgttcatcagaaagctgtgcatgcaagcacgatgcacaggcacagctggtcgatatgcctcatgcctgagctgagcctcaccctctgtgtgttggcgtgtttggcgcagctaccccgcccaaggcggacgtctggaggaggttccgccggaaaaccaaggtctccgacgggccggagccggccgtcgggcccaggagccccaccgtctacgactggttcgttctcgcctcaaagcttctcttcttgtactctcgtgccacgccacctcgaatcctcgatgcacaccatgtccatagctaagctagcaggtcacgatttatgttcctgatacagcttctgtccctggttggttcgctttgcagggtggtgatcagctcgttggaccgctgagttagaacagatcaatcgccaataagcaacaaccgagctagcagagggcatgtttgcgttcttctgaatgttgtgcgcgtgtgtctgtggcagcataagtagagagtatgtcgatgatgatgacgacgacgacgatcagttcgcggcagggaggttagaagtggcctggcgccgatctccatcctagtttgggcgtttggcctatagccggcaggcgcgttctccagttgttggatcaggggaagaactcctgccgtgggaggctcctagggttgcctgcttcgttttctacgcaccctcctcccctctgtaattatcccaagcaccacctcgtactggtctggtagtagtagcagtgttttgtgtgtgtgtgtgtgtgtgatgctacgatgtagctgtgccttttcttctgctcgcctggaaaccttttgcgttccaaactgcagctgttgtgttccatccctgaattgttgttcaactcgagagttcgacttttaatatacttactgaataacggattacg

SEQ ID NO: 33010 - DNA, 720 bp, Zea mays
  Clone ID: UC-ZMFLMO17051H12_FLI
atcgccgcggggaggtacgtgttcccggcgtccacgctcgggtacgcgcgcggcgtggccgccggcatggcgccgaaagcgcgcctggcagcgtacaaggtgtgctgggtgggcggctgcttcgactccgacatcctcgccgccttcgacgccgccgtcgccgacggcgtcgatgtggtctctctcagcgtcggtggcgttgtcgtgccgtactacctggacgccattgccattggggcgttcggcgccaccgaagccggtatcgtcgtctctgcttcggccggcaacggtggtcccggcgggctcacggtgaccaatgtggcgccctggatggccaccgtcggggctggctccatggaccgcgcgttcccggctaacgtgcggctcggcgacgggcaggtgctcgacggcgtgagcgtgtacgggggacccgcgctcgagtccggcaagctgtacgaactggtgtacgctggggcgagcggcgggggtgcctcgtccgcgtccgacggctactcggcgtcgatgtgcctggacggctcgctggacccagccgcggtgcgcggcaagatcgtggtgtgcgaccgcggcgtgaactcgcgcgccgccaagggcgacgtggtccgccgcgcggggggcgtcgggatggtgttagctaacggggcgttcgacggcgagggccttgtcgccgactgccacgtcctgccggcgaccgccgtcggc

SEQ ID NO: 33011 - DNA, 1324 bp, Zea mays
  Clone ID: UC-ZMFLMO17052C02_FLI
agtcatcaagctagctagcccggagcacgcctagacacgccagcagcaatggcggctcagctggccgtcgcgtttctcgccttgttgtcctcctctgccttcttggccgtgtctggccagaagttcaacgccatcttcagcttcggcgactccatgtccgacaccggcaacctgtgcgtgaacggtccccccgccggcctgacgctcacccagccgccctacggcgagaccttctttggccgcgccacctgccgctgctccgacggccgcctcgtcgtcgacttcctggccgagaagttcgggctgccgctgctgaagccgtcgaagcagggcggctcagacttcaagcagggcgccaacatggcgatcattggcgcgaccaccatggactcgggcttcttccagtcgctgggcatcgccgacaagatctggaacaacgggcccctcaacacccagatccagtggttccagcagctgatgccgtccatctgcggctcgacgcaggcctgcaagtcgtacctgtccaagtccctgttcgtgctgggcgagttcggcggcaacgactacaacgcgcagatcttcggcggctacaccccggagcaggcgagcgggcagagcgccaccatcgtggacgccatcggcaagggcgtggagcagctcatcagcctgggcgccatgtacgtggtggtcccgggcgtgctgcccgtggggtgcttcccgatctacctgacgctgtaccagacctccagcgccggcgactacgaccagtacggctgcctgaagcgcttcaacgcgctgtcggcgcagcacaactcgctgctgcaggccaaggtgtcgagcctgcagagcaagtaccccggcgcgcgggtcatgtacgccgacttctacagccacgtgtacgacatggtgaagagccccggcagctacgggttcagcaccaacctcagggcctgctgcggcgctggcggcggcaagtacaactaccagaacggcgcgcggtgcggcatgcccggcgcgtacgcgtgctctgacccggcgtcgtcgctcagctgggacggcatccacctgacggaggcggcgtataggaagatcgccgacggctgggtcagcggggcctactgccacccggccatctcggcctagaggctgctccgggaccgggggtcgggggctggttggtggttcgctggcccctcaagttaggggaggggaatcggattaattgtaatttttttagctggaatcgaagcaggcaagaagacgatggaggtggtctgcaactgcaagaaataatcaattatataagcataattctctcgtgatc

SEQ ID NO: 33012 - DNA, 1599 bp, Zea mays
  Clone ID: UC-ZMFLMO17052C05_FLI
aagcgctggtgctctgggaaacttgagccacctcctcagcgagacggctcaatcatcaatgctgatgcccgtgtatgacaagaatcgcgctgaaactccaaacttggcacgccctaaggtgccaccaaaggagttgttcctggagcagcttactgctggacacgagagtccatcaacctgccgctcatcaggccaaactctctatttccctttccaacagcctttaggctacaacagtgagagtggcagtggcgatggggcgaatatgaattcactctggttcaaccagagtgacttcaactgcagcacaatttctacagtgatgccgccagcttcaccatcggccctctctacatcaatggggctgaatcttccacctgataattctcgacatggaggaactggcattggaagtactgcagtagattcattctactgggatggtactaatcctagcagcagtagcagtactgggagcagaggaagcaacagtatgggatttgaaccacagagcacgagctcaattctggagaacagtgtcttccaatggacagacatcggacaagaaaaagatacaagagctcacctggtagaggaacttaagtggcctgacttgctccatggaacctttgccgagacgaccacagccatgcagaaccagagccagacgctctatgatgacgtgatcaaggcagagagccaattcagcatggaagggatatgtgcttcttggttccagaatcagcagccacagcaacagcttcaggcaacaccagacatgtatgacaaggacttgcaaagaatgcaactgtcttttgagaatatctaggcattatgttccacatggaacagagcagatcagcagaagcagaaatttgtaattttcagagattcgtgggcagaactatgctgaattgcttacatagatacattaagttgatacagaaatcatcctccacagctgctcctcagttgaagacctggcaatatcaaggaaaggacagccctggcattagaagtggcagcagaatgcatacaaaaggtacaaaggagcaatcattctcaagaagaagtaaacacattcaggaaagaaaaaaggaagaaactattcatgaatatctacctaccatgtagattgggtaatctatgaagcctcaatgtgaaggcaagaaaattggtggagctcggaagtctcaaaatcaaaaagatggcgtgtgagatctacaacaagactcgtggttggaggccagttgacagacgaatccgatgaaatgaaacatgttttgttatctggttattttggttcaataactgtgcggtcgttctacttcttctcccttgtagcgcctagctacaggaaaaactatgagatagaaatgctgcttgctgctttggtgtgatctgtgtgaactttgatgttggtcagctctgtgttactttttgtgttgctactagtagtttggtttggtcagggtttggtcctttttagctgatagttgtgtgttttgtcagctttaaaattctgggtgctcatgtggtattgtaagaacttatgtctctttctatttcgtaatgaaatagggggttatcccctttctc

SEQ ID NO: 33013 - DNA, 1688 bp, Zea mays
  Clone ID: UC-ZMFLMO17053B06_FLI
gggcggcgcagccagagtaagcagagagttgcactaccgtgcttcttcagttcttcttcctagtatgcactcgcttgtgaggcgtggcaatggctacggctacggctatggtggttacggcagcagcaatccccatatgaactaccaccgccaaaacaccgagtccgtgaccaccgtcgtcacggagatgaaccgaatggccgtcgacgacaagccctgctacggcggcggcgtgcagaagcaggcctgcaaggtggaggcgttccaggagcacgacgaagcgtacaagggcgccgtggccgtgcagcagaagcactcctccttcaaggaggacaaggaggaggtgcgcggtgctgctgccgccgtcagaagctggcacgacgagttatacaaggaggaggaggaggagaagcgcgtcgtcgacacggagtacggtgcccgctacgggggtgtggccgccgtgaagaagccgggctacaactacaagcagcacgaggcatacggggagaccgaaggtgcagggtacggctacggcgccggcggcgtgaagaagcaagcaggctacagctacgcgcaggaggcgtgcggagagagctacggcggcgctcaccacggtggtgccggtgccgtcgcgcagacgtacgcctacgaccagcagcaggcctacaagcacaagaacgcggcaggggcgggggcggggtacggtgctccctacggtggtggcgccgtgcagcagcacgacggacacaaagatgtgtaccggcacggcgccgccgccggtggcaaagtaaagaagaacggctaccagtaccaagaggcgtacggcggaactgacgcaggagggtacggtgcgcactacggcggcggtggtggcgccgtgcagcagtacgggtacggcggcgccactaccgatggcaaagtgaagaagggcggccaccagtactacggcggaagtggtgcaggagggtacgactctcactacggcggcggcggcggtggcgccgtgcagcagtacggcggctaccataaagatgcgtacgggtacggcggcggcgccaccgccggtggaaaagcgaagaagagcggctaccagtacgaggaggcgtacgctggaactggcgcgggaggatacggcgctcactatggtggtggcgccgccgtcgctcagaagcaaggctacaggcagggcatatacgagagcgagagcgagagcgaaagcgagagcgagagcgacgagagcgactgcgaggaggcgttcctgccgcacggcggccggacgccgcagggcggcgtgcagcacagctacggctacgggggcggggcgtacaagcacggggctggcaacctcggcggcttgcgccgctaccagtcgtacgagagccgcgaggatctcggcggcggacgccgctacgagacctaccagagcaccgtccagtacaccggctccccgaccaagaaccgccacgtcctacgctacggcgcgtaggcatatatacgctctgatccagttgcattgcagcacgtgcacctacgtatattcctatgccgcgtcgtgtgactcgtgtcgtataggcaggcggcaccgctacttggtgggccttgtgtttgctggtgcagatcgaaaaatctgacaataagatgtacttaatgccaccttgatataataatgtatgaagacgaaactttga

SEQ ID NO: 33014 - DNA, 866 bp, Zea mays
  Clone ID: UC-ZMFLMO17053C10_FLI
gcggcagaggattgccattggcatggcaagagggctggcctacctgcatcgcggtgcacagccagccattattcacagggatatcaaagcgagcaacatcttgcttgatgatgaatttgaggccaaggtggctgattttggactggccaagtttgcacctgaagggatgacgcatgtgagcacaagggttgccggaacactaggttatgttgccccagagtatgcactctacggccaattgactgagaagagcgatgtgtatagctttggtgttgtgcttcttgagcttctgagtggaaagaaggcattcatttctctcagcgagggacagagttttgtgctcactgattgggcttggtctttggtgcgaagggggaggacagtggaggtgatccaagagggaatggttgatcctggtccaactaaggtgatggagaagtacgtgcttgttggtgcactctgcacacatccccagctgcatgcaggccgacaatggagcaggcgctgaagatacttgaggctgattcagtaccaagtcctttgattattcccgagaggccaatccctgttgttgcaaacctggccgagattgagaggtcagccagcagcagtggatcaggtcagctgtttagcccctctggtttccgatctttcattcatgcaaatgaggatgctgctctggtgtctccaaatgacacatgacgatttacttagacaattagtgagatgatatcactataattcactgtgtaccatatttgtttttgtttgctcgattttgttccatcggcttacaaactcatggcaaatattgtatatatcaatttgtagttttgccccaacacaaaaactgaagttcttgggtg

SEQ ID NO: 33015 - DNA, 1550 bp, Zea mays
  Clone ID: UC-ZMFLMO17053E04_FLI
gattatgttggtatgccaacagctcccagtgaatctaacaaggagccaaggcctgaagagtgtgtaaatgaactgggcattaaacaaccagtacagcatgttgcttccgaggagcaggaaggagttcaagatgatgccaaggcagatgcaaatgttatgaatgtttcttttggtaagggaaaatcagaagattcttttggcacaattaatggtaccaacagtggagataaaatagaatctcctagtggtttagcagaaagaacattgactcagcctaccactaagggttgcagtaagcagcgtggccgtagttctaatggtagaggaaacaggactaaaaaaatagaagaggggaatgcgtctggactaattgctgtggctcccgagtcagaagatgatgatgatgccccatttatagatggaaaccaagcagagggtggtgcactgtgggatatttttcgacgggaagatgtgagcaaactgcatgattatctaatgaagcatgctgatgagtttagacattgcaactttgagccagtgaagcaggttactcatcctatacatgatcagtgtttttatctaacaattgagcacaagagaaagcttaaggaagaatatggagtcgagccttggacatttgaacagaagctaggtgaggcagtatttatcccggcaggatgtccccaccaggttagaaatttgaagtcttgcataaaggttgcactagattttgtttctccggaaaatgtccgagagtgcatcaggttaacagaaggtttccgtctgctgccgaagtggcataaggtgaatgaagataaactcgaggttaagaagatagctcttcatgcattcaatcaagctattaaagatatcactgatgaatcatctaatagcaatgaaagcaaatggatccggagatagtgaggatcatgaaggccattgaatccatgcttgatgtcatggaagttagaacaacctgcattcgacatcttgctatcgagaacctgaatgaaaaccgtagtggcttatcggatgccgacaagataacaaaacctgattttagtgtattatgcatgatattagtaccttatataatacgtagcttggagaaaaggccattcaccgtttctcattgttgggaggttctaaagaatgaagccaaatggttacacttggagcagggctcacaaaatattgatgtgctggtgaacaaaggtgtagggttttctccaagatgtcggatttgacactgaagaagattgagtattggaagaggtccgattgaacatttggcactgacattcaccaacttgttcaaatagaggaaaaggatatggaaatggagaaagagcgcatgtatgcatgtgtaggtcagggagtggctcggatcagccttgagtcaatttccactgcgttttcttcggttatggatgagcacgaggagtaaaagaaacagaagaaggctgagtgtgattctcatatgcttattttcttgtcctgtgtaatggatgtgtgtatgtgaaccatatgcgaacttaaacgtctttgtt

SEQ ID NO: 33016 - DNA, 1175 bp, Zea mays
  Clone ID: UC-ZMFLMO17053E07_FLI
attatgatctgtcaggtccttcggagccaacaatgcctagcattttcgatgtttttcctcccaataatggagtcctcttaacagatgatccagccaactacttggacccagccatgcagttccctttctcatgattggtcagcttttgtcatggaggtacggatgtttatacctgctctttttgtgcttgaacttgtctggactgcttcggtgttgcaacttgcagctcgctgttgctacaactctatccaccctgaacgtcaaggacgtcattgatgtcatgcctgggcccatgaaatcttctgttgctcttctgaaccaagccgaccttggctggtattcttggaagcacggtgcttggaacaatctgcatcgactgctgtatgctcccaactggttgagctaacggccaatctcggctcactctgctgaggagatcatagcctgtaaatctttgattatgctattacttgtgtgtgtcgcaacctgcctgattaccattgtcttgtgtttcgagttttgacaatatgcaaaccataataatgtcgtaatatggaactcgtttatcatgtttattccatactcccgttatgtgagcttttggatggtcgatgctttctaagctgttatgtggatttccttaaaatagggctaggtttcaactattttgtggtctctgttttaacagtggctttcaaaagtgccctcgaattcattgactcaggattgataagtaggacctgctcgtcatagagttgcacaaggccaaaactactcggccaaaagaaaggacatcaagtgccaccaccggtagagagaagacggagccgaaacttgcttgactgcatcgacgagcgcgcttcgtgacatgatggctttctcaagaaatataaaggccggagggagaatttgagtgtccacctaaattttaagaatttagtaggtgtcttattttgttttttgtctggtggtctatatttagctacgaggggttgaatagggacgtagagagtatcctttttttgtttaaagtgcggtctgggcctgccacgcgttcgaatattatgggaatcagcaagtagtaagtaaatattggactgccaactgcttctgaaacttttacttcctgtttgatccttgaaattgaattacattctaataataataatttatat

SEQ ID NO: 33017 - DNA, 1125 bp, Zea mays
  Clone ID: UC-ZMFLMO17054B01_FLI
gcttgccttgccactcatgagtatacttaatatagccagagaatttgggttgcagcataccacaccctcgattgatgataatgatctatgttcagtttgtctagaaaggtcttgttctgttgctgctgaaggttgcagtcatgaattctgcatcaaatgtgctctctacctctgctcaaccagcaacatccgtgtcgagttcacaggcccacctgggtccatcccgtgccctctttgtcggaacggcataatgtctttcaccaagttaccaagcacaccaacagaagggcttaaatcaggttcagcgctcacattctgcaacccatgcatactgaacacccggtccatggactcgccagccactttctccaaagccgaaatcagacggaaccgtgtggcagctgtctcttcggagctggtctgtccaatcacctgcagcccattcccgtcgtccgccctcccaacctgcaggtgcagcgacgacgatccatgcggcgatacagacgtgcaggatggtcccgagttccagtctccccggccctcgcacagcgcaagcatggagctggacaagatgggggagggggatctagaccgggccagctgctcaggcatgttctggagccgaagaagctgccacagggagcagcagtgtgatgcggagatcaacgcttgattctttatctgtggttctgaattacgttgggattcgtagcagctccaacgcgggagatgagcagcggttgttttttccgccccagctatgttccttcctcctatctacagccaatgttttcttgattggtgaaatgctgctgcgtcctttgcagccgtagagtgtgtgttgtaacagttttgttactatggttcatgtgtacgtgtgaatctagatagccttcgaagttgctagccagttacggttctttgtagctgtatgtaaattgcagatctggatggaattactttctgtccctgatgataaatatttatatacaacgagtgaagtaccctctaaggccatctccagcggagctggatgtgagcttgtaaaatattgctttgaattgtagactctgtttatagactagtttaaaataagaaatgagatattgagtatgatttagagct

SEQ ID NO: 33018 - DNA, 2346 bp, Zea mays
  Clone ID: UC-ZMFLMO17054B05_FLI
gcgagcaccggctgcagcgcttgatcgacgaggcggacgccaaccccaacgacgcggccaagcagagcgcgctcctgcacgagctcaacaagttaagccctgaagatgtcattaaaaggtttgaggagcgaagccatgctgtggatagcaggggggctgcagagtacctgcgggcacttattctcactaacactatagcagattaccttccagatgaacaatctgggaggtctgcaagcctgccagccctgttgcaagagttgaaacaacgtgtatctgggaatgaggacaaacctttcatgaaccctgggatatcagaaaagcaacctttacatgttgtaatggttgaccccaaatctacaggtagatcaacacgttttgctcaagaaatcttctcaacgatcttgtttacaattgctgttggcgtaatgtgggtgatgggtgctgctgcacttcaaaaatatattgggagcttaggtggaattggggcatctggtgctggttctagctcatcatattctccaaaagagatgaataaggatatgatgccagagaagaatgtcaagacatttaaagatgtcaaaggttgtgatgatgcaaaaaaggaacttgaggaagtagttgagtatctcaagaacccttcaaagttcactcgccttggtggaaagctacctaagggcatacttttgactggtgctccaggaactgggaagacactactagcaaaggccattgctggagaagctggcgtaccattcttttaccgagcaggttctgaatttgaggaaatgtttgttggtgttggtgctcggagagtgaggtcattgtttcaagctgcaaagaagaaggcaccatgcattgttttcattgatgaaatagatgctgtgggatcaactaggaaacagtgggaagggcacacaaagaagacattgcatcaacttcttgttgagatggatgggtttgaacaaaatgagggaataattgtgatggctgcaacaaacttgccagacattcttgatcctgcactcacaagacctggtagatttgataggcatattgttgtcccaagtccagatgtgcggggtcgccaagagattctggagctctatttgcaagataagccagtggcaaatgatgtagatatcaatgcaattgcccgaagtacaccaggctttaatggggctgacctagccaaccttgtaaacattgcagcgataaaggctgcggttgaaggtgcggataaattgaatgctgttcagttggagtttgccaaagatcgtattatcatgggaaccgagaggagatcaatgttcatatctgatgaatcgagaaagcttactgcctaccatgaaagtggacatgctattgttgcactcaacacccagggtgctcaccccatacacaaggcaactatccttcctcgtgggtctgcccttggaatggtcacacaactcccctcacaggatgagacctctattagcaagaaacaactccttgcacgtcttgatgtttgcatgggtgggagggttgctgaagagctgatctttggggaagacaatgttacaactggggcaagaaatgaccttcacactgcaacggagcttgcccagtacatggtatcgaactgtgggatgagtgatgctatcggtcctgtgcatgtgaaagaacgaccaagcatagagatgcaatcaaggatagatgctgaggtggtgaagctcctaagagaggcttatgggcgggtcaagcgattgcttaggaagcatgagaagcaattacatgctctagcaaatgcgctgctggagcgtgaaacgcttactgcagatgagatcaacaaagtagttcacccttaccaagaagagccccatctttccttccaagacgaggagtttgccctcgcttaaagattcttttgttgcatcaagatatcggtcaccacccgtgaattgtaaatccgtgtacagtaagtggcgcctagatgagccatggaagttccttcagatgccctcttctgtaaaacagcgcgaaacacctatggtaaattagaagattggtgttgcgaaagctgatgcctgcttattgacaattctttggatggaaggcttcccgggaaggctctgggtttgcaaaaccctctcatacttttggtttagttaggatagatgtaggtttaacactgcatgttctgattgctaggtttctggctagggcaacatgttgatcatgttcttttcacttttttattgacattttctgtaaggaaatcgtacatgtaacgattgttttatttgtcaaacaagcactgtttgtttttgtcaaacagtatacggttaatgtattcgtgttgct

SEQ ID NO: 33019 - DNA, 844 bp, Zea mays
  Clone ID: UC-ZMFLMO17054B09_FLI
gttcattttgtgttatatagtattcatttatcttttccttctcccagtatatatatatatatcaatcaaaatggtcctgtgatatcgagcttcagttgatgcagaggtggtgaaaacatcttgtcttctccaaagactgctgactgcaagttgcaaaagtttgtctttagcttgctgtgttgtttcttcctgcggagtacacgagaagtttgtagatagagtttctggtgtgccttttcctgtaccaatgtgtataaatcttacattgctggcctcttattatgcagcaaggattatggatccgaaagagaagccaaatgtatcgagcagtccaccaacaccacggctggactgcataaaatgctttgatatgctctggttctgttactcaccattccaccagatgcagaattattaccggtatggggagttcgacacctgcttcggcaagtggggcgatcttatgggctgcctcgctctcaagacaaagcggaaggcagaggtggaggagatcctcatcgcgcgggagaaggccaaaccacatatctggacctaccggacggtcgatgaggcatcggagaattggtggcggatgtacaagcatgctgtgatgatgtcaccactgccaggttctgctcagcttcctcccaggtccgatgaatcttgatagtcgaggggatttgtgcaagtgttttgtttgcgcttatgtcacattatggcattagcgatcatttctgttcaaaatcttactgtaaactacaataccaagagatggaaccattgaggtaggcagaacatgtactgctgaagattgagaatttgaaatcgccttggattcagaagc

SEQ ID NO: 33020 - DNA, 1511 bp, Zea mays
  Clone ID: UC-ZMFLMO17054C11_FLI
ggggaagtggtaccctcttctgccgaggcagctggtgagaatgatgctgatgctgatgacgagggtgaggaaagtgctcagaggtctactgaggacagtgaaaatgcttcagaggcgggtgaagatgcatcgggtagtgaatctggtgatggtgaggaatgctctcgtgaagatcatgatgaggaagaagaggatatggatcacgatgatcaggatgcaaaagctgaaagtgagggtgaggcagaaggaacaactgaaacacatgatgtggaagggggaatatcactaccactttcagaacgctttctgtactcagttaaaccacttgccaagcatgtacctacagctttacatgatcgagagttctcacgtgtattttatggaaacgattcattttatgtgttgttcagactacatcagattttatatgagagactactttcagcaaaaactaattctttcactgctgaaaagaaatggaggaattctaaggatacaaaccctcctgatttatatgcaaagtttatgagcgcgctgtacaacttgcttgatggttcctctgacaacaccaaatttgaggatgactgccgagctattattgggactcaatcatatgtcctctttactttagataaactgatttataaagttgtgaagcagcttcaagctatagcaacagatgaaatggacaataagcttctgcaactatatttatatgaaaaatcaagatctcctgggaggttctttgacctagtttatcatgaaaatgcccgtgttctactccatgatgagagcatataccgatttgaatgttgctcgagtccgacaaggttgtctattcagctgatggaatatggtcacgaaaagccagaagtgactgcagtatcaattgaaccaaatttttcttcgtatctttttagcgagtacttgtgtagtacgccagacaagaaattatctgaaggcgtctaccttggaaggaataagcggaaatattcaaataatgatgaaccttcagattctttgaaggcaatggatggtatcaatgttgtgaatggtcttgaatgcaagatatcctgcaagacctcgaaagtttcatatgtccttgatactgaagatttcttgttccggcttcggaagagaaggaaaattttgcggggcgggaatgtgcccgaccgtttgcagatttcatcaatatctgctgcaaaagtgcagcgcttcaataggttcctatccaaaccataggatcatttggcatacaaatgtatcgaaacctgttgctggggtcccagctgcttggcttgaacaatgattccatcgacgtcgcggagtcccctttcggaataacagatgggaagacatagggtaaatacagcaaagcgaagcgagcatgtaggccacagtagtcagtctgttgttccgaaagatgtgtatatatgtattagcagcatgattgttctgattatctttttactgattttcgatggtaggtctattccatcaagtatttaact

SEQ ID NO: 33021 - DNA, 881 bp, Zea mays
  Clone ID: UC-ZMFLMO17054D02_FLI
attttttttctgttcccatttccaccctcgcaccgcatccacctccacctccaccgcgccgccgcgagagaggggaggagggtttccgatggagaacggcgaggagacgttcgcctcccccaccgccgccgccgccgcggacttcgagatctccatcaacggcgaggacagcacgcccaagctccacaatttggcggacgagatggaggccctccgcgcggcgaagcgcgacctggaggagaagctcgatgccgtgggacacgagaaccggttcctgtcctctgagtcccggcgcctcgaggtcctcgtgtcccaggcccgcgaggaggtcgccgctgccgagcaagtcgccgccaccaacgagagcgaggccgccacgctccgcgccgaggtcgagcgtctccagggcctcctagccgcagagaaggccagccatgaggaggagatgcgcaggggcgcaaggctcggggaccagctgcagaccgcgtaccaggagaaggccgcccttgaggaggagatcgagaccctgaagggttccgccactgccgagggcaagggcgggaaggaggaagaggagggacgtgattccgtttctgccagggccgggacgcctaaggatgagggcgtggtgtctcccgctcttgtggttgccgcggctgctggagcagctgccacggctgccatcgcggtggtcttgctcaacctcaagagatgatgtggtggtccgatgctcgggaagttttgatctgctgctatggccttgtcgtggtactagtgttgctggactcagtgtggtatctttactatcagctggataatatattagaggttagaacaacctatattgcaagtactttttagtttctgcagttttccatgct

SEQ ID NO: 33022 - DNA, 1741 bp, Zea mays
  Clone ID: UC-ZMFLMO17054D05_FLI
tggcatttctcctaatctagccttattttttggaggacaggatagtctgccatggattttagcacgacatgagatcccatggcttgatgtcgttgtagatccttgtgcttctttcctcgttttcgtcgtcactggccttctctgtgtggggataaaagagagttcatttgtgcaaggagttgtgacggtcttaaattgctttgtgatgttatttgttatcatagccggtagctacatcggcttccaaacaggatgggttggctacaaggttgctggcggatttttcccttatggagcgaatggaatgcttgccgggtcagcaactgtcttcttcgcctacataggatttgattcagttgccagcacggctgaggaggtgaaaaatccacaacgagatctgccactgggaatcggaacagcattgtcgatttgctgttccttgtacatgttggtttcagttgttattgttggtctggtaccatactttgctatggacccagacacccctatttcatctgcctttgccaaacatgggatgcactgggcaatgtatcttgtaacaactggtgctgttcttgctctctgctcaaccttgatgggatctatattgccacagccaagaatattgatggccatggcacgagatggcctgctaccatcattcttctctgatgtccataagacgacacaagttccagtcaaaagcacagtagtgactggcatctgtgcagctgctcttgctttcttcatggatgtctctcaactggctggaatggttagtgtaggcacgctactcgcgttcactatagttgctgtgtccatcttgattcttagatacgttcctccagatgaggtacccctcccatcttccctgcaagcatcattccgcttgagccaagaaaatgacgaggaaaagctgaggggtacccttggagatgatgatcatgagcaaggctcagctgaaataagtgatgttgtagtagaaccaatcactgaccccctgatcgagaagcagctatacgcaagcaatttgagtgaggcaaaacggcgtaagaccgcggcatgcagcatcacatctgtttgcataggggttctgatcctcacgacgtcagcctcggcaacattcttgcccttcccggtgagatgctccgtttgtgttttgggtggcatgctcctcctagctggtctgggcatgctctgctggattgaccaagatgatgggaggcactcctttggccactccggaggattcatctgtccgtttgttcccttgctgccggtaatgtgtatcctcataaatacatacttgttaataaatcttggtggcggcacgtggatgcgagtgggggtgtggctagtgatgggggtgttcgtctacattttctatggccgcacccacagctcgttgacggatgtcgtgtatgtccctgtggccgaggcgaatgagatatacgggtcatcctcttcgttagggtttgtggcgtaaagagagatggaaggagatgtttgttgaagcctatcttgagccagtcatggtacttctcacaaaaacctcaaagatcctgactggagcaggtacctgcttgagctattgtgttgcaggcatgggtttgaagaattcaatttgtacgtcatatttttaaaatgtgtaaattgtaacgcacggctaagcttgtgtgtctctgttggaggaatgtaaatattagtatattgcatagaactatatataggtggtgccaat

SEQ ID NO: 33023 - DNA, 809 bp, Zea mays
  Clone ID: UC-ZMFLMO17054E05_FLI
cccgagatggagatctgcgattttgactttgaaccctgtggctactccatgaatgcgatccatggctctgcattctctacaatccatgtgacgcccgaggacggtttcagctatgccagttacgaggttatgggcttggatgccactgctctatcttatggtgaccttgtcaagagggtcctccggtgctttggcccctcggagttttccgttgccgtgaccatcttcggcgggcgtggccatgccgggacatggggaaaggcactaggtgcagaggtctatgactgcaacaacatggtggagcaggagctgcctggaggcgggctcctcgtataccagagcttctgcgctgctgaagacgctgttgctacctcgcccaaatctgttttccactgctttgacggcgagaacgtggagagtgctcctcctcctatgaagaaggactacaaactagctaatcttctctgctgggaggaggaagcggatgccatggaggagaaggcgggagtgcttgatgagtaagacgggcttctggtgtcgatttgcttctgagttgtttattttatatcgtcgcaatttcgtggttgtcgtttggttattctgtgaagcagccaagccaggctattgttatgaaaatttgtcgtctgtaagcatgtgaacttccgatgttgccacatgctggatcagtctgaataagtaagtatgcagctctaggtggtcagctgcgtctaccacaatgagcatgtacgtatggagaaatatctgtgaacccattttgtttatgaataagatttgttttttttcgagtt

SEQ ID NO: 33024 - DNA, 867 bp, Zea mays
  Clone ID: UC-ZMFLMO17054E11_FLI
cacgaaagccaaaacaccgaatttcatatccttgcctttttcttctcaaaatgtatctccgtattccctttaccagtacaaaaaagtatatagaatcaacgacttgacacaagccagtggcttagctccttgcctttttcttctcaaaatgtatctccgtattccctttaccagtacataaaaaatatagaatcaacgacttgacacaagccactgttggagtggcttagcattaatcttctccatttcatgggtggatttggagtggataagaggttgttcttcttaatccatcagcttgaccggtttattttccatctacgtacccttcttcctcctactagtactttttcactgtttctgtcaatttcccatcttttgtggtcggtgatcatggttagactgtacgaagtctcctttaagctcaagattcaactcaacaatctcttcatcgatcttgtgtgcctcaggattagatctctcttgtcatcaatatcacccattgaatatctctacagtacatctcctttaagctgaagattcaactcaacaatgtctccatcgatcttgtgtgcctcaggagtgagatctctcttgtcatcaatatcacccattgaagatatcttggtaaacaagaatacaaatgtagacactgcgatgcaattttctggttcaatgaacgcaataaatccatgacgagacacaataatcaggaaccaatatattcaaactgctgcaaaaatggcaaaatcagaataccaaaatataaagaacccccaacttttcttaatgaattaatacaccagaaaatggatacaagatgtaaacattttctacaaaagataagacaatataatagcatgtttg

SEQ ID NO: 33025 - DNA, 851 bp, Zea mays
  Clone ID: UC-ZMFLMO17054F11_FLI
tcaaggacccagaggctaagaagcctgaggactgggatgacaaggagtacattcctgaccctgaggacaagaagccagagggctatgatgatattcccaaggaaattcctgaccctgatgctaagaagcctgaggactgggacgatgaggaagatggtgaatggactgcccctaccattcccaacccagaatacaagggaccatggaaacaaaagaaaatcaagaacccgaactaccagggtaaatggaaggcacctatgattgacaacccagattttaaggatgatccatacatttacgccttcgacagcttgaagtacattggcattgagctgtggcaggttaaatcgggcactctgtttgacaacatcatcatcactgatgaccctgcgttggccaagacttttgcagaggagacctggggcaagcacaaggaggcagaaaaggctgcttttgatgaggccgagaaaaagaaggaagaagaggatgccgccaagggtggggatgatgaggatgatgacctagaggatgaggaagacgatgagaaggcagacgaggacaaggccgactctgatgccgaggatagcaaggattctgatgatgagaagcagcacgacgagctctagatggcgaggatgatgtttcggccgctggcctagatttatcagctctgccactatgaagttctttttttttcccgtgaccaccaagaatgtagaacactgctaataagcagatggacagtttgggtcgccgtagcgctttgtagtcatttttcccattaaagccgataacactgaacaaggaggaaggatcttttgcccacgattgttatctccctttctgatgtt

SEQ ID NO: 33026 - DNA, 1277 bp, Zea mays
  Clone ID: UC-ZMFLMO17054H01_FLI
gccactcctgcactctcactcgattcacctaccagcaactcgccacttcctccgtgagaaactgagaaatggcaccgcctcacagtcacagaagcttccgcggctggcagaacgcgagccacgtcgcgcttgtgcttgtgctggtgtccgtgctgttcctgagcaaggcacgtccctccgcgggcgccaggagcctgctggagctgtacaagccgccggccagcgcgctcctcacgtaccacaacggcgccgtgctgcagggccgcatcccggtgaccatcctctggtacggccgcttcacgccggcgcagaaggccgtggtcaccgacttcctccagtcgctcaccaccaccgccacctcgccgacggcgccgccgtccccgtccgtgtcgcagtggtggggcaccatcgaccagctgtacctgtccaaggcgcggagcggcggcggcagcgacgacggcagcgcgcaggtggcgctcgtggggcaggccgccgacgaagggtgctcgctggggaagcgcctcgcgctgtcccagctcccgcagctggcggcgcgggccgggccggcggcgaagggcggggtcgcgctggtgctcaccgcgcaggacgtggccgtggacgggttctgcacgagccgctgcggcctgcacggctccgacgccggggccggggccgcctacgtctgggtcggcaacgccgaaacgcagtgccccgggcagtgcgcgtggccgttccaccagccgctgtacgggccccaggcgccggcgctcgtgccgccgagcggcgacgtcggcatggatggcatggtggtcaacatcgccagcatggtcgccggcgcggtcaccaacccgttccgcgacgggttctaccagggcgacaaggacgcgccgctagaggccgccaccgcctgcacgggggtctacggcagcggcgcctaccccggtttcgcaggcaacctggcggtggacggcaccacgggggcgagctacaatgccaatggtgccaacgggaggaagtacctgcttcccgctctgttcgaccctgcaacctctacgtgttcgactttggtttaacgcccaaggaaacagtcctgtcaactgtgtagtaacgctgtgtatatagtatgagtttgataaggagtgtactgtggttagtgttgatatctgcatcataatacaatataaaaaaacatatgtgtgtggtgcatgagggagcaatctggcctgaaaaaaactttaaaatcatgcgtctaaatattagctaaccttttggtttct

SEQ ID NO: 33027 - DNA, 789 bp, Zea mays
  Clone ID: UC-ZMFLMO17054H10_FLI
ggggcggcgatgccccctagatcggatcacgccgccggcagcggcgccgcggcggcggccacgcaggcccacttcgactccatcgatccactcttccatgtgctccgcgtgctacccttctccttcctcctgccgccgcgcacccgcctgaggctgccgtcgaacctggcgcttccctctcccatgaccgtcttctccctcatcctgctcacctactttgcggtcgtctccggactcgtgtacgacgtcatcgttgagccccctggcatcggcagcgcccaggaccccggcactggcgccgtccgccccgtcgtcttccttccagggcgcgtcaacggccagtacatcatcgagggactctcctccgggttcatgttcctccttggcggcattggcatcatcctcctcgacctcgccgtcgaccgcacgaggccccggagcctccgcgtctcgtttggaagcgccggcgcagtcgccgttgtcatcgcctacgccatggccatgctcttcctccgcatcaagatccccggctacctctggtgaggttgataaatcttgcctgttaactagaccagatccgtcgcgagatctcgctgcatctaaatagacctgcgtgctgtgcagtgtggactgtgctctttcaattttgtcaattaatgttccatcacacaatttgtatggtatcaactcggaactactgggtgaggattatcattttgcaatgataccaaacaaggctttacttggtattgagtttcagggattgcatggaatcccactatttatgtt

SEQ ID NO: 33028 - DNA, 2088 bp, Zea mays
  Clone ID: UC-ZMFLMO17055A02_FLI
gcccgagtcacactcacacagagccgagccgagcccaggcaggcaggcaggcggcccagcccaccaccccacccccgcgtcgcgcggcgccgccggagccagagcgagagcgagagcgagcgatggacgcgctgccggaggcgtggtcgcaggtgcgcgcgccggtgatcgtgccgctgctgcggctggcggtggccgtgtgcctcaccatgtcggtgcttctgttccttgagcgggtgtacatggccgtcgtcatctccggggtgcgcctgctccgcctccgccccgaccgccgctaccgctgcgaccccctccccgaggacgacccggagctgggctcctccgcgttccccgtcgtgctcgtccagatccccatgttcaacgagcgcgaggtgtaccagctgtccatcggcgccgtgtgcgggctgtcgtggccggcggaccggctggtggtgcaggtgctcgacgactccacggacgaagtgattaaggagatggtgcggatggagtgcgagcggtgggctcggaaggggatcaacataacgtaccagatccgggaggaccgcaaggggtacaaggccggcgcgctgcgggcggggatgaggcacgcgtacgtgcgcgactgcgagtacgtggccatcttcgacgccgacttccagcccgacccggactacctcaagcgcaccatcccctacctcgtccacaacccggagatcgccctcgtccaggcgcgctggagattcgtgaacgcggacgagtgcctgatgacgaggatgcaggagatgtccctggactaccacttcaccgtggagcaggaagtgagctcctccgtctgcgccttctttggattcaacggcaccgccggcgtgtggcgcatctccgcggtgaacgaggctggggggtggaaggaccggaccacggtggaggacatggatctggccatccgggccagcctcaagggctggaagttcgtctacctcggtgacgtccaggtgaaaagcgagctgccgagtaccttcaaggccttccggttccagcagcacaggtggtcgtgcggcccggcgaacctgttcaggaagatgctcatggagattgtgacgaacaagaaagtgacgatctggaagaagatccacgtcatctacaacttcttcctgatacgcaagatcatcgcgcacatcatcaccttctcgttctactgcgtcatcatcccggcaaccatcttcgtccccgaggtccgcatacccaagtggggctgcgtctacatcccctcggccatcaccctcctcaactctgtcggcactcccaggtctttccacctgcttttcttctgggtcgccttcgagaacgtcatgtccctgcacagaacaaaggccacgctgatcggcttgctggaggccggcagggccaacgagtgggtggtgacggcgaagctcggcagcgccatgaagatgaaatcggctaacaaagcggggctcaggaagcagttcatgaggatatgggagaggctgcacgtcacggagctcggggtggcagccttcctcttctcctgcggctggtacgatcttgcgtacgggagggaccatttcttcatctacctcttcttccagtctgtcgcgtttttcatcgtcggcgtcggctacgtcggcaccatcgtcccgcagtcgtagcggaagcgtgtccagatcatccgcttctctctggttttcgcattgtgtcttgggtaagtttcgtagtggatgaccggtttgaggtaaagatcatgcatgcggtcctctcttccatcgtctttttttggggaccggccgtgtgtgcttcgtcgaccttcggctgcatgcgcggtgttttactgtaaaataggaaagcagtgttgcaagatcgctgcaggagaatttagagattggtgccacatgggcaggagatgtcctggtgtttctgcttatatgctatatcaactatgtgatgtgttttaagggggggtgcaggatggctgcttccaatgtactagtaacatacagagaaacaggttcagacatgtgttcagaaaaaaaagagtcaactattcagccttcttgtagcatgctacatttt

SEQ ID NO: 33029 - DNA, 1066 bp, Zea mays
  Clone ID: UC-ZMFLMO17055A08_FLI
ccaagaaccacagccaccgcgatggcgcagatcatcgatggcaaggccatcgccgccgacgtccgccgcgaggtcgccgccgatgtggccgcgctctcgtcggcccacggactcgtgccggggctggccgtggtcatcgtggggagcaggaaggactcgcagacgtacgtgaacatgaagcgcaaggcgtgcgccgaggtcggcatctgctccatcgacgtcgacctcccggaggacatctccgagaccgcgctcgtcgccgaggttcatcgcctcaacgctgaccccgccgtgcacgggatccttgtccagcttccacttcctaagcatatcaacgaagagaagatactgagcgagatttccatcgagaaagatgtggatggcttccatcctctcaacattggcaagcttgcaatgaaaggcagagagccactgttcgtaccatgtacgccaaaggggtgcatggagctcttgtcaaggagcggagtcactgttaaaggtaagcgggcagttgtggttggtcgcagcaacatcgtcgggctacctgtatccctgctccttctgaaggcagatgcgaccgtatctgttgtgcactcgcggacccctgatcctgaaagcattgtacgcgaagccgacatagtcatcgcggcagctgggcaggctatgatgatcaaaggtgactggatcaagccaggtgctgcggtcatcgatgtcgggacgaactccgtcgacgaccctacccggaagtccgggtaccggctcgtcggcgatgtggatttcgcagcggcgagcaaggttgctgggtacctgactccggttcccggaggcgttggcccaatgacggtggcaatgctgctgaagaacacggtggatggggcaaagcgggggatagtcgagtagctacgttcatctcacttctcgttgctgtacgactgtgttgcaaggatgtgagctgactcgaaaagcgtgtgttggttggtgtaacaatctgtttcccaagaataagaatgatagtcacagctgctttcctgtttaataaatgcagtgaagaaagaattttggcttt

SEQ ID NO: 33030 - DNA, 2880 bp, Zea mays
  Clone ID: UC-ZMFLMO17055B11_FLI
tggaagagtgtgctataagttctacattagaaaagtagcatgtaaatctataaaatcaatttccatctctcgccccatgaatttgagatagacttatatatacaaactttggaaagttgtggaatgtcatattctaaaaaaatagcctactctattagttagattccaattcctcaaaatgaagggaaacaaacgggccttagtctattccatatcttgaaagagcaatcaagatgactttctctcttcttctcactccaacttggcttaattttgatccaaccatttatttgggccaagtttgtgtttgaagttgtgttttgcaggcatcaactattcacccccctctaggtgctctcaaattccaaaaattgggttttttcggggcgatgattggtcgtgttcctggatcggagacgtcacctaaccccaaggaggaaatcgtggtcttcgtagcatctttcgacgttggacctcgaccgccctgccatcggtttctcatggaggtcttagagcgttcggtgttcaactgcatcggctgacaccgaacatactggtggcgctggcgaagtttgtgtgggcgacgtccaaagatcacagtgtacaagatcaaaggcctgatctacccgagaagtggaagtagagaaaggaagacgagcatggcgacctagctgacaagcatggcaaagactatcaaaatggaccttgctacaagatatatctaaacgactagagagcttggacatgacgtcgggtccagggtgcccgagacgacgatgccaagtggtggtagaagccaaagcagatgacgaggatgcgccagcggaggaggtggatggcggaccgtatacagcagccccgagctgtcacatcgggcgagaagggttctggtagccagatccttcacaaataaaccaaatgggtcaaactcaatggaacatgagttgtcggtggtgaatcgacgaactgaaagaaggttttgcatgatataaggggcaacgagaacgccgttgagatataacagtcccggaagaatcgagtcacatactgaggtgaccgagagggtggaactattcaccacaatgatagaggaatgatgggagggatggggccatggggggatgggagcgagataacgtgctgctcgccagcttcatctgcctctgctgtctccgcaagaagcgccgccgcgcgccgccgccgcctcagcactacggatacccgccgcccccgccgccgtacaaggaggatccatatggtggaacgtaccagagttggcagcaaaatgcgcctcctgctccaccccctgaacatgtggtcaagatgcacccttcgcctccgccagcatatgccaatcgtcctccacagccgccagcgccgccaccaccagcgatgctaaatagtagtggtggatctggttctaattactctggtggcgagatcctacctccaccatcccctggtgctgttcttggcttctcgaagagcacattcacctacgaagagctgttgagggctactgatggattctcggatgctaatctccttggacaaggtggttttggctatgttcacagaggattgctgcctaatggcaaagagattgctgtaaaacaattgaaactgggaagtggccagggagagcgtgagttccaggctgaggttgagattatcagccgagtacatcacaaacaccttgtgtctttggttggctattgcatttctggaggcaagaggctgcttgtctatgagtttgtccccaataacacattggaattccacttacatgcgaaaggtcgaccaacaatggagtggcctgctagattaaagatcagtttgggtgctgccaagggtttagcttatcttcatgaagactgccatccaaagatcatccatcgtgacataaaggcatctaacattcttcttgacttccaatttgaagctaaggttgctgactttggacttgcaaagttcactactgataacaacacccatgtttcgacaagagtaatgggcacctttgggtatttggcacctgagtatgcatcttctggcaagctaacagaaaaatccgatgtattttccttcggagtcatgcttcttgagcttattactgggcggcgaccagttgacacaacccaaacatatatggatgacagcttggttgactgggcaaggccattactgatgcgagcacttgaggatggtgaatatgatgctttagtggatcctcggctgggaaaggacttcaatcctaatgagatggcaagaatgatagcctgtgcagctgcatgtgtacgccattctgcacgtcgtcggccacgtatgagtcaggtcgttcgggctttggagggcaatgtgtctttggaggaccttaatgaaggtgttcggcctggccatagccgcttctttgggtcatacagcagctccgattacgattctggccagtacaacgaggacatgaagaagttcaagaagatggcattcaacaacaactataccagcagccaatacagcgcgccaaccagtgaatatggacagataccgtctgcatcaagcagcgagggccaccagacgcaggagatggagtcgggtgcaatgaagaaaggtggctacagtggtggctacagctcaggatacagcggagcctcgtaagggaattccctctttttttgtttttcttttgatgttttcattgctgcatttgtaaagtctggccgaattatatgaccaaagctgctgacttgcgcgtgatgtatctgagtttgaccgagtatagttctatgtagctgcaattgtttattctttcatgaaagttgttcttgaccaatgtttgctgtgcagttcgaagagagctaattgaatgttgatatactgtcc

SEQ ID NO: 33031 - DNA, 2881 bp, Zea mays
  Clone ID: UC-ZMFLMO17055B12_FLI
gtggaagagtgtgctataagttctacattagaaaagtagcatgtaaatctataaaatcaatttccatctctcgccccatgaatttgagatagacttatatatacaaactttggaaagttgtggaatgtcatattctaaaaaaatagcctactctattagttagattccaattcctcaaaatgaagggaaacaaacgggccttagtctattccatatcttgaaagagcaatcaagatgactttctctcttcttctcactccaacttggcttaattttgatccaaccatttatttgggccaagtttgtgtttgaagttgtgttttgcaggcatcaactattcacccccctctaggtgctctcaaattccaaaaattgggttttttcggggcgatgattggtcgtgttcctggatcggagacgtcacctaaccccaaggaggaaatcgtggtcttcgtagcatctttcgacgttggacctcgaccgccctgccatcggtttctcatggaggtcttagagcgttcggtgttcaactgcatcggctgacaccgaacatactggtggcgctggcgaagtttgtgtgggcgacgtccaaagatcacagtgtacaagatcaaaggcctgatctacccgagaagtggaagtagagaaaggaagacgagcatggcgacctagctgacaagcatggcaaagactatcaaaatggaccttgctacaagatatatctaaacgactagagagcttggacatgacgtcgggtccagggtgcccgagacgacgatgccaagtggtggtagaagccaaagcagatgacgaggatgcgccagcggaggaggtggatggcggaccgtatacagcagccccgagctgtcacatcgggcgagaagggttctggtagccagatccttcacaaataaaccaaatgggtcaaactcaatggaacatgagttgtcggtggtgaatcgacgaactgaaagaaggttttgcatgatataaggggcaacgagaacgccgttgagatataacagtcccggaagaatcgagtcacatactgaggtgaccgagagggtggaactattcaccacaatgatagaggaatgatgggagggatggggccatggggggatgggagcgagataacgtgctgctcgccagcttcatctgcctctgctgtctccgcaagaagcgccgccgcgcgccgccgccgcctcagcactacggatacccgccgcccccgccgccgtacaaggaggatccatatggtggaacgtaccagagttggcagcaaaatgcgcctcctgctccaccccctgaacatgtggtcaagatgcacccttcgcctccgccagcatatgccaatcgtcctccacagccgccagcgccgccaccaccagcgatgctaaatagtagtggtggatctggttctaattactctggtggcgagatcctacctccaccatcccctggtgctgttcttggcttctcgaagagcacattcacctacgaagagctgttgagggctactgatggattctcggatgctaatctccttggacaaggtggttttggctatgttcacagaggattgctgcctaatggcaaagagattgctgtaaaacaattgaaactgggaagtggccagggagagcgtgagttccaggctgaggttgagattatcagccgagtacatcacaaacaccttgtgtctttggttggctattgcatttctggaggcaagaggctgcttgtctatgagtttgtccccaataacacattggaattccacttacatgcgaaaggtcgaccaacaatggagtggcctgctagattaaagatcagtttgggtgctgccaagggtttagcttatcttcatgaagactgccatccaaagatcatccatcgtgacataaaggcatctaacattcttcttgacttccaatttgaagctaaggttgctgactttggacttgcaaagttcactactgataacaacacccatgtttcgacaagagtaatgggcacctttgggtatttggcacctgagtatgcatcttctggcaagctaacagaaaaatccgatgtattttccttcggagtcatgcttcttgagcttattactgggcggcgaccagttgacacaacccaaacatatatggatgacagcttggttgactgggcaaggccattactgatgcgagcacttgaggatggtgaatatgatgctttagtggatcctcggctgggaaaggacttcaatcctaatgagatggcaagaatgatagcctgtgcagctgcatgtgtacgccattctgcacgtcgtcggccacgtatgagtcaggtcgttcgggctttggagggcaatgtgtctttggaggaccttaatgaaggtgttcggcctggccatagccgcttctttgggtcatacagcagctccgattacgattctggccagtacaacgaggacatgaagaagttcaagaagatggcattcaacaacaactataccagcagccaatacagcgcgccaaccagtgaatatggacagataccgtctgcatcaagcagcgagggccaccagacgcaggagatggagtcgggtgcaatgaagaaaggtggctacagtggtggctacagctcaggatacagcggagcctcgtaagggaattccctctttttttgtttttcttttgatgttttcattgctgcatttgtaaagtctggccgaattatatgaccaaagctgctgacttgcgcgtgatgtatctgagtttgaccgagtatagttctatgtagctgcaattgtttattctttcatgaaagttgttcttgaccaatgtttgctgtgcagttcgaagagagctaattgaatgttgatatactgtcc

SEQ ID NO: 33032 - DNA, 1377 bp, Zea mays
  Clone ID: UC-ZMFLMO17055D06_FLI
cttcaatctcttctcaggcttcttcattccgagaccggtcagttgttgtttcaatcaccatccctgcgatccttttcctacctgtaggattaaatagaggactcatgttttttctctattcctgtttcagagaattcctggatggtggatctggtactactggatttgcccactggcatggacagtgtatgggctcatcgtgacacaatacggagacctggaagacctcatctcagtccctggagaaagtgagcagacgataagctactatgtaacacatcattttggataccacagggattttctgccggtcattgcgccggttctggtactctttgcagtattcttcgcgttcttgtacgcagtctgcatcaagaaactgaacttccagcaacgataagaacaagatatggcagcaaaagctcttgagagtttttttggaacattgccgtgtatatagggtattttgcacatcgcgttctcctttcattttttgagtccctttaatacattgtcgtgtatatagggtattctgcacatcgccaaatgtggtgaggtcttatacagatttctagccatttattgcaagagcaaaactatgatatttttccggatacacagaagagctacatattattatattaagaagagaggtctaacgtagacctgccacaagatataatcctctattggataagaggatataacactatcttcatctcctttacctatataaataggtctctttgtatcatgtaccacataatatctctttttcgtatctatgatcctaacatcctctttacagaggacgaaaacaaaacagagatatataaaaagcttcattaaaacaatgctaggctacatttaacctaacttaggcgaaatgcctgccaacccagaagcctcaacaagagacatatatttagtattgctgctaaccaaggctgcatatgaaggattgttcattgggtctgtccacttcagttactatgaaagagtttggaaaacttggcccccctccaaatgccgcttcttcctttggctcatggctctaaatatgtgttgtacagttgataggttggctaaaagagggttggaccacctagagatgtgtactttatgtgattatgattttgaaactttgtatcacattatggtttcctgtgttttcgcgagagaattttggttcttaatgctgcaccaatttaggttacatagacttgctcctaatcctggtacaaattcttttatgggatggtgggagaaggttgtcaaaagtaatggagatctggctatgaggggtctcagttcacttattgccttaggtgtctggattctctggaatcactggaatagaatcgtctttgatggatt

SEQ ID NO: 33033 - DNA, 705 bp, Zea mays
  Clone ID: UC-ZMFLMO17055D12_FLI
gattcaaccaggtaaccctattattacccctattgttttgaagaaagagaacgagctttctcatcatattttctattaaaaatgtggggttgatggccaccatgttcgaaaccttagctaagtacataagtacgagaagagggcgaacatcgttgaatacctcaagccagggacgggacgacgtgcggaggacggcaagttgaggatggtgggtgactttggacagcggcggaggacgtcttggtcgcgatcgcgtcgtggacaatcgttggcgtttatgtggacgtcggcgaagcggatggtggcacgcagacggtggctccaaggcggatggcggcacgcagacgatggctcgcggtctcctcccctcctcccctcgccctcggtcaccacccctcctcgctggcggcgctgtagacgtcggcaaggtggacgccggcacagaggatggcggcgcgcacacggtggcatctgcagcgtgcagactttggctcgcgattgcctcccctcctcccatcacccacggggaatgttgctcggggttctgggtcgggggagcgttccccgtgtgatttgccggggtcgctgggagcattggcttagggaagcatgctccaaatagattgacaaatttccccgtagccctcggggcccgtttgtttgccttcattttgaggaattggaatttaactaatgcaataggct

SEQ ID NO: 33034 - DNA, 1022 bp, Zea mays
  Clone ID: UC-ZMFLMO17055F05_FLI
ctttgttggtgaaggattacgctattgatagattaacttcagagaatcaggtgattctgttgccaatgtttctgatttcaggttgccttgaagatcccaattgaatgcctatttttttgcaggcaatgcgtttggaacttcataacatggaaattgctttacagaaatttcaagatttattcagtagtattgggcatgagggaatgaatagtttttcagcaatttctgaaaatcaggacgtacaggatgtgaataatgaacaacatgaaagggttccaggtacacaatgtggtctagcaaatgagcataccttggtaactgcagttgtcaaagaagccaccacacaaaatgtagatcaccagttggaaactgatccaggcagcatgcaagtacaaagcccagtgcacttcaagtctggtgcaatgccatctccggagctagtagctgcaaatacagaaaaagctgacagccttcttgaacccaatgtagacattggcatgggcagtttatctcctgcacgaccaacagattgtttgaatatggatcttgacacggagagtcagtcctgacaatgcaatttatatcccttcacacctggtattcggatacgtatatttaacaatctcgtagttggttgtggagcatattttattattttcttgtagttgatcaactgtcttgtgtgcgtagcctgtttagttagccactaaagagatagatcaggtagtgtaaagagcatcttggctcatctctctaccgccacaatgtccgagattcggatggcagctcagctgatgagaccgaggagaaagaaatgatagctgtcattgtctcttgggataaatctgagggctcttattggaggagatgaaaaaaaacagactcttaaaaataggaggggctctcaaaagaaaaatagagagctatatttcgagggctgttgctagactggagatgctctaaggtgtatttgttttttggcttttgttctaagactgtctccaacaacgttctttatattc

SEQ ID NO: 33035 - DNA, 1848 bp, Zea mays
  Clone ID: UC-ZMFLMO17055F06_FLI
tcctcctcctcctcctccatccagcggctacaccctgctgcgcgacccgcggcacaacaagggcctggccttctcggaggcggagcgcgacgcgcactacctccggggcctgctgccgccggcgctggcgtcgcaggagctgcaggagaagaagctcatgcagaacctgcgccggtacgagcagccgctgcaccgctacatcgccatgatggacctgcaggagcgcaacgagaggctcttctacaagctcctcatcgacaacgtcgaggagctgctccccgtcgtctacacgcccaccgtcggcgaggcatgccagaagtacggcagcatctaccgccgcccgcaggggctgtacatcagcctcagggacaagggcaagatcctcgaggtgctcaagaactggcccgagaggagcatccaggtcatcgtcgtcaccgacggcgagcgcatcctcggcctcggtgatctcggttgccaggggatgggaattcccgttggcaagctctccctctacactgccctcggaggtgttcgcccgtcagcttgcctgcccatcacaattgatgtcggcaccaacaacgaggccttgctcaaggacgagttctacatcggcctccgccagaggcgtgccaccggcgaggagtaccatgaacttcttgaagagttcatgaccgccgtcaagcaaaactacggcgagaaggtcctcacccagttcgaagacttcgccaaccacaacgcctttgacctgctcgagaagtacagggagagccatctcgtcttcaacgacgatatccagggaacagcctccgttgtcctcgctggcctcctggcggcgctcaaggtggtcggcgggacacttgcggaccacacttacctgttcctcggcgccggcgaggccggaaccggcattgctgagctcatcgctctcgagatgtcgaaacatactgggtctccgatcgaagagtgccgcccgaagatctggctgatggactccaagggcctgatcgtagcgtcacggaaggactcgctgcaggcgttcaagaagccatgggcgcacgagcacgagcccgtggcgaccctgctggaggccgtgcagtccctgaagccgacggtgctgatcggcacctcgggcaagggcggcaccttcaccaaggaggtggtggaggcgatggcgtcccagaacgagaagccggtcatcttcgcgctgtcgaacccgacctcgcactcggagtgcacggcggagcaggcctacacctggaccaagggccgcgcggtgttcgcgagcggcagccccttcgacagcgtggagctggacggcaaggtgctggtgccggggcagtccaacaacgcctacatcttcccggggttcggcctcggcgtcgtcatctccggcgccatccgcgtccgcgacgacatgctgctggccgcctcggaggcgctggcggagcaggtcaccgaggagcacttcgccaaggggctcatcttcccgcccttcaccaacatccgcgccatctccgcgcgcatcgccgccaaggtggccgccaaggcctacgagctcggcctcgccagccgcctgccacgccccgacgatctcgtcaagtacgctgagagctgcatgtacacccccatctaccgcagctaccggtaaggaccatggccggggcggcggcctgagcaaaaggaaaggaaacgggtaaattatgagtcagtgagtgaataaagggtcgatgtgatatttgttgcagctagaggtgtgagtttacacatactttcatttctatacaatgtatttctgtgtaccgtatacggcataccataccacactactacatactcgtcagtgatttc

SEQ ID NO: 33036 - DNA, 1562 bp, Zea mays
  Clone ID: UC-ZMFLMO17055F09_FLI
gggaaaggaaagaggaaacagggaggcgacgccgtcacaattcgttcgcgatttgcccttctccacctccccgtccatgtcgcgggaaatcacgcgcggcgacgctggattcacttagatccaacagggtaatcggcacggggcagcctctccacccattcccgcagccggttgggcgagtcgtcggctcagataatagactgggcgtgtggatccaagaggtttgatccctttaatttggattgaagtgccagctttcggtcaggaaggtgatgctggatgatgctgacggactttgaaagcataccggttcaaagaagtgttgcctgtcaccatgaggctcaacgttgggctcctagtgcccttgatggcacaatactccgcacccacatgggctactttagttgctgggttcttcatgctgcttgcgctttcgctctccacgtacctgatatttgagcatctctcagcatacaacaatccagaggaacaaaaatttgtactgggtgttattctcatggtcccttgctatgcaattgagtcatgtatttctttgataaatccaagtacaagcgtttactgtggcatcctacgtgatggttatgaagcatttgcaatgtactgctttggaagatatattactgcatgtttaggtggggaagataaaacaatagcctttttaaagagggaaggtggctctggttctgggcagtctctactgcatcacacgtccgagaagggaatcatacaccatcattttcctgtaaattatgtattgaagccctggagactggggacgcggttctacctgattatcaaatttggaatcttccaatatgtgatcataaagaccctcacagccaccttatctcttcttctagaatcttttggtgtttattgtgatggagaattcaatttacgatgtgggtacccttactttgctgctgttctcaactttagtcaatattgggccctgtactgtctagtagcatggtatacagccaccaaggacgaattggctcctataaagcctctggctaagtttctttctttcaaatcgatagtgttcttgacttggtggcaaggtgtggtgattgcaataatgtatgctttgggccttcttagaagccctttagcccagagcttggagttaaaatcaagcattcaagatttcattatttgcatagagatgggcattgcttcagttgttcacctctatgtgttcccagccaagccctatgcactcttaactaatcagtcacacggaaacatttctgtacttggggactatgtatcctctgagcccgtggacccttttgaaataaaggaaagcaaccggcctaccaaaatgaagcttccacagttggaaccagatgagagaagcgtgacaaacataaaagaaagtgttcgggactttgttgtcggcagtggtgaatatgtgagtgctgggaccaaatcttctttctgagtatttgcgacaaatttactctctttatacgttattgtaggttgagttttgaattttttgaaccagtagaataaatcttattaacttgacagtc

SEQ ID NO: 33037 - DNA, 1290 bp, Zea mays
  Clone ID: UC-ZMFLMO17055G03_FLI
aagaattctaccagacttgttataagtgcagtggcaacagtgggagctctcctattggtggctttaatgtgtttctggggttgctttctttacaaaaattttggaaagaaagatatgcgtggtttcagagttgagctctgtggaggctcttctgttgtgatgttccatggagacctcccttactcctcaaaagacatactcaagaagctagagactatggatgaagaaaatatcattggagcaggaggcttcggaactgtttataaacttgcaatggatgatggcaatgtctttgctttgaaaagaatagtgaaaacaaatgaagggctagatcggttctttgatagagaacttgagatattgggaagtgttaaacatcgttacttggtcaatcttcgtggttattgcaactctccttcatcaaaacttttgatatatgattatcttcaaggtggaagcctggatgaagtgctgcatgaaaagtctgaacagttggattgggatgcacgtattaacatcatacttggagctgcaaaaggcttgtcttacttgcatcacgattgttcgcctcgaataatacatcgtgatatcaagtcgagcaacatcttgcttgacggcagttttgaggcccgtgtatcagactttggacttgcgaagcttttagaggacgaagaatcacatatcaccacaatagttgcaggaacatttggttatcttgcgccagagtatatgcagtttggcagagccaccgagaagaccgatgtctacagttttggggttctggtacttgaaatactcagcggaaagcggcctaccgatgcatccttcattgagaagggattaaacattgttggatggttaaattttctggctggagagaaccgggagagggaaatcgtcgatctgaattgtgaaggagtgcacaccgagaccttggacgccctgctctctctcgccaagcagtgtgtcagctctttgccggaggagcggccgacgatgcacagggtggtacagatgctggagtcggatgtaattacgccgtgccctagcgacttctacgattcagagtagcctcctggacggacaagccacagtggtgccgctagtttcccgtggaggcgcattcctttattctttgcagatattgtgtaaatgcattgccgcggtgtttgtttggtctcctccaatcggctggttcaacgggtgacatttttgcgtctgtgtttatctgtcatgctacaggttggctatatgctgatttaataagagagaacttaccagtgtgtgttt

SEQ ID NO: 33038 - DNA, 2245 bp, Zea mays
  Clone ID: UC-ZMFLMO17055G08_FLI
ggcggaggcagagccgcggcgccggtgggcggtgtgggcgctactgctgctgctccaccccgccgcgctcgtgctcgccaacaccgaaggtgatgccttgcatagcttacgtaccaacttaaatgatcctaataatgttctacaaagttgggatcccactctggtcaacccctgcacttggtttcatgttacctgcaataatgacaacagtgtcatcagagttgatcttggaaatgctgcactatcaggaactttggttccgcaacttggacagctctaaaacttgcagtacctggagctctacagtaataatatcagcggaattatacctagtggatttggaaaccttacaaacttggtcagtttggatttgtacctgaacaacttcactggtccaataccagattcattggggaagctattgaagctgcggttcttgcgtcttaacaacaacagcctttctggttcaattccaaaatcattaactgctatcactgcactccaagttctggatctgtcaaataacaatttgtctggagaagttccatcaactggttccttttctttattcacccctatcaggaagtagctcttctagtactggagcaattgctggtggagtggctgctggcacagccttgctatttgctgttcctgcaattagttttgcctattggcagcgcaggaaaccacaagaacatttctttgaagtacctgccgaggaagatccagaggtgcatcttggccagcttaaaagattttcactacgagaattacaagttgcaacagatggcttctgcaataagaacattcttggaagaggtggatttggcaaagtctacaaaggacggctggcagatggatctttggttgctgttaagagactaaaggaggagcgcacgcctggtggggaattacagtttcaaacagaagttgagatgattagtatggctgtacacagaaatctattgcgtcttcgtggattctgtatgacaccaacagaaaggttgcttgtgtatccatacatggctaatggaagtgttgcatcacgtttaagagaccgggcaccagctgaacctccgctagattggcaaacaaggagaaggattgctttgggttctgctaggggcctgtcttatttacatgaccattgtgacccaaagattattcatcgtgatgtcaaagctgcaaatattttgttagatgaagacttcgaggctgtggtgggggattttggtttggccaaactaatggattacaaggatacccatgtaactactgctgttcgtggaacaattgggcacattgcacctgaatacctttcaacaggaaaatcctctgagaaaactgatgtatttggctatggaattacacttttagagcttattacaggacagcgggccttcgatctagcttgccttgctaatgatgatgatgtcatgcttcttgattgggtcaagggattgctcaaggagaagaaactggagagtctggtcgaccaagatctagaacacaactacgtcgacgttgaggtggaatctctggtacaggtcgcactcctctgcactcagagcaaccccatggaacgccctaagatgtcagaggttgtgaggatgctcgaaggcgatggtctcgccgagagatgggaggagtggcagaaagcggaagtagtacggcaagaggtcgagctaggccctcatcgaacttcggaatggatcctcgacttgaccgacaacctccacgctgaacagctgtcagggccgaggtgaaggcagctttggactcactgattcttgtatcttgcaagggcaatagcgatgtgtatcaatcatcctagtcaagaatcccccatttgttcataccaatcgttgggtgaagcgaggagatgtggtcagccatgatgtgcattggatgtatgttgctgaggtgacatggctgagttcatatatgcgagggcagcagagctcgacaagctagtgtcgtgcgctgtcggtgcatgcactagtggtcctggatttgcgaaggtagggggagctaaggtgctgtggctgtcatctgggtctgcgataagttaattgtactgacagttgacatctaactattttgtgtatctaatgtaaggttggaaggaactgacgcgaaccgttctgactcccctcctacaaaaggatcggatgatataggtgtgcctatggacctgttctgggtggcaaggttaatcagaagtttccgtgctgagtgttgt

SEQ ID NO: 33039 - DNA, 1284 bp, Zea mays
  Clone ID: UC-ZMFLMO17055G12_FLI
acctctatggccgcctcaaatcgctccaacgccacatggagttcgtcgaaatccaggaggagtacgttaaagacgagcagaagaacctgaagcgcgaactccttcgtgcgcaggaggaggttaagcggatccagtctgtaccgctcgtcattggccagtttatggagatggtcgacggcaacaacggcatcgtgggctctaccactggcagcaactactacgtgcggatcctcagcaccatcaaccgcgagttgctcaagccgtcagcgtccgtcgcgttgcatcgtcactccaacgctctagtcgacgtgctgccgccggaggccgactccagcatctccttgttgggatcgtcggagaagcccaacgtcacttacaacgatattggaggatgtgacatccaaaagcaagaaatacgggaggcggttgaattacccttgactcatcatgagttgtacaagcagattggtattgatcctccaagaggggtgcttctgtatggtcctccgggtactggcaagaccatgcttgccaaagcagttgcacatcataccactgctgcttttatcagggtcgtcggttcagagtttgttcaaaagtacttgggtgagggccctagaatggtgcgtgacgtgttccgtttggccaaggagaatgccccagcaatcattttcattgatgaggttgatgctatagccactgctcgttttgatgctcagactggtgctgaccgagaagttcagcgtattcttatggagctactcaatcagatggatgggtttgatcaaacagtcaatgtgaaggttataatggcaactaatcgggcagacactctagatcctgctttgttgcgtcctggtagacttgacaggaaaattgagttccctctgccagaccggcgtcagaagaggcttgtttttcaagtttgcactgccaaaatgaacctgagcgatgaggttgatttggaagattatgtttccagaccggataagatcagtgctgctgatattgctgctatctgccaagaggctggcatgcatgctgtccgcaaaaaccgatatgtcatcctccccaaggactttgaaaagggctaccgaaccaacgtgaagaagcccgagacagactttgatttctacaaatgagtcaacccagagtgttgaactcgtttctttctgcaaatgagtcaacccagagtgttgaactcgtttcttgtttatcaattgattatcttttaccatcagctgagtttatggatagttgccattacaaatattcaagttcctc

SEQ ID NO: 33040 - DNA, 758 bp, Zea mays
  Clone ID: UC-ZMFLMO17056A10_FLI
aaaaatgctggataggcttcaagaattaagcaagaagtcagatgggaaggtcttggcgatcgatttgcggaccgacttgctggaacagaagagttgcaagacaacccgcggcgctcgaagaaaaggctgctatagccctgatgaggtcctggctttcctgaggagtgttggcttctctgctaacacaaccatctacttgacagagacttcgtggcacaaaggcctggatgttctgaaggaagaattcccaaacacttggtataagggtgacattatgccagccgagaacaaagctgaattcctgaaatccagcaatgcagacctagcaagggctctggaccttgagatctgttcgcagagcgacgtgttcgtccctgccgtcgctggcctgttctacgggcatgtcacgggtaagaggatcgcgtccggacgcacccagatccttgtgccttcccagtccagcacctcgacacatgcttcagacttcatctccacctacatctccaacaagaaccaccttgcctacgcgtgctactgctaagcatccttttgtacggccgttaataagatcagctgaagggaaagtgctctgggtgcatatacaagtacctctcgtggacatgaatgatgttgtacactagctaatgttttgttatgaggaatattagcatacgactgtgtgttggttacttgtttggatattaaactctgaaacagcagcaaggagcatatactgcacgttcctgttggcgcgcacc

SEQ ID NO: 33041 - DNA, 1064 bp, Zea mays
  Clone ID: UC-ZMFLMO17056C09_FLI
catctgataaacttggttctattgttgctaagcggcgtaaagatttcacagtggaattcttcaaccacctttactatgttgcagagtcttgtcatgatgaaccagaaaagcaaactgagttggcaaagcttggaaatgattgtgtagatgccctacaagctcatgatgatacaacagggagtcttgaagctttgaatgctgcagaattgaagttaaaagatatacttaattcaccttcggtggatgctgcttgcagaaagatagatgacttggctgagaaaaaagaactggactctgcactagtgttgatgctttcaaaagcttggtcagctgcaaagggcactgacatcacaaaatctgaggcaaaggatataatgtttcacctatatatgactgcggtggcgaatctccagagacaaatgccgaaggatataagaatattgaagcatcttataatgatagaggatccagaagaacggtcaagtgcacttaatgacgcttttactcctggccctgaacttcaaggggacaatgttgatacattatacacgagtccagaggcgctgcacacttgggcaagagctatagttgatgcatattataacagcagagaaggcactctcattgggcaagcaagagacatgatgaatcctaaaatcattaagagagtcgaagagatagtgaagataatcaaggacaagtacctttaagttttagtcatcataaaatgggggtttaacatttctactgattgtacaagtcttgtgcgatgatggtcttttacaggctgctcccgtcaaaactactgccatcgttccagttgaactcctcagcactgacgaaacaatcagtgtttaaaggaaatgcaagttgttgtaactcattacaatgagaaggtgtttgtagcatgtggtatcagtttagctgctacatagatattagcggagtacttgtagctgtcctgactctaacagtgttgtaactgtactagtatcgaaccaggagacatgtatgtgtccaagcattcttgtaatgagctagtgatctcaaacaattttacggct

SEQ ID NO: 33042 - DNA, 1052 bp, Zea mays
  Clone ID: UC-ZMFLMO17056D12_FLI
gcgtacatagttaccaaagttatctgtggaatcatgctgccagtatgagagtggaaaagtatggcatctcacaggttgtagaaggtgacttagtgtataacaaagaatgcccttcagaagaatcaacttccgtagatattctggaaactgatgatgaccatacaaattcaattgaaatcgatctatgttctgaagcacaaccagaagaaagcatccagtctgcgaagatagttgattctggagattttactaaggggatatacacttttgatgatgttgtcctacctttgcctggttcacaagcattgtttcctgggaatgaaattgccgagatttaccatgaaatggctagaaaggatggcattagcttgacggagaatgctcatggtgtcaaggagttttcgattacaagcatgaaaggtggttaccgccgagtgttccagcggcctattggttttgagtgggaactcataacttacacagatgatacttcatctttagcagaaactgatttggatgttctgtccagaaccaagcctaaagaagcaaacgagcttatttctaagcaggaatcgcaggataagttggaaaaggctcctgatacctctgtgccaactaatgggaatagctcccaagaaaagcttattggcagcccagatatacgaccaaagaaattggccttaaaattagcatttactttaccaacatcatgctacgctacaatggctatccgggagcttctgaagacttccacctcagttgcatatcagaaaacactcagctgctagattctgtttggaagacattccttcataggagtatctcttaattacatggctgctgcctgtcttcacggcagttagaatacctggaggactgatgaatccacaaacatgatgcattctgcacatgaggcataacaaacaatatgtcctaataagtgtttcttaggggaagaccgtgaggatgatgtattgggatatctattccgcgacatgctttgtataacataaactccatttgcaataatggaatcaacttgggttagcagt

SEQ ID NO: 33043 - DNA, 1319 bp, Zea mays
  Clone ID: UC-ZMFLMO17056E11_FLI
cctgcctgctcctgcgcggcggcggttgagcggcgtggaggaggcactacccgttcttctgggctgtcaggccttccgtaccgccgccgccgtcgccactcccactcccacagccgcgcacgcgcttctcctcctcctcctcactgcgctccaccaagagatccgccgcaaagacgtcaatggactcgtcttcagtcggtgaacccttctacgtcgtccgcaagggggacgtcatcggcatctataaaaccctcagcgaatgccaagctcaagtcagcaattcggttcgcgacccttctgtcaccgtcttcaaaggctactcgctgcgtaaagacaccgaggaatacctcgccgcgcgcgggttaaggaacgctctctacgccattgatgcaacagatgcacgagatgaattgttcgacgatctagttccctgccctttccagcaacctgatggagctgcatcgtctactctgaaaagatcacaggagattgaaatcggaccatcaaagaagcatcccaaagttgatgagcaggtaccattacctgatagtcatctctcttgtattcttgaatttgatggtgcctctaaaggaaatccagggaaagccggtgctggagcaataataaggcaggtagatggttccgtgattgctcaactacgtgagggtctgggcattgcaaccaacaatgctgctgaatatcgtgcattgatcctagggctaacatatgcagccaagaaagggttcaagtatattcgtgctcaaggcgactctaagcttgtttgtaaccaggtccaagatatctggcgtgttaagaatgataatatggctagcttctgcaagaaagtgaaggagctaaagggaacatttcatttatttcaaatcagacatgttttgagggaatataattcggctgctgatgctcaagctaactttgcagtagaacttcctgttggtgaagttcaagagcagtcgaacttcccatgctagcagttgtgttgtggtcaagtgtggtttgtgcatcgctaaggttctgggactgaagctatgtcacatttgttcagttctcattgacacaaaaggaagagacgaaacaacagttgtattggaagtggtagtgggtctgatatatctgcggagtattgaacagacagatgcaatattgagtagattcttaggaaatttaatcgtctcaaacttctagatagtgcgagttgatttgtccaggaccagtgtttgctgatatacgatgtttgtattcagaacagtattagtaccggaaactttaattgctcctttctctatgttggttacttggtt

SEQ ID NO: 33044 - DNA, 1217 bp, Zea mays
  Clone ID: UC-ZMFLMO17056G12_FLI
agcccctgggtccgtccatctttaggagcaaataacgccgaccatggtcccggcggatccatgttgcctgtggggtttgtgaagggcgacaaagcagaggcggaggagtggcgacgacttgagtcgaccccgctttgggctgacgtgattctagaaaccattgagtgcatgcttagtggtttcgagatgcgatctcgattgcccaagcgtcggtgacgggggactttgtccccttcggacggcaccttctcgcacgatcggaggctcggtggaggcactgcaaacggcacaggtggggatagagttgctccgcgcgggtgctgtctacactgaagaggaagaacgcgagcttgtcgtcccccatttagaaatataccatcttcgaggcgagacatcatccttgcatgcgaagtgcgatggggctcgtggcaatgcagatcgcctttgaaactagggttcccaactcggagaggcactccgcagagtaaagtgtcatgctgggctagccgagtcatcttcatgggaggcaaaggttcgtctggtgcaagcagtctcaaaacttgtgatggagcgcgacgcgaccagagaggtccgcaaaattctcactcaagcgcgggatacgaaggtcgcggaggatgaagcgaaggctacagccacggagaatacatgcaagctcttgcttgctcgcgaaaatgccgttgctgcggggcaccgggcggatgcccttctctcggaaaggagcaccaaactccaagtgattcgtctggttgttagcatggtgtgcgcccatctctctcctctgttgtcgactgaggcgcctctggttgatcgcctctgggagctgcccgattgtgtggagagcgcaccgtcgccgagggcatttgtcgaggggtggaatcggccttggccagatggtctctcactttgacgagatcgacgtcaccattatcgccgagggctaagccagtgtccggagcgacaagtaattggacgttatcgaagaccaggtccacccccacgctcagtcaatcatgagccaagttgacgtcaggtccctcctaatcagcccctcgacactggagcttcccgccaatggtctaactgctcctatttagacgatgcccgctgggattcatgtattgaacctctacatggtgcattttgtgtatatgataacacttttttccatgtagacaatagctttgacacgcatttat

SEQ ID NO: 33045 - DNA, 1112 bp, Zea mays
  Clone ID: UC-ZMFLMO17057A11_FLI
gtcatactgcaatgcctgcatttgatttttttttacaaatcatagtcatacactttttaggcaaggtgttactggaggaaagcaacataaacatgaccctgaaagaagaactagagaatcaagagcagtccctgcccctgatgcaaatgcagaattagtatcatcattgcaggtaattctccacttgttgacagttgacacttcctttatctttagctttggagatgcacatgtactacttgtttttttatcatttcaaaccatacataacctgtgttgcttgctgtatgaatatctttgacttcagaaaaggcaagcccaagctaataccaggagcaggagcgagatgttcaatccctgcaaagaagactccgcgtccggattccgaatcgaaccaccccagccaactcctgttaccgagtcttctgaagacccacaacgtgcctacccaaccaggatcttccattccgggcctctagttaaccagagccagccatcaaaggctggaggcggcaaaaatggtgaacctcaggtccctggtgttgcgaatcaccctgtggttttgttgacaagatcaggtccccgggcagacggtagtggccagacaatggtcgctcaagctgaagcatttgctcatgggcggaggctgtcggagtccatcaatgagcatttcagtaacagtgggaagtacgatcaagtgttcccgaagaaggatgacaggaacattagggctgatggagctattgtaagtaacgtcctaccattttctggctcttgacaaaacagggctacggatccaaaggcagcaagatccaccactctgggcccctgacctgcccttcaggcagcaacgtcgacgagatgctgaaggagaacgaccggcaaatccaagaagtgttccggagaacccgggtggagaagtcgagagcgaggagggaccatggacatcaccagggcggtataaggcccggcgatttcggcgccatcccagtcttcccttccagccgctccagctatcaggctgtgcagcagtaaggccggagctcgaacaagatcggttggcgttggaacctccgatgtgtttcggtcccacgctttgtgtgctctccgtc

SEQ ID NO: 33046 - DNA, 1595 bp, Zea mays
  Clone ID: UC-ZMFLMO17057A12_FLI
cctcgtcttgcggatgacggtggcgaagaagacctcgcagctcggggaccagtccccggccatcccgcggctcggcgtgccagcgtacaagtggtggtctgaggcgctgcacgggatctccaaccagggccgcggcatccacctcgacggcccgctccgcgccgccactagctatcacaggtcatcctcaccgccgcgtccttcaacccgcacctctggtaccgcatcggccaggcttctacagatgccaagagaattattgacgaagaaagagctaatgctcggttggagataggaagtgctaaagcttctgtacaaaaaattcaatcagcacttaaagagcaggaaaaattttctcacagaactgggaagcaggatgtcgatgaactaaaggaagaagttcaagaagcaaggcaatggacattgagaacgagatccaagttctgtgtgatcaactggctaaaaaatcttcagattctcttcgccttttgaaagagttggagctgcatcgaagttacggggaaaatgacatgcccttgtatgaactaaagggtctagaaactttaggctcaacgttgcacatagttgttcacgactgtgcctctgtagatttctggaacagttcaatccaatggtttcgcatacagcctgaaggaagcaagaaagaaattatttgaggttgaacaattctcatcctacaaagtactaatattttctagagatgaagatatatttctgacattttctgttactaaaacttttaagcaccacaaaaccagcatatgctccagaaccacatgatgtgggccggtacacccaagctgaagtcaaatctggtggccaaacatcaatcacaaaaactgctggttcagtagatcctgtaatgatggatggattgtccaacacatacaactgttgtttaattgttttggatttgtgacatggctgacagttcttcagtttcgtagctgcaggattggttcattatgtagaggctcttgtaaggcgaagagaaactggttataatgtatgatcacgtggcaaaaaaaaatttaccatgtttttgttttaaagaaggcacacctttcatctctttcattatcacgcttctctttttttattgattgattgtgatcacatggtaggcctcatgtgcgctttgctgctgagggttggtcagtttttcttggaatttaccattattctcttgttttattgcttgattgtggcctcatgtgcgctttgttgctgcatttctcaggttcgacatgccctgtgcctactatcactctcgatttgaagaagagtctgaaggcttttgaactgcttgaagcattagtgtagctttggtgcttttgtgactaatcagctctggagcagctagagtgatgtagttgtgggcttttgaacaatagctagagtgatatgacacattagtgatgtagttgtaggcttttgaactgcttcaagctggagtgatgtcgttgtggtgcttttgtgactgatcatctctggagcttttgtgaatgatctagctagctatctgtaaatgatctagttgtgaatgatattataattgtgatacttttgtgaat

SEQ ID NO: 33047 - DNA, 1713 bp, Zea mays
  Clone ID: UC-ZMFLMO17057B09_FLI
gggcgccagtatcattggtcttcctaatgttggcaagtcaaacctcttcaacgccattgttgtgcgatgctttgaggatgacgatatagttcatgtcaatggaagggtcgagcccggatcagacattgatgtcattaacctagagctgatattttcagatctttaacaggtaatttggtcaacggatttcactttgtcttgctatcacgcatttcaaaagaaacttctttgctacctgtgtaataaccgtagatagagaagaggttagataagcttaacaagagcgatacacaagtaaaagtgaaggtaagacatacaaattctttcgttctgatgacctttttgttctatgtgctaattgattgcaccacttaggaacaagcagagaaatcaggattggaaaaaattcagtaggcacttatggaaggaaagcctgcaagatcggtcgatttggctgagcatgagaaagaagttataaaacatctttatctgctaactatgaaacctgtcatttctgttgctaatgtaatagaatctgatcttgctgaacctgatatcaatcctcgtgtcaaagaggtggctaaagcagcatcatatttgcagtatggtatggttacaatactagctcaggtttgttgtatacatcgaagtacaagaacctttgaagaaatttctgctaaataattttatattttttatgttgcctacccatatgtgtccacctatgctaacaaaatcatggaatgtataaaaagattgaaactgaactcgctgagctaccattggaagagagagtagagtatttaaaatctcttggtgttgctgaaagtggactaggaaatttggtaaaagcaacatataatctattggggttaagaacttatttcacaaccggagacaaggtgcatcatttgtgctgttaaagttttttccccgtcagttaaaagaaactgacagacctttaactgtgtccttttaggaaacaaaagctcagactattttttcaggcccttcttcctcacaattatttctactgtaatatttgaagaggtttttgtaatcattataactgcatgtgattctacatataggcgtgactgcgccacaagcagctggagttattcatagcgactttcagaaaggatttattagagttgaaactgtaagctgtacataacgatgagaattgaatgacgaagtttcagatttcggtttacatgttatgatatttctcagatacaatggcaatacttcacctctacggaatttggatataccgttacctgcttttttatgtttgatatttattaatcgtacactcattaataccatacctcaggtatcctacgatgattttgttgcagctggttttcttggagtagcaagggagaaaggactggaaaaatttcaaaaacatcgagtcaagaagttttggcagcactttcatttcatccttattgcagtgcctcgacagtagacataattaagttctgtccatgagtgggatttggggctttggttggcttgcgtgcccactcggtaatcaccatgaagcagaggatggaccgtgtcatctggagcagcaacagcaacagagtgtgggctatccatttgttgtagatgaattatgcgatttacatgcacaattctttgcataaataaaatatagtacacactaattcaactcaattttatctcaattctcatcggttt

SEQ ID NO: 33048 - DNA, 1220 bp, Zea mays
  Clone ID: UC-ZMFLMO17057B11_FLI
gatctctctccccccggccccgagcgcaccagattcacaccgcgcccgcataggtgcgtgtgcctgcggaagctggttgctgctcgcgctactagctgtttcgcgcggtgatcaacaatccggccgcgggagcggagctaggaggccgagagacacaatgaacatgttcgatgggatggagagtgctgggtacggtggcggcgctgggccgatgggcggggtggtgctgtcgcgggaccccaagccgcggctgcggtggacgcccgacctgcacgagcgcttcgtcgaggccgtcaccaagctcggcggggccgacaaggcgacgcccaagtcagtgctgcggctgatgggaatgaaagggctcaccttgtaccacttgaagagtcacctccagaaatacaggcttggaaagcagaccaagaaagacacgggtttggacgccggcagagtggcattcgcggcgcagggcatcaatttctccacaccagtacctcctcctagcattccatctacggccagtgataatacgggagaaacgccacttgcagatgcgctgaagtaccagattgaagtccaaaggaaattgcacgagcagctcgaggttcagaagaagctgcagatgcggatcgaggcgcaaggcaaatacttgcagacgatactcgagaaggcccagagcaacctctcgtaccacgcgactggagccgcaaacctagaagcaaccaggtcgcagctgacggacttcaacctcgcgctctcaggcttcatggacaacgtgacccaggcgtgcgagcagaacaacggcgagctggtgaaagccatgtccgaggacggtctcagagcgaacaatctagactttcagccgtaccatggagttcatgacggggacgatgtcaagtgcgctacggacgaagggttgctacttctggacctgaacatcagaggcgggtacggtcatcggatttcgacggatctgaagatgaatcaacacatgcggtgaaaagttcagtagaaaggcgaggacagtagtttaatcttgggtaacccatcaatctaagagaagaggtgcccttgtgtttgtgagaaattctttcggccatcttgattcctaacgatgcttctttatggtgatggtcagcgtattgcttatgtaaaatttggtgagaggctccgaataagggtaactaatcttatacaagatctttatacatacttggatttgt

SEQ ID NO: 33049 - DNA, 987 bp, Zea mays
  Clone ID: UC-ZMFLMO17057E03_FLI
tttataatactagccaccgatggggtatgggatgttctctcaaataaggaggctgtcgacatagtagcatcagccccatctcgtgcgacggcagccagggcccttgttgactgtgctgtcaggtcatggaggttgaagttcccaacatccaagagcgatgactgtgctgttgtctgcttattcttgggtcacgagaagtcggccgactcggttcaagggagtgaacccaatgtggagacagcagaacccaccgtggaggtttccagttccacacaggattccagtgcaggggttgacgaagacattgcagatgctggcatgcatgtatctagtgcagtgcacatttccgaggccacgctgcagcactccaccacgttaagggaggtcgacgagattgtaccggtcgacgaacctacagcctcgaaggagcctggaaggtgcgggtctgctcgcagcctggcagattgcatatcgacaaacgaggaagaggaatggtccgcgctcgaaggcgtgacacgggtgaattccctcctgaacctccctagactactgtcgggcgacaagcgatcgaccagctggaggaagcggcggtgaccggtgaggaagctctcctacaattctttgccgagttcaggtgggggttcatgcagaggcgcgtgcaaaatcctttagggcttgttcgtttacgtcggattgcacccggaatcgttccagctaatcaaagtttatataaattagagaaacaatccggctaagaatcgttccgacccaccaatccgacacaaacgaacaaggccttagtctctgggaatttgttatagctgatttttaggcttccccagattgttttgccggcaggcgcgggcgtttcagattgcttcttcattcttgtgcctttgccgggaggtgttcccagaaccattcttgggcttctctgtgtccgtttgtgcataaggaagtttttgttctgtgagaagcttcttttgt

SEQ ID NO: 33050 - DNA, 1102 bp, Zea mays
  Clone ID: UC-ZMFLMO17057E09_FLI
cccactccaaattcctctctcctcgcgctctccctcgccgccacccgccatgctcgcaactccatgagaacgccctggctgctctccccacgcttgcccacgccgcatcctctccctccccggcgcccctacgtcgcggttcgcggtggctcccgctgccgcgctcgccacacggagtagcgagggtgctacttaccaccttaccagcgttggagaccgaggtggcggctttgccggacaagggtgatcctccgcgggcgtcgccgccgcaaagcagatggacgcagagaggatgaatgccctggaacagatgttcaagcgactggccctcgccgacgacactggtccaaaccggcgaagacaggtcatgccctccaataatttctactcgatgttgctccacattattctgatatggagcatgattagcagctttgtgagtaagcattgacatgcttcggtcataactgtgcctctatttgatggcattcttcgagcctcgatccccaaacttacttcatttggagccatcatgtcttcgctctgaattggcctattagaatgtggcgagtctcctcccactcccagtgaaactcttactgacaaagataaaagagctgaacatcctcttcaatctcctccaaaaaagagctacagtcacaccaccaaagcaactcggccagcgcgcgggccggggtcgcatgggcgacgccggcgacaagtgtgcgctgcggctggccgccaccgcgaggaagtggctggaggacgtccgcgtcgaccgcgaaggccgcgtccaccccgccgtagccagcggggggcaggcgctcacctggctcgcgactgccggcgcccgcgtctcgctggccgagcccggccgcgtcgtctgctcgctccgcgtgggcgccccgctcaccgacgcggaggggaggtggcacgccggggccatcgcggtggcggcggacaacgtgtgcgcggcggcggtcttcacggctctgggcgcggacgtgctcaccgtccagtacagcctgtcctacttctcgcccgcccatctcgacgaggaggtggagatggaggggcgagtggtgggccggaaggcggcgct

SEQ ID NO: 33051 - DNA, 1089 bp, Zea mays
  Clone ID: UC-ZMFLMO17057F07_FLI
agctcttgcactagctagagaccgaacagagagagattggagaaccatgatgaggtctggccttatctcgctatgtttccacctagccctggccatcacactggctgcaagtgttcctggccttgctcgtagtagggtaatcgacatggaaccgcaactcaaaccgacgctgcaactagaaccaaagcatggtgtatctcaaccagacagaaaccaagaacccaaaccgacaccacagcctgagccaaaaccagagcctaaaccggaaccgaaacctgcaccacaaccagaccccaaacccgcaccacagccggacccaaaacccgcaccacaaccggacccaaaaccagaacccaaacctacaccacagccagacccaaaaccttcaccacaaccaggcccagagccgaaacccaagccagcgccacagcctgaaccaaaaccagaacccaaacctacaccacaaccagacccaaaacctggaccacaaccagacccaaaaccagaacccaaacctacaccacaaccaggcccagagccgaaacccaagccagcgccacagcctgaaccaaaacccacactgcaaccagatccgaaacctgagccaaaaccaacaccacaaccacccttcccacagcccgagcctcaaccagatcccgaaccccaacccgaaccatccaagccaggccctaaacctcaacctgaaccatccaagctagaacctcagccaggatctaaacctacaccggagccaaaaccctaaccagaaccatcgaagcggagccaccgtcgtctcttccaccaccatttggcacgggcgtcgtggaagggaactgagaggagcatagtggaaccgatcatcatcgtggatgccatctatagcttttggctatgactgataagtaatactgtttgtgtaagagtgagctctcttttttatatagggtgtgtgtattgtgtgtagtactatatttggacgatgtgtgtgtacccacctttttccgtgtgtttccatcagcatgcatccatgatccatgtatatgtcttgctaagtttgtattatcaatgaataaaaaaacatgcctttgt

SEQ ID NO: 33052 - DNA, 2089 bp, Zea mays
  Clone ID: UC-ZMFLMO17058F06_FLI
tttgatcaaccgccatccattctcctcctccgttgcagctgcggcatccatccagtagtccgaccaatccatggcttcagcgttcgggaccgcctccacttgcggcattaaacatgcacctgccggcgttgcgcttgctgcgcccatgaagcacctttccctcgtctcgccctcgctggtttcgcttccgcgcaagatgaggccgcgaaggaagtacaacttcagggtaaacgctgcaaaggagctgcatttcaacaaggatggctcggctatcaggaaaatgcaaaatggggtcaacaagcttgcagatctcgtcggggttactcttggaccaaaggggcgaaatgtagtcctcgaaagcaagtatggctcacctaaaattgtcaatgatggtgtcactgtggcaaaggaggttgaacttgaggaccctgttgaaaatattggtgctaaattggtccgccaagctgctgctaaaacaaatgacttggctggtgatgggacaaccacttcggttgtccttgctcaagggatgattactgagggtgtaaaggttgtagctgctggtgctaatccagtgcagatcacccgtggtattgagaaaacagccaaagcactagtcagtgaactccaaaagatgtccaaggaggttgaggacagtgagcttgctgatgttgctgcagttagtgcgggaaataactatgaaattgggaatatgatagctgaggctatgaaaaaggttgggcggcagggagtggtcacacttgaagaaggaaagagtgctgaaaataacctctattctgttgagggaatgcagtttgaccgtggctatatttctccctactttgtgactgacagtgaaaaaatgacagtcgagtatgagaactgcaagcttctccttgtggacaagaaaattaacaatgccagagatcttatcactatcctggaggatgctattagaagtggatatccaattctaatagtggcagaggacattgagcaggaagctcttgcaacccttgtggttaataggcttagaggtgcattgaagattgctgctattaaggcccctggttttggagagcgcaaaagtcaatatcttgatgacattgctactctcactggaggcactgtcatcagagaagaagttggattatccttagacaaggcagacaatgcggtcctaggaactgctgctaaggttgtagttaccaaggattcaacaacaatagtgggagatggcactacacaggaggaagtgaacaaaagggtgacacaaatcaagaaccagattgaggctactgaacaagaatatgagagagaaaaactaaacgagaggatagctaaactctctggtggtgttgctgtcattcaggtaggagcacagacagaaactgagctcaaggaaaagaaattgagggttgaggatgccctgaatgctacaaaggcagcagtcgaggaaggtatcgttgtaggtggtggctgtacccttttgaggcttgcatcaaaagttgatgcaattatagagacccttgagaacgatgaacagaaggttggggctgaaattgtaaggaagtccttgagctatccacttaaattgattgcaaaaaatgcaggcgttaatggcagtgtggttactgagaaggttcttgccaatgagaacttcaggtatgggtacaatgcggctacaggggagtatgaggacttgatggctgctggtatcattgatcccaccaaggttgtgaggtgctgcttggagcatgctgcatcggtggcgaaaaccttcatcacctctgatgccgttgttgttgacgccaaggtggctgagcaagcaccatcatctcctgcaaacccaatggcaatgggtggtggctcaggttttgggttctaaattgttcagctgcccttcgttccatcgcagcgacagaatcttagtttcgagatataataataaattggatgatgttagtttcgagatattagttggatgttgttattgttgtctcaaattataaaaaatcaagtgcaagtaaccaagacagctgaaaaaaaatagttttgatgagatgctgcttcgtttttcttttctact

SEQ ID NO: 33053 - DNA, 1533 bp, Zea mays
  Clone ID: UC-ZMFLMO17058F08_FLI
ggggaacatttgcaagggttggaccagagatcaggtgttgaacaccctaaaaagtattggaattcaagagtgtgagataagctttcccagttacaagggaggaagccgagggtttgcttttcttaagttcacctcacattactatgctagagcagcacttcgtcgcttaatgaaacccgatgctatttttggtactgatagaagcgctaaagtatccttttatcgaacccccacaaaatcatccaagagacttatacaggcaaaaatagtatacctggaacatgtccctctttcttgggatgaaaataaagttaaggaatactgtgaagaatatggggagatcctgaaagctgatgttttccagatatcaaagaatatggaaaatgaaacaatttcttttgttgaattctcatccaggaagggtgcgttagcttgtgtgacaggaataaacaaagcaaatattgttgatggaagcttcaagttgtgtgcatatcttgcttggccaaaaagtgcttcaaaggtcaatagtgctgcaccttcaaatgctgccaccgcaaccgagaaggacaaaacccacacagagaagattcttgtagacatcgatttgcaacataaattccagaaaggcgacaagagcaaacttacatctcagacaaaggaggcaattatgaagaaaaaatcatcaagtaaattaccaaatgacaatgatacaaaactaacctcacaaggtgctgccgaagtaccacaaacctccaaatcttctgaaggcaagaggaaagttggaaaaaacaaacatgcctctgtataccaaaaaccattgaagaaagcaataaataatcgtaacgttgatgagagccagctaactcatcggagtgctgcagtactgcaaacgtctaacacttccaaagggaaaaggaaagccagtgagaacagaagtttatatttaaacgaaaaggctctcaagaaagcacgtggcaatagtaatttgggtggaagttcaagatctaaatcatatgcctctgatctggaacctcatgctggattcatttcgcctgcaattcgagataatggcagtgatgcatataatcgacagagaactgcacggtatgatatccatcctatagatgtccatccttatgctagagcgccatcatcagcctactctggttacaaaagccatgctggctatgaggctgcaaatacatatgaatacgcagggaaccgggcgcctacacctccaagtggatcttacatccctcgaagaggacattactaacaaaaaatggagtgctggctctgtgcatccattcgatcgcatggtaacaaggaatcaaggatctccgtatttagatgtttcatacatgttatgtagcagttaaaaagtaacttgtttaaggaaaataaggaccctctgcagctttccctttgactgaagtgcagcccggcacaccggttgcttgttgaagaatgcttttttattattattgtagttaagagtccagacgtcgttattaccacttatcgtcgtattgg

SEQ ID NO: 33054 - DNA, 953 bp, Zea mays
  Clone ID: UC-ZMFLMO17058G06_FLI
gaaaaatatatcatgtggatgcatatcgatgatgctaactacaccaaagcatctgtcggtgtggccgtgagtagctctccgactggaccttttacttacctttacagctttcgtccacatggttgtgagagtagagacatgacagtcttcaaagatgacgatggaatggcttacctcttctattcttctcgtgacaatactgagctccatgttagcccattgacagaggactaccttcagatcacagcagcaatgaagagaatactaataaggcggcatcgtgaggctccagccgtcttcaagcaccaggggacctactacatgatcacctctggttgctcaggctgggctcccaacagggcattggcacatgctgcagagtctatcatgggcccatgggagacactgggaaacccttgcgttggaggcaacaggttttaccgccttacaacattcttatctcaaagcacatttgtgcttcccctccctggtttgtctggtgcatttatcttcatggcggataggtggagtccgtcaaacttgagagactcccggtatgtgtggcttcctctattcgtcggagggctcgcagacgaacctttagattacagttttggtttccctctgtggtcaagggtgtcgatttattggcacaagaaatggcgcctcccagaagattggaagattgcaaacacagcaaatacataagatagctagctatacttgaaccgatagatcgttcataaacttgcttgaggattctaatcgcttgctcctcaagcttttgtacaaaacagtcatcctaaacatgcttcagtgatatatcttttttttggcgtgtgcatgtgtctgtaacttctcttggaaaaagaagtgtgtttcagataactgtattgataattggtatgaccatactctgtcgtttatgccaggacagcaaggtgcatcttgtc

SEQ ID NO: 33055 - DNA, 1453 bp, Zea mays
  Clone ID: UC-ZMFLMO17058G09_FLI
acgccgcctgcgtgctctcgtcggcggccaagagcaacggcttcgcgctgcgcctggggccaggccacgccgcgcgggacgcgttcctcggcgcgcgcctcgcgtggaccagcgccggcgccgaccgcctcgtgctgcgcgtgcgccgccacgaccgcacccgcgtgctgcgcccttacctgcagcacctcgagtccgtcgccgacgagatggaggcgcgccgccgcgagctgcggctctacgccagcaccagcgctagcggagccggtccctcgccggcgccgcggtggacgtccgcgcccttcacccacccggccacgctcgacacggtggtcatggaccccgagctcaaggcgcgcgtccgcgccgacctggagagcttcctcaagggccgcggctactaccaccgcctcggccgcgtctggcgcaggagctacctgctctacggcgctcccggcacgggcaagtccacgttcgccgctgcgatggcgaggttcctgggatacgacgtctacgacatggacctgtcccgcgccggcgtcggcgacgacctccgcgccctgcttctggacaccaccccgcggtcgctcatcctcgtggaggacctcgaccgctaccttcgcggcggcggggacggcgagacggcggcggcgaggacggcgcgcgtgctcggcttcatggacggggtctcctcgtgctgcggcgaggagcgcgtgatggtgttcaccatgagcggaggcaaggacggcgtggacccggcggtgctgcggccggggcggctcgacgtgcacatccacttcaccatgtgcgacttcgaggccttcaaggcgctggcgagcagctacctggggctcaaggaccacaagctgtacccgcaggtggaggaggggttccaggccggcgcccgcctcagccccgccgagctcggcgagatcatgctcgccaaccgcgggtccccgagccgcgcgctccgcaccgtcatcagcgcgctgcagcacgtggcgccgtcagcgccgccagctgcgcagccgcagcggaccctcgccgcggcacggccgccgagactgacgtcgagatggtcggggcacttcgacgaggccagcgggagcgcgggtggtttcgccaaggacgcaccgatcagggagatcaagaagctgtacggtctgatcaagtaccggagccgcaaggacgccggcgtcgtgccggtggacgacagcgcggcgtcgcagaacgggcggggcagcgacgttagctacgagaaggaccggtgatagtttatctgggctttgctctctctcctctttttttcttcttcttcctgttttcacttttgatactgatttctaagtacaaattcttgtttattcgaaacgtcggggctgtacattgtgagtaatctttgtagtggtgggtagggtgcttcttggtactacagaaaccgtgttcatacacc

SEQ ID NO: 33056 - DNA, 2613 bp, Zea mays
  Clone ID: UC-ZMFLMO17059C05_FLI
gctccgcgcgtcgccggacccggcggcgcccttcgggttcgccttctccgtcgacgccggcaccgtcgcgtaccagctccgctcggggctgcccgccaacgcgcccgtcctccacatcggcaccctcccagccgccgcggccgaagccgcctcagatgagctgtccgactacctgctagccaatttctcgtgcctgccggtgtacctccctaccgacctccaccaccgcttctaccacggattctgcaagcactacctctggccgctcctccattacctcctcccgctgacgccgtcgtcgctcggcggcctgccgttccagcggactctataccactccttcctctcggcgaacagggccttcgccgaccgcctcaccgaggtgctgtgccccgacgaggacctcgtctggatccacgactaccacctcctcgcgctcccgaccttcctccgcaagcgcttcccgcgagccaaggtcggattcttcctccactcacctttcccctcgtcggagatcttccgcaccatccccgtgcgggatgacctcgtccgcgccctcctcaaccccgacctcgtcggcttccacaccttcgactacgcgcggcacttcctgaccgcgtgctcgcggctgctcggactcgactaccagtccaagcgcggctacatcggcatcgagtactacggccgcaccgtcacggtcaagattctccccgtcgggatcgacatgggccagctcagatcggtggtctcggcgccggagacggaggatgcggtgcggcgggtgaccgaggcgtacaaggggcggcgcctcatggtcggcgtcgacgacgtcgatctgttcaaggggatcgggctcaagttcctggcgatggagcagctgctcgtggagcaccgggagctccgcggccacgccgtgctcgtgcagatcgccaaccctgcgcgcagcgaggggcgcgacgtgcagggcgtgcaggacgaggccagggccatcagcgcccgggtcaatgcgcgcttcggcacccccgggtacacgccgatcgtgctcatcgacgccccggtgacgccgcaggagaaggctgcctactacgcggctgccgagtgctgcgtcgtcagcgccgtccgcgacgggctcaaccggatcccctacatctacacggtgtgccggcaggagagcaccgcgctcggagacgactcgcccaagcggagcgtcatcgtgctctcggagttcgtcggttgctccccgtccctgagcggcgcgatccgcgtcaacccgtggagcgtggagtccgtggcggaggccatgaacgccgcgctgcggatgccggaggccgagcagcggctgcggcacgagaagcactacaagtacgtgagcacccacgacgtcgcctactgggcgcggtccttcgactcggacctgcagcgcgcctgcaaggaccatttctcgcgccggcattgggggatcggcttcggcatgagtttcaaggtggtggcccttggcccgaatttccggcgcctctccgtggagcacattgtcccgtcgtatcggaggacggataaccggctgattctcctggactacgacggcaccgtgatgccggagaactccatcgacaggacgccgagcagtgaggtcatttctgtgttgaatcgtctgtgcgaggaccccaagaacagagtgttcatcgtaagcggacgggggaaggacgagctgagcaggtggttcgccccctgcgagaagctgggcatcgccgcggagcacggttacctcacaaggtggagcagggacgcgccatgggatacctccgggttggccgccgacttcgactggaagaagaccgcggagccggtgatgcagctgtacacggaggcaacagatggctcctacatcgagcacaaggagagcgccatcgtgtggcaccaccacgaggcggatccggacttcggttcctgccaggctaaggaactgctcgaccatctcgagaacgtgctggccaacgagcccgtggtggtgaagagaggccagcacatcgtcgaggttaacccccagggcatcagcaaaggcgtggtagtggacagcctcctgtcgtcgatggtgaggacggggaagccgccggacttcgtgctgtgcatcggcgacgaccggtcggacgaggacatgttcgagagcatcgtgtgcccggcctccaacagcggcgtgaagctgccggccagcagcgaggtgttcgcgtgcacggtgggcaagaagccgagcatggccaggtactacctggacgacacggtggacgtggtcaagatgctggacggcctggccagcgcgccgtcgcagcagcggcccaggccggcggtgcagctgcgggtctcgttcgaaggctcgctctgagggggaagaggagaacacacagcgctagtagcagcagtaaacagcaaacatcgagcaaggataaccagtggtgatgaacacaacgagattcagcagacggcgtggtgtaggattgattagctgcagtttacaggatcgacattttttttgctttcttctacattactaccccaaatctttcgtgcctgtatatgcccgcatggtaatatgcaaagaataacgtttcgaccacc

SEQ ID NO: 33057 - DNA, 757 bp, Zea mays
  Clone ID: UC-ZMFLMO17059D01_FLI
aattctcttgggtggttcatcagtttccaacaaggattccttttttgattccagcggtgtagtatgccagtttttccccatatttctccgcgattttttttgggcaggacttcttcgtgaattcacgcggaaacaagctcttcacttgcaggtggacaccgaggaaatcggagtgcaaagctttgatctttatctgccacggatacggagccgagtgcagcatatccatgggagacacggccgctcgattagtacaccatggatacgttgttcacggaatcgaccacgagggccacggcaaatcttcaggctcgaaaggctacctgtcgagcttcggcgacgtcgtcagagactgctcggaccatttcaagagtgtctgtgagaaacaggagaacaggctgaagaagaggttcctctacggcttctccatgggaggaaccgtggtgcttcagctccacaggaaggatcctctctactgggacggtgccgtgctgcttgccccaatgtgcaagggttattgtatatcaacagccaacagtagtgtcgaaggagcacaagatgaggtgtgagcacaaagtggccagcaagaatggagtcatggaacatgggcaggaggggtgcggcagcggcaaccgatgtatcccttggacaatctggttttgacatgatgcaaatcaatctgctgtacattgtattctgcacttgcacagattgtttggctaattacaagattatctcaatgttttggtttggattt

SEQ ID NO: 33058 - DNA, 906 bp, Zea mays
  Clone ID: UC-ZMFLMO17059D05_FLI
gccttgaaacaactctgcgtcgacgcgcccggctggagtcgttcgccctgcactgcaacgtcttcgtcaccaaccgcgacgcttcctgtgaatgggattgggatactcctgttgaagtcgacttactcggcccgccggccctccgggacgcgtatctgtcacacatcggctgcgacacccgcctcgacaccgagcataacatgctctacccttccttgtgcctcgacgtcgtgctagcccggatcctgactatttgctccgtcgtcttgctgcatgttgattcactcagctggctcgacccattcaaagacatgccgaacctagaagagttgcagctgctgatggactacgaaggttactgccttgaggccgtgtccggtttcttcaagctcatcccacttccagtccttcaacggctctttgtgcgtctccatattgatcacgagccggagggagaaggcagctcatcggcagcagtgtggagcgtcgagaacgatgacagcgaagacatggcacccagggaggagatcgtccttgaccagctgacattcgttaagtttgtgaattttagtgggacatggtgccagctgcagttgctcagcttcttcctggataagtcccctgtcctccagcagctggtgctggtcacgccggaaggggaggaagctctgggagacgaccgactaaaggtcatctatgagcgggtggccgcattggagaaggcgtcgagcgaggcaagcattaccatgtgccggcccaaggaagacgataccccgaaccatccacacacgaggtacttccacgaggagtatgaaactatgtaactatgctatataagcatgcatcgatcaggcatatgcatgattcaaactctttatcaattaggggtgaaaacgggtcaggtat

SEQ ID NO: 33059 - DNA, 866 bp, Zea mays
  Clone ID: UC-ZMFLMO17064D12_FLI
ggtgccatggtccccatccgtgtccacaccgtcctcatttccacccagcacgacgagacagtgaccaatgatgagatcgctgctgacctgaaggagcatgtcatcaagcctgtcatccctgagcagtaccttgacgagaagaccatcttccaccttaacccatccggccgctttgtcattggtggacctcacggcgatgctggtctcactggccgcaagatcatcattgacacctacggtggctggggagcccatggtggtggcgctttctccggcaaggacccaaccaaggttgaccgcagcggagcctatgtcgcgaggcaggctgccaagagcatcgtcgccagcggccttgctcgccgcgccatcgtccaggtgtcttacgccatcggcgtgcccgagcctctctccgtgttcgtcgacacgtacggcaccggcgcgatccccgacaaggagatcctcaagattgtcaaggagaacttcgatttcaggcctggcatgatcatcatcaaccttgacctcaagaaaggcggcaacgggcgctacctcaagacggcggcctatggccactttggaagggacgaccctgacttcacctgggaggtggtgaagccactcaagtcggagaaaccttctgcctaaggcggccttttttttcagtaagaagcttttggtggtctgctgtgcttaatcatgcttttatatggcttctacatgttgtggttctttcttgatctgcaccgcgcttatcgtttgtgttgtactgccctaataagtggtgcttatgaggactgtttctggttttgctgcttatgttgtaatgctttgaaacaatgaaagaagctacaggccacagctattttgag

SEQ ID NO: 33060 - DNA, 1889 bp, Zea mays
  Clone ID: UC-ZMFLMO17064G08_FLI
cgggatccccatccgttccagccccccagaacccagagctccaaacctaggccggagccgcggtgcaagcagctacgtggattggacttggacgtctggctctggaggtcccaagttcccaacgcttgctggagttgagatctggtgggcttccggaggagacgccgacggtttgcgaggtttgctggctccgtggcgtcgcggaaggtcatggagcaccgcgccttcgactgcagcgggagtgatgatgatctccctccaacatatcaaattagagtaccgagaatgcatttcagtgggaacagaaggccattagcaggcgcattttctcagccaagaccacacaacaagttggatagcgatatacatcagattgagcaacaggcatatactggtgttcttagagcattcaaaatgcaatcggatgccctgacatgggaaaaagaaagtctaattactgaactaagaagagagttgaaagtctctgatgtggaacacaggatgctattaaacatggtcaatgaagaggaggctatccatagaataaggcagtcaaggcagggatgtggaatgcaatctagcttgccttataatagcgtagttgatcacaaccttggacctatcaagcgtcagaagaaatcacatcccatctattcactccctgtggatcctcattcacccagcatgcctttgaaagcattggtgggcaacaaggcatatacagtaggtttggagtattcctgatcctgctttttgttcaccatcaagagtgtgcttatagttcttaatagctgacctcctgtcaagcgcgaaaaacatgccagttgcaaacaaattatgttcaagtggcacacgcacatacacacaaattgaaccaagatgaaaaattaatcttttgaaaaataggcaagtcaggaaaggtaatatgaaagcatgttgtggcatcctatttcattggcaatgttttgttgacgaggagccagaattctctacctgctggtttaatgttctaatacatttttagtcaatgcttgatcaagcattgccctaacctagcatctgatattttgcttaatgagttgggttcaacgcccattttattgtttcaaaatcttaatcatcattgaacactcatgtgtagttagtgtagcatgctttgtgtcgcactggcagttaaaaagtccccccaccccccaccccaccccgacagctggcacctgaaaacataagacggggatctgcctatcaaacccttccacatcaggttggttggctggcatctgatggtgctacgaaaggtatggatgggagaagcggaaggtatcacacgaacgagtattatgcttcacataatgacatggggcttttgaacttcaatcgtactgacatacctgatactgaaactcttgtgaaaaaggtacatatttctcagtttggtgaaattgaatggaagattgttatttcaatgccttctgtgttgtcaacaggtggagagggtattatcccggccagatgtgtattcaattgaaagggcaaaggaactgcttataggccaagagcagtcattgcttgatgcaattgccaaacttgatgaagcatctgaccatgaaagcgaggatacgctcgttgggagccggatacacgccgccatcgggtgacactggcggcacgcctctgacagggggcgatgttttggagttcagacctctggcagcaggcggagaggcaacgatatgtgaaatagtgctgtgtaagtaaaacgctacctgttgttagtccggtaggttaagttcttttggcagccaggcaaatctgtgcatgcaccatgcagtgtgatgggaatatatttcttgagcaccatcacatgtgatgtgatgctgtctcgtttc

SEQ ID NO: 33061 - DNA, 828 bp, Zea mays
  Clone ID: UC-ZMFLMO17064G12_FLI
tggcataccaagggtttgccagtggtgatccagagagagatgccaaggcaatccgaattttccttgaagatggacaccaaattggatgtgctcagtcatacgcaaagaacatgggactttatggacaaagagcaggatgcctgagtattttgtgtgaggatgagatgcaagcagttgctgtcaagagccaactgcaacagatcgcaagaccaatgtacagcaacccacctgttcatggtgcactggttgtttctataatcctcagtgatccagaattgaagagtttgtggttaaaagaagtcaagggtatggctgatcgtatcattggaatgcggaaggcacttaaggaaaatcttgaaaagctaggttcacctttgtcatgggatcatatcactaatcagattggaatgttctgctacagtgggatgacacctgaacaagttgaccgtttaacaaatgaataccacatttacatgacccgcaatgggaggataagcatggctggtgttacgacaggaaatgttggttacctagcaaatgcaattcatgaggttaccaaaccaaattgagttagggtcctaccttctttggtcgatggaagctgatggaatgagactgtgaagcggcgtttccccccctctgttcctgacagaaataagtttagcctgctgctaccatatacatggacacagactcagatgtagacactcaagttttgagagctgtgatcctgtttcatttaatcaaaaacaattttgtttttttttcatcttgtcatggcaaatgttacaccagctgcaaaataattacaataattgatcttgatcc

SEQ ID NO: 33062 - DNA, 3054 bp, Zea mays
  Clone ID: UC-ZMFLMO17067C11_FLI
acgagcgccgcgtgcagacggagtggtagaaaaagctggatgtccatcgccttgcttccaggttttctccaaccatgtccaccaacacactgatctagtactaggactactaccagatcgatcctgcctgcctgcctgcttgtaacagcaacagcagcagaagtggcgcactgtgctttgcggtggcggaggctgcgagagaggaggaacttgcaagccgacttccatggctgccgccttctccgccgctatcctcttccacctgctgctgctcctcttctcgccttccgctgcgcagcctggtttcattagcttggactgcgggggagctcgtgatcacacggatgccattgggatccagtggacctctgatgccagcttcgtctctggcggccaggccgcgcagctgctggtccagaatggcctgcagcagacccagcagcagctgaccaccgtgcgctacttccccgcggacaacaggaagcactgctacaccatgaacgtcaggaacaggacgcgctaccttgtcagggccactttcctctacggcaacttcgataacagcaacgtctacccgaagttcgatatctccctcggagcgtctccctggtccaccatcgtcgtcgacgacgccaccacccccgtcgttgaggaagccatcatcttggctgctgctcccacgctcagtgtatgtctctccaatgccagcacgggacagcccttcatctctactctggagcttcgacagtttaacggttcgctctactacaccactgacgagacacgcttctttcttggactgtctgcgaggataaattttggcgcaggaagcaatgattcagtgagatatcctgatgatccatttgatagaatctgggaatctgattctgtgaggagagcaaattaccttgttgatgttgctccagggactgaaagaatatcaactacaaaacccatatttgtcggtaccaacgaagaaccacctgaaaaggtcatgcaaacagcagtagttggccaggatgggtcattgaactaccgccttgatttggaaggtttcccagcaaatgcttggggagtctcgtattttgcagaaattgaagatttggcaccaaatgaaacgaggaaatttaagttagaggtccctggcatgccagcactcagtaaaccaactgttgatgtggaggagaatgctcaagggaaataccgtttgtatgaaccaggctacacgaatttgtcacttccgtttgttttctcctttgggttcaggaagacgaatgattcttcaaaggggcctattttgaatgccctggagatttacaaatatgtccaaattactatgggatcacaggatgcaaatatcatggccagcatggtatcacgatatccacaggaaagttgggcacaagagggtggtgatccgtgcttaccagcatcatggtcctgggtgcaatgcagttcagaaacttctccaaggatattctcaatcacattgtctgggaagaacattaccggaagtatcccggtggaactgacaaagctatcagggctggttgagctaaggcttgatggtaattcattttctggccaaattcctgatttcagagaatgtgggaatttgcagtatattcaccttgagaacaatcagttaactggtgaattgccatcttctttgggtgacctacctaacctgaaagagttgtatgttcaaaataacaagctgtctgggcaggttccaaaagcacttttcaagagaagcattattttgaacttctcaggcaacagtggccttcacatagtaagcaatggcattagccacaccataattattatatgtgtggtgattggagccgttgtcttactgggtgttgctattgggtgctatttcattacatgtaggagaaagaataaatctcatgaagacactgttgtcattgcagcagcaccagctaaaaaacttggttcatattttagtgaagtggctacagaatcagcacacagattttctttatctgaaattgaaaatgctactgacaaatttgagagaagaattgggtctggaggctttggcatagtatactatggaaagttggctgatgggagagagattgcagtcaaacttctcacgaatgactcgtatcagggaatcagagaattcttgaatgaggtgacattgctttccagaatacatcatagacacctggttacattccttggttacagtcagcaagatggcaaaaacatactagtgtatgagttcatgcataatgggacactaaaagagcaccttcgtggagctgataatgaaaagataactagctggctgaagcgtctcgagattgcagaagattctgcgaaaggtatagagtatctccacacgggatgctccccaacaatcatccatagagacctgaagagcagtaacattctcctagacaagaacatgagagcaaaagtggcagactttgggctttcgaaacctgcagtggatgggtctcatgtgtcaagtatagttcgagggacagttggatacctggacccagagtactacatctcgcagcagctgacggagaagagcgacatctacagcttcggcgtgattttgctggagctcatctctgggcatgaacccatctcgaatgacaactttgggctcaactgccggaacattgttgcgtgggcccgatcgcacatcgagagcgggaacatccacgccatcattgatgagtcgttggacagaggctgctatgacctgcagtcggtgtggaagatcgcggaggtggccataatgtgtgtgaagcccaagggcgcccagaggcctcccatctcggaagtgctcaaggagatccaggacgccattgccatggagcgggtgctcgtgtccaattgcagcaacaggatgggttcaggtagcgtggagcagaatggaggagcatctttcgacgagctgctcatgcagccgggtctcagatgagatgagaacctactcgtaccttgagtccattgtatgtagtaattaatgtgtttactacattttttttgagaaacaaattaagt

SEQ ID NO: 33063 - DNA, 2374 bp, Zea mays
  Clone ID: UC-ZMFLMO17067D01_FLI
cccagtcccagcttacgaacgagacgaccttgtggacacctgattggaagtcaacaccccctatgagcagtcccagtttgctcatcctctgcggactgcggccgaacgcccatcacgccacgcgccccttccccaatccccatggagatctccgccggcgtcaccactgtcaccgccgtgtcgatcctcatcctcctgttgctgccgcaacccgcggcgccgttctccttcacatacaacttcacctcgccctcggacacgccgccgcccgggattgccttccagggggacgccttctacaacaaggccatccgcctcacccgcgacgagcgcctcggccccatcaccagcagcaccggccgcgccttctactcccacgccgtcccgctcgccgaccccgtctcccgccgcccggcctccttcgtcaccgccttcgccttctccatcgccgcccccgacccggcctccgcctcgggcgacgggcttgccttcttcctctccccgttcccatccgtcctccccgaatcctcggcggggggactactcggcctcttcaattcatcctcggtccgcgccggcacgctcgtcgccgtcgagttcgatacccacaagaacgagtgggaccccagcggcgaccacgtcggcgtcgatctcggggggatcgtctcctccgccaccgccgactggcctaccagcatgaaggacggccgcacggcccacgcgcgcgtcgagtacgacggcgtcgccaagaacctcaccgtctcgctctcgtacggctccgcgcgcccgaacaccacgggtgacgtccttctctggtatgccgtcgatctgagggaccacctgccggactccgtcgccgtaggcttctccgcagccacgggcgaggccgcggagctgcaccaggtgctctactgggagttcacctccaccgtcgaccctaaggaggagacggtggtcctgtgggtggtgttagggctgtgcgctttgcttctcgtactcgtcggcgcgggcatcgtctggttcgtcaggcaatggaggaaggccggacaattcgacgacggtgacatcgaggtcgacgacgtcatgggtggcgagtacgacgagctcgcggacgagttcgttgtccagtgcggcccgagaaggttcaggtacgccgaattggcggcggccacgaagaatttcgcggaggagcggaagctcgggcaaggcgggttcggcgccgtgtaccgggggttcctgaaggaactcggctttgaggttgccatcaagagggtgtccaagggctcaacgcaggggcgcaaggagtacgccgccgaggtgcgcatcatcagccagctgcgccaccggcacctcgtccgcctcgtcggttggtgccacgagcaccggggcgacttcctgctcgtgtacgagctgatgcccaacggcagcgtcgaccaccacctctacggcaagggcatgctcctcacctggccgatgcggtacgacatatcgctgggcctcgcgtcggcgatgctctacctccacgaggagtgtccacagtgcatcgtccacagggatgtcaagcccagcaatgtcatgctggacgccgccttcaacgcgaagctcggagactttggcctcgccaagctcgtggaacatggtagccagccgtacaccactgtcctggccggcaccctgggctacttggcgccggagtgcgtgatgacaggcaaggcgagccgggagtcggacgtgtacagcttcggtgtcgttgcactggagatcgcgtgcggccgacggcccgcagagctcaacaacgagccaagcaaggcgagactggtgccttgggtgtgggaactgtatggcaagaacgccctccttgaagcagcagactggaggctgaaggggcagttcgatgagaagcagatggagcgcctgatgattgtgggtttgtggtgtgctcaccctgactatgcgcataggccaagcatcaggcaggccctgaacgtgcttacgtttgaggcgccattgccggtgctgccggagaagatgccggtgccgacgtatttccccttgcctgatctcgttgcttcgatttctgttgggggaacctcgagcgccgaggatccagatccaggtgttagtgattatgggtcctcgggtaaagtttcatcagtcagggataggctgctggagccatgagccgatgacggagttttctgtgttttactgcaaacacgaggagtgaatctacggttttcagattcaggtgtatagcatcgaaatgtattgattgttaattcataggtaagggtggcaaaataatttgtgctgttttatttttttcacatacaagtttgctatcataatatgcagttttgattttgttactgct

SEQ ID NO: 33064 - DNA, 6159 bp, Zea mays
  Clone ID: UC-ZMFLMO17067D03_FLI
tcttcatctggtgtagatgatgttagtcttaacccaaccttttcaactgttagtggtgtagcagacactagttatgttccttcatattctcaggtctcatcacaaggcactgctgtggcactggcaggaatccagaaggattttgtgacagttaagttggatacattgttaccagatagtggtaagggtgctcctcctgttaatgagggagataaaggtgctactgttacaacacctgtggcaaaagatatatgtgctgggactgtgacaacatcagacaacactgtcaccctgacaccaaatactcttaaggaaaacattggattagttcaagtggcatctgcaccttctatgctcgtggcttctgaagaactaatgaaaatagcacatgttgcggtggccgataagcctgttgagaagcaaactgcttcacgtcgccgcagaaagaaaacatctagtagcgaggatactggagtcagcactagacaaagatcagctatgaaaagatcttactacaacacctctgttgccgttgatgatattggttctgctgtgatcccaaatgaaaaatcaggaataacgaaggaaagagatgtcagttcaattcaaagtacatccaatgaactaccaaatattaactcaccattgtatgagaagtctggatatgattctcaaccaagcacacctatagctgtccccatcaatgaagacactcttcctagtggttttgacacctgtactaattctatgataactcttgccacatctgccaactctgctgaagatgataaaccagttgatttgcaccttaatgcacctgtttctgttgattcccaaaaccaagaacaacacatgacagggaaggaccatttggcagtgtgttctagaatctttgctactcagttacagacggacactgcaaatcctgctattgatcataaaccaggaactgcccagtttgaaccatctgcttccttgccccagaattcaggcaaggatgctactgcactaccttctgaggttgacagtgctgctccaaatagggcatcaagcaggaggaggaaagggtcaactcgagaaccacgcaccagaagtaattctgcatcagctgcaagtgaacgtcgtgcccgacttactggattgaagcaggcagaggacataaagaagttagagatgtcagcaacgccgaccacaacagtgtgtatttcatcggtagagcaacagggagctgcttctttaagtgcgaagattaccaatgcttctgtttctgaaggacagaagaatcctggaaattatatgccttctgccatttcaattcccgtggggagccatgttctgggcctgggcgcaacaagtattgaagaaacaactgccactatgataactcaggctcctgcagtttcaaaatcagaacgaagaaaacttccaggaggcagtcaacaaggtattcagtttgagagttcagcatcaaaaacaaagatggtatcagctgtggaaccagcacctgcaaatgttgaatgcatgcaaggtactgaagttaatagttcagaacagacaatagtttctgctactgaaccagcacctgcaaatgatgaacacatgcaagagcaaccaacaaatatcgtttcatctgtggaatcagaaccttcaaatgatgaagagcacacaaagcatgaagtgtttcttgcgactactggtgataatatgcttgcttctagtgcaggaactgaaatattgcgggatacagttgagcatgctgcttgccagccagaagcagtatgcacagatggaactgcaaggcagtctgaattgtcgcaacttgatagaaaagcctttcatgatgcctcatataaatacactcatgggtccactaaagatgatggtatcttgcccagtgaaggtacttctgttgatgttactggttctaagcaggatgatgtgaacattgttggcacacaaactgatgatgtttctcggggttctagtcattttccagttattttacagtcaactgagtcagatcggcctccaggtcaagtgaagaatttggagagtaggatggagcaggtgaaaacagaagaagctttggttaacagttctggtggcaatcaaactcacagtctgggcgatgaaccttctcataatacatcattagcaagaaattctccctcagaacactcgaatgagcgttgctctgatcaagtaattggtgaaaatttcaaaagtaaagaaaatattgttgaagtccattctggcattaatactgatggccccgatgaagctctgaatgcattgcacacccaatctaaggaggccagcatgacagatattggtgtacctactgatggtgatagatgtgaaggtaaagggactagtgtcgaggtctgtgctgacatgaatactgatgggcctgtggctacccaggatgcttcgtccacgaaatctgataaagagtcctgcatgatggaatgtggtgtgtctaccgatggctgtcccacagtttgcaaaacacacaatgatctccagggtcatgtatcttgtgaagaaacctttgttaggactggtggtgatgacacaacccatatcaccaatgcaaattatggttctaataatgaaagtgaggccaccattgctagtcctgttgaaaccacacaaaaactgatggaagggagcactgttattgtgtcggagaattctgatttaaataagcaatgccacacattgcatactagaaatgatcctcctgcaaataccctgttgatagttgagtctaacaaagttacttgtgatgctgaaattgtttgtgctagcaggttagaatcttctggcattgaggctgaaacagtgggtatccaagagtcagctcttactgattttgagggaacaaaaggaactggggatttgggtgacagaactaacagtcaactgcatgatgatgttcatgggacatcatgttccacgatagctcttgtatctgagaaagaaccttccgaagatcttaccaccggtagccattcagaagcatctaatttacttgctgctgtagaacaaactcaagaaactactgttgagaaccaagagatcatagatgcagtagtgtttatggatgcctgcaaggcagaacctgttggtgattttactattgctaaaggagctgaacagactgtagaaatggttcattatgttgataagcaatctgctgtattagactatgttgagacacagacaaaacgaacttcggtttgtggttctacgctaaatgaatcccctcaggctgcagggttggaagaagactgctctgtactgaagcatggtgatcctacttcatctgagcttcttactgtagcacctaatccaatcggtgaaacttctgttattcaagtggaaccagaggcaagaaactcagatggatactgcacaacagaggctggcagtgctttatctgaaactgtcatgggattggagccaaataaagaaactgcggttccaatgcaagagaatattggagaagctaatgataattttaataattgcgaagcacacaataattcggagattcatgcatttgaagtgtcgatggaaacacagtcatcagaagtcaaggaagtatcttctattcagtctggtgcagcaaatttgagcacacagacaactgcactgcctgatgtaacaggacaaaccagtatggcatcgactggagaactagtatctacaaatgaacacatacacatgcaaggcactgaaatcaattcagagcaacaaacaaagatggtttcacctgctgaatcagcacctgctaatgatgaacacgtgcaagacattgtgattcttagttcagaacagcaaacaaagatggttttagctgcagagattgacgcattatgcgtccaggagactgcaattattgatcttgggggagcaagaggaacagttgacctgaatgacataagaacacaggttcctgcattacctggaagggatgtgctagatgtggaggcacatattttggagcaaaaaaaaacatcttcaccaggtgatgaaattaagggttcagaacaagcaaaaatcgaatcgattgcagagatcgaaacagtgggcgtcaaggagaatgtcattgctgatcataaggaaacaggtaacaacagtggcgtaagtatacatgcgcctctattagttgaatctggacaaaaggcatcacctggagttgaattgcgtggtattgaggttgatgctcatgttttggaacaagcaaagatggtttcagctctagaaccagactctactccagaagtttgtgctgacaagttagaaccttctggtgctgatgatgttggaatgattgttgtccaggaggctgcttctgttgatgatcacaatagagcacaaggtggtgaggctcattgttcagaacaaataaagatggcttcaattgcacaagcggtgtctagcatggctttagtaggatattcttcttcagaagactcaatggtggatgctgctgcccgagtaactgatgctgattttgtggatagtaaagcagctggtgtttatcgccaagaaactatgcctactcaaaccacctctaccctcccagagaacatggattctcctgcaactgctgctaccatggttgaatcgaagtttgctgcctcgtctgagcacgttgcaggacccgagccaattgatgaaacttctgttatgcaagtggaactggcaacaagcacaggggatggatgtgcagcagatggtcacaatcttgtttcatctgaaactgttgttgaagtgaagcttgctcaagaaattgttgttcctagtccaggtggtagcatagaagctaataatacttctaccatcagcgaagtatacaaagatacccagtctcgtgcatctggtgaagcatgcaatgatggtcagtctcatggtgatgaaaatatgaaacttggtgaagcttacactgaactgcagctggcaccttcctctggtgaggaggccatgacatgtatgtgtagtgagctgcccagccaggaggtggaggctccaagcagtgaccctttggagaataatgaagaaacgaaaaatgaagctgctgctcaaggatcagtaaatgaggattctgctcctcgtgctgaaaatgcaaagattgatgaagctgacacagaacaggaactgcttccatctggtgaggccacggtagacgaatccagcgagctactcagccaagacgaaaaggtggctcgtaaagatgcaaagatggaagagtctgctgctgctgctgctgcacagagacagctaactactgaagttgctcatgcaagtgaaaacgcgaaacttggtgaagatggcacggagctgcaactgccaccaccttcaatggtagacatatctagggagcaactcagccaggaagtggaggttgcaagctctgggccttcaggaactgatgaaactgctgagatgaaacggctaaacactgaacattcacctggtgatgaaacttcaaaacttgttggaactgatctaggactgcaattgtcaccttctggtgatgccatggtagatatatctaataagccacccagctgccaagacgtaaaggaggccccgagcagtgacattttgggaaatgatgaaaattcagacaccgagaagactcctgctgccttgcatggacggctgaacaccgaacttgctcctagtggcagaaatacagaatttagtgaagctgacactggaaaacaagagacacccgtgtctgctgaggctatggtagaatcatcgagcgagcctcgcagccatgaggcaaaggaagctccaacccctgacctgtctggggatgatgaaaaagcgaagtcagcaagggctgctgttgttgcggaactttttggagatgcaacagaaggtggttcggatcagccattgccgtctcctagagaacaaggcaaggaagcagaggccgatggaggcttttagagtaaagttgcaaatattgtatcaagagatactagaatcggtgtaagtaagaactgctaatagtgcttttagttgtaactggtgtaagcttctactcagaatcaaaagcgacgtgctgagattacagcaacagtggcctacggcagtttactactgttttgtgcaatattgctgctgagttttgttgag

SEQ ID NO: 33065 - DNA, 1974 bp, Zea mays
  Clone ID: UC-ZMFLMO17067D05_FLI
attgagtttcatggttccttactgaaggttagtcctgtaagcatttacagccactcagggctaccatttcctgcagtaagagctaaagtttcttggccacgtaaggcaagcaggggagttgcacttgtaacatgtgctagtggtgaagctgaatttattgtgaaggactgctttgcccttggagttggtggaaggtatgtcaactgtgaggttagtaataagtgggcaaactgtgtctttgtcacagggattccattgcatgtaacagagccagaattgtatgatgcttttcatagtacaacaactaggagaatccttgacatccacttgcttagaggacagcccacagctagctcgtccgtttctgaatgtacagaagcactgatgagagcgatatcactattcatgccaaataggaactttccttgccaaaaatttcgtgttcaagtgttccctccagaagagaaagactcaatgatgaaagctaccataacctttgatggaagttttcacagagaggctgcaagagcactggaccatcttcaaggaagtgttcttccttgttgcctaccttggcagataatccagtgcgaacatgtatttcatagtactgtctcctgtccgatgcgcatttacaatgttatcagccaagatgttggtgctctacttgagagcttccgtagccaaaaaggcgtggcatacaatttggagaagaatgagaatggaaatttccgtgttaagcttactgcaaatgccacaaaaacaatagcagatttgagaaggcctcttgagcttctgatgaagggaaaaataataaaccatcctgatctgatgttaagcacagttcaattgctatggtcccgtgatggtatggaacaattgagatcagttgaacgggagaccggcacttatattctgtatgacaggcaaagtctgaatattaaaatttttgggagcactgataatgtggctgcagcggaggaaaaattggttcacgcacttgtacagctccatgagaagaagcctcttgaggtttgtcttcgtggccggaacctcccaccaaacttgatgaaggaagtgattgtaaagtttggggctgatttagaaggactgaagaacgaggtccctgcagtagatcttcagttaaatacacgaaggcagacactttatgttcgaggcagcaaggaggataagcaaagggtggaagggatgatctctgaactgataacctctagtgaccataatgctcaactgtcgtcagagaatgcatgtcctatttgcctgtgcgagctagaagatccctttaagcttgaatcatgtggccatatgttctgtttagcttgcttggtggatcagtgtgaatctgccatgaaatcacaggatggcttccctcttcgttgcctcgaaagtgggtgcaataagctgttcctcctagctgatctgaggtctctgctgcctgacaagctggacgagctgttcagggcttccttgaatgcatttgttgcatctagcgcagggttataccgtttctgccccacaccggactgcacatccatttaccaagtagctgctgcaggcgcacaaggcgacagaccctttgtctgtggggcttgctctgtggagacctgcaccaagtgccatatcgagtaccatcctttcatctcctgtgaggcatacaaagagtacaaggcagacccggacgcaactctgcttgaatggcgcaaagggaaggagaacgtgaagaactgcccttcatgtggatttacaattgagaagagtgaaggctgcaaccatgttgagtgcaggtgtggcagccacatttgttggaattgcctggagaacttcaagagcagtgaggagtgctatggccatctcagatccgtgcacttatcctatgcagatctgatgtaaatctgtacagattgtaatgaatcacgtggtctataatctggcaagctgaatttgccttccaac

SEQ ID NO: 33066 - DNA, 2233 bp, Zea mays
  Clone ID: UC-ZMFLMO17076C06_FLI
ctctttctctttctcccctgcttccccttccattcccgacggacgacgcaacaacccgcctgccctgccctgcctcacgctcgcacccgcggcggcgcggagggccggaacctaaaccctaaccctagcggcccgcccgcgatggggcagtgctacgggaaggcaggcggcgcgtcgtcgcggcgggcggaccacgacgaccacgcccacgcggtcgcgccgccgtccccgctgccggccaacggcgcgccgccgccgcagcccgccacgcccgggcgccgcaagtccggatcggccacgccggtgcaccaccaggcggcgacgaccgcctggcccagcccgtaccccgccggcggggccagcccgctccccgcgggcgtgtcgccgtcgcctgccaggtccacgccccgcaggttcttcaagcggcccttcccgccgccctcgcccgccaagcacatcaaggccactctcgccaagcgcctcggcgggggcaagcccaaggagggcaccataccggaggagggcggcgccggcgtcgccgccgactccgccgaggccgagcgcccgttggacaagacgttcggcttcgccaacaacttcggggccaagtacgacctcgggaaggaggtcgggaggggacactttggccacacctgctccgccctggtcaagaagggcgagtacaagggccatgccgtcgccgtcaagatcatctccaaagctaagatgacgacagccatttccattgaagatgttcgtagggaagtcaagattttgaaagctctatcagggcacaataatctcgtcaaattctatgatgcatgtgaggacgccctcaatgtctacattgtcatggaattatgtgaaggtggagagttgctagatagaattttggctaggtactttttccaacacagtatattcatctatagtagccgagtagcagtacctcttgttaatgcttaccaaggatgcaaacttgaactattgaagaggcgggagatatacagaagaagatgccaaagctatcgttgtacagattttgagtgtagtgtccttctgtcatcttcagggagtagttcatcgtgatttgaagccagagaattttcttttcgcaacaagagatgaaagtgctcctatgaagttaattgactttggtctgtctgattttattagaccagatgaaaggctcaatgatattgttggaagcgcatattatgtcgctccagaggttctacacagatcgtacagtatggaagcagacatttggagtataggtgtcataacatacattctgctctgtggcagtcggccattttgggcaaggacagaatctgggatctttcggtctgtattaagggctgatcccaactttgacgattcaccatggccttcagtatcggctgaagctaaggattttgtgaagagatttctgaacaaggattaccgtaaaagaatgactgctgtccaagcactgactcacccttggttacgagatgaacaaaggcaaattccattggacatactcgttttcagattagttaagcaatatcttcgtgctactcctcttaaacgtttggcattaaaggcactatctaaggctttaagggaggatgaactgttgtatcttagattgcagtttaagctgctcgagcccagagacgggctcgtatcgctcgacaactttcggacggctctgacgagatacgtaactgatgctatgagagaatcaagggttcttgagtttttgcacgcgttggacccgcttgcgtacagaaagatggacttggaagaattctgtgcggcagcaatcagcccgtaccagctggaggctttggaaagctgggaagaaatcgctggaacggcttttcagcacttcgaacaggagggcaaccgagttatatctgtggaggagttggcgcaggaactaagcctcgccccgactcactactccatcgtgcaagactggatcagaaagtccgacggcaagcttaactttcttgggttcaccaaatttttgcacggtgtcacgatacggggctcaaacacgagacgacactaaaatggacgcgaactgtgtattcgcttctaatttaaagcctctctctcgtcgattatatatagatggccctgattggtgttttgtgatgtcgcgcggctagctgttgttgtcatagctttttgtagagtacgtgtgaagatcatcgtgatggcgaaatcatatggtttgctc

SEQ ID NO: 33067 - DNA, 556 bp, Zea mays
  Clone ID: UC-ZMFLMO17083H11_FLI
acattgactggcaagaccatcaccttggaggtggagtcgtctgacacaatcgataatgtcaaagccaagatccaggacaaggagggcattccaccggaccagcagcgcctgatctttgctggcaagcagctggaggatggccgtaccctcgccgactacaacatccagaaggagagcaccctccacctggtgctccgcttgcgaggtggtatgcagatctttgtgaagaccttgactggcaagaccataaccctggaggttgagagctccgacaccatcgacaacgtgaaggcgaagatccaggacaaagagggcatccccccagaccagcagcgtctgatcttcgccggcaagcagctggaggatggccgcaccctagcagactacaacatccagaaggagagcactctccacctggtgctccgcctccgcggtggtcagtaagccatggttcatttaagctgctgctgtacctgggtatctgcgtcgtctggtgccctctggtgtacctctatatggatgtcgtcgtctaataaacatctgtggtttgtgtgtc

SEQ ID NO: 33068 - DNA, 2146 bp, Zea mays
  Clone ID: UC-ZMFLMO17117E05_FLI
aaaaaatccacgaaccaatttctcagcaaccagcagcacgacctgtgagggttcgaaggaagtagcagtgttttttgttcctagaggaagagatggcaaagggggaggggccggcgatcgggatcgacctgggaacaacgtactcgtgtgtcggcgtgtggcagcacgaccgcgtcgagatcatcgccaacgaccaggggaaccgcaccacgccgtcctacgttgccttcaccgacaccgagcggctcatcggcgatgccgccaagaaccaggtcgccatgaaccccaccaacaccgtatttgacgcaaagcggttgattggtaggaggttctcggacccgtccgttcagagtgatatgaagctatggccattcaaggtcgtggcgggccctggcgacaagccgatgatcgtggttagctacaagggtgaggataagcagttctctgccgaggagatctcctctatggtgctgaccaagatgaaggagatcgccgaggcctacctcggctccaccatcaagaatgccgtggtcaccgtgcctgcctatttcaacgactcgcagaggcaggccaccaaggatgccggcgtcatctccgggctgaacgtgatgcgtatcatcaacgagcccaccgccgcggccattgcctacgggctcgacaaaaaggccaccagcagcggcgagaagaacgtgctcatcttcgacctcggtggtggcaccttcgatgtgtcgctcttgaccatcgaggagggcatcttcgaggtgaaggccaccgccggtgatacccatctgggtggggaggacttcgacaaccgcatggtcaaccacttcgtccaggagttcaagcgcaagcacaagaaggacgtcagcggcaacccgcgcgcgctgcggcgtctgcggacggcctgcgagcgggccaagcgcacgctgtcgtccaccgcgcagaccaccatcgagatcgactcgctgtacgagggcatcgacttctacaccaccatcacccgcgcccggttcgaggagctgaacatggacctcttccgcaagtgcatggagcccgtggagaaatgcctccgcgatgccaagatggacaagagcaccgtgcacgacgtggtgctcgtgggcggctccacgcgcatccccaaggtgcagcagctgctccaggacttcttcaacggcaaggagctctgcaagagcatcaaccctgacgaggccgtggcgtacggtgctgccgtccaggccgccatcctgagcggcgagggcaacgagaaggtgcaggacctgctccttctggacgtcaccccgctgtccctgggcctggagactgccggcggcgtgatgaccgtgctgatccctcgcaacaccaccataccaacgaagaaggagcaggtgttctccacctactccgacaaccagccgggggtgctgatccaggtgtacgagggagagcgcgccaggaccaaggacaacaacctccttggcaagttcgagctgtccggcatcccgccggcgcctcgcggcgtgccccagatcaccgtgtgcttcgacatcgacgccaacggcattctgaacgtatcagcggaggacaagactacaggacagaagaacaagatcaccatcaccaacgacaaggggcggctgagcaaggaggagatcgagaagatggtgcaggaggcggagaagtacaaggcggaggacgaggagcataagaagaaggtggacgccaagaactcgctggagaactacgcgtacaacatgcgcaacaccatcaaggacgacaagatcgcctccaagctaggtgcggatgacaagaagcgcatcgagaacgccgtggacggtgccatcatctggctggacagcaaccagctcgcggaggtggacgagttcgaggacaagatgaaggagctggagggcatctgcaaccccatcatcgccaagatgtaccagggcgctggcgcggacatgggtgctgctgccggcatggacgaggacgcaccggccgccggcggcagcgccgctggccccaagatcgaggaggtcgactaagtgcttccacctgtggtcgtgttatcgtggtagaagttgaattgcttctgtttctgtgggaacagtaaactctgaggttgtggttgatctgatgatactttcct

SEQ ID NO: 33069 - DNA, 760 bp, Zea mays
  Clone ID: UC-ZMFLMO17057G06_FLI
ccattttctgctggccgccgctgctgctctgctttccatggcggcgacctccctttctgctgcaaggaagtttttcctgccctggtgctcgtggctgctatttctctggccatgtcgagtccctctcctccctaacgctcacccctcctcaggtccgtgctcgtccagctcgcgcccactcccagctcggtctccacctccgtttcctctccctgtccgaccaagcacacctcgtcgtcgatttccttcactggaccgcgccctgctcggcttcttgcagcacatgtccagcccatgcgtccaaggtcatggagcagcaacaactatgaaacccccttcgtgtcgcgccctcgatgtgctcgatgaaataccgcaacaagctccacctcgatctatgccgacccgatcaccacttcgtcgaacctcggtacgctagctgaaaaatcgtgcgaagcgaagggtgtggatcaaaacaacccacaagacgatgtcggccgatgagcccgaagatggatggactaagcaaatgtcagaacaaaagttgatcgtcaactgaccttcatttaacaacactaacgtagtgttatcccaggttgtaattttgttctgttgtggatggtgctaagtgccggtgggctcggccttcttctataagtatatcccatctttagtttctctattgaggattgtcacttaagctagcatgtatttgaaaacctataaatattttatacattttaaattgtaatttttttgaatc

SEQ ID NO: 33070 - DNA, 1022 bp, Zea mays
  Clone ID: UC-ZMFLMO17057G08_FLI
ccttctcaaccagcacagaacgtgaacgcatagaagacattgcgttcagaaataagctggaattctttgctgctgcaaagatctcttcctcattccccactccaacactcccagagatagcatttgcaggtgtatcgaatgttggtaaatcctcactcctaaattcacttacaagacaatggggtgttgtgcgaacatcagataagcctggacttactcagacaataaatttctttcaacttgcttcaaagttatgtcttgttgatttacctggatatggttttgcttatgcaaaggacgaagttaaggaatcgtgggaggaacttgtgaaagagtatgtttcgaccagagttggcctagaaagggtgtgccttcttgtgcacactaaacgaggaatgaaaccgttggactatgagcttgtagacttaatggaaaggcacaagacgccataccagattgtactgacaaaaactgatttagttttcccaattgatgttgctcgccgtgccatggaaatccaagagagcctgaagaggaataagtcagtggtaaacccagtgatgatggtgagctctaaaacaggagctggcatacgcaacctgagaggcgtgcttggaaagttagctcgcttcatcaaaccgtagcaaagctgcagccaatttcggagtctgcgtctgcgtcggtcgagaccgtgagaggaaactcacaccaggctgtcttaggcaggtgccgcgctacgtcaacgctctaaccagtccaccgccacaagctttgtctgcatcagtttagactatcgaacacttgcagcaagcgttcctagttaggttatgctttggagcctagctgtatcacaggccattccggtaggattgaactgttcaacttttgagtggattatgcgatgctcagattaatccatgaaatatttgagtttccccatttggatatacggaatcgtacatccttaaaaactattatgcatcgttccttgatgtacaatactttttcagtgatgattcatc

SEQ ID NO: 33071 - DNA, 2846 bp, Zea mays
  Clone ID: UC-ZMFLMO17058A01_FLI
gacctgcttgtccgccgccgccggcggcggcggcggctaccactcgccagcgagccatctcctggagctggagggggtccgcttcctcctcgactgccccatcgacctctccgctctcgcggccttcgcgccggtgcccctcgccggtgacgcaggaggtctcatccgcgcggtgccgcgctactggttgccagcggccgtgaaagaaggcggcgtggacgccgtgctcgtgtcttccgctacggggatgctcggactccccttcctcaccgggctccccggattcaccaacacgaaggtatatgtgacagaggtagcagcaaggatcggaaagccaatgatggaggagctggtggagatgcatcgtgagtttgtgaggtactatgggccagatacggatgcatcacccaagtggatggaaggggaggaactcaatgaactcatgtcaatgtcgcaaaaggcagtgattgaaggcagggaaaatgatttgacttctctggtgcctttatacaggtccgctatggaatcacaatcctgctgggtcctggcttgcacatctgtggcttctcttccagtcttcccgcagggcaatctatatgtctgaaagcttgagataaagagtctaataggagctaataatatccaaccatcaaatcagcagaatctaatagatatgagttgtccaggaaacgttgaagaatgcatgcacaaagtacagtctgttaaatatggagaggaggtttgcttcaatggcatatttatgctgaaagcttctagttcaggccttgaacttggcaattctacctggacaatacaaagtccaagagctagcattacctacctaccaagttcagtatttgtgtcggctcatgcattagattttgattacagctctctgaaggaaaatgatgtgattttgttttcggatttctcatccttgaatgacacggacgaggataatgagaaactgaatgagcattcaatggatgaaacggactcttctctatgtcgctactcagtgtttagggatgacggcgctgatgcagatgaaagggtgccattcgtgtgcaacaatgatgatatcacagaggagattgagagaatcagctttatatgctcatgtatttttggtgcagtaaaatctggaggctctgttctaataccaattggccgccttggtgttattcttttacttttggagcttatatcagaaatgctacattcttccagcctgaaggtaactgtgaccttggaatcatatgggggattttcagattggaatatattattatcacacttaattaatttaacatgtgtgcctcagctcttgaagcaatgcttctggtatattttttcctgatgcggtcatgcaagatgccactgcctaatttgccatcaactgcctgtaaaattattagcgttcagggatgtttaattatgcatatggttcaagtatcttaagttattaattgataaggaatgggctacttgagtatctgacatagtttgtccaccccttatattctttctatcccatgaaatgtcaatattgtgctgaggttctgtagcaaactagtaaaactaccttttcttagattatttccccctgtttttggctcattattgtttttttcctgagtcaggtgcccatatttgtgatttctgaaacagcagaagaaatatttgcttttaccaataccttgcctgaatggctatgcaagtcacgtcaagaaaagttattcgctggtgaagcattgtttggccatgtcgagcttttgaaggagggcaaattatttttgttcccgcatctacattcaaagggtttgctcatggaaggagccttgtattgtgctatgtccacactggagccttagactcggcccagctgttcatttgcttcgtcgctggcatgcagacaaacggtgccttcttgttgtggagcaaggaaatggtgctgagttgagtcttaagcctttcatgcccttggcaattcaagtccttgagtgttctttcctttcgggcgtaagggcggggaaaattgatccattactgggagtgctcaaaccgaagtttgttatgcttccagaaggtcttaagtcgcggtgttcaataaagggggtgccatggtcattcttgtattactccaagggcaagaccatcgagctctcaaatttacgtgaagatattgaggtgcatcttgcaactgatgttgccttccgattgcagcctagacaactgaacgaaaccactgcagtggcgagattgagaacaaagctgcttgtaagcaatggacggtaccagctggcctctgcagaaaagcaaccagatcaatcaaagcgtcacttgctacactgtagcactattgaccctggtcgcttgctgtcagctttgcgagagaaggggatggtatgttcatttgctgcagatgatagccccactgctagtgaatcctcagttctggtcactagtcctggagatgctttggtgaggataacgcccgacacgactgttatatactgcgacgacgagagaacatccaatcaaatttatgatgcgcttagcagtgtttgtaaagggatctgactgcatcatgtgtaattgttgttcgttatggggtgtttggtttttagggactaatttttagtactccattttaatctataaattgctaaatgcggaaaataaaacttttatttttcgtacttggtaatttatgaactaaaataaaataggggactaaaaattagcctctagaaaccaaacattcccgaagttgtgcgtgtgcgttaaattgtgaattgccatgtggtggtttagtggttgaaaaaaggttaagttttttcttc

SEQ ID NO: 33072 - DNA, 1485 bp, Zea mays
  Clone ID: UC-ZMFLMO17058A07_FLI
cagaacactgatggcaatgttattgccattatgctggacacaaagggtcctgaagttagaagtggggatgttccagagccaatcatgctcaaggaaggtcaagagttcaacttcacgattaaaagaggggtgagcactgaagacactgtcagcgtgaactatgatgacttcataaatgatgttgaagctggcgacatactattagtggatggaggaatgatgtcgcttgctgtgaagtctaaaacaaccgatacagtcaagtgtaaagtagttgatggtggggaattgaaatcacggcgccacctaaatgtccgtggaaagagtgctactttgccatctatcactgagaaggattgggaagacataaaatttggtgtcgaaaacggtgttgatttctatgcagtttcctttgtgaaggatgccaaagttatccatgaattaaaagactaccttaaaagtgctaatgccgatatacatgtcattccaaaaattgaaagtgcagattcaataccaaacctgcagtccattattgctgcttcagatggggcaatggtggcgcgtggagaccttggtgctgaacttccgattgaggatgttcctttgctacaggcagagattgtccaaacatgtcgaagtatggagaaaccagtcattgtcgctacaaatatgttggaaagcatgattgaccatcctactcccactagggcagaagtttctgacatagctattgcagttcgggaaggtgctgatgccatcatgttatctggcgaaactgctcatggaaagtatccactaaaggcagtcaaggtgatgcacactgtggcactcagaacagaatccagcctttataacccaactacttctcctagtcttgttgcatctgcacagggtctacagaatgaggacttctccccaagccagctaagtaaaatgttcggatctcatgcaacgatgatggccaacacccttcgcacaccaatcattgtatttacacagacaggctccatggctgtcctcctgagccattatcgtccctcgtctacactatttgcatttacaaacgaggaacgagtgaagcaacggctagcactctaccagggcgtcatccctattcacatgcagttctctgacgacgcagaagaaactttctccagagcaatcagcagcttgctgaaagcacaatatgtgaagaagggagactacgtcactcttgttcagagcggagtgacttcaatctggagagaggaatccactcaccacatccaagtgaggaaagttcaggtctgatgtgccggtgggaattggtcgtctgagaaattttgatagcgccgcctgatgtgttatcatcattatatgtgtaattttactgttttaccaggagattgctacgtcgagttatatgttgtgtcgaattcacgtgtaggctctgaatcttgactgtgtccgttcattttcgcttgtttcacactgaagtgttataagctc

SEQ ID NO: 33073 - DNA, 1273 bp, Zea mays
  Clone ID: UC-ZMFLMO17058B08_FLI
ggaggaggtgagggagtatgagagcgacatgaggaagctggaggagctgctttctaagctgaacccctcggcggaggagttcgtgccgcagtcccgccgccgcgtggacggcggcgctccccgcctttcggccgacgcgcccgtgttcgtgtcgccggcgatcgactactacgcgcgccaccaccagctcccgccgccgccgcttctgcagcagcagcagccgatgcacgtgctgcagtttgtgggtggcgtcggcggggttggcatgggtggcggcggggggatggactccagcagcgacggatccgccaatggtcagccgaatcgacggagaaggaacggtttcatccaggggaggagaaggatgatgggtgcccggcctcgtcgagctgacagggaggatagtgtgcggcggacagtctatgtctctgacgttgatcagcatgtaactgaacagaaacttgctgaagttttttcaacctgtggacaggtggtagattgccgtatctgtggtgatcctaactcagtgcttcgttttgcttttatcgagtttgctgatgacgttgctgcacaatcagcactagcacttggtggaaccgtgcttggcttttatcctgtcaaggttctgccatcaaagacagcaattttacctgtgaaccctaaatttcttcctcacactgatgatgagaaagaaatggtatccaggactgtgtattgtactaacattgacaagaagatcgcagaagatgaagtgaagcaattctttgagggaacatgtggtgaagtttctcgtctgaggctacttggtgattatgtgcactccacatgcatcgcttttgttgagtttgtccaagcagatagtgctattctcgctctgaactgcagtggcattgttcttggaacgcttcctgttagggtgagcccatcaaagacaccagtccgctcgcgatcgccccgtgtgacgtcatactgaattcggctcatctgaagccgtcgtccagggcagcaaatttctgggcaacaaagccctagtcgtgtggccttagagactgccgcatcgcggataagtaattgtcgttgagcagagttctcgttggttaaagtccagtctagtaggaggcgcagagacccgtctgtatggtcgctgggagatctatcttgacctcctttttctgttctttttggtcttagttatcgtggttggattctatagcagccttgacaggcattcgaacaacaatgtttatggttatcctatccgctttggactctt

SEQ ID NO: 33074 - DNA, 3972 bp, Zea mays
  Clone ID: UC-ZMFLMO17058D11_FLI
cgctctcgccaactcccctgctccacagccacaagcccactcggatcccaatccgagccctactcgtcgtcgacgacgcgacggccccgcgtgcgaagccagccagccagccagccagccatcgccgtggaccggggagcccggagggatggaccccgagaagcgcggctacgagctccaaaattttgtggcgcatgatgcggaagttaggtccctgtctattggcaaaaagtctaggcgtgtgttcatcaccggtggcaatgatcgcaaggtcaaactgtgggccattggcaagcaaactccacttctgaccttgtccggccacacaagtgcggtggaggctgtgcagtttgattcagcagaggtgcttgtgcttgctggctcgtcaaatggttccatcaagctctgggacttggaagaagctaaagttgtgcggtctctcactgggcacaggtcaagttgcactgctgttgaattccatccatttggcgagttttttgcatctggttcgtcagatacagacctgaagatatgggacataaagaaaaaaggatacatacacacatataagggtcacagaggagcaattaaaacaatcaggtttacgcctgatggacgatgggttgtcactggtggggaagataacattgtgaaggtgtgggatttgacagctggaaagcttctacatgatttcaagttccatagtggacaaatcaactgtattgattttcaccctcaagaatttttgcttgcaacaggctctgctgataggacagtgaaattttgggatcttgaaacttttgaattgataggttcttctggacctgagggtaccggtgtacgttctatggtctttcacccagatggtaaaacccttttctgtggattagaccaaagcttaaaggtaggtcgtattctgatcaatgatttcaagtcgcctggtcgcctggtcgatccctgggaccgaccaggcgactagtcgcgattaggcgactagtcgcgattaggcgacgactagggcgattagtcgactcctagtcgttccctggtcgtcctagtctagtagttatacttatatagctatatatataaatgtacatgtatgcaactacattatataaattagaaagtcactacttagcacaggcttaggattagggcagccagcaaccatccactaatttggcagaactgcagagaagggggagatggggcagagcatgaggaaccttgagatgacgagctcatctcctcaatggtgcaggtctgctggagcttgggaaggggcagggtggagactgcagctggtgaaccttaagacagtctccgcatgtggagactgtagcaggcgagcatgggaaggggcagggtggtgtagccgctgatgatgtagccgtcggtgagctgtaggtctgaaggggcagccaccggcgaccaagtgtgaataagggctggaacagtcgagctagcaagagaggagagtaggagacgtagtgcactgtttggcggctaggtattacagaggagaggagagggtagtctaaagtatactgtagatgggttgaaaatggcccaataacaaaaccctagccaggacgaccaggaaacagtaatcgggcgattagtcgccctaatcggcgattagtcggccgaccagcctatctagtcgagtcgtccagctaatcgagcccaaatagccgaccagcccgactaatcgcgactaatcgcgattagtcggacgacttgaaatcattgattctgataggttcttgattgatatttatttgcttggtacttgagaacatgaatatttccaggtattctcttgggaaccagtaaggtgccatgatgttgttgacatgggttggagtaatttggctgaccttagtatttatgaagggaaactcttgggatgctcctaccatgagtgccgtgttggtctatgggctgctgatatatcagtgagtgtcattttttctatgccatgtgtttttttcctgcctcttctaacttccattcatggatccagctcattggaccctatgctcttggtgtattgcccaaagcgaatttttttgctgagcttgtgcagtctatggaagataatcctgtgaaaccagttgatagcactgcaaattctcgtcctgcttcagcaatggcacattcaagaagttcatacaaaatcaaggagtctgggattgctcaaagcagggttcgtggctcacatttgactccagcaagtacagataagaccaagaaagataggagcagcactattccacgaagacctgattcgtctttaaagtcatctgttcagagtactaccctgatgaggcgtatgaagcttgttgatagtccttccaccaacacaaaaaatgtggaacgtaatgttgggcagagagacatttcattagcgtctcgtgcagtgatggctaataattctgcaactgctaagaaaagcaatcttacagaatcagctttagtgaaagatatttacactacatctcaggctgtttcagcacctattgttgtgcccagagacattttagaggacaaaacagtaagcaatgttcgtcgagggactggagagacagctgcagtcccagatgattttcggatccctgttcacagaagaaaaccctcacttagtggcagtgctgctgatagtgatagctcatcaagatcagtgttcactgaacctgatgtttgctcagagggtttgtctagcttaaaattctcctttgggctaactccatatcacaagaaagaagaatttggcgatgtggataatgaaggtattgcacaaatagcagaaaagatggaaagaacagtgtcgctggaccattctcagcagttaaatgatgataaatcctttgaatcaccatgctcaacaacagagactgccaaggtcaaatatgttagaggagttgctgtgccactggggaaaacaaagtctcttgttgagagatgggaaaaaagagagacttctagcactgattattcaccacaaactggttcttgtggtgatcgggcatcgagaaatgacaaccatccattccatctggcggaaccaagtacaacatttgaaaaggacctgtcaactgtagatgaagcgatggctcctgtcaatttagtgcggaaccatgatgaattcctaaatgctgtaaaacttcggctgacaaaactagagatgatgcggcatgtctttgaacaaagtggtattaaaggagcaattgctgcagtggcaaagctacctgacaatgctgttcaagcagatgttgttagtgctctcaaaggaaagcttgatcttttcaacctggaatttttctcaaattttctgcctgttcttgctgggttactgtgtagcaagactgaaaggcatgctatggtctctttggaaatgttgttggatcttataaagatttttggaccagtaattcattcagcattatcagcaaatttaggcgttggagttgacattcaggctgagcagaggttgcaacgttgttcacggtgctttaaccatttgcaaaagatccaacagagtctgaatccattgattctgcggggtggtcaaacagcacaacttgcacaagaactaagtctttcattgcaagatttggtggtgatctaggcaagatgatgtacaatgtatacgacagagtagataccattggttttggcgaaaagtgcccacagttgtgtagcttgtaattttgtcatagctttgcaagtgggttttgcaactgtgttttaacattgggctggcattcagcctggtcccctgttgtaaatgtgagcctagccgtgaatgagtctgtaattagccagccacatctgctgtgtgagcagccctgaacaaaaagactagttgaaaggaaacaaccgcaaaggggatcattttggttacaccccaggtggtaggatggctcatgtagcatgcggtgattggcaattccattctttgaaagc

SEQ ID NO: 33075 - DNA, 1510 bp, Zea mays
  Clone ID: UC-ZMFLMO17058E03_FLI
cgtctgtggactgcggaaggcggcaagccggcagtagagcagactcggcgctcgacgctcgggggcggctgaaacagagagacgagcggatttctatacgtcagctcgtttcggccccgcttgggggcttctcctcggcgtcgtcgctccctccgccgcctctttctcttcgccccgagcgctacagagaaagctcgtggacgggcaacgaaccagcggcgtttccatacgcggaaattgcagtacgtgctacaacctacaatatcacatatctcgggtttatccgaagagctcacccatcgacctcatcagtggtgtgattgattcacgttacaacatcttctgattacctcatcagtggtgtcattacgtcgaataatttgattatatggacgctcatatatatttttatttctgaatataccaacaatttacgaggagctgagctacgcctaatcatttctaggcttctgactgtattgtccacttcttcctttggatctccttcccacgccatgcgcttcttccagtgagccctcgcgccatggatagggagcaacatgagaagtttggcggttcacgtcgacgagagcaatagtggtgagcctcgccgtgttgtgtcccgtcttcaatccgtgggcttgaagatttcctgttcgcctgctgttctcgacagcacactcattcctcaacgtgcctctaattgatgcaggattatcaacagctggtttggaaatcttgctgttaaggcccattaggcccaggcccactgcctatatatgtatataatagtccttagggactgagtcaacgtctgtcaattctcagatgcctaatgtggtcagcacaatgtttaagtttgtaagatggatggctagttggctagcagctgggtatgtcctttctcttccctttcttctgcacgcaagcacccaaaccctaattgtactgggttcgtcctgcacgcttaagatcgatcttggttgacgataggacttgttgtccagtattagcttgtgaattgagtgtaaaagcaactccaagggactagcctgatccttttgtaaaggagacatatcaagttgtttggtgataatggatccaaagcattcggctgaagtgtccaagcatttagacaagcaaaatcaagcactaatggaaacatatcgagcaatgtcccatgagttgcataaactgcaggtagaagaagagacaatcatgcgcaagttgtatgaactgatgtccgcggaagggcttcttccaaagcgcaagaaagaaaagcaacatgtggaaaatatagtgggttcaactgagagcaaagaacaggaaccataaattcttatgcgacgtgtaatgtgatatgacagcaatgccattttatctggagagttggtgcttgttaacttctgtatagcagttctctatcatcacaactctgcgaccactacatttaacttcacagttgaaaatttaacctgagtattagttccgtgaggaattacttacagac

SEQ ID NO: 33076 - DNA, 306 bp, Zea mays
  Clone ID: UC-ZMFLMO17058E10_FLI
gttttcgacgaggggactacatttattcattattatgtacatgaaagaggctcaaggacgcctccactccattacatttgcaccgacaagggacaaggcaaaaccgtcgctagctacaagcgaagttcacaacagtgacagggatgggatcacacacgacacgacgagcagagttgcaaagcagagtagtacgacggcgtctatttgcatctacgtgtcatcagtagtgcagcatcacacgattcacgggagcactggtccgattttggcgatgatcagctcggatgagcctcctcaccattctgc

SEQ ID NO: 33077 - DNA, 925 bp, Zea mays
  Clone ID: uC-zmflMo17059a07_FLI
acccggccgtacccaaactgccatacatgagagtagatagacagagaacatgaagcaacacagagacacaagctgcagcggcacacatggggcaccgcgccccactaccaccaccagaccagacgacgcacactttatttagcccatgccactcgcagtccgcaccgggcactgctatagctacgacacacacactgtcacacacagagagatggagagaaaccgtcgcgttcgcttctactgaacagtaggcgccagcgcgcgacgacgacgactggcacgccacgcgcgcacgctgagacatcgatctcccgacccgctgtccgccgctgcagtgcgcgcacggcgcacggcctcactcgctggccttctcggccacctcagcctcagcggccggctcggtcttctcgggctcctcagcggccggctcagccgccgcgggctcctcggcagcagcagcctcgggctcagcggctgccggttctgcttctgtctcggcagcgggcgctgccgcttcctccttcacctcttcagccgccgccggctccggctccggctccgcctcctttgccgtctcttcctcctttggcgtctcttcctccgccgccacgggggccgcctcgggctcagcggcggcagctggctcggtctccgccggggcagctggctcgtccaccttggcctcggcggcgggggcagcctcctcgggcacgacggcgggcggagccggggtctccaccaccggcgcttcctcggtcgccacgacggtcggggtctggacctcggcagtggccatgggtgacgatcagaaggctgatgactacacgaccgagtggctagctactagctagggctagagctagagcagctaaagaatgaccgagctgcaagagtgagcgatcagctgctgatcgggagtgggatc

SEQ ID NO: 33078 - DNA, 467 bp, Zea mays
  Clone ID: UC-ZMFLMO17059A08_FLI
ggcgctcgcggagcagacgtgcccgctgggaagcgtggcgaccgtggtgagcgtcgcgagggcgtgcctgcacaaggacccgtccaagcgacccagcatggtggacgtagcctacacgctgtccaaggcggacgagcacttcgccgactactctggtgagagcgtgtcggttgacggcagcggcgagatcgctgctcggtgaaccatcatccttcgtttcgtcgtgtactcggtcctagtcagtagtaatatggtttttagccatcagttcgcgttgtaaatgttgttgcgctctattgcagtgctcagtggcaaaatggagaggacagagacaaatgacagggatgtctgtttattgcagagatctccctatatatatacatgtgtacaaagggcatttaacccttggatcaaataactgtaggatcaacggtgggatgggtcttgatcatattgcattgttttgt

SEQ ID NO: 33079 - DNA, 588 bp, Zea mays
  Clone ID: UC-ZMFLMO17059A09_FLI
cttttcagggctatgtgctacattgattttggattgccagtagttgaggatgttgacttgccaaatggatcagctggagctgcagagaagtcggacacaaaaaaaattaaaaaagcaaggcagaaacgtaaggcccatgatgaagagtctaaacaagagaaaaggaataacttaagtttttttgcgtttaaagaaccagtgctctttgttgggcacctactggacagttcaattttaatagtagagaagcgatggatggatgtagttgaaggttttggcgcaccggttcacagacatatatatggcacatgattctttctaacatcaaactttggcgcccgtgacaagcagaccattatttttgtttttgcattcggcctcgagtatgttaccggttgaaagggctccaagttttgcagtacaaagtggcagctgcatctaatctttagaattggggactctggcaattgtgtagtgttattttgttctcgagtaatgcagtttttcataccttgtcactgcgcaaaattgtcagatgtaaaaactgtataactatgttattgttagtttatatctgctgttcgtctc

SEQ ID NO: 33080 - DNA, 1042 bp, Zea mays
  Clone ID: UC-ZMFLMO17059B11_FLI
gtggatgacgacatcagggacctgccaagatctccatggaggagatcgacgccgccaagctcaccaaggacaacgtcgacgtccgcctcaagtggctcggcctcttccaccgctacaagcaccagtgttgttgttgctgttggtaggagcgaccccgcgagcgtgacacagacaaagcagccttcggtgccagggccatccattcttgagcgtgtatgatgacctgcatgcagaccacttatctggtctcaaggttcttcatggccttgactctcaaagatcagagtattcttgtcaatggggatatcaatgaaggcttgcttcgcctttgtcacaagcttcatcgtttaaggaaagaatatgcatacacatttgaaagcacaagcttatcttatcagtgttctgaggttagcaggatcttgcaaggctagggacccaggggctacacatcttataactgaaaaacacatgagcagtttatgaggttgtcaagttttcatttcaatgcaaatccagctggacaacaccatgtcacaaagcagtgtgcttctagatacagttcagtcttggcgtcatcgaatcaatggaacatgaagttagaagcacactgagatccagtggcttgtgaccccttgaccctttagaggaagcgcactagagtcattggcaagaagaagaggatcgccaagaagtctgaggctgccgagtaccaaaagcttcttgctcagaggctgaaggaacagagagaccgcgagagcttggccaagaggaggtccaagctttctgccgcttccaaggcttccgctgccaccgccgcttaagaatgttcgatgctttgagatgtttcaagacctatcttgttacaacttaaataccttatgctactctgattgtgttgcaacttgcaactgcccctgtacttgatagatttgtattagatgctcaagctacagagggtaggttcctaattatgaccatacgactatgtactaaattatatatctgttgctaagttacaatacatacaaaataagtttactcc

SEQ ID NO: 33081 - DNA, 925 bp, Zea mays
  Clone ID: UC-ZMFLMO17059E10_FLI
gcagctgatccgcgcccgcccggccgggagcgcgcgcaggcgaaggatggaacaatacgacgggctctttcctcccgcctacgtggacgactcctcatccctcctcctggtgcccaacgccaacggcactgcgcaggaggagagaccgcgagcgaggcgcaggaggcgtcgagcagcgaggtgcggcggcggcggtggcgagctggacggaggaggggaccacaagaagcggcggctgaccgacgagcaggtagagatgctggagctgagcttccgggaggagcggaagctggagaccggccggaaggtgcacctggccgccgagctcgggctcgaccccaagcaggtcgccgtctggttccagaaccgccgcgcccgccacaagagcaagctgctcgaggaggagttcgccaagctcaagcaggcacacgacgccgccatcctccacaaatgccaccttgagaacgaggtgatgaggctgaaggacaagctggtgctcgccgaggaggagctgacgcgtttcagatccgcgggcaaccacgcggtctccggtgatggcggagacgtcatggcccgtgccgtctgcagcggtagcccgagctcatcgttctcgactggcacctgccagcagcccggaggaggcggcggcggcggcggcgatcacctgggggacgacgacctgctctatgttcctgactatgcctacgctgacagcagcgtggtcgagtggtttagcctgtatggactgatgtaatcgatggtatgccatcgtcgtcggcagattaattctagctagctactcatcgtagcgtgtcattgctgtgctgaattgctgatttctatgtgcgccctcttaatcatatgtacataaatcaagctatcaattactggcaaaatatagccagctagcagcaactagtacttt

SEQ ID NO: 33082 - DNA, 1100 bp, Zea mays
  Clone ID: UC-ZMFLMO17059G02_FLI
agttctaatccctgttatccgctgaaccatcgctgtgccgggttgcccttgattcatggagttcaccggcttccccgtgcgtagtcgcggatgccgtcgctcagcccttgtgtcttgccgagctcatcactgtcgtttatccctggcgctcgttcggctcaacgtctctgctctagcatgctgtgcaccactcggccgcgccctggatgtcgtgctcgttgtggtcggctctggtggtcggcatcgccacgctgtctgtcccgccaggcccttagacccactctgctccagccgtcagacatcgctagctcttgtgcctctctgagcgcgcgcctgtccacgtcgctagcagctcggtctctacgtgtgtctccctcagcatcttgacaccggaactccatcctgtctgtatgtgtgtggaagaacgaagtcgatggagaagaaattgaagcccgtgtggttcttgcgctcgtctggtgtggaattggagctatggaaattagggaagaaatttcgagaaattagtggacagtgatggtgatgttcgtgcgacactcgtcagatgctcgacaaaaagcccgaatcaggagtggctgctccgtcttctttgtcgaatgagaatcgtcgtgctgaaacaccgatgtcgtcgatcgccatcctcgtctatgccaactctgtgtagctcgttaccacaccctgtagccgcttccacgacgttgtcgaggggacttccgtgcgccacgtgtgcttcctctcgtcatgctaaatcaccatacttccatttgtgtcgacagcaagccgtgaagacgctcttgtgctggccacgcgccacttactcgaccaaacagatcccctaagtatctggttaagaaatgagattgtgtacatcgctcgtcaagtgtgtgcggtcaaaggcgtcaagcaaaaaccatcgtcgttcgtctgactatcgtgtcggattagttagggtaagccaatttgttattcgtgttagtggattgatgaatggtctgactaggtatattaattgtgatgattctgtggtgagttagattgctaattctgttattagttcgatgaagggaattgttaaatatact

SEQ ID NO: 33083 - DNA, 711 bp, Zea mays
  Clone ID: UC-ZMFLMO17059G10_FLI
gcgctgccccgtacacatgttggtccgtgtttgttatcccaatcaatctcccccctggtgtgtgctttcaaaggcagaatatatttgtgtcgttgataattcccggacacccggggaataaaatgggcatgtacatggagcctttgattgatgaattggtatgtgcctgggaggaaggggtatggacgtatgaccgagctacgaagacaaacttcataatgcatgtttggtaccagtactccatgcatgacttaccggcgtatgggctattctgcgcctggtgtgttcacgacccagctagaagaagagaggagggaacacctgacagatcagcagaggatggcggagatgtttcaatacatgcagagccttggcgccgcacagggtttcgctccgccgcctctattgttccctacaatggaccctgctctattccatactcctggtcaatctggggcggcatccaacaaccctcatgaagcgcccaacccaacgcaacaccagtccaaccgcccacctcaatgagagttatgtttttagtgttcaaactacaaaacttatgttgaatacttatgttagagcttgagacttatgtgttgatacttttgaactggtgttgatacttctgaacttgtgttgatactgtttgtgttgagaacttgtatattaatgtttgtgttggatatttatgtttgtgatgatctgtgatgt

SEQ ID NO: 33084 - DNA, 1278 bp, Zea mays
  Clone ID: UC-ZMFLMO17060A03_FLI
gctccaagtcacacggaggcagccatcgtagcctcgcccgactccgcttcccctgttctttgggcatggagctgatcacaaatgtcaccgagtacgagaagctcgcgaaggagaggctgccgaagatggtgtacgactactacgcctccggcgcagaagatcagtggacgctcaaggagaaccgggaggccttctccagaattctgtttaggccacgggtactgatcgacgtctcccgtatcgacatggccacaaacgttctgggcttcagcatttccatgcctatcatgatcgctccttcagccatgcagaaaatggctcatcctgatggagagcttgccacggcaagagctgcagcctctgcaggaacaataatgacattgtcctcatggtctacttccagcgttgaagaggtcaactcagttgggccggggatacgtttcttccagctctatgtctacaaggacaggaacatcgtacggcaactcgtgaaaagggctgagatggctggcttcaaggctattgcactcaccgtagacactccaatacttggccgcagggaagctgacattaagaacaggttcgccttacctccacatctggtgttgaaaaacttccaagcgctggatcttggcacgatggacaagacaaatgattccggccttgcttcctacgttgctggtcaagttgaccgtaccctttcctggaaggacgtcaagtggctgcagacaattacctcgttgccgatcctagtgaaagggatcgtgactgcagaagacactaggcttgcgatcgaatatggcgctgctgggatcatcgtgtccaaccacggcgcgcgccagctagattatgttcctgcgactatcagctgcctggaagaggtcgccagggaagcgaaaggccggctaccggtgttcctcgacggcggcgtccgccgtggcacggacgtcttcaaggccctggcgttgggagcttcaggagtgttcatcggccggcccgtgctgttctcgctggcggtggacggcgaggccggcgtgcggaaggtgctgcagatgctgagggacgagctggagctcaccatggcgctcagcggctgcacgtcgctgagggagataacccgcgcacacgtcatcaccgacagcgaccggatcggccgctcgcggctgtagaatcattgtgcagttcacctcaggaatgttggtctcgactgaactgtcctgattcgggatatataccgctatttgtagctcttgtgctctcattttacgttaggcaaat

SEQ ID NO: 33085 - DNA, 798 bp, Zea mays
  Clone ID: UC-ZMFLMO17060A12_FLI
gggcgccgccgtcttcgtccgtagcagagcagagcagatcagagagcggggaggaagaaaaaccgatcgatggcgtccaactacgtggacacaacgggcgaggagggacggttccacggccctcacagccacagcaccagcacgaccccgacgggcggcgcggcggcggcggcatcgccgcgcaacttccggcgcagcttctcctccgcgtcctccgcgggccacagccacggcggcggcggcggcggggccaagtgcgtgtgcgcgcccgcgacccacgccgggtcgttcaagtgccggctccaccgcaccaactcccagggccacggccacggccacccgcacccgtccccgccggcctcccccgccgcgccggcgcagggcgtctcgtcttccgcttcctcccgcaccgtcgaggccctgtgagtgtccgaggccaaagacgggcgaggcgtggggaaagtgagaagatgatgggatatacttgtcgtgtcagtctgtcagaaggaaaggagtgaagctattattccctcttgttgtgatccgcgctgttttgcctcttcccccctacccgtttcctcccttcgtgctggttgtggttctaaattcctgattgccggccgtcccgccttcttccttgccaagacgagactctcctcctcctgccactgctaccgctgctcctctcaactggtgaactggatcctgatttggggagaaggttaaactggatgcctttccatgtaattaattgcctctctttaccattctacgtgctactagtattgaagtatcatc

SEQ ID NO: 33086 - DNA, 1628 bp, Zea mays
  Clone ID: UC-ZMFLMO17060D03_FLI
actctctgaaggagagcatgtcactttaggctggaatgaaagagaagatctcaaagctgtggttaactatttgcgaacagatgggaatgtatcttgcattggtttgtggggtcgctcaatgggtgcagtcacaagtctaatgtatggagcggaggatccatcgattgcgggaatggttcttgatagcccattctccaacttggttgacttaatgatggagctagtggacacatacaaatatccactgccaaaattcactgtcaaacttgcaatacagcatatgcgaaaaattgtcaagaggaaagctagtttcgacatcatggatcttgataccattcaggtagcaaaacaatgttttgttcctgctttgtttggacatgcaactgaggatgattttatacttccccatcattcagacaagatatatgaatcatatattggcgacaaaaacattataaaatttgatggggatcacaattcaccacgtcctcaattctactttgactcaatcactatatttttccataatgtgctaaaccctcctgaagtggcagaggatcattatttcatgacaccacatggtagccttggtcagggtcattgggatacagaacaagacatagagtatcggttctctcaatcacctacagggacagccaatgctactacaacagaagatgccattgcacagttgcgctctagaaggctcatgagtagaatggaggtcccatctggtgccaccaccgaagacaggactgatcgaactgagggtttcgatagtgatcttggtccctcttcatctagtgtatcaacagcaactcctcccaatggtcgcaacggaaggctgctgactccaacctctgatgatggcgagtatgtggagtactcaattgatagcttgtcagatatgcctcacaccgtggaagatgaagatagaatgctaatgcaagcaattcttgaatcactgaaagactatgaacagtcgaatacaaaaaatgtgcaatccactgcatctgatcctgcatctaaagccaatggtactgtaaaagactgcaatggtgttgctgcagcagcattggagcaagatgcatcctcatttgatgctcctgacaagcatacgaatgtccccaacagtggagaaaaagtcagcgaagggcaaagtacagattgcaacgccggaaagagcagtgcttcggtctctgcttctggttcctcagagcccctggcaccaacacagatggtgaatggacaacctgcttcggtagactcccagaaagtgacccagaatgccaatggagaggatggcacaagagcaactttggtagttcagaagagccggacaggcggcctgatagaaaaatggggttccttcttcaagaacaacgactaaggcgaggaaagatagacgatgacacctttgacaatacgtgttccgttgtgttcatagtcatagaatcgccgttggctgatgtccagcttgattggttttacgtgtaaaatggaaaggaaacaggtgatttcaggacgttcgtgtgtatatagaaggaattgtagcgcccccattgatttataccatctctcaacttccactactttcggttgcggtgaattggcaagacctttgttct

SEQ ID NO: 33087 - DNA, 773 bp, Zea mays
  Clone ID: UC-ZMFLMO17060D04_FLI
ttcccaaatcccgtcccctccacccgcactccattggcgccgctcccctcccctcgccgccgccggagatctgatccgatccgatccgatccgtttgtgcttgtgctgcagcaggagtgagaagtaaaaaaatatggctgccctgccactggccaccgccgaagtatgcgacgctaaccctcacctgatcatgaacggcgagctccgcgcgctccagccaatcttccagatctacggacggcgccaggtcttcgccggccccatcgtcacgctcaaggtctacgaggacaacgtcctggtccgcgagttcctcgaggagaaaggccacggtagggtcctcgtggtcgacggcggcggcagcatgcgctgcgccatccttggcggcaaccccgtccagcaggcgcagaacaacgggtgggctggtatcctggtcaacggctgcatcagggacgtggatgagatcaacggctgcgacatcggtgtccgggctctcagctcgcaccctatgaaggccaacaagaaggggatgggcgagaagcacgtccccgtcaacatcgctggaaccaggatttgcgacggcgagtggctctacgccgaccccgatggcattcttgtctccaggacggaactcaccgtgtagacagacacctggttgtatgtgtgtgtgtataaggaatcgagcgctcttgctgttaagcccgagcttgcaataatggattcttgctggatcacacatttatacttagaataatcgaatgcttgcttccttggtt

SEQ ID NO: 33088 - DNA, 885 bp, Zea mays
  Clone ID: UC-ZMFLMO17060D09_FLI
tctgataaagccctgttgattcatcagtggtaatatatcagtgtactattacactttatagctttatgtaattttataagaaccgtgatgtccatcacattccattgtctggcaggtggcaagtgcaacagcaacattcgtgatgatgttctcctcctccctctctgtggtggagttttacttcctgcacagattccccctgccttttgctggctacctcatcttcatttccatattggctggattctggggccagtgtttggttaggaagatcgtgcatgtgctcaagagagcatcgcttattgtcttcatcctctcctctgttatcttcgtcagtgctcttacgatgggtgtcgttggaacccagaagagcatttcgatgatcaacaatcacgaatatatggggttcctcaacttctgcgagtaactcaaacaccatcagactgtcgatccatccgggagaatccaggccaatgcctaattgacctcatctccctcaaaatctagaagaataaagtcgccgagtatgtgcacaagttagctcctcgccaacatgtgcgcatttagaccgacagagtcgctgtagtgaattcagctcgtgttagctcctggctaacgagctgaccatacggctttagttttgtgaagtgggcgcgatttcgtcatgtcatgcatgtgttagctcctggctaacctgcaaatgcgtgtgttggtgcaggtttttgtcacgtctgcgtcagctcctggctgaccagcagttgtttgtcgttcattctctgcgtcagctcctggctgaccagcagttatttgttgttcattcttgcgctagcaccaggctaggctgcaaaactgcaaatatttgttgcatggaacattgtaaatatc

SEQ ID NO: 33089 - DNA, 1392 bp, Zea mays
  Clone ID: UC-ZMFLMO17060D11_FLI
ctatgattgaaggagaattccaaaacctgtaaagaatgagtctcgcagtctttgagctcacaaggttctaacagtgggagcgtgtttgggagcaagcgatcgattaaaggaatgtatagtcccatgcacaagagttctttggatagggagatccctggcagcacaaaattctccttgccacagatccagaaagcaacaaagaacttctcgccaaacttcaagattgggcagggtggttctgggactgtatacaagggtcagcttgctgatggtactcttgtcgctgtcaaacgtgccaagaagaatgtgtatgacaagcatatgggtcgtgagttctggaacgagattgagacattgcaacgcattgagcacctgaatttggttaggtttcatgggtacctggagtttggtggcgagcagttgattattgtggagtatgttcccaatgggaatcttcgagagcacctcgactgtataaatggtagaatattggaattctcactgagattggaaattgcaattgatgtggctcatgctattacatatcttcatacctattcagatcatccagtcatccacagagacatcaaatcctcaaacattcttctaatgaacaattgtcgagccaaggttgctgactttggattcgccaaactggctccaactgattctagtcatatatctactcaagtcaaaggaacagcaggctatctcgatccagaatatctcagaacataccagctcaatgagaagagtgatgtctactcctttggagtccttctggtggagttggttactgggaggcgccctatagagccaaaaaaggcaatcattgagcgtgttaccacaaaatgggcaatggaaaaatttgtggagggcaatgctatccaaacactagatccgaatctggaagcgaccgatgcgattaatctagcggtcgagaagctgtatgagctggctctgcaatgcttagccccaactaagaggaaccgaccgagcatgaagcggtgcgcagagattctgtggagcatccgtaaagattacagggagttggttgtacccacctctgccatgaactgaagcaggtcgtctggagcagtcaagtgaacaaaaagatgtatcattccagtttgcctctcttgattcgcttcaaagattggtggttgaaatcatccgattgctgggattctttcagttaccgcaagtggtcgtgaacaggactgatggccttcctagatgctgtgtttgtgctagaaaccagaaaagtccctgtgtgaaagtgttgctgagtaaacatgtacgagtatatatcagatatctaatggtgtgtatatcttgtaggttctcttatacaggtaagtgcatcacgcatgaagaaatctagttgtttcc

SEQ ID NO: 33090 - DNA, 471 bp, Zea mays
  Clone ID: UC-ZMFLMO17060E05_FLI
agctgccggcgaggagaagaggcaagacaggccgccgccgccggagggcaagcggtacgaggcggccggcggcgggggcgcagcggtggtgcaaggcgacgagccacgggaggctgggtcgaactccgaagagtagaccgcgcccggcggactggtgtacatggaaatcgcgggcaacgacatcgccggaatcagggatgcctccgacgcgctcgaactgaaagctgctaactgttcggaatcggaactgaattcggcgccgaaaccaaaaggcagcacagaacagaatccgatgccaaagatttgacctcggtgaggtggagtcgacgagttaataaaaatcggacaagaggaagtgttgcaaacagctgaaatcggcgtgatcaagcagggaatttcgtggggagggcgaggagagcagggaaatggggaaaatctgttcggcttgcgtactacttgggttgcgtcccg

SEQ ID NO: 33091 - DNA, 1733 bp, Zea mays
  Clone ID: UC-ZMFLMO17060E07_FLI
aaaacagccacacgctcgccacccatggccaccaccaccaccaccaccacagcacaggcccactgccaccgctaccgctaaccatggcctcctcagcgtccctgcagcggttcctcctgccctccccgcacgcggcggcgacggcggcctcgccgtcctcccggctgcgccgcacagggcgcgcccgcgcggccgtctccgtgccgccgccggcggcggcgggggagcaggtcccgacggagcggctggagccgagggtcgaggagcgggcgggcgggtactgggtcctcaaggataagtaccgggcggggctgaacccgcaggagaaggtgaagctggagaaggagcccatggcgctgttcatggagggcggcatccaggacctggccagggtccccatggagcagatcgacgccgccaagctcaccaaggacgacgtcgacgtccgcctcaagtggctcggcctcttccaccgccgcaagcaccagtacgggcggttcatgatgcggctgaagctgcccaacggcgtgacgacgagcgagcagacgcggtacctggcgagcgtcatcgaggcgtacggcgcggacgggtgcgcggacgtgaccacccggcagaactggcagatccgcggggtgacgctcccggacgtcccggccatcctggacggcctccgcgccgtcggcctcaccagcctgcagagcggcatggacaacgtgcgcaaccccgtcggcaacccgctcgccggcgtcgacccccacgagatcgtcgacacgcgcccatacaccaacctgctctcctcctacgtcaccaacaactcccaggggaaccccaccatcaccaacctgccgaggaaatggaacgtctgcgtcatcggctcgcatgacctgtacgagcacccgcacatcaacgacctcgcgtacatgccggccgtcaaggacggtgagttcggcttcaaccttctggtgggcgggttcatcagccccaagaggtgggccgaggccttgccgctcgacgcctgggtcgccggggacgacgtcgtccccgtgtgcaaggccatcctcgaggcgtaccgggacctcggctccaggggcaaccggcagaagacgcgcatgatgtggctcatcgacgagctcgggatggaggtgttccggtcggaggtggagaagaggatgccgaacggggtgctggagcgcgccgcgccggaggacctcgtcgacaagcgctgggagcggcgggactacctcggcgtgcacccacagaagcaggaaggcctgtcgtacgtgggcctgcacgtgcccgtgggccggctgcaggccgcggacatgttcgagctggcgcgcctcgccgacgagtacggcaccggcgagctgcggctcacggtggagcagaacatcgtgctccccaacgtcagcaacgagaggctcgacgcgctgctcgcggagccgctgctgcaggagcagcggctctcgccgcggccgtcgatgctgctcagggggctcgtggcgtgcacgggcaaccagttctgcgggcaggccatcatcgagaccaaggcgcgggcgctgcaggtggcgcgggaggtggagaagcgcgtggccgtgccgcggccggtccgcatgcactggaccggatgccccaacagctgcggccaggtgcaggtggcggacatcggcttcatgggctgccttaccaaggacagcgacggcaagatcgtcgaggccgcggacatcttcgtg

SEQ ID NO: 33092 - DNA, 1280 bp, Zea mays
  Clone ID: UC-ZMFLMO17060E12_FLI
atgagttccaaatccaacacaaagacattacaaagtagcaaagctgtgcttgatgagagtagtgtgatcaaaaggaatggttatggaaccttggatgtgccagaaccaacatggtttattctaagtggacatcgcctgctgagaaaagagtatagggctatacttagacgtttgagaggtagagtttgcagggattcacatcactggtctttccaagcaacacaccttgtcaccactgagatgcgcagaactgaaaaattcttcgcagctgctgcggctggcaggtggatactgaagcctgattacttgactgctagcaatgaggctggcaagttcttagaggaagagccatttgagtggcacggtgaaggccttaatatcggtgatacgatcagcttggatgctccaaggaagtggcgccagctgcggcagcgtactggctatggcgctttctatgggatgcaggtcatcatatatggggaatgcattgctccaacactggacacgttaaaacgcgcgatcaggtgtggtgatggcaccatcttagcaacctccccaccttacacccggttctttaagtccagtgttgacttcgctgttgtatccgcgggcatgccaagcgcggacgcgtgggtgcaggaattcatgcggcatagcatcccctgcatcagcgcagattacctggtggagtacgtgtgcaagcccgggcaccccttgggcaagcacgtcctcttcaacatgcacgatctggccgagaggtccctgcagaagctcatgaagaaccaagaagatgctcccgggagctgttccgcttgtgggtcagacaaccgggaagtgccgatgctggtgtgcggcggcgacgggaggagccagtcttccggctgtggggtccggacgcatgccgattgctgcaaccctcccgtggaaggctgcgatggtggcgagtggctgtgcggtaggtgcgaccagcagaaatctgcaaagaaggctaagaagaccgctgcgaaaccgagggtgctgaaacagagatgattctggtttggcccgtacaagcgatgcaaaaggtcgtctcccaaggtaacgacgaatgatggcagcgggggtgctcttgctctctacaagttgatgacaactagctcgttgcctttggaaagcacccgtgcatgtgatctgatgaatgaaaacaaagtgatgggtgtaaacgtataaggactttagactggtgccaataaatattacgtatttatgtaaatgcacggatctgatggaatgctgtgatc

SEQ ID NO: 33093 - DNA, 687 bp, Zea mays
  Clone ID: UC-ZMFLMO17060F03_FLI
gccgcagccgcagcccaagatatcgaaggagcccaagctatagcagaagcccgcgagatcgttctcctaggaggcgaagttacagcaggtcgccactgggatctcctgcacggagtctcagcaggtcaccgccgctgccgccgcctcctcccagaaataacagcaggtcaccacctggagcccgagaagtgagcaggtcgccgccgccacctcctcccagaaataacagcaggtcaccaccggcagcccgagacgtgagcaggtcaccaccggcagcccgagacgtgagcaggtcgccaccaccacctcctgatgccagaagaagctatagtggatccccaggacagcagccacaacgcgacgagtccccatatgccaatgacgcctgagattctcttagctgccccaagatgctggaaaatgctaggggcccccagcatgttttgcctgtccggtcggcacaactgtaattctgtaggatcgagtctgagattttgttccagtgttttgggtttcccttgacacatcgctgctgatacaattgtggaggcaggagcacaacgtttctgttttaagtattgactggatgactttgggcgcttgtagttgtcaaggcaggacctgatttgtgttaggcttgtattactagactgcattcgaatttggagaaagtgttcatcgtgctgt

SEQ ID NO: 33094 - DNA, 1286 bp, Zea mays
  Clone ID: UC-ZMFLMO17060H02_FLI
cagttccgctccgccacttcctctggcagcaatagtagcggcgagaacttcctcaagggcgtaaagtggtcgcccgacgggtcctccttcctcaccagctccgacgataactccctccgcttgttttacttaccggaggaagcgtacattgcggcggagcccgttgccgaggccgctgtcgaaagtgaagattcttatggagctttcattcaggcgaacgagggtgagccagtgtacgatttctgctggtacccgtgtatgtccttgtctgacccagccacttgtgtatttgcaagcaccagtcgtgatcatccgatacacctttgggatgccaccagtggggaactccggtgcacataccgagcatatgatgccatggatgaaataactgctgcactttcgatttctttcaattcttcaggatctaagctatttgctggatacaacaaagctataagagtgtttgatgttcatcggcctggcagagactttgatcagtattctttactcaaggggggtgaaggaccaactggtataatatcttcaatttccttctctccacaaaatgggatgcttgctgttggttcatacagccagacaactgctgtgtatgcagagaataatatggagcctttgtatgtcttacatggccagcttggtggtgttacacaggtgcttttttcgaaagatgggaactatctgtatactggagggcgcaaggatccgtacatattatgttgggatattcgcaatactgtggacattgtttacaagttgtacagatcagctgatactactaatcaaagaatatattttgatattgagccctgcggtagacatctagccactggtgggcaggatggcatggtccatgtatatgaccttcaaggtggtcaatgggtaaccggctaccaagcagcagctgatactgtaaacgggttctcgttccatccataccttccatttgctgtaacatcatccgggcacagaagatttggcatgcaagatgagtttgaagacgagttaaacttggcaggtgatgagaacagctgctctgtctggatgttttcttcctcacaagaagcttgaagcatttagtgaaaatattggatcaggctgaagctaagcgaagcattggatgcacattcaaatctattgtcactttgatgttcgtgtgcagagagcatcgcggcattgaccacttcctgttgtgttggctgtaattggtgtctgcaaaatgcaaatgtattcactgagatctatagaattaatgacttatttttttt

SEQ ID NO: 33095 - DNA, 960 bp, Zea mays
  Clone ID: UC-ZMFLMO17060H05_FLI
attaagttcaatgaccccatatagatggacagtaatttataggtttgtgtttttgtttaactaatgctgccaccttagtaaaaatttctatggcgccttttgcattttggctctctttagccatttccttgtcaaggttcacactagccgaagttgacattacaacaaaattcagtatacacattgctttgtttgcttatttgtattccagttatgagctaattacctgataggctgaaaatctatattatttttctgagagtattaccataaacaccaaaatgtgtccttacattgcagcttcgctcctgtttcagttcattcatatgccgtggaatgttgcctctttattcacatctcgagttgccagtttaatttttatcacaattttatatcagatattagagtgctactaacacatcattaagtaatggaatttgtttcttgtaccttctgcagatcgctatcaagatctcgatccccaatttcttctccttctcatgcaagatatgcgacaagccctaggagcagaagcgcatcccgttctcggtctcctgtgagatccgattgaactttgagagcccttgaagcagtgagcagccccagggagaagaaaggaacttgagagtatgccgtgccatcacaatggtccgagtgattatgctgttgccactgctccctcacatttaagaggtttcctcttatttagacggagcatttaattaacattatcttgctaaagagagacttatgcgtagtctacttgtgtactcgttcgtttgtcctcatgttcttggcttcaggaactctggttttttatcattgtacccatagtaaaacctagatgtagttggggtatgccgtatgcgtctatattcggttggtcgaatgtaaatctggatgcatatatgcatctgtttggtttcatttaggcctttccttggtttcgtgattaatgac

SEQ ID NO: 33096 - DNA, 2277 bp, Zea mays
  Clone ID: UC-ZMFLMO17061A07_FLI
tcgcacgcagcacggcctccgatcgatttcctcttgtccgcgtgtcccagcgaatcgccgtcatgccgcgcccgatggcctcctcctccgccaggggccgggcgaaggattccgacccctcatcatcctcggcagcggcggattcctccatggcatccctaatcgagcgcgccacctccaccacggcgcacgccgtcgacccggtgctcctccgcgccatcaaatcttcggcccgtgcctccgatgccgccatccgggacgcgttccgcctcatcctctccctcatgtccaagccccactcccacgtgcggctcctcgccttcagcatcgccgacgagctcttcatgcgctccaagctcttccgctccctccttgctgactcgctcgacggcttcctcccgctcgccgtcgggttccgccgagcaaaccccctcccgccgccgaccacgtccgctgccttactccggaaggccgccgtccaggcgctcgagcgctggcaccatctctttggtgcgcactaccgccagctccgcctggccgtcgagtacctcaaggagtccgcgcgcgtccagttctctggtctgcgggccaccgttgatgctcgtgcagctcgtgaggctcgcatgcaggagatctatgctggcaaggttgagcagttgcgtgaaaaccttgcgtcaatcaaggcggagattcggtccacgattgatgagattcgcaatggattggagatcatccgtgctgaacataagaaatttgagggttattatgtggatgacgaggaggagattgcatccttgtcaatgcggagcattagaacagcatcattgatggctggggagtgggtgcctgagactcaggagaatgaggcagtttttgatgcactgagggaagcacaccggttgcttgtgtcaaagcatttggtcacagtacaggagtggataactgtgcttgtgagggtcaaccttccagacaaccgtttccgagattctgcattgaaggatttcattgatgttaagaatgagataagggctgtgagagatcattgcagtgagcttggtcttgaccttgataattttcataggcggaagggtgaccaggaggaagaggacaatgagttctgggtggagggaaacatagaggcaccaaatcgtgctagagtccagagcagtttagatgttgcgagcactagcaaggacactgagaagggaaagtgggtggttggtggagtgtctcacattggcaaggcaccagttgcggctaatggaacgagaaatcttgatccagaaaaatcaaaactcctcgctgaagcccctgtgctgccatggagctctgtcttggatcgctggggctcaagtggggatgtacacgtaaaccagaggggacttgaggtcgagagtcattggggaagagtggataatgatgccactatacctgcagcaaagattgcagagttgaatgttcattgctcaatttatagagaagacccagttgagatcctaccatgccacgcccctctaaaaaaaggaggactttgccagagaagggatcttagggtatgtcctttccatggaccgattgtcccacgtgatgcagaaggaaatccaattgagcagaacagtggtagttctgatgcagaagtaaatcctgttgagcacttagacattggaggacattcaaatgagcttaatggaatcagtgatgatgattgtatggagggaacctcttcaagaatggcaggtgtcaataatgattatggtgacatagctggaacttgtgatctaggtaagattactgcagagcagttagcaagacaatcagttaaaaatgtccggaaaagagaaatggatcgcaaggcacaggaaagggcccaacgtgcaagaatccgtcagcacaatgaagatgtcctgcgaaatgcggctcttgcttcaacttcctattctgcagcagcctatgagcagcctacagaagcacatggtcggcgaggacgccgaggtaaggcaaaggcaccaacgctggcatcgatgctgaaaaagaaagttaccaccaaagacagaattgcagagaggcttctgaacgctcgagccacagatgccacagtaagggatgtttctcataatgaagatatgagctacagggaagcatttccaaatcagtggtagcagaagcagttgagttgttcttgtgtaggctccggctggataaacatgttaggaatgaaatcgatgttgtttattggttcatactgtcagctaaataatacatattctgttgctatct

SEQ ID NO: 33097 - DNA, 1681 bp, Zea mays
  Clone ID: UC-ZMFLMO17061E02_FLI
gcccgagaaaggaggaagaaaaactagaaaccctagcgatgctgcagatccgcctgagcaagattggctcgtcggactccggcggtgccgccgctagcacggcagctggcgccggcgcccccgccgcggttggggcggctgcggcgctcggcggcagcatcctggaatcggtcaccgtggcatgccccgaccacctcgtgatcgcggacctccccgtcgcgaagagcctcggtgccgtcacggcctccgctgccgccgccacgcgcgccatcggccgtcgctcccgtcgcccgctcggggagcgcgtccacatctgttcccgctgcgagttccccatcgccatctacggccgcctcatcccttgtgaacatgccttctgtttatcctgtgcaagaagcgattctagctgctatctttgtgatgagcgcattcagaagatacaaagtgtgaaaatgatggaggggattttcatctgtgctgcaccaatgtgtctcaaatcgttccttaagaaagcagattttgagttccatgtgcctgatgtccatgccaacctcctccaaactaatctagagaaggaagaagaacgcaatgagtcagatgctcctaacatcccctgtgcttctgcaggggatactcaaagacaatctcaaatgcctgaaatgtctactgcacgtgctcctcctccaaggccaggtgtttcacaagatcgtgaagaacgctcccgctaccaccagtccagggagcaaacaccactgaggcctccacccctttcaaaaccaccgttccatggtcgccattcttacccaccaggggatactcaggccgagaacaatccacctcaaggattcgaccggccatacaactgggcttctcaatcacgtcaggagagcccaggtgcggtgactccacttcgccaagaatctgaccacagtactcaggacaggcagcaattgatggctaatgcaccttttatgttcccgccgattcctcctcaccagggaaactttatgatgcctatgaatatgaatcagcctttgatctccaacgcaccattcaattaccctctccagcaagatggaaaccctcagtacttttctgcccctttccagatgccgccgctaccagatactggatcagaccaaggttccatgtcaagtgtccagcctccagttggccctatgagcttccctgaggggcttcagcgcccatgggctatggggatgatgggtaatccatttcacccgatggcccttggtcagggaatggttgatggtgcgggtgatcctcagggtggtggtggccttgccttcatgcaagctggttttgggggcatgcctgatggctccatgaatacaggcatgcccgatagaggtgatggaaggggtgttcgagcacagatgcccacgccaatgcaaatgcagatgtcacttcccccacctccgcctacacaacctccatcaggctcgcagcaaacatttaacaggacttgatatattttgttttgcacgaattgatggttcctctcaaaattccatgtcaattcattgaggaaactgtaattttatcgtcgttggcatgtaacctgtgagaactagatggctcagttctattccctggtttgataggagcctgtgtattatgctgtaactgtcctgtttgaatgaagtgttcccaagttacg

SEQ ID NO: 33098 - DNA, 1008 bp, Zea mays
  Clone ID: UC-ZMFLMO17061E10_FLI
gaacaaccgtggcatgcacaaactcccttgaagaaaaagtaaggtcttgaggattgtcaagggaaaggaacaaaagaagaaaatcaatacctctgccaaaagcctcaaccatgcctccatgcaaggtaagatccaaggtaatgatcaagccacacttcacactaagcaaagtaagaagtgtagtgaatgctttgaaatgggcacttgattaggtcatgtccctatattaaagaaaatggcttgattattaacaaggatgataaacattgttttagatgctctaagaagggacatttagttaagtcatgtccctatgtaaaacaaaaaggcatagttttagaaaacaaaatatttactaaccatgtagcaagaaagaaacaaggaaagaagaaatcttcaagacatgaagatcgcctttgctacatatgccgaaagaaaggacatcaatgtaaggattgtcctattggtaactatcccgcccctaacttgtcaattgattcatatgtaactagacaatccaaaattgcaacttgtgctagaaaggtaatgagtttaccaagtgatagcacaaaggacatctgggttcctagatctttgttgactaaccttgatggacccatcaagagatggggaccaaaatatgcatgaaaagctttgcaggggaaggagatgatatgaagctttggaagtgcttgagaggatcaattaaattaatattaactcaagctatcaatcttacaatgatctatatccctaagattgacccaaagttatttttgagttattatatctacaactcatatcatctcaagcaggatattgcagttgtaggaattaaaggattatcatgtgtggaaaaccaaagcctacaacatggaggaaagccaaaggatggtaacacttatgtctttaggtgcaagtatctttaattaccatttctcttgtgtcttgtgtagtcacatagaaaaaggaagcacttaagaatattatcaaattatgtcaccgttc

SEQ ID NO: 33099 - DNA, 911 bp, Zea mays
  Clone ID: UC-ZMFLMO17061H05_FLI
cagctgccagcggacgtcctcgtgtcggtgatctcccgcgccgccgcggggccgagggatacctgcatcgccgccacggtgtcgccggcgttccgcgccgcggccgactccgacaccgtgtggtcacgcttcctcccggctgacctcgccccgctcgtctacccgacgcctccgccaagatccaagaaggagctcttccttcgcctctctgaaacccatgccctcgttgaagatggcctcatgagcgcgtggctggacagggagaccggcgccaagtcctatatgattgcggccagggctatggctattatctgggtcgacacgccggactactggcgctggatcgtgcgcgaagactcaaggttctcgacatgcgctgaactgttagcggtttgttggctggacatctccggttgcatgccatgcaggatgctgtcaggtgacacgcgctatgcagcctacctggtattcaagatggccgatgactgctttggcctggattctcctcttcaggaggcatcggtcagcgtcggagaggggggcacatcaacggcccactggatcagactacagagctaccacgtcggcgacgaagagaacggcgtaaccgaggaaggagctccacctaggctcccacatgagaggcctgatggctggatggaggtggagctaggagactggtacaaccatggaggcgacgacgacctagtggttcgtgccagtgtgaaggaggccaggtttggaggcaactggaagaaagggcttattgttcagggccttgagattagacctaagaactgattgagggctggttgatcataaaattatatgtatatgtctcagtttggagtgcattcatgttggagctattatgtaataatacgcctgcaggctgcagccgttcctgatgc

SEQ ID NO: 33100 - DNA, 2107 bp, Zea mays
  Clone ID: UC-ZMFLMO17062B08_FLI
aaaatcccagaataccttgggctcccgagcaggagagagcaatgcaacgagccatccggatagccgcggctgcgacaaggcgagcgctgtcgtcgtcggcggcgagggcatcaccccctcctccccgcggacccctggctcctggctggggcgccactaggtggctctgcagcgggcgggaggcgctgagctacgacgtggtgatcgtgggcgcagggcccgcggggctcgccgcggcgatccggctgaagcagctctgccgcgctgctgacaccgacctctccgtatgcgtcctggagaagggctccgaagtcggtgctcatgtgctgtcggggaatgtgtttgagccccgagccttggacgagctcattcccaagtggaggcaagaggattctccaatcagagttcctgtttcatctgacaagttctggctgttaacgaagaaccaagcttggacactaccatctccatttgacaacaaaggaaactacgtgatcagcttgagccaattggtgcgttggatggccacaaaagctgaagagttgggtgttgaagtgtatccaggttttgctgctagtgagatactttatgatgaaaatcaaatagttacaggagtcgcaaccaatgatgttggtattgctaaggatggtaccaaaagggaaacttttcaacctggtgtagaactaagagggcgaataacactgcttgctgagggttgtcgcggttcgttatcagagaaaataataagaaatcacaagctcagagagagagggcaagggcaacatcagacatatgctcttggaattaaggaggtttgggagattgaagaaggaaagcacaatccaggttctgttattcatactgttggatggcctttggatactaaaacatatggaggatcattcctgtaccaccttgatgatagacagttggcaattggtctggttgttgcgttgaattatcgaaatccgtttctgagtccctatgatgaattccagaaatttaagcagcaccctgctgttagaaaacttttggaaggtggaacagctattcagtatggtgcacgtactctcaatgaaggtggtttccagtcaataccatatccaattttccctggaggtgcaattattggatgttctgcaggatttctaaatgttcccaaaataaaaggaacccatacagctatgaaatcaggtatgcttgcggcggaagcaactttcaagtccctcgttgaaggatcttcgatggaactgtactgggagaacctcaagaagtcatggatatgggaagaacttcataaagctaggaattatagaccagcatttgaatacggattaattccgggtatggttttgtctgcactggaacgctacatattcaaagggaagtcaccttatacattgaagcatgggagacccgatcatgaagcaacagacacggccaatctgcatgcgcctattcaatatcctaaaccagatggacatataacatttgatgtcccaacatctttatacaggagcaatacaaaccatgagcatgatcagccgcctcatctccgcttgagggatcctacagtacccgaacgagtaaatgttgcactgtatgcagcgccagaatcacgctattgcccagcccgggtttacgaatatatctctgatgagaaaggtgacccaaagcttcatataaatgcacagaattgtcttcattgcaaggcttgcgacatcaaagatccaaagcagaacatcgagtggacagttccagaaggtggaggtggtcctggttacacagtaatgtagaatgctcaatgatgaaaatatgttgccttcaaaaataataacggctcattcaccactggtgtcaaactggaccaaatccctggctaattgggttggaagttacaccagacatctagcaatgagcaacttccttaaagcagtagacaggatgtcaggatgttcctagagctatgtaccgatcaggatcagtcagggaaagaagcgtgcatcacatggatgtggtgactgtaaaactattgggaagatgcaatttgtcgaccaataacaggcgctgtaagagagatctgtcccaaacgaaatatcgtaaggtg

SEQ ID NO: 33101 - DNA, 2226 bp, Zea mays
  Clone ID: UC-ZMFLMO17062C07_FLI
gctgcggcaggcgcagcggcagcatcagcatcatctcatggtgcgcggcatcggcgaggagatcgacctcgagatcggccctgtcgacgacccctctttttccggagcttccttagtggccgttacgtccacgcacgacactgtcgttcacgccgacgaccacaagagcctcctcatcccgtgttcgcagcccggcgcggcggacgggctggcgccgcagcagcacctgtcgcagggggaagagcatgacgggatgctcaggtcgccgtcggggcacaccaagaagaagaagaaggtggtcaagaaatggagggaggagtgggcggacacctacaagtgggcctacgtcgccgtgcacgacaccaccaccaggatcttctgctcggtgtgcaaggagtacggccggaagcaccgccggaatccatatggcaacgagggaagcaggaatatgcagatgagtgcgcttgaggagcacaacaatagcttgttgcataaggaggcgctccggttacagatggcctccaaggagaagttgcagcctcccgagattgaggggccggtctatgtcaaagctttatcgaaaacagcagcatcaatacttgaatgtgtcctaaggagggatccccatgaagctgaatatatacagtcgatccaggaggtggttcattccttagaacctgttttggtgaagaatgcccaatatattcaaattttggagcgtttgttggaacctgagagatgctttatcttcagagtgccatggattgatgacagaggtgaagcacacgtcaatagaggtttccgtgtgcaattcagtcaggcgttaggtccatgcaggggtggtcttcggtttcacccatccatgagcttaagtgtggcaaagtttctggcctttgaacatactttaaagaatgctttgtcactatataaacttggaggtgctgctggaggaagtgattttgatccaaagggaaaaagtgataatgagataatgcgcttttgccaaagtttcatggatgagctgtatagatatttgggccctgatcaggattttcccgctgaagatattggtgttggtccaagggaaatgggttacctttttgggcagtatagacgtctttctggtcattttcagggaaattttacaggacctaaaattttctggtcagggtcaagttttcgaacagaagctactggatatggtctggtgttttttgcacgtcttttacttgctgaaatgaataaagagcttaaaggattaagatgtgtgatcagcggttctgggaagatagcaatgcatgttttggaaaagcttttgccttgtggagccattcctattactgtctcagattcaaagggatatttgttagatgaagatgggtttgattatatgaaatattcacttctaagggatattaaggctcagcaaaagagcctcaaggagtacttgaaaacatatccacatgctaagtatattgatgatgcaaaaccatggagccagcagtgtgatgttgcatttccttgtgcatcacataatgagattgaccaaggggaggctgttgcaatcagcaactctggttgtcgtgttcttgtcgagtgttcaaatatgtcgtgcactgttcaagctgttgatatcctaagaaaggcaaaagttattgttgctccagcaaaggcaactgctgctggtggggtagcacttggggagattgaattgaatccagagtttaatttgatgcaattgtcagtggaggattttgagaatagaattcaagatgcaataaagcaaacatatgaaaggtcggtcaaagctgctcaagattacgggatcatgaaagaaagccccgattttttggtccatggcgcgaacatttgtgctttccttaatatcgcgcaagccatgactgaccagggatgtgtttagttaggcctggattctgtcaagaagcttcaactggagctttctgcaaccgcgagggaaaaaactttctgacaactagaggtgctttgatgcttaaactttgagtaatgctgcacaaatcttgaagccctacaaaacagggagtaactaggatccatttacccctgtttatgctagaaatgtgtacagctaaggtgtaggaaaggccaattttgtggtacaatcaagaggagccgaggatgtagatcaccgatgtaccatccattgttatgaacgtaaatgtaaatggaaagttctacattgtatgc

SEQ ID NO: 33102 - DNA, 1550 bp, Zea mays
  Clone ID: UC-ZMFLMO17062F07_FLI
gaaggggttgccttctaatttagatgtgtatatgtctttccaaaatgaatttttttccaagatctttatgcaattaagggggctcaacttggtgcttaaatcagttgtcagtgctattttttatagctcagtggattatggaaaagttgatttggagatgaaatcccagctgcataagtttttttaaggtaacactaaacctaacttacttttattttgtccttacaggtctacatgctgctaagtttcttttgtttttcaaccaggcttacttcaaccgcttatttctttaaaatagacataattgctaaaaaaatttctaaatgttctatacgcaagctttctaaatgtttgctacacaagattactgtacatcattactaaatgtttcctacgcgcgcgggacgcgcgctcattcccgctccctgcaaagcccattcacattttcattcccggctatcacgtgtctttctcattctccctcccacagagcctattcccaatcccacgtgcatctcacgcctagctaaaattaaattaaaaaaacaggctctaaggggattcgaacccacgacctctcaaataaatgtgtttgtagctaccactacaccacatgtgtgtttatgtctacatctattatagtaaaaacatataatacatctctcctgaagcccacctgctacccttgcacaatgtgtagtagtagataagtatcactgagattattaaattatatttttggattgagggagtagtatttaaagaagagccttgcatgcaatttcttttgtttgaataatgttttcatcttaaatactttttttgcatgtgtaacatttattctccgtaatattttttgatggatctaacttataaatcattttcataaaccaatgccaaaggtgaatccatgtttcttacttggaaaccccgaacaaacaccactagcacgaggcgctcgcattggcgtcgctcaccgacgacgagaaggaacttggcgactgccagttcgacctctggaagcagtcctacatggcccatgcgccgctgtgtacgacaagctccggcgcagccgtcgcttggacgtggtccagaccggctgcaccgcgctgtccatcgtcaaacatggggacctcatggtcgtcgccaatgtcgacgactctcgggttgttctgggcatcgcaacctacgacgacaccatcacgccgtctagctcatcatccacctgaagcctaacctgccatcccagccaagagtgatcggtactcaccatatcgcgcgcgttcgacgactattatatcaaggattgtggcgtcatctcgacaccggaggtgagcagaggtggaccgacaacaatgaccactcgccatcgtcggggtaccttttgtgccggcctgcctttaattctcttcgcaaacacacacttgtattttttgtttaagcaagcgtgtatggtggtgcgtgcctgatgactaacgatgtacgacagaacttctaccagcaggtgtggcacgtgctctccaataatgagaccatgcaaatcatgacat

SEQ ID NO: 33103 - DNA, 677 bp, Zea mays
  Clone ID: UC-ZMFLMO17063B07_FLI
tcgccgccggcgcctgcgcgctgctgctggccgcgacattcctggcggccggcctgttgacgacgtcctccctggcgccgtacctgctgccgccgctggccctgtcgctgccgtgcctgccggcggtgaccgcgccggcggggtccgggtacggcgcggcgccgggcgtggcggcgctggcggaggcggccgtggcgtacgccacctcggagaccgtgccacagcagtcggtcgacgagatctcgctgtcgctggccgtgctgcggcggcgcgcgccgctgcggctgctggtgttcgggctgggccacgactcgaggctgtggcacgcgctgaacccgggcggcgccacggtgttcctggaggaggacccggcgtggtaccgcgtggtgcgggcgcagtcgccgttcctgcgcgcgcacctggtggcctaccgcacgcgcctcgaccaggcggaccggctcctggccacgtacaggcggcacccggcctgcctccccggcggcggcggcggcaacgacaccctgcagctgccgcgcgtgcgcggcaactgggcgtgtccgctggcgctgtacaacctgccgcccgaggtgtacgagaccgagtgggacatggtcatgatcgacgcgcccaaggggtacttcgcggcggcgcccgggaggatggccgcgatatggacc

SEQ ID NO: 33104 - DNA, 1268 bp, Zea mays
  Clone ID: UC-ZMFLMO17063C11_FLI
ggaccatcaaagaagagttctgaagatattatacagttaagagctcaaaatggctttgcatgtagagaggtcccagttaaagagactaaaaaagtatttcgctcagaggatgaaaatggtaataagatggtcaaccaatatgtccacttgggaaagatcggttctggaagctacggaaaagtggttctgtacagaaacattaaagatgggaagctgtatgcagtaaaggttctgaataagccatacatgatgaaagtacatgttgtacatacaaaaactgccatgacagatgttcttcgagaggtatccataatgaaaatgttgaaccaccccaacattgtaaatctcgttgaagtgattgatgacccaaacatggataaattttacatggttcttgagtatgttgaaggaaaaatggtttgtgataatggtttagaagaagctactgcaagaatttttttgcgagacataatatctggtcttttgtatcttcactcccataatgttattcatggtgatatcaagccagacaatctcttggttaccagtaccggcaatgtgaagataggggatttcagtgttagccaggtttttgaggatgatgatgatatgctttggagatctcctggcactcctgtttttactgccccggagtgctgtcaaggttcagcctaccatggtagagcatctgatacatgggcagttggtgtcactttatattgtatggtctctgggcactatccatttctgggggatacattgcaggaaacttatgataagattgccaatgatcctgtggaaatacctggcgatgtgaatccccaacttgccgatttgctcctaaggcttctctgcaaagatccaggagatcgcatcacactgcgtgctgcggctgagcatccttgggtcgctggggatgaggggccagtccctgaattcatctgtagatgtgggtttggccgcaggaagaggaatgatgtccgggaagaagttcaataacaaagcatcctcggatggtctaataggtctagcgtagataattgatgatcggcaaagcgaagccctgacgatgagttcgttgttccgtgttccctgtttctaatacgcgctcgactgaacatatttctttttggtacagaatatatactgcgtaaccctatgccagtaaggcaacgtttgtcacagtttcacgttgtcaaacgcagcttaacgggtgatgttttttttttatgatccgagaggaatggataagtgaatttttttttttg

SEQ ID NO: 33105 - DNA, 611 bp, Zea mays
  Clone ID: UC-ZMFLMO17063D05_FLI
tgatggagttgctatccgaagccgcaaggaggctggagtattctttggctttgttgagttcgaagacatgtctggtattcagaatgctttaagtgcatctccagtagagttaaatggccgttttgttcatgttgaagagaggaggcctaactgcggattccctcgtggaagaagaggccgtggaagagctgatttctcaagggaccaagctggtgggagatacgacggggagtatgctactcgatcgaaaggaattgggcaccagaaaaaaactggacgccagtatgactactagttatgtaccgctctgctggtaaatggccgtgtaccattggtgttctctacttggtgctgttctggccataattttgctaaaagtcacaatgatgtcgggactagtatttctgctttgttgacattcggcggagtcttttttgggggatgggcatctgttaccattttgttgcgtcacagtagtttttggttctcagttaccgtgaccacttacaaatggatcatgctaccgtcggtgtcaaactttttaagcaatacctaggttgtacttgtaccgatgttaatagttggtattcttagattgacatagtttgcat

SEQ ID NO: 33106 - DNA, 1361 bp, Zea mays
  Clone ID: UC-ZMFLMO17063F02_FLI
gctgtgagcaagattgcatcgctgcaggagttcattcctcatgatttcgatgccagtgaccatgggacctcaagcttccctgtatctgcagtgcataggattggcatccttgacattagaatcttcaacactgacaggcatgctggaaatcttctggtcaagaagcttggtcctggcgccgacaattttggagagcagacagaactcattcctattgaccatggtctctgtcttccagaatgcctagaagacccatacttcgagtggatccactggccgcaggcatctgttcctttctccgaggaggaggaggaagtgggttgaggaaagagagtcctttcttcccaacgaagccggagttgaagatgacgatgatgacttcacccagttccttatcgacggcgaggatgattatccggatgccttggaaccatcagctttctgcaagtttggtagcatgaaggcaagttctaggaatccactgtccaagctagatgagcgtgacgaggaagacggagacgggaccgaggaggacgacgacgacgacatcttgaccggtgcattgcctcagaggatctcgtctatctccaagctgtcgtcatccatgaaggggcttggcttcattgggaaacccaagccctaccgcacgtgccttcggaagggtaaagcgacaggcagaactaagtacaccggcaaagccagcgagcatcagtccggcagcaggagcgccaacgagctgctcccgcccagcgccagtttcgtgaagctgtcggacatgagccctaaacagtggagcgcattcctcgacaagttccaggagctgctcccaggtgccctgagcgcccggaagcacgctgccggtgtcgtcggccagcgctcgatgccgaggctgggcacgtcttgccagttttgagagtagcagaagagaagccaccgaacccaaggtatgacgaacgcgcttctgttcgagctctggtgtgcagcagccaagcaggtacggagtattatatatgcttgtagtaggtgtctggagccggtggtggtagagagggtccgagaataagatcatccatggcatgtgagatgaggttgcgggagaaggaagggggttgtgtgtgtttgtgcatagtgtttcgcataagaggtccgttgttcttttttcttcttctctgtatatagttaagtactcctactgctactgcatcgcagcaccgggcacgggctgggatctcggccgttgttatctgaacgatggtggtgagtgtgctggcgtcgcctgctctctgctctgtctttgccgctgtaccattttggaggcgcttaccatattatgaactttgaactatgatatgatgttcgct

SEQ ID NO: 33107 - DNA, 1201 bp, Zea mays
  Clone ID: UC-ZMFLMO17063F05_FLI
tggttttaaaagattcaattcgatcatctgaagaggctctaaagacttcaagaagtgaggtttccaaactttccaaggagcttgaggaggcaaatgaattgaatgaggacctggtatcacaaatttctaaactccgagaggaatccaatgaaatgcaagtagatctcactaataaactaggagaggcagaatcactatctaaagctctgtcagaagatttggcttcagtaaatgaaatggttcagaagggacaagaagaactcgaagccacctctattgagctggcatctattgctgaagctcgtgacaacttgaagaaagaattgctggatgcgtacaagaatttggagtcaaccacacatgagcttgtcgaggaaagaaaaattgtgacagccttaaacaaggaacttgaagcgttagcgaaacagttgcaggttgattctgaagcaagaaaaagtctcgaatcagacctggaggaggcaacaaagtcactagatgaaatgaacaatagcgcgctgttactgtctaaagaacttgagagcactcattctaggagtgccactcttgaatctgagaaggaaatgctacgcaaggctctagctgaacaaacgaaaatcacaaccgaagctaaggaaaacacagaggatgctcagaaccttatcacaaggcttgagacagagaaggagagctttgaattgaggtgtagacatcttgaagaggaattggcgttagcaaaaggtgagatactgcgcctaaggaggcagattagcacaaacagttctcagaaaccaagagcaagaggaccaccagaggccagtgaaactctgaaggagcaacctgtgaatgattataatcagaagaccagtggagttgttgctggaactccacagcctgtgaaaaggactgtaaggagaagaaaaggtggcgcataaacatgtgtgtgactgtgtgtattggaagccctagccagagccatcgttttcccataccttcctatttagtaatttcattgttactcatttttttcaaaaaaatggcatcctttgcaaaatagcatcaatagctattcaagtgttatttacaccccccccccccccctagtatttcagttagtcgatgtattttgtttacgttttttgaaaattgaggtctgtatgtgtataaatgagttattgaatggccaacacgatgaaattaaggt

SEQ ID NO: 33108 - DNA, 1723 bp, Zea mays
  Clone ID: UC-ZMFLMO17063F09_FLI
gacgcttccggctttccgtgcgaccgtgcccttttcctcctctcgcagctcgcaggcgcaacagattccacccgttccttcgggtggccggacggaacgaggaaggaggcaggatggcctccgatggccacccgccggagccggggaagaaggaggatgtcgccaccacggccgccgggcctggagcaaacgatctggacgacccgcaattcatgtgctgcggatcttctgtacaaaccagttgttatatcatgtggtcatatgtcatgtttctggtgtgtccacaaagctatgcatattttccgggaatcgcattgtgctgtgtgtaggcagccctatatacacttcccgagtatttgtcagctcttgcatcatttgcttctaaagcttgaaactaatgattacaaaagaagggaaaaagaagtactagaggaagagaagcgcatgcaaacatactctccccaaatcattgagttcttaaactacaagactaacgttggaagctataaggagaacagaaatgaagacagtaaagctagacctccacaagaagttccattgaatgacagcgttccagatgagcatttgaagaaaattaaattggaggatgtttcatgccctctctgtatggagatgctgtatcaacctgctgttcttaattgtggtcatgtgtattgtgtatcctgtttgtcatccttgaatgaggaaacgctgaagtgccatgtttgtggaagtcttcaccctggagatttccctaatgtttgcctggaccttgatcatttccttgaagaatattttccagcagaatatgaattgagagggcagaaagttcaatttaagaaggatcagtgcaatcgtgaaacatcatcttcaggtacttcaggcagaaaaggaagcactagggcactgcatgctgaagacccgtcaaatattcacattggagtaggatgcgactcatgtggggtatatccgatacgtggtaagagatacaaatgccaggactgcactgagttaataggctttgacctttgcgaagcctgctacaactccagttcaaagctcccaggacgctttaaccagcggcacacccctaatcacagaatggaagttgacaattcagcactcgtgcataggatactgagacaccatggcatacccgaggaaggccctgagggactgatgatggaagtggttggtcctgatgcaatggtgcagatactcattgataatcaaggaatggaggagggcaatgacgagggcccaggagaggcggccattgaagaaccagttggttctcttggctcaatgtcgcgtctgtcgcatctattcatgtataatccagaaatggaggatggcaatgacgaggactcaggagaggaggcggccattgaagaaccagttggttctcttggcgcaatggcgcctctattcatgtatgatcaagaaatggaggacaacgaggaggatcaggcacactagatgcagattgcaccagctgcagcgaagcctttgttttgtgttgctggggcggctctacttatgtaatgtggaatggagggattgcgcaagcttaaaagtatggctggatcggccttgttttttaactggttctctagttactgccatctaatagccaacatttttcccgcttttgtaaatccgtgcagttgtttgtttcaaaggaaaatgcaataaggatatgcagaactatattccttatttt

SEQ ID NO: 33109 - DNA, 1797 bp, Zea mays
  Clone ID: UC-ZMFLMO17063G08_FLI
gcgcacgatcgtcgcccttcagcgggagttcgcgatgaaggacctagggctccttcaccacttcctcggcatcaccgctgagcgccgccctcagggtctcttcctccaccagcgccagtacgccatcgacatcctggagcgggctgacatgtctgactgcaagccctgctccacgcctgtcgacactcaggctaagctctctgaggacgacgggcctccggtcgccgacgcgacatcctaccgcagcctgaccggcgccctccagtacctcaccttcttcaggccagacatcgcctacgtcgtccagcaggtgtgcctgcatatgcacactctgcgggagccccactttaccgctctcaagcggatactgcgctacctccgcggctccctcgaccacggtctcctactccgaccatccccgatgttggagctcgtggtatacaccgacgctgactgggctggctgtcccgatacgcgccgatccacctccggctacgccgtgttcctgggcgccaaccttgtttcttgggctgccaagcgacagcccgtcgtctcctgctccagcgctgaggccgagtaccgtgccgtggccaacggcgtggcagaggcctcctggctacgccagctcctccatgagctcaacagtccccttcagcgcgccaccctcgtttactacgacaacgtcagcgcggtctatctctccaccaatcccgtgcagcatcagcgcacgaagcacgtggagaacgacctgcacttcgtccgcgagcgtgtcgctgccggtgacgttcgggttctcagcgtccccaccatgctccagttcgccgacatcttcacaaaggggctaccgacgagtgtatttttagaatttcgattcagtctcaacatctgtacaggacagagttgtgactgcgggggtgttagactatccctttgtaatgggccaggcccaagtactctaatctatcaatacaactccaaccctggttagggttaggttttgtcacaatccaacattttgttgttatatttgcttttttggctaattctaatgattttcttgatgatttcagccaaaagggattccatccgggccatcctctaatacaagaaactttcaactagatgatatggatgatttgggctacagagatgaggaagctaggttctttgacaacgatataacagaggagcatgtacaaaatgcaacaaaattgaactaccattcctacatggctacatgaacaaaccagcccgaggaaaatggtcaaaatcagataccgacttgttttatgagggtcttcgacaatttggtagcgattttgcaatgatacaacaattattccctgataagactcgccatcaggtgcggcagaaatttaaatctgaggagagaaaaaatccattgctagtccatgatgctatagttcatcgctcaggaggtaattaagcagctcaacattgaagatgttgtgctgccagatattaaaagtacacaaaaacaagatggtgcatcaagtgaaagaggccctggaaatgagaatgtactggatgatttaaacgaggaggaaaatagttcaaattggttgaacgaagagcatgacgtacagatgggcggctgatgtggaagaagagcatggcgaacagatggataatgtggaagaagagcgtgatcttggaaatgatggtggtgatgatgatcttggggatgtttttgattggtactagtttatgttaaacacggatgcgagcgtgaatatgagttggtctagctctgcataacagggggtagtttttagg

SEQ ID NO: 33110 - DNA, 1161 bp, Zea mays
  Clone ID: UC-ZMFLMO17064B06_FLI
tctccatccgtcctcgtcggcatcccagccacacacacacacacacacaccgcacctagccacctaccctgctgtcccccgtgccgtcgccgatggagtccctgggcgtgctgctgctccaccccttcaacgcgtacctggagcaggagctggaccgccgcttccgcctgtaccgcttctgggagacgccccgcgaggagttcctccgcgcgcacgcgggcgccgtgcgcgccgtcgtcggcaacgccagctacggcgccgacgccgcgctcatcgacgcgctcccggcgctcgagatcgtcgcctccttctccgtcggcatcgaccgcgtcgacctcgccaagtgccgcgaccgcgggatccgggtcaccaacacccccgacgtcctcaccgacgacgtcgccgacctcgccgtcgggctcgccatcgccgtgctccgcaggatcccgcaggccgaccgatacgtccgcgcggggctctggaagtccaggggagactacaccctaaccacgcggttcagcggcaagcgggtgggcatcatcgggctgggcaggatagggcaggcggtggcgaagcgagtggaggcgttcgactgcccggtgagctaccaccagcggacggagcagcgggcgacgtacccgagctacacctactacccgtcggtggtggagctggcggcgaacagcgacgtgctggtggtggcgtgcccgctgaacgcgcagacgcgccacatcgtgagccgcgaggtgatggaagcgctgggccccagcggcgtgctgatcaacgtcggccgtgggccacacgtggacgagcgcgagatggtggcggcgctggcggacgggcggctcggcggcgccgggctcgacgtgttcgaggacgagcctaacgtgcccgaggcgcttctggggatggacaacgtcgtgctgctgccccacgtcggcagcggcaccaacgagacgcgcaaggccatggccgacctcgtgctcgggaacctggaggcgcacgtgctcagcaagccgctgctgactccggttgtctgacgtttccttgtttctattacgaaataacaagcgcctgcgcctgacagcgagtggggattaaattcaaaatgttttgttttgatttgatcgccgctggtgaatggaactgaaatgtgctgtc

SEQ ID NO: 33111 - DNA, 1680 bp, Zea mays
  Clone ID: UC-ZMFLMO17064B11_FLI
tccggttccagaaaaaaactcggaaccagatctcaaaccacacaatccacggctgctccttcgctggacaccgagaaaccgtcaaggcgcaacgaacgaacttgcagcaaaatttcccggagaccctcgagcaaaaatctggtctggttcaaactcgccttttgcctgcgggcggcgggcgttcttacgggccatgtcgcagcgcgacggcgacctcaccggagctcatccggaagaaggagaccgccacgccgttcgaatggatggctccgacgacgatgagctggaccaacctcgactgagcacatcacggctatggacgtgaggaaggggaaggatatgcaagggatcccctggaacgtgatgccgactacaagggacaagtacaggcagtcacggctgcaggggtacgccaactttgagaacgtgcctaattccggaaggctttctgagaaggaatgcatgcctgcagagaaaggccaactctactacgagtttcagcacagcacgaggtcggtgaaaccgaccatccgtcatttccagttgaggaatttagtgtgggcaacaacaaggcacgatgtgtatcttatgtcaaacttttctgtgcttcattggtcggcaatgacttgtaagaagcaagaagtcattaatcttctaggacatgtgacaccgtgcgagaagcaccatcggaattactacgaggggttttatcggactccagtcagtactttggcggtgaagcataacttgcttgttactggtggatttcatggggagataatatgcaagtttctggatcgtcaaggagtaagctactgttgcaagacaacaaatgatgacgacggtattactaattctctggagatatttgagaagcctagtggttctctgcacttccttgcgtcaaacaatgattgtggacttagagactttgacatggaaaaatttcgaatatgcaaccacttccattttgcttggcctgtgaatcatacatcgttgagcccagatggtaaacttgctgctattgtgggggacagtcctgatggacttctgattgacgctaattcaggaaagacggttcacaaactccatggccatttggattactcctttgcgtcggcatggaatccagacggccgaacattcgccacggggaaccaagacaagacgtgcagggtctgggacgtccgcaatctctccagatcagttgttgtattgggtggcaacatcggagccgtcaggtcgattcgctacacgccagacgggaagttcatggcgatgactgaacccgcggacttcatccacatcttcgatgttgagagtgggtacagcaggaagcaggagctggacttctttggtgagatcgcaggcatatcgttcagtcctgacactgaagctctctttgtcggtgtgcatgatcgcttcttcagctgctgcctcctccagttcaatcggcgacggttctactcgtaccttgattcaacactgtgagcttgtgctggtgtagacctgtgaggtcgacatcacaggctgtagaagcaagaaagttgtggctaatgttcataggtgttgctgtgaagaaactggagaacggtgcgtttacttttgctgaacaagctgtagatattcagcgacccatcttttctgggtgatcagagtttaagattcccgctttctgtt

SEQ ID NO: 33112 - DNA, 895 bp, Zea mays
  Clone ID: UC-ZMFLMO17064D06_FLI
tgcttcagtggccaacaaggttcaagataatccagggggttgctagaggaattatgtatctccatcatgactcaagattaactgtaattcatcgagatctaaaagcaagcaacatcttgctagataaggagatgaacccaaagatatcagatttcggcatggctaggatattctctggtgatcagctccaagcaaatactaaccgagttgtagggacatatggctacatgtctcctgaatatgcaatgaaaggtgcattttcagttaagtctgacacctacagctttggtgttcttatattggagattgtaagtggattaaagataagctcaccatatcttatcatggatttttctaaccttataacatttgcatggaacatgtggaaagatgggaaaccagaagattttcttgactcatctgtaacggagagttgctccctcgatgaagtttcaggatgcatccatataggactcctgtgcactcaagacgatccgagttgcaggccactcatgtcaacaattgtgtccatgctggagaacaaagcaacaccacttccaacaccgaagcaacctaaagattttgcacttcgggactacaatcctggaaacgaaggtgtccacagggaattgtccgtaaatgatacaagtctcactatggtgcagggccgttagattattgtttttgatactacgatgggggagcacatagcccaccagaaatattcattgaagacttatacgtttagtccctattttgtttatgggtatttctgtttagaaaaatttagtatcaattttgttggaacttgctctccggtgcaagttgatccaacgggggagtgtagcaacgtaaacagggtttttgcacgagatgacaatagctctgttaatct

SEQ ID NO: 33113 - DNA, 2508 bp, Zea mays
  Clone ID: UC-ZMFLMO17064D10_FLI
gctgctgcctcctcggtgccatcttcccggtctcagcgccagattcagacctcacagccatcctcacccaaccgcaaatcagcaaacagatgtcgtcaaccagcgggtgaggagtgtgaggacgaaggggattcggagctatatgagcagctgcgtgctgaggccttccaccgaacttggtccaagatccagtccaccatcgacgaggtcctcagggccatcaacctcaagctgttcgaccaggtgctgcagtgggcgaaggagtccttcgcttcggcccatgccatcacgaaaaagcaccacactgaagtccagcagccataccctctcctgactgatgtgatctgcagaaggatcccgacggtattcgtcctcaccaagaatgcagagtttgttgatgatatcacaacgtttcatgaccttgcagggcatatgaagtccaatggatgtcacatagtcaagctgtcagcggctgagttatcagcaaaacatggagttggtggttgcttcaggagcctgttgggacagctattatccgatgttccagatgttgctgatgtatctgcgctagcatcatggtattgtgaagctgagaactttgatcagcctatcattgtcataattgatgatttggagcaatgttctggcgatgtgcttggagagtttgtgatgatgctgagtgagtgggtgtttaaaattccagtcttctttgtaatggggatagcaactacccttgatgctccaaagaagcttctctcgtcagaggctcttcaacgattagagccctgcaaacttaccttggggtctccctcagatagattgaatgcacttgttgaggctgtccttgttaaaccatgcgctggattttgcatcagtcatgaagtcgcactgttcgtcagaaattacttttttaggcatgatgggacaataacttcttttattactgctctcaagcttgcatgcagtaagcacttctccatggaacctctaagctttttgtgcttaggaatggtggaggaagattctgaggaattttggcatgataagcttgaatcgctccctcaaacaatatggaaacatgctttcgatctaccctcaaacaaaaatgcaaggaattcttgcaacatggtagaaggattgtctaggctgctgaaatcgcaaaaggattggagttctgttctcttgtgcctgtatgaagctggaaggcatgacaaagtgcagcttttggatatcttctgtgaggcagccagcccagattggcaaactgaaaatgcaccagatagttacctatttgcttctaaagtggctttattaggagtaaagtcagggtctgctagaagatttatagcccaagtaatgaatacaataaggtacttgcctacggaaattttgttacacgtccttgaggtttggagcatccatttaaaaggaatgagtgagatcaacgacagagtgaaggagcttcggtcaaaaggttgtggtgcagatagtgttagggccaaaaggaaatcaaccgccaatactggaaatggagtggttctaataaacgaggaagcggctgcgctgttacaggatgttatcaggaaatatttggtacctgctgaatgcttacctttccatgaaatagtctgcttcaagaatgttgacatcctccgatctgcgctgattggaaacccaagaagaatgattcaactcgatcttctgaggtcacagagccatctgaaatgctcttgttgcagtaggagtggtgctgccgtgtcaggatcgttgcacgacacatcaatcctgtgcagtctagcccaagagtatggtgacatgattaacctccatgactggtacacggcctttgaagggattataaagagcacaaactcaaaagccaaagggaaatcttgcagctctccctcgaagaagaagaagaaatcaaaccccacgcctctggagggtgatggcatgatccaagcaaggttctgcagcgccgttactgagatgcaggtcactggccttgttcggatgccgagcaagagaaggcccgatcttgtgcagagaatcgcgttcggtccttaacagctcggtgattacatgcatgctatacagacgaaacgttttgtgcacgtaagggtttccagttgttgaatcggagcaaggtagattagctgcaagctttgtgctctttgtctcctaacttagatggctttgttcttgcgtctgcaggctgacgataatcccaccatgtggtaaattgggcagccgtggaaggaaggtttggttacttgtatcggtgcttcgaagagagctgtgagatggagcagcagccgccgcttcagatatgcagtgctgatgttgcgtctgatggctaagctatgtcgttatttttttcctcttaagagcagtattaaacatgttttagctattgattcggctctctgtagagctgacatgggctcatgtagcccaaggggtacatttgagaaatttttatccttgaaacaaagggcatttcgaatt

SEQ ID NO: 33114 - DNA, 1382 bp, Zea mays
  Clone ID: UC-ZMFLMO17065A11_FLI
ggcacgtcaagcttccctgtcgctgctgttcataggatcggcatactagatatccggattttcaacactgacaggcacgccggcaatgtgctggtgaggaagcttaacggtggcacaggccgctttggttgccagacagagctgttcccaattgatcatggcatgtgcttgccggagaacttggaggacccttacttcgagtggatccattgggctcaggcttctatcccgttctctgaggaagagctcgagtacatcagaaatcttgatccaaggaaagatgtgcagatgctgcgccgggaacttccgatgatacgtgaggcctgcctacatgtactggccctgtgcacaatcttccttaaggaggctgcagctttcggactctgcttggccgagataggcgagatgatgaccagggagttcagagggatggaggaggaaccaagccagctggaggttatgtgtatggaggccaggaagagagtagcagagtgggagcccttctctgccacagctgaacatggagaagatacagatttccagttctcggtggatatgctaggagaatacagtgatgtagtgcgatcaccaaggttcaatggctcaggttccaaggtgtccagtttcagaagccctttgtctaagctcgtcgagagcgtcgacgagggcagtgacggccatgaagatcaaaacgagtctgatcgagtcttgtatgctggatggaatacatccagcgttcctagcaaagctatgggccatagtggcaatgcctcaaaaagtgcaatgaacaggagtgccgatgaacaacttccatcaagtatgtgttttgtcaggctgtcggatatgagtgcagatgagtgggatgtattcctcgaaaaattccaggagctgctgaaagaggcactgcacgagagcgcaagggcagcagcaggtcaaaggatgaagcagcggctgggcacttcatgcaagttttgagcagggcaatagcgcatcagagaagaaaaaaatatgcagtgctacttgtactgcttgcttatggagtgagtacatgatgaagatatcatcgtatgcggcaccttcaaccttaccttgtgcaacgatctaggttgcagcagccatgtccagcaggtagataggaccacaagcatatgtagtgacggtgtggagaactgcgacgcgtgtttattagctatatgtttacgaaggggaatgcttaataataaatgtttgtgagcctgtgtatattggcttgatgttagatactccagctttagcatgcaatttcttagtcgctgaaaattctttgtagcttgtgatgtgacctgtgagcagtgtaaacattgcacctttggtggaaaaataatgcttacctgttgttgaat

SEQ ID NO: 33115 - DNA, 927 bp, Zea mays
  Clone ID: UC-ZMFLMO17065B01_FLI
caggcttctagcctctgtccaagccggcagcccgccacccgcgaggccgcgaccggcgaccgcccgcccctgacgtggtgactgcgtcctcctccgctctccgtgcgccaccctgaagcggtgaggcgaggacctccaggcaccgccctccctggttcggcggctccctcgaggccttcctccccaccggttcagcagctcccgatccgcacggccaaaggccgattcgcgctcctccagccttcctccgcgtccaacagcaagtgaaaaacttcaacccaagaatggcgatgtcttggacaagagggttaaagcatggtgttgttccgaggcatgccgctcaattggtagagagcagaagccttgcaattgcaagcaaggcgaagaagggtggaaaggctgatgctggcaaaactcctgctctcagccaagagctcaagagtacaacagtgttcggggcaaacatcttcaaggagggttctgatccgaaaatccaaccagactctgagtatcctgactggctgtggcacttgctcgacaagcgtcctgtactaagtgagctgcggaggaaagatcccaagacactctcttatgaagacctgaagcgttttgtcaagttggacaaccgatccaggatcaagataaggaatgacctcaatgctaagaactgacctggagtcttggacgaaacaggacctgctctactgttctttttattattaatataatactagacgacatgaataatttttctggagtttttggcaaaacatagcgacttgggatgttaaaatgttaagatgtgcttggtttgttactcttttaggcagcttacgacactggcatgctttttgttcttccatcttgggaaagatgcagctttgtgcccagtacttagcaaattatcaagttccatggttctgcagc

SEQ ID NO: 33116 - DNA, 2503 bp, Zea mays
  Clone ID: UC-ZMFLMO17065C09_FLI
ggatcctaaggcgaagtctgaggtccaggacaaggaatcctccatgatcagctatacgaaggctgaattgggttgtaattttggtgtgatcgcagacaggtggtcgcctgaatccgtggaatcaggagccttcacaggagatgcagtggcgagactgatgatgacggccccggcaggatttcataagaatgcacccgaaatgtatagtttgcttgattcaatggatgtggatgtcaagccgcctcctttggtcagctctgacagcaccggcgagatgccattgcatggcgataaaattcaccgctcaacctccttaccgaggggcccaaagggggtggggttttttgctgtagatagagatgatgacgacgacaagtcctcagggtgcactcatccgagcaccgccactaacaaggatttcacatccaattgtaaagctgagtataatagggtaaggaagctgctcactagtaagcacaggaaagttgctccagcgaggattcacaaatctgatctttcctatagtgatgtcgagcggaagccttctttccggtacaaaaaaatgcatacacgacagaggacacaaaggagtacattcaagcggaggaagctctttgatcgccatttagctctagcatctgaatttggtacagcaaatggaaagggaaacacaaaggttgccggaagaaactccaatgctgtgtctttggaagcaaacaaggggactaattcaatgccattccagaaatcttgtgggtcaaatgattgctatgtgaaacttagaattaagtcttttaacgtgcctgaacttcttgttgaaatcccagacagtgcaactgttggctcactaaagaaaactgttctcgaggcagtgactgcgattcttggaggtggcctacgtgttggtgttcttcaccatggaaagaaagtcagagatgatagtaaaacgttaattcaggctgggattggtcaggatgatatgctggacaaccttggcttttcacttgaacccaactgtactcaaaacccacaagtccaagctcctgaagatgtcaatttcctcgaaaacattgatactaccgaacccctcgcaaggatcacacctgctgactcgtcttctaagcttggtgaagttgacgtatcacaggagcttgcattaaccccattagcaatgaactaccagggcagtgatcatgattccgtgcactcccctggggctgtctcgtcgcgcgataaagactcgcgagccttatttctggttccagctgcagatcccaatgcaggagctgtagttccagcaaataagactaagaggtcaccagagcagggacaccgcagaatcaggcggccgttctctgttgctgaagtagaagcacttgtgctcgcagtcgaaaagcttggaaccggaaggtggcgagatgttaaacttcgcgcttttgacaatgcaaagcaccgtacctacgttgaccttaaggacaaatggaagacgctggtacacacagcgagcatctcgccgcagcagcggcgtggcgagccggtgcctcaggagctgctcgaccgggtcctggcggcccaggcctactggtcccagcagcaagccaagctccagccgaagacgccctcgctggctgaggctcgcttgctcacccaataattcgatgatcccggctgatggcctcctctgaggccgttgcagcctttgtataaagtcagtaagtcagtcagtcccttcacaggaggtttaatgaaaatataatattaggggaaaaaataatgcatatataaggtacaagaagcattgaccgatttgttgtaacatctactcaccaccggttattctttaagccaggattctctctccttgtgaatttaaccaaaggaaagggcatttctttggcaattgtacattttgatgatgatggaagaagaagatgatccatgaactgagatctgcagtgtctacctactaatggctcacaatttttgcaattgtgattaagaaattcgaggtgctgcttgaccaagctcggctccggcttccagtttttggattctcttgtgaagaagttgctgcctccttcaatacagaagctgagagccgaacagtgtatttggcttgaattgcagcctatatagtttcatccactcatacagacggccacaaatgccgtaaaaggagggtgtagcttcttttgttgagtctagccttgggagcaaagctcaggaccgaagtctagacttgagacggagcggggccaaagcgggcacccgaatgaaagcttcagattcttttgttcagttaaattcattctttggtagtggagactgacggaaggataggaaattaggtggggtggatctttggttctctttttctttttttcttctattattattacattattagttgtattaatgtactatattattttaccaatcttgtagttaccctcaaatttgtaattggtgaaattaacaaaattgaaggaaatacattactacc

SEQ ID NO: 33117 - DNA, 1538 bp, Zea mays
  Clone ID: UC-ZMFLMO17065D07_FLI
agaagcacatgagcggcggcgccgccatgaccgtggagcaggcgctcgcggcgaagcgtctgttcatcctggactaccacgacgtgttcctgccctacgtgcacagggtgcgcgagctgccggacacgacgctctacggctcccgcaccgtcttcttcctcacggacctgggcacgctgatgccgctggccatcgagctggtgcggcccaaatcgccgacgcagccgcagtggaagcgggtgttcacgcacgggcccgacgccaccgacgcctggctgtggaagcttgccaaggcgcacgtggtgacccacgacacggggtaccaccagctggtgagccactggctgcgcacgcactgctgcgtggagccctacatcattgccgcgaaccggcagctcagccggctgcacccggtgtaccgcctcctgcacccgcacttccgctacaccatggagatcaacgcgctggccagggaggcgctcatcaacgccgacggcatcatcgaggagtccttctggccgggcaggtacgccgtcgagctcagctcagcggcgtacggcgccacgtggcagttcgacacggaggcgctgcccaacgacctcgtcaagcgtgggctcgccgtgcgccgggacgacggcgagctggagctcaccatcaaggactacccctacgcgcacgacgggctcatggtctggaacaccataaggcagtgggcggccgactacgtcaacgtctactacaagtccgacgaggccgtcgccgccgaccccgagctgaaggcgttctgggacgaggtgcgcaacgtgggccacggcgacaagaaggacgagccgtggtggcccgtgctcgacacccgcgacagcctcgcggagacgctcaccaccatcatgtgggtcacctccggccaccactcggcggtcaacttcgggcagtaccacttcggcggatacttcccgaaccgcccgaccaccatccggaagagcatgcccgtggaggaggaggcgggccgggacgaagagatgaagaagttcctgaagcagccggagacgaccctgctggacatgctgccgacgcagatgcaggccatcagggtgatgacgacgctggacatcctctcgtcgcactcgcccgacgaggagtacatgggagagttggcggagccgtcgtggctggaggagcccatggtgaaggcggcgttcgagaagttcggcggcaggatgaaggagatcgagggattcatcgacgagtgcaacaacaacccggagctcaggaaccggtgcggagcagggatcgtgccgtacgaactgctcaagcccttctccaagccgggagtcaccgggaggggcatccccaacagcatctccatttgacccgtccgtcctctccatccaatgggggtttgccttattgcgtgcacgctagctagctgcttggaaataaaaataattaaaataaaaggtctcgtctgtactattgtattgtaccatggatcatatcgtacatgttgtgtcaatgcaaagaggcacgtttgagttacc

SEQ ID NO: 33118 - DNA, 1524 bp, Zea mays
  Clone ID: UC-ZMFLMO17065D11_FLI
ccgaatcgcgcccaggtccctcgctgggagtttcgccgagggccctcccgcctcccctagattcacgacggagatggcgtccgagctcacctaccgcggcggcgggacgtccacggccgccggcgccggcgccgggggatactcaccgaagccgtccaagccgctcgcgtggctgccccgcgcggcccgctacgccgtcgccgagcatcgcccgctcttcgcgctcgccgggatgctgatcgccgccgccgtcatctccatcgcctccccgtccgcctcctcctcctcctccacctccacctccaccggcggcgccgcctcgtcctactccaacaacaacaatccgctcgcccgcttccccgtcgagcccgcccaccaccgcgacgtggccacgcggcacttcgtcggcggcaaggtgccgctgggcctcaagcggaaggcgctccgcgtcctcgtcaccggcggcgccggcttcgtcggcagccacctggtggaccgcctcctcgagcgcggcgacagcgttatcgtcgtcgataacttcttcaccggccgcaaggacaacgttcttcaccacctcaacgacccaaacttcgagatgatccgccacgatgtcgtcgagcccatcctgctcgaggtcgaccagatctaccacctcgcctgcccggcgtcccccgtccactacaaatacaaccccatcaagacaatcaagaccaatgtggttgggactctgaacatgctcggattagcaaagaggatcaacgccaggttcctcctcaccagtaccagtgaggtctatggtgatcctctccagcacccgcaggtggagacttactggggcaatgtcaatcccatcggtgtcaggagctgttacgatgagggcaagcgtacagctgaaacgttgaccatggattaccaccgtggtgccaaccttgaggttaggatcgcacgtatcttcaacacatatggccctcgcatgtgcattgacgatggccgtgttgtcagtaactttgttgctcaggcactgaggaaggagcccttgacggtttatggtgatggaaagcaaaccaggagtttccaatatgtttctgatctggttgagccgcgccaaggagttcctcgggtgggagccgaagatccccctgcgtgagggccttcccctcatggtctccgacttccgcaagcgcatcttcggcgaccaagacgctactgccaccaccggaaaccagcaaggttaggatgaaggagcgcacatgacatggaaatttttggtggccctgcttctagctgcttggttgctctctccttactgacaaaagctatgggccacgtagttcgttgggaatgtgttactggaatacctcggctgatgctgtaatgccattctttttttcccctgtattttttctttctcagttctctcagtccttagctatacaaaaaaaaagttcagttgaacagttggagataaaccaggatgatctaattctttgttgagagcatagcatcatatatatggtataaatc

SEQ ID NO: 33119 - DNA, 721 bp, Zea mays
  Clone ID: UC-ZMFLMO17065F02_FLI
gggatgccagatgcccagattacaccagacaaatcttgaaggcttcttgttggctctgtcgatacatattttatggtgattttgcttacattctttctggggcatgcctcccaccgatgaaaatttagtatgtgttttctcgtgctctatgcagatcgactgagtcagcatggagaagatagcagacgtatacgccccaaacttgacatgagcaggaaccagctcatcggagagataccagcagagctgggcgccatgccggtgctcagcgtccttgacctgtcgtcgaacgagctttccggtgccataccgccggcgcttgcgaacctgcgactcacctccctcaacctgtcctccaaccagcttagcggccaggttccggccggcctagccaccggggcctacgacaagagcttcctggacaaccccggcgtctgcaccgccgctgcgggagccgggtatctcgccggcgtgcgctcctgcgccgcggggtcgcaagacggaggctattccggaggcgtctttcatgcgctccgcacgggcctcctcgtcgccggcgaaggagaagcgacggagacgagaagagtacgccagacggcgtctgcgcacggatacttatacctgtttacgtagcccaaagtgttgtctcgtatctattttagagtttgtctgtcggctgcgtctccaaaatagagaaggcaacaccaacgtctctatttcg

SEQ ID NO: 33120 - DNA, 1936 bp, Zea mays
  Clone ID: UC-ZMFLMO17065F05_FLI
ctcgcggcaaagctgcagcgtgtctcggctccggcgcgccaccgctcgggacgcccgacggatccgctcccgcgtgcgctcgatatcccttgcttcaacggtccaagtcaacccccccaccaaatcgccgtccgtccggccgctgccgcaccctagcaggatcgcagcgtgcacagctcttcttcaatctgcaggattgcagccacgcacaagtcgtagctgtttccttggaactttgagctttggaagatgccaaggagaacaggaaatgctgcttcgaccaaatcagttgaattggtcaaacaagaccaaatggagtttgatcatcctgatgaggtagatgaagaggaagaagttgagtatgaagaaattgaggaggaggttgagtatgaagaggtagaggtagaggaggaggaggaggaggaggaggaggaggatgatgaaattgaaggtgtgcgtgaagttgatgctaatcatgacagtaaaatagtggatgatgatcccaaggatgggaatgaaaaagaaaagcatgctgagcttcttgctcttcctcctcatggagctgaagtttatgttggggggctttcctctgatgtatcttctgaagatctcaaacaactatttgaatctgttggagaagttgcagaagtgcgaatgcgaggaaagggggataacaagacatatgcttttattaatttcagaactaaagagatggctttaaaggccatccaaaagttgagcaataaagacctaaagggaaaaaagataaaagtttcatcctctcaggctaagaataggctttttattgggaatgtaccccatgattggacacctgatgatttcaaaaccgcagtggaagaagttggtcctggagttttaaaagttgatctcatgaaggcaccaggctcaggtcgcaataagggttatggctttattgaatactacaaccaggcatgtgcagagtatgctaagcagaagatgtctactccagaattcaaactagatacaaatgctcctactgtcagctgggcagatcataagaatgctagtgaagctacatctacttcacaggttaaatctctatatgtcaaaaacctccccaagactgttactcaagagcagctgaaaaagctgtttgagcatgttggagaaatcacaaaagttgttattccacctgcaaaatctgggcatgaaaatcggtacggttttgttcattttaaggaacggtccatggttatgaaggctctgaagaacactgagagatatgaacttgatggtcagctgctggattgttcacctgcgaaacctcctgctgataagaaggatgatactggatcatctcctactgcaaaaggacgtccattacccccaagttatgccccacttggatatggactagcgggagcttataatccacttggaaaaggactggcaggtgcttacaattcccctggaaacggactggcaggtgcttatggcgtgctttctgctcatgccgcacagccaatgttgtatgctccaggtgcttctccaggttcaacaatgatcccaatggtcctaccagacggccgtcttgtatacgtaccacagactgcagggcagcagcctgtgcatgtgacttcgcctctgccacagcaaggcggtcgtcgattcggcggcggtggcggatccagctccggcggaaagcgacagaggggagatgatcgtggcagtagccgcaggggctggcaccgtccgtattgatgtttgccatgccgctgatttgcaattagaagttagaacccagcaattagcatatttatcgcagtaccatgctggaaactgtactttgaattatttgtttttcctgtgtgcttcgtaacaggcctgccctaaaaagaatgatagtaccgcaaggggcaaatgtagtggtaatataatctatacatttgtaacc

SEQ ID NO: 33121 - DNA, 1058 bp, Zea mays
  Clone ID: UC-ZMFLMO17065F12_FLI
gggttccacccccgtctcctccgatcggacggaccaccgggccagcagcggggcggatcgcgtcagcagccatggtgaaggcctaccccacggtgaacgaggactacctcaaggcggtcgacaaggccaagcgtaagctccgcggcctcatcgccgagaagaattgcgccccgctcatgctccgcctcgcatggcactccgcgggcaccttcgatgtggccaccaaaaccgggggccccttcggcaccatgaagaaccccgccgagcaggcgcacggagccaacgccggactggaaattgccatcaggctgctagagcccatcaaggagcagttccccatcctatcctacgctgacttctaccagcttgctggagtcgtggcagtcgaggtaaccggcggacctgatgtccccttccaccctgggaggcaggacaagcctgagcctccaccggaaggccgccttcctgatgccacccaaggttctgatcacctcaggcaggttttctccacacagatgggtttgagcgaccaggacattgttgcgctttctggtggtcacaccctgggaagatgccacaaggacaggtctggatttgagggagcctggacgtccaaccctttgatctttgacaactcttacttcaaggagcttctgagcggagagaaggaaggccttctgcagctaccaagtgacaaagccctcctctctgatccatccttccgcccacttgttgacaaatacgcagcggacgaggatgctttctttgctgactacgccgaggcccacctgaagctttcagaattgggatttgctgaggcgtaaagtgagagagaacgaaccagaagagtgtggtggttgtcgtcggccggcaggccttgtgtttttgttgtctgcttttctcttgaatgaagatgtgatgaactctgctgaagatgtagtgtgtatgttgtcatggttcatttttctattttatttatctataatatctgtcggagaagctttgatatgaagcgggatctggttcggaacactgattaacgatgccaatgcctccac

SEQ ID NO: 33122 - DNA, 1578 bp, Zea mays
  Clone ID: UC-ZMFLMO17065G09_FLI
aaaacagaagagccaatgcatccttcaaatgtgaagatggctactactacaagacatactcctgggaatatgctgtgtgatagtttctcaggtgattatcagcttaggtcagggggggatgcatcgggatcagtccagcaagcacctaagtacagaagactatgcaaatatggtgacaagatcaaaagagtctcttccatatctttggatggctgtgatgataggtttgaagaatgcaatattgctaataaagataggccaaaccaaataaaacatgctatggggacaaaaaggaagaccaagaggcgtctagatgcctatattgacgaggaagtcggggtgtctgaagatgcatatgtttcagaggatgaggatgataatcagagtgaagataaatacgaagatagcttcattgatgatcaggcaactccaactgaatttacacaaactgaacaaggtgatcgacacaatggtgacatgatgggtttctacaggcaatcgttgtttactcagtccccagtagttctaccctcaaggtaccttgatgtttcttacaattctgcttctcggaccggaaattcaagctattcttcagaggctaggcacaattacactgagactcccaaagagattcaaacacaacatcataccataaacccaagcccatcgtacagttttgtacaggatcgatgtgaaagagggatcgccaattgtgaatcatcgactaagctggattgcagaaagagaaggctaagcttccagcaacctctggcgatccctgttataaaccttgaaccagaaccagcaccagaaccatctccacacgtcgccagcagagtcgctgatcacctatattttgatgatggtttctttgagaaccttgatcttgatgcaattgaagctcaagcaaccgaacagtggagacagaagaccacacaatcgacgcagaaaccagtggaaattaagaatgcatcagacatgagttttgcacctccgtcattcgatttaggtctctgatagtggtggtaaagttagcatccattcatgatgtcatctagctgcagtacctagccatctcagagcatgctgagaactgcacaagcaatgaggttttctgcagaaggcccgaacctgcatcacatgacaatgccgcaggatctggcatgtctgccgctgtgatatttatcggcgccctggagctggaagatgcgctggcggcagattttgtagagtatttatctcagtacaggctcaatacaccatgtatattctcctgtaaatactgttcgatgtataagggtcttattgtatgcagacatttcagagacttgatgtgttaaacccagtggcaaaggtgacgtcagtgtcggtttttgttgcgcaggattatcctcgctctcgatgctgaaccgactggttttgcatagacgaggcatccgtgcagcatgatggcaacgtggagtttggtcaataggacgagtggttggtacatgatgcctggttgctttccgaaaacaggcaatgttttgtgcagtcttgtcgatttctgtacatctcaattaacgtacgcgttttcgt

SEQ ID NO: 33123 - DNA, 635 bp, Zea mays
  Clone ID: UC-ZMFLMO17065H09_FLI
tccacttccaccaatctgtctcccaatctttcttgctgctccaatccgctctctttactcggccagcggaaggggagaggagggcgagatgacggtggagaaggtggacgcggggctttccgacttcgaagcccacttcgatcgcctcttcgcttccccggacgccgcctccgacggcaaggtgaagctgctgctcttcctggccgaccgcaagcctgactcctccctctcctggtgccccgactgcaacgtggcggagccggtgatctacgagcggctggaggcactggagggcaaggacgcggtgctcctgcgcgcctacgtcggggacaagcccacttggcgcgacccggcgcacccgtggagggtggaccccaggttcgggctcaagggcgtgccaacgctgatccgctgggaggatggcgccgccgccgcccgcctcggggacgacgaggcgcacctcaaggacaaggttgacgccctcctctgcgctggcggcaactgagtactgactactgacagatccggtttcccgttcgggttccatctgcgtagagtggccataataaataacatgtactgtaattcagttcatctacatgccggaccagaagctggggaatcgtgtgaagctt

SEQ ID NO: 33124 - DNA, 957 bp, Zea mays
  Clone ID: UC-ZMFLMO17065H10_FLI
ggcagcgacgatgagccggcggtgcgcaaggggccgtggacgctggaggaggacctcatcctcgtcagctacatctcccagcacggggagggctcctgggacaacctcgcgcgcgcagctggactgaaccgcaacggcaagagctgcaggctgcggtggctcaactacctgaggccgggggtgcggcgcggcagcatcacggcgggggaggacacggtcatccgggagctccacgcgaggtgggggaacaagtggtccaagatctccaagcacctccccggccgaaccgacaacgagatcaagaactactggaggaccaggatccagcagaagaagcagcagggagccaagacgacgcagcagcgggaaccgtcgacgaccgccagctccggcgccggggacgactactggtgcaccaagcccgaccccaaccagcaagcgcactactgcctgcagaaagccgccatggcagctgcgactgcgacgacgagcgcggtcgtcgtcagcagcgaggacgacgcgccgtcggcggcgctgacgagccaggacagctccgcggcggccggcggagactggtacatgcaccagcagcagcagatgtgctacccgtactgctccgagctgagctttgtcgccgccggccacgatgaaacggtcggcctggacgctgtgacgatgcagttcttgtcgtcgcacttcactgccagcttttggacgaacggcgtggatgatttctgggagtcaaaaccgatcgattactgatgcgttctgaacactcatacaaacgtacttacttctgatactagctacaacttaacgggcaacaaaagggaagagtatatatatttgtcgatatagaactgtagaagcgttatatatatataccttgtactagagcactttattactctttttgtgatgcgtggtatgatgatctcacttaatttttcattattg

SEQ ID NO: 33125 - DNA, 1632 bp, Zea mays
  Clone ID: UC-ZMFLMO17066A04_FLI
atgtggtgcgcatcgtgcttggcgtccgcctgcgcgggctgcacctgcaacctctgcacgtcggcggcatcggccgtgtcccgccgctccgcgcgcctcgcttactgcggcctcttcgccgcctcccttatcctctccttcttgctccgccagttcgccgcgccgctcctcaagcatatcccatggataaatgcgtttgatcaaacaccaccagaagaatggtttcaaatgaatgctgttcttcgtgtaagcctggggaacttcttgttctttgcaatattttctctcgtgatgattggtgtgaaagaccagaatgaccggcgagatgcctggcaccatggtggctggattgcaaagattgctgtatgggctgttctcattgttcttatgttctgtgtgccgaacattgtcattactatttacgaggtactttcgaagtttggatctggcttctttcttctagtacaggttgtgatgcttttagacttcacaaataattggaatgactcatgggttgagaaagaagagcggaaatgggaaatagctttgctggtagtgactgtggtttgctatctttctacattggccttctctggtgtgctcttcatgtggtttaatccatccggtcatgactgtggtctcaatgtgttctttatcgtcatgacactcatccttgcttttgcgtttgcaatagttgctttacatcctcaggtccatggaagcgttatgcctgcttctgtcatttctgtttactgcgcatacctgtgctacacgagtctctcgagtgaaccggatgactatgagtgcaatgggcttcacaggcattctaagcaggtttcaatgagtgctcttatactcgggatgctcactacggtgctctctgttgtgtactcagcagtccgtgctggatcctcgactacattcctttcaccgccatcatctcctagatctggagccaaaaacccgctactcggtgacgaggaggacggcaaaggcgatggcaaagaaagcgaaccgcgacccgtgagctactcctacaccttcttccacctcatcttcgcccttgcaagcatgtattcagccatgctcctgaccggctggacgagcgctgcatcagagagctccgagctgatggatgttggatggacgaccgtctgggtgcgcatctgcacggaatgggtcaccgccgggttgtacatctggaccctcatcgccccactgctcttcccagaccgtgatttctcctaggcacccacgcacccatagcctatgagttgtttggtggtgttagttgcgattgtgaatatgaataagccgaagctgggagctggtagggatctggtattgtctctgtatgctatctggcatgcctaatgtgatggcactggttagtacctgtttgtatggccttgtatagaatatatttcgaccgagtgtaggttgtggactttaaagtcatatagctatacttgacctgatgtcaagtcgcggttgtgtgtaatgacgacaattatcatgtgtaagaatacgtctattgctcgtaatgttgtaataactacgactgtagcttgtgtttagggcatctacaacctactacataaatacataaataacatatatcttagggttttt

SEQ ID NO: 33126 - DNA, 789 bp, Zea mays
  Clone ID: UC-ZMFLMO17066A07_FLI
ccacaagcgagcgagggacccggggcggaagaagagagagaagacgtctctctcctctcggcgtccccgttccccaacctctcgtctgctgcctgcctgcctgcaaaaaggagtttgtcatggcgtctaagcgcatcctcaaggagctgaaggacctgcagaaagacccccccacatcatgcagtgcaggtcctgctggtgaggacatgtttcattggcaagcaacaattatgggaccacctgacagtccctatgctggtggtgttttcttagtgaacattcatttcccgccagattaccccttcaaacctccaaaggtttctttcaagacaaaggtcttccatcctaatatcaacagcaatggaagtatatgccttgacattctcaaagagcagtggagccctgctttgacaatttctaaggtcctgctctccatctgctccctgctgaccgaccccaacccggacgaccctcttgtcccggagattgcccacatgtacaagacggaccggccgaagtacgagtcgacggcccgcagctggacgcagaagtacgcgatgggctgacgaacgctttcctgctcgtctgggcgccattgttcccttggatttgttgttggtcgtatgtatccctgatccatctaggatcatcgtattgtattgtagtgtatgtatgtcgtcggcctaccatcgttgccatccaccatagtgaggtggttggacatgtttcgcctatatgcacctgtgcttgccttccttcgggtcggtgctgtttggttaatgttcatcg

SEQ ID NO: 33127 - DNA, 1856 bp, Zea mays
  Clone ID: UC-ZMFLMO17066B07_FLI
ggaagcaatgccctgctcgtgaagggagctgttgaaactttgcttgagcgaagtagccacattcagctgaaggatggttccgtggtgccattagatgagaaagcaaagagaactgtcctggcaagcctccatgagatgtcgaccaatgctctgcgctgcctcggttttgcatacaaggaggcgctagcagaatttgcaacatatgatggcgagaaccatcctgctcataagctcttgctggatccggccaattatgcagctattgagactgacctaatatttgcgggtcttgtaggcctaagggacccaccccgggaagaggtctatgatgctattgaagattgcagagctgctggcatccgagttatggtgataacaggggacaacaaagaaaccgctgaggcaatatgccgtgaaatcggcgtgttttcacctgacgaggatatcaccttcaagagccttacagggaaggagttcatggcgctggaggacaagaagacgctgctacgcaggaaaggtggcctcctgttctctagggcggaacctaggcacaaacaagagattgtgaggttgctgaaggaagatggggaagttgtcgccatgactggagatggagtcaatgatgcccctgctttgaagctggctgacatcggtgtagctatgggcattactggaactgaggttgccaaagaggcgtctgacatggtgttggctgacgacaattttagcaccatagtttctgcagtcggtgaaggaagatcgatctacaacaacatgaaagctttcataagatacatgatttcgtcaaacattggtgaagtcgcttctatattcctaacttccgccctgggcattcctgagggtttgattcccgtccaacttctatgggtcaatctcgtcaccgacgggccccccgcaactgctctaggtttcaatccgcctgacaaggacatcatgaagaagccacctaggaggagcgacgactcactgatcactccctggatcttgttccgctacctggtgattggcctttacgttgggatggcgaccgttggcatcttcgtcatatggtacacacatgggtctttcatgggcattgacctgaccggagacggccacactctggtcacctactcgcagctttcgaactggggccagtgctcttcctgggacaacttcacggcctcgcctttcaccgccggagccagaacgttcgcgttcgacgacgacccgtgcgactacttccacgcaggcaaggtgaaggcgacgacgctgtccctgtccgtgctggtggccatcgagatgttcaactcgctgaacgccctctccgaggacagcagcctgttggccatgccgccctgggtcaacccgtggctgctcgtcgccatgtcggtctcgttcggcctccacttcctcatcctctacgtgccgctgctcgccacggtgttcggcatcgtcccgctcagcctcaacgagtggctgctggtcctgctggtggctctcccggtggtgctcatcgacgaggctctcaagctcgcgggcaggtgtacgagcccttcttcgggccccaccaggcggtccaggaagaagaagcagaagggcgagtagcgagcgggcgctaacatttgactccgtgctcagttactaaaccattccattaatcatgtaaacaaaagatgaacctcagtcagtcaatcaatcaatacaggagataacccattttcactgtttctctttctactctctctccaccctaacgccaaaacaacagcagcacagtagcttctttgttctcagaacaagttgttaattagttggcaacatatgttatcctgtgaattatgtagcgttgagtc

SEQ ID NO: 33128 - DNA, 3037 bp, Zea mays
  Clone ID: UC-ZMFLMO17066B12_FLI
cttgaaatccacgatttctattatgaaaaaatacagccaaatttgagggatagttacacatcgaggctttttgaacgctactcttctggcttcctcctggtatgcccctatccacttcctccattccgcctttcagaggaaagcatttgccttttggccctttgattattgtgtggtttcaaattaatttattcattcatagcttcctaggtcgaaggtaaatagaaagtcgttggtttttgttaaacctggattgttatggctatcgatgttacttggacctctggtactaggctcctcatattccgctcactagatttctgatgttgattcaatttccttccattcaataaaatccatgtgtgtgattgttgtcctatgttaatttgaggccaaggaagtgaatgggtgaaaatgattttgtctattatcacatgatttggttttttacagcatactcttatagcccacctgtaattcatcagcatggattgattatgtgcctctctattttgttgtatcagttatgaagtttaaataaacattgaatccatgttcttgcacactttttgtaatgttcaaccaaaaaatctgcttcaaatatgttcagcaagacagaagttaataggttacattcagctttttcagttggtaatgttcacaacaacaaaaaggatgtattcagttttttcagtccttttctgttcagttcttaaccacttgtagttgcctatttggtaatgtttaagttcccatgaccgatctggcagtgcagttaaatttatgggttcttttagagccatggattagattaatgtacgttgtccacaaactcttaacaccgacaaactatccttcaagaggcgctaggcaaggaggtgagtaatacctattacctcgtgctccatccaaatcccaaaagtgtaactcctctacagctagcaccaacacatgattgttttgtgcaaatgtttaggtgtgttaaatgattatgagcaatagtctgatttgatggttgagttattttcagatattaagatagtttaccttttaacgttatcaacacattgatatgctacatgatctctgtccgtgcaatcttttgatatgttacagaatgcactattcctaattgcttagttgaagcatcctgcagatcaaggtagaggatatggatgcgtatgcccctaaagatcttttggttgtcactacaggttcacaaggagagccacgtgcagctttgaatcttgcatcttatgggggaagtcacactcttaaactatcaaaagaggatgtccttctttattcagctaaggttattcctggaaatgagacacgggtaatgaagatgatgaatcgtctcactgatcttggcccaaaaattatcatgggtaaagattctggcctgcatacctctgggcatgcctaccgagaggagctggaggaagttcttcggattgttaaaccacaacatttcttgcctgttcatggagaactcctatttctcaaagaacatgaatcacttggaagatcaactggcatacggcacacaactgtaataaaaaatggagaaatgcttggtgtatcgcatctaagaaacagaagagttttgtccaatgggtttgtttcattagggaaggaggatctttaggtgaaccatttattttacacgtcgtttttttatgtcttttgcagttatgatatctaacatgatatatgatattacagctcatgtatagtgatggtgataaggcttttggtacatccactgatctctgcattgacgagagactaagaatcgcatctgatggcattatttttgtcaagtagcttcttgtacagttttggagtattttctaggtttatcttcagcaaaaatttctcctcgcatgtgaaatgatagtgatttatgtcgaaccttgtgatagtcaaaatggtaaaccatatatagtattgttcggtgcacctaaacattttacatgttactcctttgcagcatggagatcttccgacctcagaaggaacatggtttagcgcagactggtttgaaaggaaaatttaagattactacaagatgtctatggcttgataatggaagattgttggacgcactctacaaagcagctcatgctgcattgttaagttgtcctatgaattgtccacttagtcacatggagaggatggtagctgaaatcttgaggaaaatggtacggaagtatagtgagaagaggcctgatgtcattgcggttgctatggagaacaccacagcaagtttctcagaacacctcgatgctaaatcatctggaaattttgaaccttcctcagctactagccatctgagcaggagtccagctatgagtcttgaaggcagttataaaacacacccagacaacccagaggtggatgctgaagaagcccttcctgaggccacgagaacagcactggatgatgcaaccacactgttatgcatctatcatgcataatggataatatccgatgttatgtttctttcaccagtggaaatttgctcatgttacattcagtaagccggaatacctccaagatttagatattgtaatgaacagattccataaacagagacctgtttatggaggttgggaacaacaccttggattggagcatacaaccactaccccaaaaaggtcctacttaggcaacaaccagaaccaccattcttttgagaagcctgtgaagatttacaactaaagctgggaatactttttacaagtgatgaatggatatgaaggcagccttgttccaaaagcagtcttttggtgatgtacatagagcttttgcatagagtagtttatgtggcagttatctcaagaattttcatctggtggatgtacagggttcgtatagcaacatttccttgtagaaagttgaagttgtatatcgagggtggatttacctgtgtttatcttttcgaccctaagcctctgggaagctgtgaaccatagcctcatgaaatatgcctgttgttgattcagtgtttgtgtttttcttgtttgtcaag

SEQ ID NO: 33129 - DNA, 486 bp, Zea mays
  Clone ID: UC-ZMFLMO17066C04_FLI
gccgaaattgagccggctacattgatggtggagcctaagtgtgaggagggcgatggttccagcttcgtgctcccaccaagccctccagaactgatgctcgaggaacaggacgattcagggttaatagctctaggtactggatcatgtaccgaacagcagagccttggagtaggagaggctgaggatcaggaaaaccctagcacaggcacagctcagcatggcatcatgatagtggagcgtacgggtgaggagaacagcagttgcaatggcgtttattcttcctgcccaccgtcatctgtcattgttgaatcgagcagtgattatctgtgttagttatgtagggagtagaagctttttttatatttaaagatctgacatgagattgttagttcctttgttgctggtggcatggggtttgattctgtaacttgtttcgtcgtgattgtcttgataatttgagccacaagccccacgtttgagggtctt

SEQ ID NO: 33130 - DNA, 2253 bp, Zea mays
  Clone ID: UC-ZMFLMO17066D07_FLI
tctgaagcaagcaagaagcggtagagtcgattatctacagctatagacatggattctccggcttcgctgctttgctcacgaaatcacagtctacaaagattgcaggtctgcctggcgtggttagtgtaacgaaaaaccgagtccaccagacacgcacaactcgaagctgggactttgtggggctgcactacaacgatcagccaaacggtttgctcgcaaaggcggctaaatacggagacgacgtcattgttggcgtcatcgactcaggcttctggccagagtcgcctagctacgctgaccacggctacggcccccctccttcgcgatggaagggagtctgccaaggcggcgacgacggctcgttcggcccgaacaactgcaaccgcaaggtcataggggcgcggccggtggtacgctgccggcgtgagcgacaaggagacgctcaagggcgagtacatgtcccccagggacgccgaaggccacggaacccacacctcctccacggccgccggtaacgtcgtcggcaacgtcagcttccacgggctggcggccggggcggcgcgaggcggcgcgccccgcgccaggctcgctatttacaaggcctgctggggcgcgcacccggtgtcgggctcgtgcggcgacgctgatgtgatgaaggccatggacgatgccgtccacgatggcgttgacgtgctctcggtctccatcggcgggccctctgagacgccgggcacgttgcatgtcgtcgcgagcggcgtcacggttgtctacgccgctgggaatgatgggcctgtctcccagatggtggagaactcgtccccgtggctgttcaccgtcgccgcaacgactgtggataggatgttccccacagccatcaccctgggaaacaaccagattgtgcatggtcaatccttatacgtggggacgcaagggagagaagatcatttccacgaggtcgtgcccatggtgaactcaggttgtgatccagagtatgtaaacagcagcgatgtgaaggggaagattgtcttctgcatcacagaggacagcttgaatccatctgctacagttactgctgttggacagctagtgttggagaatggagggaaagggttcatattcacgggatataacagggacaatatcgttcggtgggaacctgttacaagcaaaatgataccgttcattttaatcgatcttgaggtcgcctaccacatcttgcagtactgcatctcaactgacggtaccccaagagcaaagatctctttggctcaaacaacttttggaactggggttcctgcccccaaggtagcagtgttctcgtctagaggacctagtgccgtctatccaggcgttcttaagcctgatatagctgcacctggggtgaacatcttagctgccgccccacaaattccttattacaaagagcagctgggtggcgtcctgtaccattttgagtctggaacatccatggctacccctcatgtgtctggtatcgtcgccctgcttaaatcattgcatcctgactggtcacctgcggccctcaaatcggcgctcatgacaactgcacttaccaccgacaacaacgggatcccgatacaagcagatggaaacccagtaaagatcgccgacgctttcgattacggagcagggtttgtcaacccaaccaaggctgacgatcccggtctcatatacgacatccaaccgtcagattacctcaggttcttcgactgcacgggagggttgggtaccaacgacagctgcacgacacctagggcatctgttgtagacctcaaccttccgtcgatcgcaatccctagtctcaaggcgccccaaaccgtcacgcgcaccgtcaccaacgttgggcgccagactaacgcagtgtacagagcagtcctccagccgcctccgggcgtggagatgtccgttgaaccgtcggtcttggtcttcgatgccaagaggaaagcacagagcttcaaggtggctttcatggcgacgcgtcggttccagggtgactacaccttcggtagcttggcatggcacgacggaggcagccactgggttcggatcccgattgcggtccgcatcgtaatccaggatttgtattcgaccgtctcttgaatcgatcccattgcggaaatcgtctagaaaaagaaataattaatgttatatgaagctagcgagtttccataaggaaccctcgctcgtggtggcaagatggtatttggtgcatatatatgaaaaatatatatcctt

SEQ ID NO: 33131 - DNA, 1741 bp, Zea mays
  Clone ID: UC-ZMFLMO17066E04_FLI
gcgcgtggcggctggcggtcgctggactgggagatccaagggccggagttctggaatctttgggtcaacctgaagcacatttgcacacatgtaccatggatgttcctcagttgactgctgaaggtgccacacaacttggagatagagtgtctttattacaccagacagggacacttcagtcagaaactccttgtctgaccttaggccgcgattctaatgcagtatcaatggagaagctgcatgctagcgattgcttgccctgtggtaaagagaatgtcgggacaggactacaacctaaatctgatccagaacgtgctgataataggatgagtgttgcacgtcttgggttggaccttaacacagtagatagtcctgatgtagcagagcctaaccctttcttcccttacaagaaattggggcagtcaaaagtcagcgatccatcggaatgtggcagcactactggtgctatagaagaaagcgagtcacacagaaagtggagagaaatgaagcagaatggctttctttcttcatctcatgggaatgcggtggtgcctaggccacgtggtcgaccccccaaaaggaaaagggatgatgaattcaaaaagagcagttccacacagcatgtacaggctaacaagtctgtgaaggttgctgctcctagtggtctattatctgggctaaatcctggaatcattaaccatgtgagaaatagcaagcaagtttactccataataaaggctatggtacactctgagaggcttgagaatgagaaccactctagtcaaacaggtgaaagagggagagaagttaatgagagaattcaggatcagaaatatggtggtggtttcatgaagtgccatttgttgataaaagataataatgctgtgtttcaccaaacactgcctaacacatcgcagttccttgcacaggatggtgatagtcttaaactgcaactcccatccgcagtcactatgtcttcagataggaccttcagtacgtcagctgatgatcctgcatctaatcatgattacatgactgtactgtcagtaaaagcggctagcgttgcttctcaatggttggaattactgcatcaggacataaggggacgtcttgctgctttaaagcgcagcaggaagagggtcagaaatgctcttcacacggagctgccatacctaaccgcgacagaattttcatctaatcaagagaacgaatcatccattgcaaatacttctgagattggatgtactgacaaagcggtttcagaagctcatgtggcacgatggaggtctctgtttgttcagatggacaaaacacttcaggaggaagggaaacagctggagaacaagttgaagcaagtgcaagaaatgcaattgaattgtgataaaggcctcaaacacatggcctgtgaagctcctctgctaggacctatggctgaactatggaagctgaagaacccaaatatttccgagagcgagtgggcggtgcaagccgctgccgcatcgatctactcgacctgcaacatggtcatgagaacggagaacgtgccttgcttttgataccacacttgtagtttagttttttgctttgctgatttttacctcaaaccaggtcttctttcttacctttaccctatgtgaatcgtgatcccttgtccattacagtagtggcgactgtcgagtgatgtaacaagaacaaacttgtgatgtatgttatcccgagcctacaatttcacaggcacatg

SEQ ID NO: 33132 - DNA, 2054 bp, Zea mays
  Clone ID: UC-ZMFLMO17066E05_FLI
ttaggatctggctctattactattcattttgaactaaagtttttaaaagccctaaattagggcgtgtttagtttttagggactaatttttagtcatttcaatttatttcattttagtccctaaattgtcaaatatagaaactaaaactctattttagtttccatatttgtcaatttaggaactaaaatgaaataaaatggaggaactaaaaattagtctctagaaacaaagcacctatttattgtgaagaaacgtttggatcgtgatccattaccacacctagctgcaccgaaactgtgcatttccaaaaacaaataagatgcaccctgtatatttctggttatcgattatatacgcatctttcggtacatcatggatcatgctttgaagtgaacattaccaaagatggagcactggaacagtttttcggcatatagataggcttgacatccggaccatatttcgtgtaagtgtaatgacactgccttcatatgtcatgctgaacactttcaggaataggcacacagtacattctcgtatcgcaggctctgttctttagatgtgctcataacactgatcattcatttctttataatgcaggcagagattatggaaatgcagaagaacgaggtaactgttaattctaaacttcgtgtgtttgacccctgtatattatcttgatgccctttctggtttgctaaaaactatggcagagatagatagagaattagagaatagagattcaggctgtaagcataccattccttctattactttgccaataaccaaagacgaaagaagaaaattccatattattcaaatataagccattaaatctgtgaaccgctagctgagcaaccggtcactaaattggttctaggattcagttaggggatcacacgttcacacttcgggcttattcgtttcaccgttaatccatgtggattgggtggtattgaggtggtattgagtcggtttaaatccatagcaagctaaaattcatcccaatttattccaatacactccaatccacatgtaattagaataactgaacaaggtcttcagtgtttcattctattccacacacttagttcaactttgtttaaggtatactacattatccttgtacactactcagcctgtgagttcatatcggttatgatgattgcctgtcactcatcaaatcatacttttcattatccatagaaaaaaaaaccgaattaggtttttaagacagctagcttttgatacatgtgtgtgttatctcaatattatgagggctccaaaagagtatgatgggtagctcgagtaaatcgaattaaactattttttactggcagatatctggaacagtttacaaatatatgaaacattgtcgccagcacgtataaatctaattattttgataatcaccacgtgtttctgcatttggcaatgacgactgcaaattttgcccggcagctaccagaaatgttgaaggatccattcggacggaagaagcgtctgtgcttgcgaagaacattgactgggccttggtgatgactatctgaaacagcagacgagtcgctgcatacctgcagtggtgcctgggatctgtacacaatttgtctcctatagactagcgatggacgtaacgtagtggggatgattgtactgttaccgcttatagtggagtcgggaaactgacacatgtagattatgttagtagagaaccaaatggagtgaagccggccgcgcaagactcggcggcttcggccatcctccagagcttgtgtagagttgcctagctttgcatcttgccggaagcagcacatcgtgtagagattggacggttttaaaggatcggtggctgggtgtaagtaggttggtgggattacaagcatgggcatggcgacgttcaggatgcaaccggcttgacgactgtacatctgatggctgtagagctgttgtagtatgcaaactgtcccgctgctgctgcttgtgtgtaatggtgaaaccagatgaatcggttatttgtgtattactacttagcaaatatgctcacgaggatttct

SEQ ID NO: 33133 - DNA, 1710 bp, Zea mays
  Clone ID: UC-ZMFLMO17066G01_FLI
cacacattgtcaccagagatggcagaagaatacaatagagttcttgctatcctggatgatctcactgcagaacaattgggtgctaagattagggagtataagattgttgctccagacaccaagaactcattatcagatccatacccttttaatctcatgtttcaaacttccattggaccatcaggtttgagcccagggtatatgaggccagagacagctcagggtatatttgtgaacttcaaagacttgtattactacaatggcaataagctgccattcgctgcagcccaaattggtcaggccttcaggaatgagatatctccccgtcaaggccttttgagagtccgtgagtttactttagcggaaattgagcactttgtggacccagaggacaaatcccatccaaagtttggtgatgtttctgatctagagttctggatgtttccgagagaggatcaaatggcaggaaggtcagccacaagacttaaactcggaaattctatatctgagggaactgtgaacaatgagacccttggctacttcattggaagggtctaccttttcttgacacaacttgggattgacaaggatcgtctccgtttccgtcaacacctgccaaatgaaatggctcattatgctgctgattgttgggatgcagagattgaatgctcctatggttggattgagtgtgttggaattgctgataggtctgcctatgacttacgtgcccactcggataaaagcggcgagaaacttgaagcacatgagaagtttgctgaacccagagaagtggagaaattagttataacgccatcaaagaaggaacttggtcttgcattcaaagggaaccagaagttggttgttgagtcattggaagccatgaccgagaccgaggcactggacatgaaagccgcgttggaatccagaggggaagtcgagttcaaggtgtgtacccttgggaaggatgtcaccataaagaaaaacatggtttcaatcaacatcgagaagaaaaaggagcaccagaggaaatttactccttccgtcatagagccatcctttgggatcgggcgcatcatatactgcctttttgagcactgcttctaccaaaggcctggcaagaccgaggatgagcagctaaacgtgttcaggtttccccctctcgttgctccaataaagtgcaccgtctttccattggtcaagctcgagaaatttgaggctgttgccaagaagatctccaaggccctgacagcagctgggatttcacatatcatcgacatgacaggtaatacaataggaaaacggtacgcaaggacggacgagattggtgtccccctggcgatcacggttgatcacaccacgagcgtgacggtgcgcgatcgtgacagcaaggaccagatccgcgtggatgtggacgaggtggcctcggtggtgaaggaagtgacggacgggcagagcacctgggctgacatcatgtggaggtacccggctcacacggcctcggccgccgacgaggatggggcacagccctgaagaggcacagccacaacaccacccaacgatcgttggtctctgatagttccttcctgcgttccttaacagaaacagactgcattgttgtgtaagcctacagtagccagattcctgcacatttaaatttccacaaacaaatagtagcctctgtgttataaattctgctacaacatttcatcc

SEQ ID NO: 33134 - DNA, 1908 bp, Zea mays
  Clone ID: UC-ZMFLMO17066G11_FLI
cagatgcggccggaaggaggcagtcagtggtggaggtggcaggcatggctggaataggcaggtggtgctggaggcagcagagaggaggctggcggtggtcaaggtggtagggaggaagtaggcgcctgagagcagaggaaggtgcgacagggcagagagcggatggataagctgggaaggtataaggtgggctaggttgtttttgatggactaggctgcttttgatgggcctttctatccaaccctaggcctgtaatctcctgttttttcttttcctttgaggtaatatttgtatatgtttgtctatttgtgaaacacctaggcttgcctcgcctaagctttaggctgaaggtcactgcctagcacctaatgtaacattgttatttagttagcgctctttttttgtcggttcacttggtgtttgtggactgtaaggatggtatcatattaactaggcagtagaatgatagatggaggatatctgagttagtttgacctctgcgctgtaatgttatttttagaaggtaaggaaaccaacagggctaatttcaattatataacatggtgtcattgaaattcaatttattgtgctctaaatttgtaataaagtgattttagtttgtttcttatcgcagttctcctgcgtacttgaggaaaaaggaacttgtcaggataaattgtccacaaatggttcctgcttctgcagtttccactaattagcagtaggtagtttattctataattgcattgaagcttgaacattgattttggttgggcatgcagtaagtagcttacaagaacatggcttagttgggatactgaaatgcttcatcaatagctctaaacctgccacaaattacttgacattcttctctacaggcatttccgaagaaagatactgctgtagttccgcttgttatatttgatgatgcaactggtgatcctttatctactcttgatcagttttgataattcgtttttggatctggaacacactagaggtatgcctgaaatgcattagcttgtagtcactatgctgatgaaaggcatagtggatcatagatagtatttagatcttagatcatgtgctttgctttttgctgcttttatggccttgaagggtttgaataaaaaaaatcggctttggtcacgccttgcctttggtagtacatttcgttaacttgctatatcaactgcaggcgccggaaggaagttgaacttagactaatagaggaggacacagctaaaagagttgagcaagctattaggaagaaggttgaggagagtctgaattgtgatgaaattaagcgtgaaatacaacgtcggattgaggaaggacgaaaaaggatacatgaggaggtagcaatccagatggagaaagaaaaggagtcagccttaaatgaagccaagctgaaagtggaacgagaaaaaaaggagcggaatgagctagagaaaaagcttgaagaagaacgaaagaaggctgaagaggcgttgaggaaagaggcgatggaacagcagcagaaagagctagagcggtatcaggagctggagaggcttcagaaggaaagagaggaggccatgaagcggaaaaaaatggaggaagagcagcagaggcaaaaccagatgaaactgctgggcaagaacaagtcgcggccgaagctgtcatttgcttttgggatgaagtagcgttcgagtcaccgaacgaaattagtgttttagtttcctgtaaccctgtatttcctgaaaccaccattgtctaactttggcagacaaattgggacgtcttaaatcctcctgatctgctttgtaagttgccgtctctcggtgatgtggttttctctgctcctttgctgttcactgttgagttgacgttgcgagaagactgccaaagaagaatccggttggtcc

SEQ ID NO: 33135 - DNA, 1367 bp, Zea mays
  Clone ID: UC-ZMFLMO17067A01_FLI
ccctggcactatatcattcatttggagattttcaatcagctgtatagctatgtaaaattggttgcattttaggtgatttgtgggaattaaattgcaatgtaccagaaatcgatcttaatttatgcaatagattatatgggaaaaatcataccatggattggatgtaggctgaaaccagttacttcatctaggctaaaattgttggttctgtacaaaaggtagtctaattaggctttgatatccgaattaaatgtttatcacctacttttagaaaaaagttagtcatcttcacgatccagttgatacatattcacaaatttgtacatgagtaacaggcaacaacttttctcaatttatccagaaaatgacttatttttaggggcctggtgtatatctctatcctattattttattctcagcacattcacattcacaactagctcaacacattcacattctcagataccgatctactggacatcatcaactcagagatcaagtacgcccgaggactcaggactgcgatgaccacgacacgaatttgtgatgtcacagagtagggatgatgatgatctatatcaaaaaagactaggttcctcatgttcctcatagtcctctccataaagcactagaaagtatactaccattctggcggacttcggctgaacccgaacctgtacgagagcgggaaagtgtgcctgagccttctgaacacctggtggggcaaggggtgcgagaagtggggcaagtcgagctccaccatgctgcaggttctggtctccatccagggcctcgtgctgaatgacaggccatacttcaatgagccaggatacaagaactcggctgaaacgacaggtggtgagaggtgttccttggcttacaatcagacgaccttcgtcagatcatgcaagacgacgctgtattcactccggaagcctccaatgcattttgagacccttgtgttgtggcacttccacgagcatgagcgtgccatcctcgacgcttgcagggcttacatgtctgggacagtcgttgggtcgtctgctgggactgggagcaaccgcagatacgtccatgacaagtgctttgcagaattccacaagtcgctgacgctctacactgaacatctcagggctgagtttgctacaaacagaagacgagtgatggagctagaaacagaagacgagatcgtgcctagcatagcagctagcatgaaatcgtgttgaaggcaaatgccccacagtgttgctctcatcatcagatatttgctgccttagctatttctagcttcattcatgtcaagtgaataatctaattcatgacaattgtacctgtctctatatctaatgaatctgtcctctcttttg

SEQ ID NO: 33136 - DNA, 1476 bp, Zea mays
  Clone ID: UC-ZMFLMO17067B05_FLI
aaaaaatagggtagccctcagttcctcaaccagcggccgaccgtcgaccgagaagcccgagcagcggtccgatcaggtgagcagcggcgcggctgctgcctgcccgcgcctgcctccgcggctccgccggccgtcgaccgagcagccgagcagaggcgcggcggctgcctgcccgcgctcgcctccgcggctccgctggccgtcgttcgccgacccgaacgccgagtcgcgcgagcgtgccggcgtgccccgcctctcgtcggctcgcgactgcgccagcgcggtcgcgccgccccaccccccggtgaccggcgtccggatccatccgtctggcaacccaaccggccaagggccaaccccgtccccggaccccgactccccgagggccaaccggccaaggcacaaccgctgaaccgcacaatgcatatttagtcgcctactcgcctaggcctattatttccctctcaaactcaaattcttcctggaatccaccaaagccctgcctcccctctactgattctgaaagtggagttccatctgcgcgtcggttgatttattctatttgctgagttggactacattacctccatgtcgagactgcgagctctgtggcaggcttcctttaacgccacaaagagagctcttgtatggagttcagatgatctaattccgccaagtgaaagatgtatcttcaatttcaactcaaaagatgagctgaaaaggtggcatttgtactcagattcagagtatggaggtttgtcttctgcatccttagaaataactgatggcgcttcagttggagatactccattaactggtgtgttttctggtaacctttctttggatatgtctgaagagtcaacatggaggatcaggcgctatggattctgtgggatgcgatcaaagaagtttgatgggttcattgaccttgatgcatatgatacaatagcaatgaagatcaaaggggatggaagatgctacatatctacaatatacacggagaattgggtgaattcacccgggcaacaagaagacaactcgtggcaggcttttgtgtacatacctcctcaagacagatgggaagtcttgaagatccctcttgatcgctatttacccacatggagaggaaatgtgatccaggcaaagttggaaatgaaccctgctcggatcgtggggatgtctctctctgtaaacgcagaaggcggtgttcctggcgccaagactgggcctggtgattttaggcttgatgttgcttggatcaaagcgttgagagctttgtgaactccacaagtcatagttttatttcacatcggccctttccttctttatcaccctgccccagtggcgccgctgaactcatcacccgaccacaaccacaggagtaaccatagcacagattgccaactcctttatgcacttaataatggattttgttttgcttctgaggtttatgaataagtggtagaaaaatggagc

SEQ ID NO: 33137 - DNA, 2274 bp, Zea mays
  Clone ID: UC-ZMFLMO17067B07_FLI
gaaagcctctggcaaatcgaaggaaatgatagaaaaagaaatcgtggagcttgttgatgcgcacagtggctttgagaaaaaaaattagcagtggtagggaaaggatagcacggagaagagcaaatgctggtgatgctacagataagcacaccaacgaacccagggagaattctaatgcttcattgcagaaacatcatggaaacaggggtaaatttgctgattcgagtttgtatgaactttcggtaatgtgtgtcaagcagtgccatgctgataactacaacaatgttagtcaacattctagccaaactaaattgaaccagagctccaatttgacatcctttgtactgaaagcctttcttgaattgttgaaatcacttgcatcaaagcacagtagggacttcacaataaagctgcatggagattttaaaaagttaagccagccaataatgcagctagtatggtgttttctgttagacccaattcaagaaaatggtggaagcaagaagaacatgacccaaggaaagaaaaacactgagtgcaaaaaggatcagttatatttggctctgacatgcctaaaaaaattccttgagccaagtgtttcaggagaacactctagtgatatcattgattttctaatatctttggctccacctaatatagaggatacaatgggtactggggatcttgacaataatgataccactatggttgaagatagaagcacaagaaatgtccatgtgattttgaacatactgaagacgttatatgccagacttcttacccaatcagttttacgtgaatctgaggctgtaattgaattgattctgggtatttcaagaaaactgcaacttgaacgaaggcatcttgttggaaaatgggctacagatctatgtagaaagaaaaccatgcaaagtcctagaatggcacgagagatgttaaaactagctatacatcttacaccagctccagatgacatgattcttgtttatgaggtgtctactgagttgatgaatttaatgacctctggagatgatggagattcttctgatacatttcatatcattaactgtaaaacaaagagctcactcgctgctctctctcttcaaatggttgagtcatctcttactgaattggattggggctttggaaagcttaaagcaatgcttacattaggttatgattgtgctaacattgatgaagatcaaccagcagatgaaataatgctaaggttggctttggagaaagcactctactcgagatcaacattagtagttcaagtgctctcttcctttgcacatatgagccctatggatactcaagcagaacattttctgaaattgactgtcaagttctacaagcttttaactcgcatgtcaaagtcccagattgcacctaaaggctacagacaatccattccaagcctcaagtttcagaaactggcagaagtaacttgcaaaatgctcaccgctcccctttatgattttgtgtttcaacagaatcagcaaatacccataaagggaaacctcgccaaaattagaagagaaaccaaatgtatccctgatcttatttttcagattgaggattatgagaagtatttaatacagctaagcaaactaactaaggtaaaccttttgaggcatgccaaacgcagtgtagcaagagacttccagataaaagataaatctgggggacaacaggaagatgatcacattccagacaatgctgcagcatctgataacgaggctgataaggacgcaatgggtccaaacgcaccagttgaatcatgtgctgacgatgctcaaaaatcatacgctgacgaaaatgcatcatgtgaaagtgggcatgatgaggatgcaggaggtccaaacactccagcagaagcagatgctgatgaaatcattaggtctagcattccatatggtagtccagtccaggagtctgaatctgatagagaagaggaagaattattagcacggacgaagagagctaagacaaaacaagttgtgcaggattctgatgaggatgcagatgagtaggtttttaaacattatcaatagttcaattttcgaagcgtctattgtgggcaacatcatgccaaggtgtatatacataagtttttatgggttatcttgctgattatagacgatgaacacatgagatgtaaaatatatggttttgcaaaaattcttgtgggccatcatgttgattatagaccatgcacagaacatatgtaaaatactttattgtaaattataagttattctaattttcttt

SEQ ID NO: 33138 - DNA, 958 bp, Zea mays
  Clone ID: UC-ZMFLMO17067B08_FLI
agaggatcaccattctcagaggaaaccatgaaagccggcagattactcaagtgtatgggttctatgacgaatgcttaaggaagtatggaaatgcaaatgtctggaaaacctttacagatctatttgattacttccccttgactgcattggtcgagtcagaaatattttgcttgcatggtggattatcgccatccattgagaccctcgacaacatccgcaactttgaccgcgtccaagaagttcctcacgaaggtccaatgtgtgatcttctgtggtctgatccagatgatcggtgtggctggggtatttctcctcgtggtgctggttataccttcggacaggatatatcagagcagttcaaccataccaatagtctaaggctaattgctagagctcaccagttggttatggagggattcaattgggctcatgagcaaaaagtcgtgactatatttagtgcacctaattattgctaccgctgtgggaacatggcatcaatcttagaagtggatgattgcagagagcatactttcatccagtttgagccagccccaagaaggggagagccagatgtaactcgtaggacacctgactatttcctgtgacgcaaaagtgatgtggatcatgcagagcgaaggtttgatagataggcgcagtttcctggttgcagatatatatatttatatatgtttttgctgggacccctccgtgtgctattcttattatttttgccctggctcgccggccgctctgccgcgtcgtgattcaagtgtatacctacagcctgctacagctggaaggactggactgtgttctcaccttttctcaaactggttggtgcttttggctcggtgtggggccgcagtggtgtggggggttgaagcatcaagcagcgatttgtgttatgggaggaaactgttcccgctgtattgttcattttattccccttctctttctc

SEQ ID NO: 33139 - DNA, 1693 bp, Zea mays
  Clone ID: UC-ZMFLMO17067E02_FLI
cggacgactgggatcgaacatgaagatgacatggttagcacaaatcatgtggactgggtacagactattgaagagagagccatcgatcaggcacagaaaagccaatcaggctcttttgatcagatacatggtaatctggaaagcactttcagtcagttacagttgagccaagcagaccctgctaatggaatgcaggttatacaggcaaacactaccattcattcacaaccaagccaattggatactctgagtcctacacagaaaaaacaggaaaacagttccaaacagttacaatctgtggtcacagattcttcgattccaaaacgaaccacacagaaatgcactatagatcagccaagccagccagacataaatcatatacgcacagatcaggaattcactgggaatcagttcccctcgagcctaccagttgacactgttatttcattaggggatactgaagaattcacagcgggtcactcacagccaagaaatagtgacactgcaggacaaattcaggccaatgaggaaaatactgccgatcaagtacagttgagcctggcagagacagtcattctggtaccggctattcaagaatatgctgctggttattcactgctgagcaaagctgacactactgatcaaacacaggccaatcaggaatacattgctgatcaagtacaatcgtgcctaacagacgcactcattccagtaaaagctattgaggaatacacaactgattattcacatattagtaaagctgacattacaaatcaaatacaggtcaatcaggaaagcactgatgatcacttatatttacgtcaagtagactgtctcgctgaaatgcagataattgagcaaaatttgtccaagcaacctcagctgagccaaccagacactggggatcaaatacgaattgatctggaaagcactaccaatcacttgcaaccaaactacgatgaaaattctatgctgcaatctggtttctcttgggctcctgaacagaacagaggagcccctacagatttctggaaaaatgttgaaagtcaggcgtcatcggtttccatgccaataaatggagcgcctctttcaagctttccagcaaatgtcagattccaaaatgcagcagcagcagcagcagcagcagaacctgctttgccaccacaggttgctccaaccgaaacaggttccgatcagtctgggttggccttccaatcccttttcggaaacatctggtcagatccttgcatcgagtttgctttcaagacccttacaggcgacattcctgttctcgacgacacaacggctgtcacagactacttcccagagcaacaagacttgaataaagacccagcgccaaactgtgcaggctctgtgtttgacagttcaagaaaccacacacaagtcgacgtcaaccttccaccgcctgctccggatggtttctacgatggcagctggttccctccccaatgaatttgagtgcagggaggggaaaaatgcaataacattttgtacctgtgaaaaggcaaatcagagaaggctagtggccgaaacataaaagcaatagtcgcactcttgttagggctctgatctgaatgtctaatcccacaggacacattttgtaaaaaggcggtagcttctttagccttattagactgttaatacactcaactgaatgatgtccagttccatc

SEQ ID NO: 33140 - DNA, 3454 bp, Zea mays
  Clone ID: UC-ZMFLMO17067E07_FLI
cgagaaagtgattggggtttcacttcatttatgccgttgggtgaactctacaaccacagtagaggttatcttgtaaatgatacttgtatagtggaagctgaagttgctgtatgtaaagttgttgactattggagttatgactctaaaaaggaaactggctatgttggtcttaaaaatcaaggtgctacctgctatatgaattctcttcttcagacgctgtaccacatcccatatttcagaaaggctgtttatcacatgcccaccactgagaatgatatgccctcaggaagcatccctttagctctacagtcactcttctataagttgcagtataatgacagcagtgtctctacaaaggagctcacaaaatcattcgggtgggacatgcatgattcatttatgcaacatgatgttcaagaattgaacagagttctttctgagaagttggaagataagatgaagggaactgttgtagagggcacaatacaacaattgtttgaagggcaccacatgaactacattgagtgcatcaatgtagatttcaaatcaacaagaaaggaatccttctatgatctccagcttgatgtcaaaggttgtcaggatgtctacgcttcatttgacaagtacgtagaagtggagcaattggaaggtgacaacaagtatcatgccgataagcatggtctgcaggatgcaaagaaaggagttctttttatcgacttccctcctgttctgcagcttcagctaaaacgttttgaatatgatttcatgcgtgacacgatggtgaagataaatgatcgctatgaattcccacttcaattggaccttgacagagatgatggaaaatatttatctcctgatgctgacaggaatgtgcgtaacctttatacccttcacagcgttcttgtccatagcggtggtgttcatggtggacattattatgctttcatacgacctaccctttctgatcaatggttcaagtttgatgatgagcgtgtgacaaaagaagatgcaaagagggcactggaagaacaatatggtggtgaggaggagctacctcagacaaatcctggcttgaacaacactcccttcaagtttactaaatattcaaatgcatacatgcttgtgtacattcgtgaaagcgacaaggacaaaattatctgtaatgtggatgagaaagatatagcagagcatcttcggattagattggaaaaggaccgtgaagagaaggaacgtcggaagaaggaaaaagctgaggcacacctctataccataatcaaggttgcaagggatgatgacttaaaaactcagatagggaaagacatatattttgatcttgttgaccatgataaagtcccaagcttccgtatccaaaagcagatggcctttgctcaattcaaggaggaggtagcaaaagagtttggtattcccacacagttccaacgattttggctgtgggccaagcgacaaaaccatacttaccgacctaacaggccattgtgtcctcaagacgaagcgcatactgttggacagctaaaggaattggtgaacaaggcccacaacgctgaattgaaattgttcttggaagttgaacttggactggaccttaaacctcttcctcttccagacaagactagagaagatatatttcttctcttcaaactctatgaacctgaaaaggaacagctacggtatgttggtaggctctttgtaaaggcttcaggaagaccacaggacattctgccgaagctaaagatgttggcaggtttttcacaagacgatgatattgaactttatgaggaaattaagttcgaacccaatgtgatgtgtgaatacattgataacaggcttctgttccgatcttgccagcttgaagatggggacataatttgttttcaaaaatcttcaaaggcagatagtgctgaccgatatcgatttcctgacgtcccatcctttttgacgtatatacgtaaccgacaggtggtccactttcgttcactggagaagcccaaggaggacgattttttcctcgagatgtcaaagattttcacatatgatcaagtcgtggaaaaagtagctgaaaaacttggcgtggatgacccatcgaaaattcggcttacatcacataattgttattcgcagcagcctaagcctcagccaataaagtacagaggcgttgaacgtctactggacatgctgattcattataaccagacttctgatattctgtactatgaagtattggacataccacttccagaattacaagcgctgaagacattaaaagttacataccatcatgccacaaaagatgaggtgtcagttcacagtataagattgccaaaaaacagcactgttggcgatgtgctaaacgatatcaaaacaaaggttgagttatctcatcccaatgctgaactgagattacttgaggtcttttatcacaagatatacaaggtgtttgcaccaaatgaaaagattgaaaacattaatgatcagtactggacactgcgtgcggaggaggttccagatgaggagaaaaaccttggtccctttgatcgattgattcatgtatatcattttacaaaagatactcaaaaccaaacgcaagttcagaactttggagaacctttttttatggttattcgtgaggatgagaccctatcttctatcaaagagcgtatacagagaaagcttaagattccagatgaggatttctcaaagtggaagtttgcatacatttcacttggtcgtccagactattttgaagattcagatactgtagctttaaaatttcagagaaacatgtatggagcttgggagcagtatcttggactggaacatccagacacagctcctaggaaggcacacacaattaatcagaatcggcattcatttgagagacctgtaaaaatttataactaggcatgatagaaatttgagcaatgagctgccaagcaagggctaaaattgctgtcctgaaataaagcgtgccggggcatgttgctcaggtttttcgtggagctggtgagctagttcatgagactccaagtatgatcggggggcggcttctcatctttccctgcttttccccggatacatataaagttgtgcagagatgaccccaccgaacaattgtctttagtagataagccagtacttcccgttagatgactttatacagtcgaatagccggcattttagtcgatctttccgttctccagttgctgttggtgctaggaggccttgagctgttgagggtacttgccctgctgtatattatgacgtagagtgtacaagtctttgttgttgacaattacacggtgttttgtaatttcagtgatacacttccaggtccttcagtacgtacttgcctggatggtgtcaatttggcattctatgttagatattgatccatctgttctaaattaaaattataagacagtttgacctttttaag

SEQ ID NO: 33141 - DNA, 3036 bp, Zea mays
  Clone ID: UC-ZMFLMO17068A01_FLI
catccatccacgcacacgcgcacccgtccctctcggcgcccctctcccccctcctccactccgctgctgcctgcttgcctcctccttgccgccgcgaccgcgaccgccgttcgctgtcgaggccagaggagaggagtggtcaagtccgaggccacctgcccaggctcagacctcccccgccacaacgcgagccgcatcgcctcgtctcctccacgccatacacgcccgccttcccttccccggcgaccaggacccctcgcccgcggcgccagcgagctcccccggccagtcgtaggcctcccggagctcagcacgcacgcaggtgggtccagtgaggcctggttgtgcgcgttcctgcgggcgtcgtcggggcagatccatggaactcagccgcccgcagcgcggatagtactgcacttgtgcaccagccaccagcggatcgccaggaccgcccacctgctgctgcttgtgtcgctagccatttttcgggcgtctggcttggaggatatggccgcggcgatggacgcgcccaaccctggagcggctgctggcccaggaatgcctagtgacgccctgtaccaggagctgtggcatgcgtgtgctggcccgttggtcacagtacctagacaaggcgagcgtgtctattacttccctcagggccatatggagcagctcgaggcgtctgcacaccaccagcagcttgatcagtacttaccgatgttcgatctaccacccaagatcctatgcagagtagtcaacgtggaactacgggccgaagctgattcagatgaagtttatgctcaaattatgttgcagccagaagctgatcaaaatgaactcaccagcctggacgctgaaccacaagaacgtgaaaaatgcactgcccattccttctgcaagacactgacagcttcagatacgagcactcacggcgggttttctgttcttcggaggcatgctgaggaatgtcttcctcagctggacatgtctcaaaatccaccttgccaagaactggttgccaaagatctccatggcactgaatggcattttcggcacatttttcgagggcaacccaagaggcatctccttaccaccggctggagtgtctttgttagctcaaaaagattggtttctggggatgcattcatcttcatgagaggtgaaaatggtgagctacgggttggtgtaaggaggctcatgagacaagtaaatagcatgccgtcatctgtcatatcaagccacagcatgcatcttggagtattggccacagcctcccatgccatctccactggaaccctcttttctgttttctacaaaccaagaactagtcgctctgattttattgtgagtgtgaacaagtaccttgaagctaagaagcagaaaatatctgttggaatgaggtttaagatgagatttgaaggtgatgatgctcctgaaagaaggttcagcggaacaatcattggcatcgggagtttgccggcaatgtcaaaatctctgtgggcagattctgactggagatctctaaaggttcaatgggatgaaccttcatccattcttcgtccagatagaatctcaccatgggaagtggagccactggatgcagctaatccacaatcccctcaacctccactaagggctaagcgtccacgacccccagcttcaccttgtatggtttcggaactgccttcaggttttggactctggaaatccccaattgaatcatcctgtacactctcattttcggaacctcaacgggctcgagagttatttccttcaatccccacgtcaaccttgtcatcttcatcaaatgtcagttttaattcaaagaatgagccgtccatgctaaccagtcagttctactggtcagcaaggcatacaagagctgactcctgcgctgctagcaccaacacagtcgtaattgaaaagaagcaagagccaagttctggtggttgtagattgtttggaattaatatatgctcagctgaggaagaagtattacctgaggttactgctccaggtgttggttatgagcagactgctgcctctgtagagttgaactcggataagctctcacagccatctgatgtcaacaattctgatgccctagcagctagcagtgaacgttcacctcttgaatcccaaagccggcaagtgaggagctgtaccaaggtaattatgcaaggaatggcagtaggaagggctgtagacctgacaaagcttagtggctacagcgatctttgccagaagctggaggagatgtttgacatccagggggagctgggttccacactaaagaaatggcgggtcattttcactgatgatgaggatgacatgatgcttgttggagatgatccttgggatgagttttgcaggatggtgaaaaggatttacatttacacatacgaggaggcaaagaagctgacatccaagtcaaagttaccggttagcagtgacagcagcaagctgagcgctgcgaactcactgtctgaatgactatgaacaaaaactgcagagtgctaacgtccctctaattttgttatttccatcatttgattatgggggtgaatgctcacggttgctccgtgggctgaagttgtggttggcattcaactgccttgagttttggaggcttttggactgccttgccagcatgagcctcctggaagaggcaccctggcatctgcgtgccatttcccatttgttcgtgccgtttggtaggagtatccattggcttatttagcaggtccctggtttgaagaaagaagcggtcagctgcaagatggacggtgccttgcctcttcttcgactacttagctagtaattaggactatgtatgtaatgaatgtatatagtgccattaagacgcccatgccctggtattgaggtcccggcatttgtatgaatcaattgttcggaaattgttacctttagcagcaacgaacctgagggtgtagggtggccaggtgggagaagttgtatgtttctttcagtaacaatctttgtgcaagtgatctgtatatagtctactgttttaat

SEQ ID NO: 33142 - DNA, 1040 bp, Zea mays
  Clone ID: UC-ZMFLMO17068B03_FLI
tgcccgtccgtcgagggcatcgtgcgctggcacgtcgccgacgccctccgccgcgacatcggcatcgccgccggcctcatccgcatcttcttccacgactgcttcccgcagggctgcgacgcgtccgtcctcctgtctggttccaacagcgagcagaagcagggacccaaccagacgctccgtcccgaggcgctcaagctcatcgacgacatccgcgccgccgtccacgccgcctgcggccccaaggtgtcctgcgccgacatcaccacgctcgccacccgggacgccgtcgtcgcgtccgggggtcccttcttcgaggtgcctctcggccgccgcgacgggctatcgccggcgtccagcgaccaggtcttcacgctgccgggccccgacttcgacgtgcccacgctgctcgccgcgttcaagaaccggagcctggacacggcggacctcgtggcgctctccggggcgcacaccgtgggtcgtggccactgctcctccttcaccagccgcctcccgcccaacgccgacgacggcaccatggacccggcgttccgccggacgctcgcggccaagtgcgccaaggacgccagcgcggcgcaggtgctggacgtgcgcacccccaacgccttcgacaacaagtactacttcgacctcatcgccaagcaggggctcttcaagtcggaccagggcctcatcaacgaccagaccaccaaacgcgccgccacgcgcttcgcgctcaaccaggccgccttcttcgaccagttcgccaggtccatggtcaagatgagccagatggacgtgctcacgggcaacgccggagaggtccgcctcaactgcgcagtgcgcaacgccgcccgcgtcgtctcagcagaccagctcgagaccgccgccggcgacgaggggctcgcggccgacgcgtgattagaattttgttttacaataaatgggtggcgagcgcgagttgcgagtagaacgagagccaagagctgactgttgtggtgtgtggctcatggaagcctgtcttttgctgttgcttctcc

SEQ ID NO: 33143 - DNA, 948 bp, Zea mays
  Clone ID: UC-ZMFLMO17068B04_FLI
cgcagatcggcctccacggcgagtcgctgggcgtgcagtccgtcgccggtagctcgtccgtcgagtggggcagcgcggcagggaagcaacccttgacatggcacaaggtcagtgttctactacgttgccacccaccacaagtattccattgtctgaaaccaagcacgcctgtggactgtgatcgatcgccaggcctacttcagcgcgccgtccggcgacgcgccggtggccctggacatgggcagcatgggcaagggccaggcgtgggtgaacggccgccacatcgggcggtactggtcgtacaaggcctcctccagcggctgcggcggctgcagctacgcggggacgtacagcgagaccaagtgccagaccggctgcggcgacgtctcccagaggtactaccacgtcccgcgctcctggctcaaccccagcggcaacctgctggtgatgctcgaggagttcggcggcgacctgtccggcgtgaagctggtgaccaggacggcgtgaccaggaatggagaggggagggcatgccgcacgcacacaggatgtgaataatttgctgggaagagaagcgagctgagggcagggcgcgcgcgcgcgcagacacgacacgacacgacaccgattctttcttcctcgtgaagtatctatagatacggcgtacatacggacacaatttgtgcccactatacgtacgtacaaaaaagattagtactagagtttaccgtagatctgttcttggagttggccgacgccggcacggctgcaggaactgcggctcacggccggctggtaatggtactagtagcgtggtttttgctctgcactccgcatgaatctcacggcgcacgcaggcttaattttcttagcgcaaatttgcgaaactgagttgtaaatgaggttatttattcctacgattaagtatgatacaagacgaataattatt

SEQ ID NO: 33144 - DNA, 1056 bp, Zea mays
  Clone ID: UC-ZMFLMO17068B05_FLI
aattcttctccctgtccattcggtgttatctctgggtatgtgtggtactaacccgatctgtccgttcactactcgattagggtctccttctccagcttgcgagatcggcactggttggcactgattgtagcacttcgtggcgccttattgggtcgcgggtgcggtttgcgctctacaaattttgggtttggtttcgctgaaccctcatgacccaagcgaagtccactcctgggaggagggagatgggccgggcgcgatcgccggaaccgctcgatttcttcatatggactgtcgaggatgttggattatggctggaagaaataaatcttggtggctacagacaagtatttcaagaaaatagtgtcaatggagaatatctagaaagcttgtccatgtttactactgagcagattctgcgctttattaggcggtgccatatgaaatggggagactttatcacactgtgcaaagagttgaggcgcattaaagtggcgtgccttaaaggggagcaagaagtccgcaggccatggtgggcgccggcatgcctctccgtagttttcgtgagggcagccaagcagaacaggaagtcccgtgttgtctcgttgaagctggaaccataatgcttgtcaaaagtggcatggaagctgttttcgctctgggtgcatcatgctcaactggtctgtcttatcccttgttagttcttcatatataaggtttggaacagtaatctgttgtagacaaagaaagaaacatataggtgatttgacgactagggaattgtagggaattggaggggatctattgaggaaatcctcttgctattcaagggattttctatggattctcttcaattcctggtcaccaaatcagcccataatatgcagatgtttcctggctccctacaaggtctgctctctgctctttcaaatcttcctgagtcgttatggtgcatgcatttttctaaaagaataaaagattggtcaagaagacccgtttccatttttctcctaggtgatgtaattaacagatgtttggtttgaagaatcaatttattct

SEQ ID NO: 33145 - DNA, 1337 bp, Zea mays
  Clone ID: UC-ZMFLMO17068B10_FLI
atggagggcctgggtgctcatccgtgggagtgggggcgttctcagagaatgggccgttcaggcctagcggcaatgcgctaacgaggaacgagtacagctggaacaaagaggccaatatgctgtatctggagagccctgcaggggttggcttttcatactccactgatcctgccttctacgagggtgttggtgacagcatgacagccagagacaacttgaagttcttgcaaggctggttcgccaggttccctcagtacaagggcagggacctgtatatcacaggagagagctacgctggccactacgttccacagttagcccagcgcatggttgagttcaacaagaaggagaagctattcaacctgaaaggcattgctcttggcaaccctgtgctggagttctccaccgacttcaactcgcgggccgagttcttctggtcgcacggcctgatatcggactccacctacaacatcttcacgacggtgtgcaactactcgcggtacgtgagcgagtactaccgcggctccctgagcacggcctgcgacagggtgatgagccaggtggcgagggagacgagcaggttcgtcgacaagtacgacgtcaccctggacgtctgcatctcgtcggtgctcatgcagtcccaggtcctcgtccctcagcaagggagcagggagctggacgtgtgcgtggaggacgagacgatgcggtacctgaaccggaaggacgtgcagcaggccatgcacgcgcgcctcgacggcgtgcagaggtggacggtctgcagcagcgttctggagtacaagcagctggacctccagatcccgaccgtgaacaccgtgggcgcgctcgtgaaggcgggcatccccgcgctggtgtacagcggcgaccaggactcggtgatcccgctgacgggcagcaggacgctggtggggcggctggcggccaggctccggctcaacgccacggcgccgtaccgggcctggttccaggggaagcaggtgggcgggtggacgcaggtgttcggcggcggcgcgctgtccttcgccacggtgcgcggcgcgtcccacgaggcgcccttctcgcagcccgagcgctcgctcggcctcttcagggcgttcctcgccggacagcagctgccggaatcgttccagtgacgacggaacgtgcctcttcctcgtctagtgtatgttcattgtaagcgtatgtacgtgcagctgaccgtctgtcgtcatcatccggccgctcgacactggcaaaaacaacccaaatgggttcttctccaagtgtaatcaggacgaaaataatatcattggaaggaatgagactgtgtgtcgtcggat

SEQ ID NO: 33146 - DNA, 550 bp, Zea mays
  Clone ID: UC-ZMFLMO17068C05_FLI
cgcgtcgttccgagccgtgcaccttagcctggaccactacgagaacgcccggaccttcgacccttggagatggcagcagggcaagagcaagctgcagagcgcggaaggggccagtctgttcacgccgttcggcggcgggccgcggctgtgcccgggctacgagctcgcccgggtggtggtttccgtcttcctccaccacctcgtcacgcgctttagctgggaggaagccgaggaggacaggattgtcttcttccccaccacgcggaccctcaagggataccccatcatcctacggcggcgaccggattgcgatgatctctgacctcatggctatgttctccccccttatcttcttcggatcaaggccgaaggctaagcattagatagagtaaggtggatgtcgtggctagtaggtgcatggtggtttctgccactcactcactcactcactctgttgtctgtttgttcctgttcctctctgttttctcttgctctgtaacctggacctggtacgagtcagcagccagcagcaaactcgcgttttgcctgt

SEQ ID NO: 33147 - DNA, 828 bp, Zea mays
  Clone ID: UC-ZMFLMO17068C10_FLI
aaaatttaaactataaaaaaattcactgaaactttcaagaatttacaagtctgccagtcctgaaacacataaagtccgatcgtcggtctatgtttgcctgaatcctgatccactgagagtgccggacacagtctcatcatgcccctgaaagaatatccactgacctttcatacagcacaagagaggggaaaaaacaaactacggaaggcaaactagacgcgccaggactggctagctcgccattcatattaacatgagagaatcgcaaaacagcgttgctgctttccagggaattgaatagtttgctaatgttcaggaactccagctcctgcagctctcctctctgttcttccgtgcaacttcctgacatctcggtcgtcctccgatcgctacaagtcctttttatgtagcagcagggacgacttcttattgggatccctcgttatgtttgggcgtgcttttattgtgctcacttcttgtaaatttctctctctctcccctctctcttaatggataagcagagctcctgccatttgctttaaaaaaaacctagtcctttcggacaaatcgatctccagtatcaatcgcgaggagtggtgacccgttcgttggtcctcattccatcaggaagctgacctccatctgctgcatctgtcctggccttctctctaatgttcagcttctcatgttcagtgatctcttctccctctgtttttttattccgagtcactgtccaagtcgtgcatagctttcaatcccctggggcgcttcttggaaaccttcttctctcggacttcgtatctttcaagagtcaggtcacacagccac

SEQ ID NO: 33148 - DNA, 547 bp, Zea mays
  Clone ID: UC-ZMFLMO17068C11_FLI
agagagaggacggcagtcacagtcaggcagtctgcaggcacatccatggagtactactacgcctaccagcacagcaacagcaacagcagcggcggcttgagctcaaaggagaagaggccgccgctgaagcgggggcagctcaagcggcagatcgtgaggaccatcagcaacctcgtggtgccgaggcacgccgccgtcgctgggtcgagggagaaggcagatcgcggcagcggattcggcggaggacggagctacaactgatgatggatctctcggagaaggcgtgatcagagatacgattcgcagcgccaggtttgtgtgtacgtactacttgccgatgccgatgcaaaagcagcacgtagcgcatctgttcttcttagagcttagtaatagcttaattatccttgttttcccccctgttgtacaaaacaaaacttgcaggcttttttagatggttgatagagttttgttacataaatgtaatgttagcttcatagcttgtgtgaggtcatgtaaagttccttttgtataatacgtacatcttgcg

SEQ ID NO: 33149 - DNA, 1280 bp, Zea mays
  Clone ID: UC-ZMFLMO17068E07_FLI
agcagagatggggtccggcatgagccgcggccggcggcgcggtttcggcgcaggggcgtcgggagggatgctcccactgctggcgcttcaggttctgatcgagtacggccgcgcgggcgcctctcggccgcccgtgacggcggcgttgctcgccggcaacgcgctcatctatctccgtcccggggcgctcgacgggatcctgccctctgtcacacgcgtctccttcaatccgcggctcatcgtcgagaatggcgacttggtgcgcttcttcttgtcaccattctaccacttgagcgaaagccacctgttctacaatatgacatcgctcctatggaagggtattcagcttgaaacatccatgggtagtgtcgagttcgcttccatggttgctgcattgcttgggctgtcacagggcatcgcgctgctcttgtccaaaggcctactcttgcttggtgattatactgcgtactacgaccaatacgcggttgggttctctggtgttctgtttgccatgaaggttgtgctgaacgcctggtcagaagattttgtctatctgcatgggatggtcattccggcgaaatacgctgcctgggctgagttgatcctcatccaggttttcattcctggcacatcttttcttggccatcttagtggaatacttgctggattggtttacctttggctgaagcgggcgtttaatgggccagatcccctcactcttctggtgtcaagcattaccaaagtcgtgacctggccagtaagatttgctcgggatcttctatggtctgcccatccacagggacgctttagaggccggggcagggttgggcgccggcaatcagcaagagatactcctcgaggtctatggagatgctcagcctgcacctatgacaactcagtttccacagatatctgtgagatgtgcagcactgcacgagaggaccatgatttttcgctgaggcagtatcatcaggctggaggtactggagaactcacagttgatgagatacgccgaaggaggctgcaaagattcagtagatgatgtaaatccattgttatcagcacactttgtgcggcgctgaacgaagctctatatgagtatgtatgatagctccattcctctgctacatagcgtaggcatatttggttcttctcgtgatggagaatgctttacattattgagttgtttctcatttttgaaggagacagttactgatgtaattttaggtacatcaaagccatagaagtatagtaatacaaattatcaagggcatatatat

SEQ ID NO: 33150 - DNA, 1568 bp, Zea mays
  Clone ID: UC-ZMFLMO17068F01_FLI
aaatttggcagccataggccatagcccatagcccccgctgccccccgggcgcagatcttttctgggcttctggctcccctctcccgccgatcacgccgcctcacctcgccgggcggcgtgatggcgacttccggggccggcgaccacgggcagggccagggccaggggcacggccgcttcgcgtcgtccctgacggcgcgctactcggactgggtgctggagacgctggacgagctcccagggagcttcctgctcacggaccccgccctgccgggccaccccatcgtgtacgcttcccggggcctcgccgcgctcaccggctacgcgccgcgcgacgtgctgggccgcaacgcgcgcctcttccagggcgccgccaccgaccgcgccaccgtcgccggcgtccgcgaggccgtccgcgcgcaccgcccgcaccaggccgccatcctcaactaccgccgcgacggcgccccgcactgggtcctcctccacctcgcccccctattccacgcccgcgacggcaccctgctccacttcctcgccgtccaggtgcccatcgcccccgccgccgtcgcgcgcggggcgacgtgccacacgacggggcatctgctagccgcgtgccgtgacgaggccagcagggtcgcggaggatttcccctgcgccacccacgcgggcaaggtgtttgtcgatatggacaagagaggtctggaggccgaggaaccacgtgtagctagcgatagtgagaaagatatggcaataagtacggctaacagcattgtctctgcgctgaacagctacagcaagctaactggtctagtggtgagcaggaagagatgtgactcgattggcatcccagcactcagttcgtcgttaaaactctctcttggactgactcccgcttgcctgacatgccaattatttatgctagtgatgcttttacatcattaacaggttactcaagagaagaaatattgggctgtaactgcaaagtcttaaatgggccaggcactagcttggaggttttagaggaggtgcgggccaggattatatagcttgtatgaccacattctccataatatagcttaccttttaaaatttatattcaaaattggacgtacagataaatcagcatatttgttctgagcaggcatgcacggtggatctactgagttacagatggaagttcattctgcgatcatctacatgtatctcctatccgagatacttcgggcaaggttcgcttacatctttctcaggtggcctttcatatctgggttcaccttgacatgggtgcaaagcacgattttagtgggctgacccccgagaaatggctgcttggcgctgttggtgcggtgagggttgctgtgagaggcttgtcggcatcaggtagcctgttgagaccaccatcccaatatcagttttagtctcctcgccgtttcatgaccacggcgaccggccttccacgatgtacattgctgcttgctattctgtgtaaagcaactgcttagcatgacaaagtaaatgagttcgttttgaaggaaaatccatggtaaatacaagatgttggtgtg

SEQ ID NO: 33151 - DNA, 1502 bp, Zea mays
  Clone ID: UC-ZMFLMO17068F12_FLI
gcagtttggaccggattctagatgagagtttctcaaaacagaatggagaacattctcggtcaagtctgagtagtatggtgtcatttagtggagcatctgccacagaacccgttgttctagggagtgtcacatcggaaaattacgtggaagatcttacaggcgttagagatcgtcctgttgcaacactaaattctggggaagagctccaaaaggtctgtgatttactttatgagtttaaggatgaaatgttgggggcctccgcagcgaagtgtataaataagagcagcccgtcacttgaagccttgcttgctgaatcatctgattctgaagcgcaaatctctgatctggagggtactgacagtggtgctggcattggctcaggtcgactgtttagtacactctcatcttcagatgacgatgatgcttctgctgcggacgagcctttagttgatgttgctgacctgactacgccaccagagcgatatacttctgtccccagcgacgagcctctggttgacatagctgacctgacaaacccttcagggatagatgcttcttcagtgaatgagcctccggctgatgtggttgatctgctacatacttcaaacgagcctttggtcagtttggatggtctgccaaaccatccagagatgtgttttggtgggagcagtggagaacatatcgacagtcttatataaaggataaggccatgcggtactgatagttcaaagatgagcggaacatataagtccatgcggctgatgtgaacgacagtctcatataagtgtattccaagttatgcataagtttttgtacataaataagtctttgtgtctgcatcagtttatactaaatactatgaaagcagagtaactttggttttggttgctgttctcccgtttgtgtaaatccattacaactaacactttgccgatataactttttactgttgctcgttctttttcaagttctgagcattgcaggagaaatcaaagttactacttaccagacgcgcctatattggtaccatttcagtttaaactgaagtcaccagacctgagttacaatcaagaatcaacccttcatctagaccagaccagacaagtgacaggtgaagctcggaacatgctgtgttcttttactttcgatggaacacgccatgttccttccataagtaagcgaacagagtaacaggcggcgctctgttcacatgtgagcatgcctgccacctgctgcgcgcctgcgctccgtgtatagacgcacacgggctagccctgtctatggtcctggcgaagtcgtcccgccattaatacgagacacggcccggcccgcgcggcccattagtgggtccgactccgtcttcgctctgtctaggttcaaggaataggaatccgtggattcgcattcccgcgagatcacaaacataaagagacacatgagaaacaatagtggataaacttttctcttgttatttagtatgtgcctgattggatgcctgtatc

SEQ ID NO: 33152 - DNA, 547 bp, Zea mays
  Clone ID: UC-ZMFLMO17068G11_FLI
ttcgagaagagccggcgcgatgagctcgccggcaaggtcgaccgtctcggcggcgagtgggggagccgtctcggccgccgaagacgttgccgattccatcgacgcgctctaccgcaaggacgagaccatggctgaactcaagtttgaggtgatggaagcgctgcggaggtgaggtcgctcgacgatgacaattggatgttcgcgcgcgtcgcggttccgcatcaatctcgaatccagaactggtgcttacatgcccaagcaacacgggaaactctcggagctggggcaagcatccaagaaaacaaggaacttctagggtgtagatgtttgtgcttgcaagaagcctagttcatgactccatgatgatagtgaaggtgggattccatctaggctgtagcgtcaaggatgattttgtccagttccaaatcaatctagttgcttcctgctagttcaatttcaagcacatgtaaggattttcgagtgattgagatgtcaatgtcatggtattgtactattgttcatgacttgtgccctttctatcttttac

SEQ ID NO: 33153 - DNA, 558 bp, Zea mays
  Clone ID: UC-ZMFLMO17069A01_FLI
cttgacccgagaccagtacctgcgcgacgccacgagggtgcggttctacaggagctacatcggccagctgaagaaggccatagaccagggagcgaacgtggctggctacttcgcctggtctctcctcgacaacttcgagtggctggcagggtactcgtccaagttcggcatcgtctacgtggacttcaacacgctcgaacgccacccgaaggcgtcggcctactggttcagggacatgcttcagaagcattgagatctccagagccgagcctgagcacggaaggtaccattttgttcagcttcgcctagtgtttgggatggcccaatggttcaaatccggctcagtgcctggctaccaaaatgggaacaaaggacagctaccccgatcaattgtgatgttgtgtgtttgtgggtatgttctctctggagtttgagctgtggttattttatcgtgttggttgatcgtgtttgaaatgcttaattcaggactgtgacatctcgagttgttttaactaaatcttataagaactaccctgatcgagcgctgggtaattggat

SEQ ID NO: 33154 - DNA, 1330 bp, Zea mays
  Clone ID: UC-ZMFLMO17069A04_FLI
ctgacagcaaggttgcttgtgagacctgcaccaagaccaacatggtcatggtctttggtgagatcaccaccaaggccaatgtcgactacgagaagattgtcagggagacctgccgcaacattggttttgtgtcaaacgatgtcgggcttgacgccgaccactgcaaggtgctcgtgaacattgagcagcagtcccctgatattgctcagggtgtgcatggccacttcaccaagcgtcccgaggagattggagctggtgaccagggacacatgttcgggtatgcgaccgatgagacccctgagttgatgcccctcagccatgtccttgccaccaagctaggtgctcgtctcactgaggtccgcaagaacggaacctgcccctggctcaggcctgatgggaagacccaggtgacagtcgagtaccgcaatgagggtggtgccatggtccccatccgtgtccacaccgtcctcatttccacccagcacgacgagacagtgaccaatgatgagatcgctgctgacctgaaggagcatgtcatcaagcctgtcatccctgagcagtaccttgacgagaagaccatcttccaccttaacccatccggccgctttgtcattggtggacctcacggcgatgctggtctcactggccgcaagatcatcattgacacctacggtggctggggagcccatggtggtggcgctttctccggcaaggacccaaccaaggttgaccgcagcggagcctatgtcgcgaggcaggctgccaagagcatcgtcgccagcggccttgctcgccgcgccatcgtccaggtgtcttacgccatcggcgtgcccgagcctctctccgtgttcgtcgacacgtacggcaccggcgcgatccccgacaaggagatcctcaagattgtcaaggagaacttcgatttcaggcctggcatgatcatcatcaaccttgacctcaagaaaggcggcaacgggcgctacctcaagacggcggcctatggccactttggaagggacgaccctgacttcacctgggaggtggtgaagccactcaagtcggagaaaccttctgcctaaggcggccttttttttcagtaagaagcttttggtggtctgctgtgcttaatcatgcttttatatggcttctacatgttgtggttctttcttgatctgcaccgcgcttatcgtttgtgttgtactgccctaataagtggtgcttatgaggactgtttctggttttgctgcttatgttgtaatgctttgaaacaatgaaagaagctacaggccacagctattttgagaagtaatggaacctcgtgccgtttttgatt

SEQ ID NO: 33155 - DNA, 1549 bp, Zea mays
  Clone ID: UC-ZMFLMO17069B05_FLI
aatgccttcctatcagaggcaagctatatgatgttgcttgtgttgatgatgtccttaacactattgcttccaaagtgcagcaaaatatcattcaccttgtcggtgacatggtaacagagttttttgttgcacatacatcttcatcgttgaatcaacaacagcttatggaagtcatttcacagatgagtctgaagtgtccacaagaagatgctaagtggtggtacaaattttattttcggcttgaagtttttttgcatttcaataagccatttccttttgaagaagcagcatctccagagcatgtcatagttgctgagtctatttgcaagattttgaggacgttttatcgtgttattgaagtcatttctgcctctagttctccgacagcaaacatgtacttcaatgagatatggaaagtgagaacagtcttgcaagaagaagcatcaagtgagcatgcagaaatcactgcgatggtcgcagagatgcatgaaacattcaatgagtactggcaacattcatacttatggttatgcatacctgttatcctagaccctagattcaagttcggtttcattgagttccgtctgaaacgagcttttggattaaaatcagcaagctacttatctggcatacgtgaaacactccaggaactcttcaatgaatactgcagtccagtggatcagccgaatgtgcgtgtgccaaaaagcgaatcttttagtctagatgacaacgactcatttgaagattgggaccagcacctcaatgagcaagcgagcagtcagaaatccacggaactcgataactaccttgcggacggtttggttccaaggaaggatgacttcgataacctgaactggtggatgtgtcacgccacaaagtacccgacactggcggctatcgtgcaggacatcctggcgatgccagcatctgctgttccatcagaagcagcgttcacaagcagtggaccagtaattccaaagcaccacagcatgctaagcatcaagaccattgaggcacttgtttgcactcgagattggatgagataaagcggttacggtcatactgtgctctgtttatcgatatggctctggaacttctgttccttgcatctttgcctataaacatgaatacatgacgtgctgctgctggcccagaaaacttggcaccccagattgtgtaccctgaactctgaacaaccaatgatgggatgcagttttgttcaggggatggtcctggctcccaaccagtgggatccagtccccagccaggattgggtggtggatcctgtgaaattcctgcgttagaaacaggccctcagaggtttggtaggtgtacctgacttggttccatgtgtgtacagttgctcgatgtagttgcagatgtagttgcagatctgcggcccaaaacagagctaagctaattgtaatgttgcaggcatgctttattggtgatcttggacacttctggttctggaatagcatccctagtggctataccagttcgttgcaaatggactcgcggttgaaagaataaactgagctactacttc

SEQ ID NO: 33156 - DNA, 1087 bp, Zea mays
  Clone ID: UC-ZMFLMO17069D08_FLI
atcgtgctaattctactactacttcggaaccgccgccgctcccggcgcctcggattatcaactaccgcaggaggtcgcggcggcaggatcggtggtccagcgtgcgatggcggcggcgcctaccgtgcggggctacgggccagcgtcgccgtcgtcgtcgtcggtggcgctgcctcggccgcgatcgcgggtgcccgcaccgctcgtgcccgtgacgacgcggcggggggcgccgtcggtgcgcctgcgcgcggcgggcgcggacacgcctccccgcggcggcctgcagctccagcggcgggaggaggacgaggggctgccggggaccgtgttgggccgaggggaggacgatgaggtgtcggagaaggtcggggaggagaaggtggagaggtggatgcgggactcgatcgcggagatcgtgcggcacgtcggggaggcgccgttcctggtgcacctgttcagcagcggcgagggcgagcgcgtgacggtgcggcgggagcccgcggcgccggagagctggccggacgtgcggcgccggtgggggccaggcggggcgcggaggccggacgggatcatcctggtcgagcaggtggcctcggacggcggcggggcctccgccgcctcggaggcggcgcggcaggtgtgggggctggtggtgcaggcgcgcggcatggagcgcgcgtcgtgctacgtgctttccacctgccgcgtgcgctcgtcggccgggttctgcacgcacttctgcctcgcgcgggcgcagtgcttcggcgaccctgtcgagctccagctccgcaacgcctggctcaaccgcctggccggccgccggtagccgcccgtcggctgctgctgctagtgctactgatactactaataggattcgaatcgatgctccaaggaccaaatgcaatgatgcctcctcttcgctggcaagaacgaggaagagaagcttgcagattggatttgaagcaggggagacgaacatatcttttcgttcacttggggttctcccggaattggatatcaattgtacagattattgaatgtaaatttgcctattcaatcaagaagcaattcatcgagtcaaatt

SEQ ID NO: 33157 - DNA, 2040 bp, Zea mays
  Clone ID: UC-ZMFLMO17069F04_FLI
attctcaatgaacgtgagaaattggtttccttctatattgagctttttattctattatatatgactaaaacagctacttcatacactatttccacttcaaggctcttgttcttactagctttctagtttgcattataataatgcacctttctggcaaaccaacactgctctcaagaaaatgttggtcaatcccaacataattatatttctagttcaagttttacacggtaaggctggccacttgaaccaatttttagttatttatgctattcaaattaatcaatttagggctagtttggatactttgggattagagtgttttggagggattggagagggtgtaaatccccaatagatcaaatactctctctcaatacatctcaatccactctaatcccactcattactagagtacccaaactaggccttattgggggctgtctagccctaaaactggatgtatctggccaaatgtgccaatgtgataaacttttatccatgtttattttttattgtataaaaattatcatcatatcatttccacctcctgctgggactgtagaacaagaacttttgcatgtatattgcttcaaggtttgtctcagccacatgtgggaacactgtaggtagtggattctatggttgttgagagagcccgtggagaatctcaaagtacatctggatcactccagtcactctgttggggatcttctgcctttggaggaattgtgagtgcttatttcagtggttcacttgtggatacttatggagtaagatttgtctttggtgttacagcgtttttacccctgatgacatctgctgttgcagttcttgtaaatgaacatggcattccttctggagaacacaatacctttctctctggttccggatttattgagagctctaagcagcatgtcaggcagctttggacttcagtaaagcaacctaacattttgttgccgaccttgtttatatttctttggcaagcaacaccgcagtcagattctgctatgtttttcttcatcacaaataagcttggattcactccggagtttctagggcgcgtgaagcttgtaacctcttttgcatccctgcttggtgttgggctctacaactattttctgaaggaagttgctctgaggaagatttttcttgtgacaaccattataggttcagctcttgggatgacacaggtgcttcttgtaactgggctaaatcggcagcttgggatcagcgatgagtggttttctattggtgattcattaatcatcacagtccttggtcaggcatcgtttatgccagtcttggtgttagctgcaaagttgtgccctccaggaatggaagccactttatttgcaactttgatgtccatttctaatgctggaagtgttactggtggtctggttggtgctggtctaactcggatatttggggtcactagggatacctttgggaacctacctctgttgattgtcgtctgcaatcttagttcattgctgcccttacctcttttaggtctccttccagagggatcaggtgacaccgataacggagaaacaaaaaataactgatttactgagggttttatctccattgttctggtactcaagtattgcataccacagtgcccagcttcaactcagatatggcccatcgagttgaaattcaaaaggccagtagagaaatacggaaatcacactggatttaagttcagtcggtcaccgccatcatcaggcagtatctcctgtgactattaacctgtgtgatggaagtgattcattgatgatctgcaaatgatctatggcgcacaggtactcacctctttttagtttctaagctatcttgtacacgaagacaaggtaggttttatcttttctctagagtctttgagtttttgttgttaatgcgaccccatgagaattagactagtggtcaaaggctattaattggggattaccttgcgaagtcaaatgtattgtgacaaaaaaaaggagggagtatgtatacattattggaaacctagagtacggaaatgtaaag

SEQ ID NO: 33158 - DNA, 935 bp, Zea mays
  Clone ID: UC-ZMFLMO17069H06_FLI
ctctcccctccccaactccggcgaagggagcagaaacgttggcgtgttggttgggtggcgtcggcatggacgaggcaacgaagaagaatgtggaggctacggtgctggagatcctccggggctccgatatggagtccgtgacggagtacaaggtccgcgccgctgccagcgaccgcctcggcatcgacctctccatacccgaccgcaagctcttcgtccgcggcgtcgttgaggaatacctactttcactctcctccaaggaggaggcgaaggcggaggaggagggcgtcactggcagggagagcaagggcaaggaacacgaagaggaggacgaagaggatgacgatgaggaggaggatgaaggtaagggtggcgggaagagagagtacgatgaccaaggtgaccttatcctgtgccgcctttcgagcaagaggagggtgactttatcggagtttaagggcaggtcgttggtgtccatccgcgagttctacgtgaaggacggcaaggagatgccctccgccaaaggtatcagtatgactttggagcagtgggaagcattttgcaatgctgtacctgcaatagaggatgccatcaaaaagcttgaagattcagactgaactggttttaagagcctcttcttatgcccgtgtcaaatgaaaaagcctgggaagcatttcgcaatgctgtatctgcaatagatgatgcatgaaaaagcttgaagattcagacagaactggtttaggagcctcttattttgcctgtatcaaataaaaaagcctatttctgacccttaacgagggccatatatgtgtcttgcaagagctaagttctgtaaaagatttctacatgtaccatgtgtaggagttaggatagagtgatagacgtactgctgcatacagttcggaatatttgctagtaacaagtaatctaccatt

SEQ ID NO: 33159 - DNA, 1236 bp, Zea mays
  Clone ID: UC-ZMFLMO17070A07_FLI
cccagcacattaagtcattaatcgccaaggaccaggacaatgagtctcaaacaaaactcgaagcagggagcagcaggaagaaataaaaaaataaaacaagccgacggcgagcaatccacaaggaaggcaagtacatcctattcgccgtacaagagctcgccgccggcgacctgtgcgaagggaggttcgtgttcagccgcgagacgagccgggccaggctccggagccccgaggacgatgacaagagcaacctcataaaggacgggatgaaccccaagagcctgctgcagacgctgctgatgcgggccggccacaccccgcccaggtacaagacgaagcacctcaagacgaacgagttcagggccgtggtggagttcaaggggatgcagttcgtggggaagccgaagcggaacaagcagctcgcggagcgggacgccgccatcgaggcgctggggtggctgacgcagacctccggcgtgaatgctgtcttcatccgtcgggagcaggagctccctcctagactcaatctgcagcggcatgtgatttgactgaaaattgagcaacgcggctatacaatacctgttggggtgctgctcccggacgaagcggatgccaccgttgcagaggttgcaggcgcctgcaagcacagagcacttcacccccacaggctgctgggcgcggacgagtgtcgggttacgtcctgattctcagcagcgagataccccgtagcgcccccaagttgctcttcttcctaggctgcgggtcgcggacgccgtacctggttcggtgctcgccgatatgctgcgcgcggttctttagatcgacgatctgggtggcgatgttgcggcaggggtaccacgtccggatctcgtagagaatcttgcggacgaccgtcacctagccgctgcccctggggtctggacggaggctgtaggcgaagtcgtcgatgcagtcttcgatgtcgtaggcgacatcccagatctgcttcatccagtcctccgtctagttgttgtggccctcctcgcacttgctcaggctgctgaggaaggtctgcatgctggctagctcgtcggtgataaattggatgtcgccccggacgccacggatctggtgcgcggaggtagtagctgggcgagggatttcgtggagcgctcagctaggctagggcacgcgcggatcgcggagagggggaggcgggggcatcctatgcactggatctgggcgtggatgttggcg

SEQ ID NO: 33160 - DNA, 1844 bp, Zea mays
  Clone ID: UC-ZMFLMO17070B03_FLI
gtggacgagtggtgtgccgtcgtccggttcccgttggtttggcgatgaggcgcgctcgcggtcgccgcgggctgctgcttctcctcggcgtggcgctctcggcggctgcgctgctccgtggctgcgcggggcagcaaggggaggacggctcggacgcccctgcggcggcggcggcggagacggcccccatggaggagaaggagcgcagggcgctgtacgccgccatcgagagcttcgtcggcaaggggtggaacggctccgggctctacccagacccctgcggctggtctcccatccagggggtgtcatgtgatctcttcaatggcctgtggtacccaacagtgatgagcattggcccagtccttgacaactcgctgcagtgcggccccgacgccaagttcagcgcccagctgttcgacctgaggcgcctccggacgctgtctttctacagctgcttcccggcgagcaaccccacggccatcccgaccggcagctgggagaagctggcggggacgctggagacgctggagttccgcaccaacccgggcctgaacggcgccatcccggcgtccctcggtcgcctggccagcctgcagtcgctggtgctcgtggagaacaacctgacggggcccgtgcccgcggagctgggcgcgctgtcgaggctgagacggctggtgctgtccgggaacgggctgtcggggccgatcccggtgacactcggtggcctcacggggctcctgaagatggacctgagcagcaacctgctgcagggcagcatcccgccggagctcgcggggctcaggagcctcacgctgctggacctcaggaacaacagcctcaccggcgggctgccccagttcgtgcagggcatggcgtcgctgcaggacctgctgctctcgaacaacccgctgggcggcggcctgccgcagtccggctggggggcgctggcgggcctggccacgctggacctgtccaacgtcggcctcgtgggcgccataccggggtccatggcggccctgacggggctccggttcctggcgctggaccacaaccgcctgacgggggccgtgccgcccgagctcgcccggctgcccagcatcggcgcgctgtacctgaacggcaacaacctgacggggacgctggagttctcggccgggttctaccagcgcatggggcggcggttcgcgtcgtgggacaaccccgggctgtgctacaacgtcgcggccgtggacgcggcccacgcgccgtcgggcgtggtggtgtgcaaggacctgcaggagcccagcgtgggcggcggcgcgcgggacggggacggggacggggacgcggaggaggacgggacgaagcccgaggcgggctccagcctcgtggcctcctcgtcgtccggcatgccggttggcagtgtcggtgggctccggtacctggtggtggttcggggaatggcggctgcggttcttgggttggtgtccctcctacaatagcaagcaagcaggttcagaagaagaacacggagaaacttgaagtaatgctaggtaggttagcacgaagtagtttctgcgcgttctctgtgatcttttggcatttgtttttggctgctggtggcttaccatcgtcagatggtgacggaggaaggagggaacatggatctggatggtgtgagccacagattacattacagtagtagagtaaactatgagagttcttgtggactgaaggtgtgtagtggtggatagggtagcttctccggggttcttttgtgtgtaattagcctgtgtcgccctgtggtgtcatgttacaacagcaagtggaaatctaagctggttcgtccgttgttggagaatcag

SEQ ID NO: 33161 - DNA, 928 bp, Zea mays
  Clone ID: UC-ZMFLMO17070B08_FLI
caacttggagtgctcgctcaggtgcgcagtacaagtggctggaggcggacctggagaaggtggacaggtcggtgacgccatggctgatcgcgggctggcacgcgccctggtacaccacctacaaggctcactacagggaagccgagtgcatgagggtggagatggaggagctcctctacgcctacggtgtcgacgtcgtcttcaccggccacgtaagccttcggagtcggctgcttagtactaactagctcgctcttgtctatctgcaagactgacggatgatggtctgagactctaagctgagcaagaacgaacatggtggtggtctgtgaccaggtgcacgcgtacgagcggtcgaaccgggtgttcaactacacgctggacgcgtgcggccccgtgcacatctcggtgggcgacggcggcaaccgcgagaagatggcgacggcgcacgcggacgaggccggccactgcccggacccggcgtcgacgccggaccccttcatggggggccgcctctgcgccgccaacttcacgtcgggccccgccgcgggccgcttctgctgggaccgccagccggagtacagcgcgtacagggagagcagcttcgggcacggcgtcctggaggtcaggaacgacacgcacgcgctctggcggtggcaccgcaaccaggacctccatgccgccgccgccgccaacgtcgccgccgacgaggtctacatcgtcagggagcccgacaagtgcctcgccaagacggccagattgttggcctattgattgatccatcactcctagctactcctactctggtcgctgcctattgattgatccatcaatcctgttaattttcagaagagtttcagaagagtcttaatactcctagtcttaatagtcctagctatgcaaatatgcagtgttaatttgcggcagt

SEQ ID NO: 33162 - DNA, 1020 bp, Zea mays
  Clone ID: UC-ZMFLMO17070B09_FLI
ccgagacgcgtacgcggcattctccttgggtgcgggggttcctctcgagtctcggcaacgacgaaaacgaaaataccgagtcgagtcagcgatgaatcccttcgccaaaaaaccaacaccgcgagaggtgatgcggagcagcaagcgggacctgacgaatgctacgcgagggatcgagagggacattgcgtcattacagcaggaggagaagaaactcgttgctgaaattaaaaggacagcaaaaactggcaatgaggcagcaacgaaaattctagcccgtcagctgatcaggttaaggcagcagatttctaatttgcaaggtagccgagctcagattcgggggattgcgacacatactcaggcaatgcatgccaacacttcagtggctactggtttacaaagtgcgagcaaagcaatgggagctttgaataagcaaatggaacctaccaagcagatgaaaataatgcaagaattccaaaagcagtcagcacaaatggatatgacaaatgagatgatgtctgattcaattgacgatgtcttagacgatgaccaggccgaggaagaaactgaagaacttgctaatcaggttctggatgagattggtgtagacattgcatcacagttgtcctcggctcccaaaggaaaaattgctgggaagaaggttcaggttgatgaaagttcggagttggaggaactagagaagagactggctgctctaaaaaatgcataagatctgtttacaaccctctcctctatgcacatagcaagcctgtcgtgtaccttaattccaaatcttcattcgacacgcaaagtcactgtgatttgtatgtatcaaaaggaagatgatgcaaacccccaagtttttgggcgaatcgatgttgctgctgttcgtacacactcacgtataagatggggctgtgctgccttattagcgacatgattcagagcaagggattccatagtcttgtaaagaagtttgattatttttacatgacagctttttgtttttggtcgttcgtt

SEQ ID NO: 33163 - DNA, 1558 bp, Zea mays
  Clone ID: UC-ZMFLMO17070B11_FLI
ggggtcggatctgagacgagacgagtcccctcgcctcacccaaccggaacgaacaagttaccatctcatcccaaccccgcctcgaccggatctcgtcggactcggatccgcccgaccaccccgcgccgccgcagatcaaagaagatggcagctctcgacaccttcctcttcacctcggagtctgtgaacgagggacaccctgacaagctctgcgaccaggtctcagatgccgttcttgacgcttgccttgctgaggaccctgacagcaaggttgcttgtgagacctgcaccaagaccaacatggtcatggtctttggtgagatcaccaccaaggccaatgtcgactacgagaagattgtcagggagacctgccgcaacattggttttgtgtcaaacgatgtcgggcttgacgccgaccactgcaaggtgctcgtgaacattgagcagcagtcccctgatattgctcagggtgtgcatggccacttcaccaagcgtcccgaggagattggagctggtgaccagggacacatgttcgggtatgcgaccgatgagacccctgagttgatgcccctcagccatgtccttgccaccaagctaggtgctcgtctcactgaggtccgcaagaacggaacctgcccctggctcaggcctgatgggaagacccaggtgacagtcgagtaccgcaatgagggtggtgccatggtccccatccgtgtccacaccgtcctcatttccacccagcacgacgagacagtgaccaatgatgagatcgctgctgacctgaaggagcatgtcatcaagcctgtcatccctgagcagtaccttgacgagaagaccatcttccaccttaacccatccggccgctttgtcattggtggacctcacggcgatgctggtctcactggccgcaagatcatcattgacacctacggtggctggggagcccatggtggtggcgctttctccggcaaggacccaaccaaggttgaccgcagcggagcctatgtcgcgaggcaggctgccaagagcatcgtcgccagcggccttgctcgccgcgccatcgtccaggtgtcttacgccatcggcgtgcccgagcctctctccgtgttcgtcgacacgtacggcaccggcgcgatccccgacaaggagatcctcaagattgtcaaggagaacttcgatttcaggcctggcatgatcatcatcaaccttgacctcaagaaaggcggcaacgggcgctacctcaagacggcgcctatggccactttggaagggacgaccctgacttcacctgggaggtggtgaagccactcaagtcggagaaaccttctgcctaaggcggccttttttttcagtaagaagcttttggtggtctgctgtgcttaatcatgcttttatatggcttctacatgttgtggttctttcttgatctgcaccgcgcttatcgtttgtgttgtactgccctaataagtggtgcttatgaggactgtttctggttttgctgcttatgttgtaatgctttgaaacaatgaaagaagctacaggccacagctattttgag

SEQ ID NO: 33164 - DNA, 2675 bp, Zea mays
  Clone ID: UC-ZMFLMO17070C03_FLI
ggaggaacggaaagtaatacttcttgttcatgacacaaagccccccttcctggatgggagagttgttttcacaaaacaagcagaacctgtaatgcctctgaaggacccaacatctgatatggctattattgcacgcaaaggttctagtctggttagggaaatccgtgaaaagcaaagcatgaacaaatcaaggcaacgattttgggagcttgctggatctaagcttggcaatatcttgggtgttgagaaaacagctgaacaggttgatgcagatactgctgttgttggtgaccaaggtgagattaattttaaagaagaagcaaagttttcacaacatttgaaggataaagcagaagctgtcagtgattttgcaaaatcaaaatccctttctcaacaaaggcaatatcttcccatatttactgtccgggatgatctgctacaggttgtgcgtgaaaatcaagtggttgtggttgttggtgaaactggttctgggaagactactcaactgactcagtatctgcatgaggatggatatactaccacaggagttgttggttgtacccaaccaaggcgtgtggctgccatgagtgttgctaagcgagtcagcgaggaaatggagactgatctgggagataaagtcggatatgccatacggtttgaggatgtcactggtccaaacactataataaagaatattttatgggcctgtttgcagtatatgacagatggagtgcttctccgtgaaaccttgaaagatgctgacctcgacaaatatcgtgttgttgtcatggatgaagcacatgaaagatcactcaacactgatgttttgtttggtatactgaagaaggttgttgcacgtagacgggattttaaactaatcgttacatctgcaaccctaaatgctgacaagttctccaagttcttcggaggtgtgcctgtattccatattccgggtcggactttcccagttaacattatgttcagcaaaacaccatgtgaggactatgtggaagctgcagtgaagcaggccatgactatccacataaccagcggccttggtgatatcctaatcttcatgactgggcaggaagaaattgaggctacctgctatgcgcttgctgaacgcatggaacagttaatatcgtcatccaccaagactatccccaagctagagattctgcccatctactcacagttgcctgctgacttgcaagccaagatttttcagaaggctgaagagggcgctcgcaagtgtattgttgctaccaatattgctgagacctcattaacagttgatggtatcttctatgtcattgataccgggtatgggaagatgaaggtgtacaacccgcggatgggtatggacgccctccaggttttcccagtcagccgggcagctgccgaccagcgtgcaggtcgggcaggaagaactggccctggcacatgctacagattgttcacagaatcagcctaccagaatgagatgctccctaaccctgtgccagagatccaaaggactaacctggggaatgtggtgcttttactgaaatccctcagagttgaaaacttgctcgactttgactttatggacccaccgccccaggagaatatcctcaactcaatgtaccaactctgggtgttaggtgcattgaacaatgttggtggccttacagaaattggctggaagatggtggagttcccgttggatccaactctggcaaaaatgcttcttatgggggagcagctagagtgccttgatgaggtgctgaccattgtatccatgctatcagtgccgtcagtcttcttccggccaaaagaccgagcagaggagagtgacgcagcaagggagaaattctttgtcccagagtctgaccacctgacactcctgaacgtgtatcttcagtggaagtcgaatcagtatcgaggcgattggtgcaacgaccacttcctccatgtcaagggtctccgcaaggctcgtgaggtgagatctcagctgctggacatactgaaaaccctgaagatccccctgacatcatgccatatggaatgggacgtggtgaggaaggctatctgctctgcgtacttccacaattccgcccggttgaagggtattggggagtacgtcaactgccggaatgggatgccgtgccacctgcaccccagcagtgcgctatatggccttggctacactcctgactatgtcgtctaccatgagcttgtcctgaccaccaaggagtacatgcagtgcgtcaccgcagttgatccacagtggctagcggagatggggcccatgttcttctctgtgaaggagacagacacctctcttcttgaccacaagaagaggcagaaggaagagaagacggcgatggaggaggagatggagaagctgaggcggcagcaagcagaggccgcgcgcatggagaaggagaaggaacgggagaagagagctaagcagcagcaacaggttgctatgcccggcctgaagaagggtgcgacttatctgaggcccaagagaatgggtctgtagataagacctgatataatataacttaactgtctccggtgattttgttactaggctgagggaacttgtaatgtgtagcctgctcaagcagcatgtaaaacaacacgtcaatgtgaatgtatacaacatcgacatgtgaaaaaatgaaaag

SEQ ID NO: 33165 - DNA, 978 bp, Zea mays
  Clone ID: UC-ZMFLMO17070C12_FLI
tcttctcggcctcctccgcgtcggcgccctacggctacggcgccggcggatggagctacgactcgctcaagaacttccgccagatcacccctgccgtccagacccacctcaagctcgtctacctcaccctgtgcgcggcgctggcctcgtcggcggtgggcgcttacctgcacgtggtctggaacatcggcgggacgctgacaatgctcggttgcgtcggcagcatcgcctggctcttctcggtgcccgtctacgaggagaggaagaggtatgggctgctgatggcggctgccctcctggaaggcgcttcggtcggacccctcgtcaagctcgccgtggaatttgacccaagcatcctggtgacggcgttcgtggggactgccatcgcgttcgcgtgcttctccggcgcggccatggtggccaggcgcagggagtacctctacctgggcgggctgctctcgtcggggctctccatcctgctctggctgcagctcgccgcctccatcttcggccactccgcaaccagcttcatgttcgaggtctacttcgggctgctcatcttcctgggctacgtggtgtacgacacgcaggagatcatcgagagggcgcaccgcggcgacatggaccacgtcaagcacgccctcaccctcttcaccgacttcgtggccgtcctcgtccgcgtcctcgtcatcatgctcaagaacgcggccgacaagtcggaggacaagaagaggaagaagaggtcgtgagcgtcgagaacggaagctctcccacatgcataggagtaactgccagggttccttcctggggtggaagtgtggaactgagcttgaatgttaagaagtgttcctttgttctcttcctctcttgatgactctgtaaatagctatgtcaatctggttaagtttggtttggttgcatgtgcctgtgttcgctgccctttggatagaatgcaaattaaagatgttgctattgcac

SEQ ID NO: 33166 - DNA, 1125 bp, Zea mays
  Clone ID: UC-ZMFLMO17070D01_FLI
gacggcaagcgggtgatccgcgtcaagtcggaccacttcggcaagttctggcggcgcagcccaaactggatctggtgcgacaccgacgacaccagcaccgacaaccgtgacaccctgttcgaggtcgtcagggtgggcgatgacgccgacgccgtgtacgggctccggaacctcggcaacaaccacatctgccaccggctgacctacgagggcaaggagagctgcctgaacgccagcatacccagcgtcaggaaggaggcgcagctgaagatcgaggaggccgtcctgctgcggaagatctacggcgtggactaccacctcaaggacgccaagatcctgaacaacaaggtgaggaccctggtgactcgagaggcggtgaacgccggcagcatgcccagcaagaacacgctgaccctcaagtacgtggtcagcaacggcaagatctgggacgccagcaggtccttgaggctgggcatcaaaagcagcttccaagccggagtccccgaggtcgtgaccggatcgattacgctggagagcgagttcgacaccagctacatctggggcgagaacaccgtcaacacggaggagttctccaccgactacgaggtcatcgtgcctccgcacaccgtcatcacggtgcgcatcctggccacgcagggcacctgccaggtccccttctcctacacgcaggaggatattttgactaccggggagaagaaggtcaccaagtatgacgatggcatcttccgtggagtcaacagctttggtttcaagtccgaggtcaccgagaggaagatcaatggcgaatgagacgatgcaccacatgtcatatctatggatcggagacactgtgccaaagtctgcttatctatctatatctgcatcaataattcagccacgtacgctaccatctgcatatatgtcagtataggtggcgcatgtattgcttttaataattggtgtcatctaagccatgcaagcatgtgtgctttatagctaatcatcttgcactacgctcgtctgtttatttgtatacgtaagtactgtacattgcatgcacatgcactctcatcacctgtaatgttttacttgaaatttattcaaaaataaataaaggcttgtctt

SEQ ID NO: 33167 - DNA, 1401 bp, Zea mays
  Clone ID: UC-ZMFLMO17070E06_FLI
gtcgcggtgagccccacggaggaacgggctacccaaactcgccggattcctacctgtcccggccaacccacctcgccgaaccactccaccaaccacgaacctgaaaccctagccacgcccatgagcgacgacgcgaccgccgccgcgccctcttcgccgtcgacctccccttccccatcctctgcttcctcatcaggcgcctccccgtcgccttcctccccgcgcaccaagcgccgccgcaccgaccggtacgctctcggtttcgagttcgccccgcgactcgcgccctacgaactccctgaggaaccgctccccgacaagcacaagcgctcctggcccaactggacggagcgctccaccttggctctcctcgacgcctggggcgacagcttcgtccgcgcggggcgcagcatcatccgcgccgacgagtggctcgaggtcgcccgcctcgtgtgcgccgccgtgggccgtcccgcggggtatttctctgatgcgcagtgccgcaaccgagtggacacgcttaggaagaagtttaagaaggagagggagagagcgcgccgtgccgcgcgccgctccggtccctccccttccaaatgggtttattacgacaagatggtggcaattctgtgcccgaccccgcctccgctgccgaccctgcctccgcctgcccgtccccctccgctgcctctccagttgctgcctctggtcgcaaagcgccgccgcgacaggcagccagcgcggcgctttcagtgggggatgaaagctcctgagcgtcttcttggtggtgccggagacgtcgtaggtcccagggtttcagggtcaggtgcgaagttgggtgaacttggaccgcagaaaaatagtgctgttcaagggaagcggaatggtttcatggccctcacagagtcaattcagaagtttgaggaggcttttgcgaggatggagagtagcaagaggcagcacatggtgaaggtggagcaaatgaggagggatttgcaaagggacctagatgcaaagtggagggagatattggagaaggcgcaagcggagattggtcgccttagtaatgaggatggggatgaacatgatgtggacgaagatggggatgttggcgatggtaagagattggagggtggtgatgagcaaaacaatggtgctatggatgcttctccttagcatatagcctagatgcttacaaaatgaggaacaaaattggggttatcatgtcgatagatgaatccacatgatagacatgtggttatgattaactccgtagctgctgatattagtattattgtataattctcatatgtgtttctttttttttactccgcaatgctaagcaaaagattactgctattttggttactgtacatagctatttgcttaccgacgtgtgttttc

SEQ ID NO: 33168 - DNA, 609 bp, Zea mays
  Clone ID: UC-ZMFLMO17070F06_FLI
cgcacgcacgcgtcgcagaacaagcggctgccgctgcaggccgcgctcagcgcgctctactacgacgagctcaagctccgcagcgccgcgacggccgacgtggtattggacacgcagtcgtcggccgccgggagggcttccgcgcaggccagggcggcggacgcggcgctggcgcgagagaacgaggcgctgcggtcagagctggcacggatgcgggcctacctgtcagggatggagcgcagcaaagggggccggtcaacgccgccgtcctcgccgtctcggagggcaaagaaagcaagcttcctgggctccgtctcccgcactatgagccggctgaacccgtttagaagtggggggtggatggcgaaggttacgaccagtaacgccgccggtggtggacgccagagcaaaacgatgatgcagcatgtggtgacacccaagaggaggagggcatccataagttaataatcatgagttcatgacgctgtcgtgtaattttaggaggataccgtgtgtgcatggcttgtagtttgattattattgtgtgtttttagtttattattgtgctagtatatatatgaatgcgcgtgtagtaccaagtggtttgct

SEQ ID NO: 33169 - DNA, 2214 bp, Zea mays
  Clone ID: UC-ZMFLMO17070F09_FLI
ctcccttccacaccgccgcctccggagaagggtccacggcggcgtccttcctcgggaggcgctcggctcggattcgctcctgctcggcggcggcgtcgccggctggtgggctcgcgcgcgcacctggtgctgggctccgcgggcgctcctcgtgcgtgacacgcgcccgatgcgtcaggatcgcgcggccggcgcccggggcctgccgtgattctgcggggaggctggatctcggtgcttccgcgtgcgggaaccagtgagttttctttttgtcttctcttccccggcggctagcggcgggccgcttggtgcacgtcagcgcgggaggccggaggttagccgatctggtgctctcgccgcccggagaggtggtgctgggcccactgccgggttctgcttagtaggaggcggaggaggtaagtccctcgtctcatggggctcgcgccgccggagctgggccagttcgacgggtgggagagctccggggaggaggagcgggagcgggagcgttggggctggtgccgccgcagccgccgcggcagcagcaggcgccgcgcggcccccaagggcaccgacgacgacaccgcggtcgacaccggctgctgcatccgcctctggcccgtcgggacatgccctccgccgccgcagaggtccaaggtcgacacctccaccagcagcgccagcacgcacggggagaagtcaacagaaaatggtagtaggaatcaaccggtggcattggtagtctcaggttctacaactactagtaatgctgaaagcagttcatctgcatctaaagtcggagaagagataaaagttgcctcccagctgcgcaagtttgcattcaatgatctaaaatgtgctacccggaacttcaggcctgaaagtctccttggagaagggggttttggatgtgtttttaaagggtggattgaagaaaatggaactgcacctgtgaaacctggtacaggtctcacagttgctgtcaagacgctgaaccatgacgggcttcaagggcataaagaatgggtggctgaagttgattttcttggaaatcttcaccatcccaatttggtcagattgattggatattgtgttgaagatgaccaaaggttgctggtctatgaattcatgcctcgtggcagtttggataaccatctttttagaaggtctcttcctctcccatgggcaatcagaatgaaggttgcactcggagcagcaaagggtctggctttccttcatgaagaagcagaaagaccagtcatttatcgcgattttaaaacatctaatatactgctggatgcggagtataacgcaaagctctctgattttgggcttgcgaaagacggacctgtaggtgataaaactcatgtttctactcgagtaatgggaacctatggatatgcagcaccagaatatgtcatgactggtcatctgacatcaaagagtgatgtctacagcttcggggtggtgcttcttgagatgatgtcagggcgcaggtcgatggacaagaaccgcccgaacggggagcacaacctggtggaatgggcgcgccccctcctaggcgagaggcagcggttctacaagctaatcgaccctcgcctggagggcaacttctcggtgaagggcgcgcagaaggcggcgcagctagcgcgcgtgtgcctgagccgggaccccaaggcgcggcccctgatgagccaggtggtggaggtcctgaagccgctgcagaacctcaaggacatggcgagcgcctcctacttcttccagacgatgcaggccgagcggatggcgcactcgagcagcatgaacgggaggagcagcatgaacggcggcttcaagacgcagagcccgtttgggcggcatgggcagccgccgcccgtgaggagcctctctgacgggccccgcgcgtccccgttccgctactcgccgaagcctaacgtgaagtgagcggagtggtggaggcgcggttttctgccggctggaaggcacggcccctggatgaaacctggtttgttgggggtgactggttcgggccgtgcatttgcattgcattgcattgatgtgtgtgctgtagattgacatgtgcacaaagtaaaaggatataggcgaaaaagggtggtgtaggtatcggagtttgcttggcggatgtttgctctgaggttttaactgaatgaatgcggatgcaccgttgctataaaaaaataccggaaaaaaaag

SEQ ID NO: 33170 - DNA, 1406 bp, Zea mays
  Clone ID: UC-ZMFLMO17070G09_FLI
gcgtccttttcccttcctcccctccgttgcgtccgtcgtctgcgttgcgtccctccgtccgtccgtccgttggcccgtccgtcgtcaccagcctcctccctcgcgcccaccgccgggatccggccctcctcgtctgcgcccgcctcggtctagatttctgagaaaatggcgagaagtgcgggaactaggaggcgtgtggctcgccagctcaagtccacacatcccattccttcataccgatggaagtcaaagcccatgaaaaagccgatgaaaaaatccaaccgaaagcaagtgttgccaaccttgcaaaagatggactgggaagatgccaattgctctgtgtgcatggaatacccacataatgctgtgctcatcctttgctcatcccatgataagggttgtcgtccttatatgtgtggaactagctaccgccactctaattgcttggatcagttcaagaaagcttacaccaagggggcattgcttgaggaagttcctgcaaatagtgttggctctaatctggattcggcgccattggctgcagaaaaaactgactccattgaccttgcatgtccattgtgtcgtggcaaggtgaaagggtggacggtggtggaaccagctcgaagctacctcaatggaaaacgaagaacatgcatgcaggatggttgctcatttgtggggacctacaaggagctccgcaagcatgtcaagttggaacaccctcttgcaaagccaagggaagttgatcctgtccttgagcaaaaatggagattgctcgagattgaaagagagcggcaagatgcgctcagcacgatcacggcaacaatgggcagagccgttgtttttggtgattatgtgctagacttggaggatggaatggactccgaggatgttgacagtgatgctgataatgatggccgtgggacagaaaacactcgtaggatgctactatttattatgcgccaagttgctcaacatcaccaaaaccaaaggctccagaatgcgactggtgcatctgacaatgctgaggacaattatgtggtgagcagtggtgccaatggaaccacaccatactcttaccccttggagggggaggacgagaatggtatggttgtggccggaggcagaagcactgatgtgctgagaccagagaggaggcgccgtcgtcgccgcaggaaccgtgggagattgtttttaggtgctaattgagaggacaggtggccaggtagggtttagccgccagaggagtacatacagaaatgcttccctggtgcctggcattcatcaattcctgcctcaatttacttgatcatgatcatgtaccaagtagttatcttaacatcagctcattgtcataaatttatgttatctcacattcttcgttgaaaaaggaaaacaccgcagcc

SEQ ID NO: 33171 - DNA, 947 bp, Zea mays
  Clone ID: UC-ZMFLMO17070H08_FLI
ggtctcactgaggtccgcaagaacggaacctgcccctggctcaggcctgatgggaagacccaggtgacagtcgagtaccgcaatgagggtggtgccatggtccccatccgtgtccacaccgtcctcatttccacccagcacgacgagacagtgaccaatgatgagatcgctgctgacctgaaggagcatgtcatcaagcctgtcatccctgagcagtaccttgacgagaagaccatcttccaccttaacccatccggccgctttgtcattggtggacctcacggcgatgctggtctcactggccgcaagatcatcattgacacctacggtggctggggagcccatggtggtggcgctttctccggcaaggacccaaccaaggttgaccgcagcggagcctatgtcgcgaggcaggctgccaagagcatcgtcgccagcggccttgctcgccgcgccatcgtccaggtgtcttacgccatcggcgtgcccgagcctctctccgtgttcgtcgacacgtacggcaccggcgcgatccccgacaaggagatcctcaagattgtcaaggagaacttcgatttcaggcctggcatgatcatcatcaaccttgacctcaagaaaggcggcaacgggcgctacctcaagacggcggcctatggccactttggaagggacgaccctgacttcacctgggaggtggtgaagccactcaagtcggagaaaccttctgcctaaggcggcctttttttcagtaagaagcttttggtggtctgctgtgcttaatcatgcttttatatggcttctacatgttgtggttctttcttgatctgcaccgcgcttatcgtttgtgttgtactgccctaataagtggtgcttatgaggactgtttctggttttgctgcttatgttgtaatgctttgaaacaatgaaagaagctacaggccacagct

SEQ ID NO: 33172 - DNA, 1743 bp, Zea mays
  Clone ID: UC-ZMFLMO17071A05_FLI
atttacgtatatgcccttgtcccggttcctttccccatccccaactccattatttgcttgatccttgagaagagagaggaagacgagagctagaagcgaaggagaaaagcagttcttcagctaggcaggagggcacaggaaggaggagatggcgtcaaagaggattcagaaggagctcaaggatctgcagaaggaccctcccacctcgtgcagtgcaggtcctgttggtgaagacatgttccactggcaggcaacaataatgggtccatctgatagcccatattctggtggagttttcctagtcacaatccattttcctcctgattatcctttcaaaccaccaaaggtacagcaaacgagcatttagggaatgaccattcctttttttttgtgcattttgtcctttgtttgccattgaatttgtaaaataaacatatgcttaagctcatttacttcctaggaggattactctgacatatgcactatatatctgtgatgtttagtaccttgacaatgcatatgagctaatgtgcagtagccaatagcttatcggttagatgccatgcccactaagcgcacttgctgaaaacacttgagttatttttggatgaaacctttaaggccttgttcggttgtgcctggatcgaatgagattggggggattaaatcttcttctattcaattttgactaggaagagatttaatctcctccaatccccttcgatccagacgtaaccgaacaagccctaagggagtggattggagggatcaaatctctttctagtcaaaattgaataggagatttaatccctctgaatccccttcgatccccatacgaccgaacaagccctaagaagattcaagattgtaacagtttgcgaaaggacctctagccgagttggttaggtggtctgagtagcactcatcaggtcctatggagcgaattttcgagctgtggttaaagaaattttctcgtctgttccatgccaaagcataggtttaaggcctggccctagtcgcggtcgtctcacatgggctacggtgccgttgtgtatgggtgagataggggtttggggagttttctcactgtccggtgcctgtcttacctcttaccctcgtaggtagagtttttttagattgtcacagtttcatgtgcaatcttgaaacccttgatatctgaaatttacctgccttaccaaatccatatatccttaaaaatgtttgtcatattccaaaccatgtaacctagtatatgtatgcgatacgcaggtggcatttcgtactaaggtgttccatccaaacatcaacagcaacgggagcatttgcctcgacatcttgaaggaccagtggagtccggcactaacaatctccaaggtgctgctgtccatctgttccctgctgactgatccgaaccccgacgaccctttggtccccgagatagctcacatgtacaagacggaccggcacaagtacgagaacaccgcgaggacctggacccagagtacagtgccgcgtgtggtgctgaatgcagaatgctgctgtattgtgtcacttggaagctgtaattctcagtgtcaaaaaaaactggtgcttggaaccattttgcgtcggatggcgctgcaggccagtcgatgcttgcgtccttcttcccttcaccagtcatcatgttggaagaaacataacgttctgtctcttgagtaactggtacgaaacaataatgatcgttggggatttggttgcagc

SEQ ID NO: 33173 - DNA, 626 bp, Zea mays
  Clone ID: UC-ZMFLMO17071C03_FLI
ggccggcctcccaattcgctggccgctccggcggccgtggccgccgccgcgggccaggctacggaagccgcggcgagggcgtccgcgagccggtgctccagctgccggaagcgcgtggggctcacggggttccggtgccgctgcggcgagctcttctgcggcgcgcaccggtactcggaccggcacggctgcagctacgactacaagggcgccgcccgggacgccatcgcccgggagaacccggtggtgcgcgcggccaaggtggttaggttctgatccacgacggaaggaaccgcgccgcgcgcgtgcgtgcgcagacgggaaggaagtacacgacacaaaggctcgcagggcggagaagggaggaggaaggcgtgcagacaaggtcttcggtgttattattattacgctgttcctttgattttaatctcctttttttaaaaaaatatttgtcctatgggaatgggaggagaagaggtggacgaagaataatggtggtggtgcagtggcggtggttgagggcccgaaacgatgaacagatgggttggattgggttgggtgtatgtatgtgtcacacgcaactttggacagaactattatactagtacgtactaagcttctcgtct

SEQ ID NO: 33174 - DNA, 2839 bp, Zea mays
  Clone ID: UC-ZMFLMO17071C05_FLI
cggcttcggcagggtgtaccagggcgcgctggcgtccaagacggaggcgcggtgaagaaggtggcgcacgggtccaggcaggggatgagggagtttgtggccgaggtcgtcagcatcggccgcctctggcactgcaacctcgtgcagctgctcggctactgccggcgcaagggcgagctgctgctggtctatgactacatgcccaacggcagcctcgacaggtgcctctacgactggagcaggaccgcgctgagctgggggcagaggtttcgcatcatcaagggcgtcgcgtccggcctgtgtacctccacgaggactgggagcaggtggtggtgcaccgggacatcaaggccagcaacgtgctgctcgacaaggagatgaacgcgcggctgggtgacttcgggctggcgcggctgtacgacttggggatgcaagttacccttcagaacaactcttaatttctggataaaaggaaacacaggaccaggtttactttataaaacagatcgaatcattgggaaatgctcgtggaactattgctctactccatgctgttggaaatgcatcttccaaagtcaatttaggtgacctgaaacgattatatgcagcacacagaattctataagatggttgcaatctttcttgttctctccttgtttctgaattgaattaacctatctggtctgcaaggtgatacacttacactgatgatacttattgttgttgttttctacatgcactgtcagttgagttagtgtctctgccatatttgataattgtttgcttagtgtctgatatcccactgcaaactactgtttgcttgtattaagtgatttgttttctatacttccacaaatattattgtcgatgtgtagctttctgtagccctatggctgaaatattcatctatacaatttagtacacatgatgattcacctttgtagattgcatgatgttacttatggtgatgattctgcctctttcacttgcagtgttctagaattagttgatgttgttgtgtatccttcatttctagaaccagtcaaggaaactattttgagggttcacagtgtgaaggtagaatttcagttattccctaaaatttagtttcttctcagtcagttctatatattttaaatgcacagttctgtgaatcttcctaggtcaatcttcttagagatgctttgaaaggacaattttgttttttatgtatccataactaagagatcaaacctcagacttaatataagttataaatggagtacacatattattttatcatttttattgtgcttcttggtgttttttctttcattcatttgacaagttataaattggttaactgatatgatagttgtgctactgctacactagcaataatgtagctactataaagagatagcatataacttggttataatcattttcttttttgtacaaagggaaagcaaaatatagtttaaagaccagaaattaagtttgttccaccatagctacagaacttcgttggtgcaaatattttactgcacagttaaactgtagaagtagaatcttttctattttatctgtaaacataatgaataacatggccaattatgtgaataattaatgatgcacttgatagatacatgtttctttgatttttttagtgctgcatagattgcccgaatcgcacaaatgttgcacaatatgcatatggtctttctgcttttgggaggcaacttcatgcaatgggactgacagatgcttcagaaatccaccctgatagagtatatattttttctgtttcttttttttgcaattttgattatcttctcaccttctatctcaattgcagcatttgggcagtcatccacaagcatatttggccacaactcgtttggagcttcgtagggttagtattattgtaaatttttcgagcatgtttggacaactatcccattcaaatggtttacctatgtgatatatagaatttgtagcagcgcacgagttgttcgaaggctaaataattgtgtcactgcaccaggcatgactgactttgcagagtcattgtcttctttggctctctccttggcaagatgtgttactgccattcacatatctgttgttcatagtaaattgtcttgaggagatagctacggtgaaatattctctattttgttccagctccgtaaagaaggacgaagttgttatcactgttcagtttcaacaatgcatcaagatcctagcgaacaaagtttatttactaacacaacagagtgttgagctgctagaacgttattcagctatgcaggcagtacatggaggtatcacaaaagagttggatttgaagaaagtgcttattagtaatctctacaataaactttaacaagaaaaataggtttgtcttggagttttgttactccaatttctgcatttggcaatgaattcccatggtttatggatataaccatttacatttttgctatttatgctaacgagcaaatttgctatggtgtcccatggaaatcattttaacagaccagcaaggagaagatatcatttggtcggttcgaagtctatgagctcgctgtctttttctaaaactctgctgggcactatgtggcgatcaaccgaaactgctcaaactactacttgtctgaggaatccatcgccatgttcaccgagcaccaccggcagcaccctatcagggggttgtgagtactttgggtgactgttgccatgctgcctaatgcttcctgttgaaacaaacaccttcatgatcctgatgacaattgtctgctgaaaagaagggagaaaactatcaactatatatatatacacactgaaatttgttact

SEQ ID NO: 33175 - DNA, 1932 bp, Zea mays
  Clone ID: UC-ZMFLMO17071E02_FLI
gtgcagcgccagcgcagcgcctctctgctactgtgctggctgacgccggtggggtgtgagcgaactgcgagctgctgccacccctgctgccgcggtcgaccgccggccccggaccgagatggacgctcggtgggcggtgctgctcgcgctgctggtcgccagcggcggcgtccgtgtctgcgccgccgctggggccaagggcgccaactggctgggcgggctgagccgcgcgtcgttccccaaggggttcgtgttcgggacggcgacgtcggcgtaccaggtcgagggcgccgcgtccaccaacggccggggcccctccatctgggattcattcgcgcacgtcccaggaaatattgcagggaatcaaaatggagacgttgcagtggatcaataccatcgctacaaggaagacgtcgatctcatgaaaagtttgaactttgatgcctaccggttctcaatctcatggtccaggatcttcccggatggcgaagggaaagtcaatccagaaggtgtagcgtattacaataatttgataaactatctgcttcagcaaggcatgactccttacatcaacctttaccactatgatcttcctcttgcgcttgagaagaaatatggagggtggttaagcgcgaagatggcggacttgtttacagactatgctgacttctgttttaagacctacggcgatcgcgtaaagcactggtttacattcaatgagccaaggatagtagcgctacttggctatgacacagggtcaaatcctcctcaaaggtgcaccagatgcgctgctggtgggaattcagcaaccgaaccttacatagttgctcataattttctcttggcacatgctactgcagttgcaagataccgtacgaaatatcaggctgctcagaagggtaaggtcggaatagtcctggacttcaactggtacgaggctcttacaaactcacctgatgaccaagcagcagcccaaagagccagggacttccacattggctggtttgttgatccattgataaacggacactatccacagataatgcaagatctcgtgaaggagaggctgcccaggttcactcctgagcaggctaaactggtgaagggctcggcagactacatcggtatcaacgagtacacatccagctacatgaaggggcagaagctggtccagctggcgcccagtagctactctgccgattggcaggttcaatatgtttttgcacgcaatggcaaaccgattggaccacaggcgaattctaagtggctctacatcgccccgacggggatgtacgggtgcgtgaactacctcaaggagaagtatgggaatccaacgatctacataacggagaacggaatggaccagcctggaaacttgacccgagaccagtacctgcgcgacgccacgagggtgcggttctacaggagctacatcggccagctgaagaaggccatagaccagggagcgaacgtggctggctacttcgcctggtctctcctcgacaacttcgagtggctggcagggtactcgtccaagttcggcatcgtctacgtggacttcaacacgctcgaacgccacccgaaggcgtcggcctactggttcagggacatgcttcagaagcattgagatctccagagccgagcctgagcacggaaggtaccattttgttcagcttcgcctagtgtttgggatggcccaatggttcaaatccggctcagtgcctggctaccaaaatgggaacaaaggacagctaccccgatcaattgtgatgttgtgtgtttgtgggtatgttctctctggagtttgagctgtggttattttatcgtgttggttgatcgtgtttgaaatgcttaattcaggactgtgacatctcgagttgttttaactaaatcttataagaactaccctgatcgagcgctgggtaattggat

SEQ ID NO: 33176 - DNA, 2299 bp, Zea mays
  Clone ID: UC-ZMFLMO17071E09_FLI
cacaaatgtccagtttctttgctgtagctgtagctttggtgctctcatctctcatccatggaaccacgatggccacagcgagcagcgaagagagcttcttccagaagtgcccagcgtccagctgcagcgaaggagggccagagatccggttccctttccgccttgcgaccagccctctgtcatgcggtgcgcccggcatggagctggtgtgctccaaagcagacaccgtcctggttcacccaaaccttggcttgtgtaaggtaactgccatctggtatggcggcagcactataaccatcgtcccactcgcagtcgcagcagaacacaagtgcccttttcagaagatcatctccaccaatctatcaaccgatgtgtatagaccttatggggatagggcaaccttagtgagctgttcagcagagttcatagtaccaagccatccggccagccttgctggtcccatctcttgccttaccaacgctagccgccggttcgcttacttggtgccgtcttttcgaccaatggatttccttcccttggactgcacggttctttcgaatagcatctcggtaccttaccctgcttctgtcaacgcgggcttcaacgaaactgcaagaggagccatcacatttggcgagacgatgttagaatggagagttcctaacattaccgatgtctgccgagactgcgaagctgaaggaaggctatgcggatttagctcggagagtaggcaagcattctgtaagagtaaggatcacagttcacgtctcaaggtcattgcaggtacgtggtttcagtgcacttttgacctattgagttctttctatttcttaacaacaaaaccgcagcacgatctcatatatagtcgtctcatccacaaaagatctgaataatcgattgcaatctaataacagactgatgttgtccaaccctgtctgttcagtaacgacgccagtagccacagtcctggttctttcagcaatggcaggtgctgcattattacacctggccctgaaatctaaatacgacgacgagatacacaggaaagtggagatgttcctcgagacctacaggacgctgaaaccgagaaggtacacattctctgaagtcaggaagatgacaagacggttcagcagcagacttgggcaaggcgggtttgggagcgtgtacaaaggcgagctgccgaacggaggagtgcctgtgcctgtggcagtcaaaatgctggaggactcaacgggggaagaggagttcatcagcgaagtcgcaaccattggaaccatccaccacgccaacgtcgtccggcttctagggttctgctccgagaggtcaaggcgtgctctggtatacgagttcatgcctaacgcgtcgctggagaagtatatacgctgctcctcccaagaacagtcgtcgttaataacggccagtaagatgctggaaatagcgacagggatcgcccgaggaatcgagtacctgcaccagggctgcgaccagcgcatcctccatttcgacatcaagccttccaacatcttgctagactacaacctgaacccgaagatctcggatttcgggctggcgaagctgtgcgcgagggaccagagcgtcgtcgcgctgaccgcagcgagaggcaccatgggctacattgcgccggagctatactctcggaacttcgggacagtgtcatgcaagtcggacgtttacagcttcggcatggtggtgctggagatggtggtggtgagtgcaaagaggaggaagtacagcccagcagagaccgaggaccagaacgacgacgtttgcgttccagagtggatatacgaggaaatagtcaccggacaagagcccagggaaatggcacgaggagagagagacatggtgaggaagctggctatcgtggctctctggtgcattcagtggaacccaccgaaccgcccgtccatgacaacagtggtgaacatgctcacggatagcttgcagagccttaagataccccctaaaccatttgtttcatcctttgttggccagtaaccatgaagaaaaagctagagaccacatggtgaccattcatcagatagatattcgtgtctatcacttgtcggcatatgcatgtatcagcgatgatgccctgtgatctgtcgtagttttgtgtcatacccatataccttttttccttgtaaccactggattgtatacattgcaattttctggtggtttaaccatgttcacgaatttgtaatggcattattagcaggacgttacataaaaaaaattagtaactggaaaggtagaagttacagcttacatt

SEQ ID NO: 33177 - DNA, 2482 bp, Zea mays
  Clone ID: UC-ZMFLMO17071F06_FLI
gttggctacacccggcaaccaattgaggatgaaacctggtttttagcacatgagattgattatcctagcgacaatgagaaggcgactggccacacaagagggaacgatcgtcatgatcgccctacaaaggatgaagatgatgaccagtcatttgttgaggaagattcctacatatctggtgagcaatattttcatggaaagaatattgcacaaataggtacttctgagggcccaatggtccatgggattcctgataatgatatgatagctcagtatgatggccaacttttagattctgaagagcttaatttgatgcattctgaaccagcctggcagggctttgtatcacagaacagtgagctaggtatgctaggcaatgggaaattccttaatgattccgaacgacctcatcctgatgacctttttgtggaggatgatcagcatggctctgttaggtcaattggtgttgggataagcagtgatgctgctgacattggcagtgaggtgcgagaaagtctgattggaggtagcagtgaaggggatattgaatacttcaatgagagcagcttgagcgtgagtggaaaaagacatcctcatcaggatactgaaaagaagagagtaggtgctaaaggagtaaaacatgaccaaatcatttacgctgctgatatccagaagggcaatctaccaccaggagcgactgatgtaggattttcttttcctccacctttgcattctgggaaaaatcatgagtctgatgctaaatctttgtggtcaaagaaggatgaaatgtattgcattaatgatcctgatgactgtcaaaatggcatggtatcagatgatatgcttgccacatggaggaaaaagaacagtgagtcttctctaaggagctctagagatgaaattacgtctgatgttgttagatcaagaaattcaagtgcatcctatgacgaaacagaggacacatcgaatgcccggcatcacaaactagatgatgcacaagaagaagacactggaaccaacttggatgatgaggaagcagcagcgttgcaagagcaagtcaggcagataaaggcgcaggaggaagagtttgaaacgttcaatcttaagattgtgcatagaaaaaacagaactggctttgaagaagacaaaaacttccatgttgttctcaattctgtcattgctgggcgttatcatgtatcagagtatttgggttcagctgcattcagcaaagccatccaagcacatgatttacatacaggaatggatgtatgtgttaaaattataaaaaataacaaagattttttcgatcagagtcttgatgagatcaagcttctgaagtatgttaacaagcatgatccagctgataaataccaccttttgcgtctgtatgattacttctactatcgggaacatttgctgatagtctgtgaacttctgaaggcaaatctgtatgagtttcagaaattcaacagagaatcagggggtgaggtttacttcacaatgccaagactccagtcaatagctattcagtgtctggaggcactgcagtttctgcatggtctcggtctaatccactgtgatttaaagccagaaaacatattggtaaagagctacagcagatgtgaaataaaagtaatcgatcttgggagcagctgctttgagacagatcatctatgttcatatgtgcaatcacgatcttaccgtgcacctgaggttatactgggcttgccttatgacaaaaagatagatgtatggtcacttggttgtatattagcagagctttgcaccggaaatgtccttttccaaaatgattctcctgcaacattacttgctcgtgtgatgggcatcattggctccatagaacaagctatgcttgcacacggacgcgacacctacaaatatttcacaaagaaccacatgttgtacgaaagaaatcaggaaagtaacaggcttgagtacttgattccgaaaaagacatccttgcggcaccgattgcccatggctgatcaagggtttatcgagtttgttgcgtaccttctagaggtgaacccaaagaagcgcccaagcgcctcagaagcattgaaacatccatggctttcttttccttacgagccaatatcttcatgaggctaactgctattggatcctgtgtggattagcatttgtctcaacacctaagcaccatgaaattttgatagatgaagacggaagattttctaccacgactgagccatggcatcagccgaagtccaaaacgcaaatgcagattcggttcgatcatgtcttggtgccacaatcagctggtcttaggcgccatgtaaaatcaacgcatgccatgtgttgtgcttgtaatataacttgtttttttttcatttccagccccgatgtaacaggccattttggttttctaggtacttggtgactcatttctagcaatagggctgtcatgttgtacatggtgtgatcattgttgagcggcccc

SEQ ID NO: 33178 - DNA, 518 bp, Zea mays
  Clone ID: UC-ZMFLMO17071F09_FLI
agtcgacgccgtcgaccccgacgacgccggtgacgccgtcgtcgtcgacgacgccgcgcggcgccggcaacgtgtggcgcagcgtcttccacccggggagcaacctggccaccaagggcatgggcgccaacctcttcgaccggccgcagcccaactcccccaccgtctacgactggctctacagcgacgagaccaggagcaaccaccgctagatcgggcgagatggatggacagtgaagaggccatgtttgctggtccttgtggttatctaaaacgcacgcatgctctattatagctagtcatcactatatatatacttgtgtttgtgtattgttgttcttgttctgctggtgtctccgccgtttaatttgacctatgttatggagtgagtgatatatgtgccgtcactcctagtatatagtagtgagtgactagttggtatgtgtagtactgtactatcttttctccatatgcatgttttgccagcgcgtaatgaatgtaatgtcagtactgctact

SEQ ID NO: 33179 - DNA, 937 bp, Zea mays
  Clone ID: UC-ZMFLMO17071G08_FLI
ggtccagactgagtcacgaaaatgtcgcaaagatggtgggatactgcaaggagtctgatccattttcgagaatgctagtctttcagtacccaccaaatgggacactctacgagcatctgcacgatggagatgggtggcagctatcttggcctagacggatgaaattagcactcgccatctcgagggctctcagatacttgcacactgagctgcaacctccatttgcagttgctgcactgacgtctagttcagtctacctaactgaagacttctccccaaagataatcgatttcgagaggtggagatatcttgcgaccaaaccaggatttggctcactaaatggcgggtcagtcaacagcattacagattctcggcataagcgcttcatggacgtccaggccaacacttacgcgtttggcgtgatcctgctggagctggtcagtggcagagcctcggtttccaaagatacaggaggtttggtggattgggcacgaaagcacctggagcagcccgaggagttcggcaagctggtggacccgaggctgcagagcgtgaaccaggagagcctgggcatcgtctgcaacgtggcgaacctgtgcatcgacctggagccgtcgcggcggccgtccatgagcatgatcgcggccatcctggaggaaggcatcgaggcgtcggcggccaccttgctcaggaattcgtctctggcttgggccgaagccgagctggccatctcctagaacctagataccctctttgcatgttttgctgcactcgctacactgtatgtttggacagtgacgatggtttaacccgttgttactccgtttggcattgttatttctctcttttttggagagagaaatggctcacagatctgaattcaaaatgactcaagttttgatttgatcagcgcgaggagaggcctttttatcctttc

SEQ ID NO: 33180 - DNA, 1227 bp, Zea mays
  Clone ID: UC-ZMFLMO17071G11_FLI
gcgaggacgggcgcacgcttgccgactacaacattcagaaggagagcaccctccacttggtgctgcgtctcaggggtggcatgcagatcttcgtgaagacacttactggcaagacgatcacccttgaggtggagtcctcggacaccatcgacaatgtcaaggccaagatccaggacaaggagggcattccaccggaccagcagcggctcatctttgctggcaagcagctggaggatggccgtacccttgcagattacaacatccagaaggagagcaccctccacttggtgctgcgtctcaggggtggcatgcagatcttcgtgaagactcttactggcaagacgatcacccttgaggtggagtcctcagacaccattgacaacgtcaaggccaagatccaggacaaggagggcattccaccggaccagcagcggctgatcttcgccggcaagcagctggaggatggtcgcaccttggctgactacaacatccagaaggagagcaccctccacttggtgctccgcctcaggggtggcatgcagatctttgtgaagacattgactggcaagaccatcaccttggaggtggagtcgtctgacacaatcgataatgtcaaagccaagatccaggacaaggagggcattccaccggaccagcagcgcctgatctttgctggcaagcagctggaggatggccgtaccctcgccgactacaacatccagaaggagagcaccctccacctggtgctccgcttgcgaggtggtatgcagatctttgtgaagaccttgactggcaagaccataaccctggaggttgagagctccgacaccatcgacaacgtgaaggcgaagatccaggacaaagagggcatccccccagaccagcagcgtctgatcttcgccggcaagcagctggaggatggccgcaccctagcagactacaacatccagaaggagagcactctccacctggtgctccgcctccgcggtggtcagtaagccatggttcatttaagctgctgctgtacctgggtatctgcgtcgtctggtgccctctggtgtacctctatatggatgtcgtcgtctaataaacatctgtggtttgtgtgtcatgaatcgtggttgtggcttcgttggtttaatggacctgttgtgtcctctgtgttgtacccaaaactcttctgcagcagtatggcttgaatccttatgaagtttgatatttgaactt

SEQ ID NO: 33181 - DNA, 1750 bp, Zea mays
  Clone ID: UC-ZMFLMO17071H09_FLI
gtgcagacaccaccgctcgtttttctctccgggacaggagaaaaggggagagagaggtgaggcgcggtgtccgcccgatctgctctgccccgacgcagctgttacgacctcctcagtctcagtcaggagcaagatgggtgccggcggcaggatgaccgagaaggagcgggagaagcaggagcagctcgcccgtgctaccggtggcgccgcgatgcagcggtcgccggtggagaagcctccgttcactctgggtcagatcaagaaggccatcccgccacactgcttcgagcgctcggtgctcaagtccttctcgtacgtggtccacgacctggtgatcgccgcggcgctcctctacttcgcgctggccatcataccggcgctcccaagcccgctccgctacgcggcctggccgctgtactggatcgcgcaggggtgcgtgtgcaccggcgtgtgggtcatcgcgcacgagtgcggccaccacgccttctcggactactcgctcctggacgacgtggtcggcctggtgctgcactcgtcgctcatggtgccctacttctcgtggaagtacagccaccggcgccaccactccaacacggggtccctggagcgcgacgaggtgttcgtgcccaagaagaaggaggcgctgccgtggtacaccccgtacgtgtacaacaacccggtcggccggctggtgcacatcgtggtgcagctcaccctcgggtggccgctgtacctggcgaccaacgcgtcggggcggccgtacccgcgcttcgcctgccacttcgacccctacggccccatctacaacgaccgggagcgcgcccagatcttcgtctcggacgccggcgtcgtggccgtggcgttcgggctgtacaagctggcggcggcgttcggggtctggtgggtggtgcgcgtgtacgccgtgccgctgctgatcgtgaacgcgtggctggtgctcatcacctacctgcagcacacccacccgtcgctcccccactacgactcgagcgagtgggactggctgcgcggcgcgctggccaccatggaccgcgactacggcatcctcaaccgcgtgttccacaacatcacggacacgcacgtcgcgcaccacctcttctccaccatgccgcactaccacgccatggaggccaccaaggcgatcaggcccatcctcggcgactactaccacttcgacccgacccctgttgccaaggcgacctggcgcgaggccagggagtgcatctacgtcgagcccgaggaccgcaagggcgtcttctggtacaacaagaagttctagccgccgccgctcgcagagctgagaggacgctaccataggaatgggagcaggaaccaggaggaggagacggtactcgccccaaagtctccgtctacctatctaatcgttagtcgtcagtcttttagacgggaagagagatcatttgggcacagagacgaaggcttactgcagtgccatcgctagagctgccatcaagtacaagtaggcaaattcgtcaacttagtgtgtcccatgttgtttttcttagtcgtcgctgctgtaggctttccggcggcggtcgtttgtgtggttggcatccgtggccatgcctgtgcgtgcgtggccgcgcttgtcgtgtgcgtctgtcgtcgcgttggcgtcgtctcttcgtgctccccgtgtgttgttgacttgttgtaaaacaagaagatgttttctggtgtctttggcggaataacagatcgtccgaacgac

SEQ ID NO: 33182 - DNA, 1576 bp, Zea mays
  Clone ID: UC-ZMFLMO17072C03_FLI
gctcgcggataatttttcaggtcacctctcgtctctcccgagcaccgcaaaatccatcaatcgaacagaccaacacaaacccaacctgccgccggccgatcgcgcaaaccctagcgccgtcgcctccctctcggttctacaccgtcctctccagcctcgcccgcgtgcaccgcagatcaggggacgtacgtcgcccgcgcgcaccgcagatcaggcaacgtacgtcgcccgccggagatcggaattctgtatttttccttccgtgctcgcggctgctacggcgatggcgggcggcgggagcaggcgcgccggcgcggcggagcagccgaagatcggcagcggcaacgtcttcgccgcgctcgagacgcttaagaagaagaagaagccggcggataagggggccaagcccgccgccagggaggaccccaagccagaggtcttctgggcgcccgcaccgctcaccgccaagtcctgggccgacgtcgaggacgacgacgatgacgactatttcgccaccaccgcgccgcctcccaggcccgtctggggggacgcccaccgcgacgctgccaaggaccagcacgacgcgcccgcactggaagaggagattgagagtgaagatgatggccttgatgatgacgctgatgaggaccatgaggataaagcagatgatgctgtccctgctgaaccaaccgcgaagaatgcgacagctccacctgcaccacccaaagatactgaaagacaactttccaagaaggaattgaagaaaaaggaactcgctgaacttgatgctgttctggctgagttgggccttggcacatcaaacaattccatacaagaggaacccaatggtaagaaaggtgcagatcaagttgcagatggagagaaaaaggaagatgcacctgctcctctagaaagcaagaactcaaagaagaagaaatctaagaaagaaaagtcttcaaaggagctaaaggaagcgcaggatcaagccaatgggtcggaagcagcagctgttgcagaacctgatgaagatacagcctctgtggatgtcaaggagcgcataaagaaggtagcctcgatgaagaaaaagaagtcaagcaaagagatggacgctgcggcaaagattgctgcatccgaggccgcagcgaggagtgcccggcttgccgctgcaaagaagaaagagaagagccactacaaccagcagcctgtgcggtgaactcccctgatctgaggccgcagcgaggagtgcccggcttgccgctgcaaagaagaaagagaagagccactacaaccagcagcctgtgcggtgaactcccctgatctggtgtctctagaaaccttttgagctctgatgtcccctgttcgttttggacctgcaataaaacttttgagactgttttttgacatggtggaggtgccgtctgatgctcgttttgggaattaaattacatataggtacataggggttgtcttgtcgctggattctgtttggtgtaatgagctatgaactgttcgtcaatcgtcatatgaaccctgctgactatttatatagaaaatgtgggatatttgatacctaact

SEQ ID NO: 33183 - DNA, 1308 bp, Zea mays
  Clone ID: UC-ZMFLMO17072C08_FLI
cggcgactggcccacgagccttctcgaaccgacgcatccgccacccatgctgcgctgccacacgccaccgcaatgcgcccgcgcgccgctccgccaccacggaaggtgggagtcgcctccggcggcggcgcccgcggtggtagtgcggtgcgcgcggggtgcgccgcaggtgtccgggatcgaggcggcttcgccgggccacgcggctgtcacagcggctgcggttggggaacctcctggaggacgggctatcgtacaaggagagtttcatcgtgcgctgctacgaggtggggatcaacaagacggccaccgttgagaccatcgccaatctcctccaggaggtaggatgtaaccatgcacaaagtgttgggttctccactgatggcttcgccacgaccactacaatgagaaaacttggactaatttgggtgacgaaccgaatgcacattgagatctacaagtacccagcttggggtgatgttgttgagatcgaaacatggtgccaagaagatggaagaattggtacccgtcgcgattggatcctcaaggacctagctaatggtgaagttattggcagagctaccagcaagtgggtcatgatgaaccaaaatacacggagacttcagcgggtcagtgatgacgtgagggatgaggtgtttatgcactgtccaaaggctccaagattagcattcccagaggaaaataatggcagtttgaagaagattccgaatctttcagaccctgcagaatattcaagacttggactagtgccaagaagagctgacctggacatgaaccaacatgtcaataatgttacttacataggttgggtcctcgaaagtatacctcaagatataattgatacacacgagttacaaacaatcactctcgactacagaagggagtgtcaacaggatgatatagttgattctcttacttgcatagaggaaggagaggagaaaagcatgaacggctctgcttctgcagcagcgcctcacaaagaagagcggcagcagttcctgcattgcttgagatttgcagccaacgggcacgagatcaaccgtggccgtaccgtgtggaggaagctagctagataaaagtgttgtttcgtcataaatgatctcctccatttctctgctcacggctggcggcccttgtaccacaattttgtgatgtattgttgccctttggaatgtactcagccatgtatcggtgccgatttgtgacatttcttggagctgtagctgtctgtccgttttgtaccagtggacaatgtttgtgacatgcaataaactgcgtttctccggc

SEQ ID NO: 33184 - DNA, 1134 bp, Zea mays
  Clone ID: UC-ZMFLMO17072C10_FLI
gacaaactgaattatgctccaatgagaatgtggttcctctctaatcctccggggaaagcaacaattgaagtacagaatattgaggagtttacatggctaaatgacagctacagtccagtactcaaacatcttgggtcccaatccatgattgattactactttggaacgaatcgtgcaaactcagattcaaacctaaaatatcgaaacccaaagtacctgtcaatcctcaatcatctccgcttttacctacctgagatttatccaaagcttgacaagatggtctttcttgatgatgacatcgtagtaaagaaggatctggctggcctttggtcaatcaacatgaaggggaaggtaaacggtgccgttgagacttgtggagagagtttccatcgctatgatcgatacctgaatttttcaaatcccattatcaccaagagttttgacccacatgcttgtgtttgggcttttggaatgaatgtgtttgacctggctgaatggaggcggcagaacataactgaaatttatcactcgtggcagaagcttaatgaagatagatcactctggaaacttggtactctccctccgggtttggtcacattctggaacaagacatttcccctcagccggtcatggcatgttcttggtctaggttacaatccccatgttaacagcagagacattgagcatgctgcagtcatacattacaatggcaacatgaagccctggttggagattggtctacccaagttccggagctactggtccaagtatctggattatgaccaatctttccttcgggaatgcaacatcaatccatgaaggaacctggtgcttttagtcccttctgacataaccaatagcctgttttctgtcgatgtgcgctttagtgtagtcagcatagtactctcttgctttagatatcagttgttaacaagatttcttattgcctgtgcttcttgtcagaccctttgcataattgcaggaatatctgttatgtttttagagtacatgctttggagcagggcaaactttagatagtgcaatgctcttatgcgatatcgcctttatgtactgaacgtttgctgcaatcctgtaatttggaagcaaactttcccaacaatttaataggtattc

SEQ ID NO: 33185 - DNA, 1028 bp, Zea mays
  Clone ID: UC-ZMFLMO17072D11_FLI
gttttgctagggttctcatccttccgccaccgcccctgcccgccgctagcggcggtgaggatgacgcggcgtgggtgcgcgccatctccgccgccaccaagtccacctcggcgcccaagaccctcaccctcgatggcaccgtcaagtcctccatgggcggcctcccctccgccgcgctcctcgagcgcttcgccacctccctagaggagctctccatcgcgggggtgcgcctctcctcgctcacgggcctgccacgcctcccggcgctccggtgcctctccctccctgacaaccgcctctcggggtccgccgccctcgccgccgtcgccgaggcatgcggtgccacgctgcgccacctcgacctagggaacaaccggttcgcagaggtccaggagctcgcgccgcttgccggggtccgggtcgagtcacttgacctgttctagtgccccgtcaccaaggtcaaggggtacagggaggaggtcttcgcgctgattcccagcctcaagtaccttgatggcgctgacgctgagggcaacgagcgtttggagacggatgacgacgaggacgaggaggaggacgacgagggagaagaaggggcggagggagaggaggagggcgatgaggatgatggagaggaagaagatgacgaggacggtgaaggggacgaagaagaagaaggtgatgaggaggtgactggattctaagcgaggctactcatcacctgtaactttggaagtgtgagttagttgacatactattcacttgtacctcgtgcgatttcttatacgtgtacttgtgtgcgttctatgggacgcactgagcccataaatcgattcgtgactatgtaggtatgtgtagtgctgttgtgtgtaccttgaatttctttctacatcttcctgtggtggcatagaatgcgtgcagtaaggtatggtctaccttctgtttgacatgccttgtgtatttatggtcgatatgtgtttttgtttaaatgatgtttctctgttgctccctctgggtaacagattgtt

SEQ ID NO: 33186 - DNA, 1138 bp, Zea mays
  Clone ID: UC-ZMFLMO17072F03_FLI
cctcgcgccgccgccgccgccgtgacggaaggaagaggaggagcaaggagcacgacgcgatgggccactccaacgtttggaactcgcaccctaagaactacggccctggctcccgcgtctggtaactatcccgcgacgctcccttctctgtatagcaggatctcggttcttttcgcttttttagaatgtggacgacctgcttgtgatagggactccatggatctgttaaggttctcactctttttttatggttagcttagtcccccccgtaaagctctggaaggattaggtttcttggattagcgtgttgctgctgagatttgatgtgcatctctcgtataaactctgctatcttgttaaacatcagaagtctttgtatcctctagtttagtatctcagttcgatgtagagtaatttcagctggttatatgtagcagctgctttgatctgccgtttggtggtcttactcatggctgtttgatgaaataacctgattgatttttagctgatatattctatgactaattgttctattaatgagtatgcgtttggtctgttgtattgtgcatttatgccatagcgcgagacgtaagcagcacaaagggctcttgtttttaagggattgcgatttggtaaaaagatgtggaaatagaccgttttttacctgtatgtgcaaagagtttattttacaatacaacaaaatagcctcggtaatgtttgtggtcttgcagccgggtctgcgcgaaccctcacggtctgatcaggaagtacgggctcatgtgctgcaggcagtgctttcgcagcaacgccaaggacattggtttcatcaagtaccgttgaagaggccactgtgctgctgcggagaacttcctacatcaaagaaatgggtccttcattagaaggcctaatttatgcgctttagctttttgttcagaacttgagactcatgtgttaaactcgacttgttaaagttttgatggctactttgtgcttgttggaccagctataatcagaagattgaaattttctcactcatgatgtttgttcttatcctgcgtgtatgctcagttttctttcttgagttactgtattagctgggcaactgttcctcgcttcatggatgattctgctgaagttg

SEQ ID NO: 33187 - DNA, 1516 bp, Zea mays
  Clone ID: UC-ZMFLMO17072F09_FLI
gaaaccgacaagacctgttttgaaggtgagaaaaccaagggctttagttgatattacacctgctgtgtcctctgctttgcttatgaatgagctccaatggattggattaatcgttaagcctatagactattctttaaaaggtggaatattgcatatcgatgctggcgctgaactgaaaattgaggagtctcagatgattgaaatagaaatttacgtaagtgatatggagtgtgctaattctgccaacagctccatcaaagctggaaaggttgaaaaggtacctattgaaaatggaaagatagaacttcctgattgggctagtgatgtgactactcttgtttggtttcctgttcgtgctattgatgacacaattgcaagaggagaatccctagtgtctcagaaacagagcgttgtagatgggatgagaatgattgctctcaagcttgagtttggagttttccgtaaccaagtgtttgaaaggaccattgcagttcattttactaacccattccatgtaagcacacgcgtcgtggacaagtgcaatgatggagctctacttctacaggtgatattgagttccggagtgaaggccacactgcatgtaaaggatgtacggttagatcttcaatctggatttgatcacttgggcaaaggagatggacggccagctttgagtttattccctctggttattgctccttcttccaaagctggaattttattcatgttacggttaagtggtacaaaggatgtggacgacgcagaaaatgcagacagcacgctgaatatcacctacgggatatctggtgacagaaaaactggagcacattctcctatacctgtcaaatctggtgattctgaagaacttgtgttcaagattgcactcagactgaagcgacctgtcctggatccatgtgtagcagttggattccttccattttcaactgactgcctgagggttgggcagttagttaatatgaggtggagggtcgaaaggctgaaaaccccggaggatgcatccatatccattgacgaaatactttatcaggttgaggcaaacccgcagaactggatggttgctgggaggaaatgtggtcacgtatcgttgtcaaatgagcaaggttcaaggatggagatcacggtgacatgtgtgccactggtgtctgggtacgtccacccaccgcagctggacctgccggaggtgggtgaggcaaacattagctgcaacccagcagggcctcacctggtgtgtgtccttcctccagccatcagcacatcctactgtataccagcgatatgattcttcctgggctgacagtttgctgccatttacacatagatgagccatagtatgtttttgccgagacgtgttttttgtgtgtagacatgtttcactggaatgtgtttcttgtaattctgttgtgccatgatcagtgtacaattctgcattgactgatggtacatgaaactggttccccagtattccgtgaaactgcaagccggatttgctgtgttc

SEQ ID NO: 33188 - DNA, 907 bp, Zea mays
  Clone ID: UC-ZMFLMO17072H05_FLI
gtggagcccaagaacttcagctcctatggtggccgccgcgggaacaatgaggtggtgatgaggggagcgtttgccaatatgaggatcgtgaataagcttcttaatggcgaggctggtccctggacgatccatgttcctaccggggagaagctctacgtttacgacgcggcaatgaaatacaagtcggaaggtcatgacatggtcatcatcgctggctccgagtacggcagtggcagctctcgtgactctgctgccaagggaccaatgctactgggtgtcaagtcggtgattgcaaagagcttcgagcggatccaccggagcaacttggtggggatggggatcattcctctctgctttcaagcaggagaggatgccgattcactcggcctcaccggacgtgagcgctacaccatccacctccctaccagcaccgccgagatcagtcctggtcaggacgtgaccgtcacgacccacgacggaagatcattcacttgcactcttcgcttggacacacagcttgaggtcacatacttcaaccatggaggcatccttccctacatggtccgcaacctggcggcacaaatgaaataagttgaagtttattggtgggaataaattaaaaggtactcaatgccacgtatttggcgtatgtatgtaaataagtggcacattctaatcttcaattgtattattcgctctggcattgaggtgggtcgtagctgcattatactttctccgcaagacatgagcatggattttgttttagcaacagattatttgtactcttgattctttggttccatgctctcttcggccatctccatgtcaatttgctttgcaaacaatataatatcagcgtgccgtgcccttgtagatttccaaatggttatatgcatatgtactattg

SEQ ID NO: 33189 - DNA, 907 bp, Zea mays; identical to SEQ ID NO: 33188
  Clone ID: UC-ZMFLMO17072H06_FLI

SEQ ID NO: 33190 - DNA, 1996 bp, Zea mays
  Clone ID: UC-ZMFLMO17073A05_FLI
ccgaccacccgccgaaggccagagagaaatatctcatcttctctccaccggatcggttcaatcgagagcgagggagaaagggaggtggtgcgtcgaggggggccgagattttgccggtttggagccagataggggtatgagctgcttcgcgcaccgccgccgcttcgacgtcgcccgccgccaggacggcctcctcgtcttcgtcttcttcctctcgattcccatacgtaccagtagttttaatttaagtagtagtaattgtagtagcaatctcttgtaaactgcgctcgcctttgcgtgttcgtggtccttttgcgctttctcgtccctctttctctcaatctctccttattcttctccttccacggcgaagccggcggctggtatggatcccaatggcctcaaaactggaggccttttgctcccgaccatcgagaggcggtgcacgtcgcctccatccgtcattgtcatcggcggtggcatctcgggcgttgcagctgcccgtgccctctccaattcttcatttaaggtgactgttttggaatcgagagatcgtattggcgggcgcattcatactgataactcgtttggatgcccaattgatatgggagcctcatggctacacggcgtgtgcaatgagaatccactggcaccattgataagctatcttgggctgaggttataccgcacaagcgatgataactcagttctgtatgatcatgatttagaaagctatgctctctttgataaggatggtaatcaggtcccaaaggagacagtcgataaagttggagaaacattcgagagaattcttgaagagacggtgaaagtgcgcgatgagcaggaacacgacatgccactgctacaggcaatttctattgtgtttgagaggcacccccatctaaagcttgaagggctagatgatcaggtcttacaatggtgtgtctgccggcttgaggcatggtttgctgcagatgcagatgaaatatctctgaagaactgggatcaggagcgtgttcttactggtggacatggactgatggtaaatgggtactatcctgttattgaagctcttgctcaaggtcttgacatcaggcttaaccaaagggtcaccgaaattacccgccagcacaatggagtcaaggtcactactgaagatggcacaagctacttggccgacgcctgcataatctcagtgccactcggcgtgctcaaggcgaacgtaataaagttcgagcctgagctgccccagtggaagagctccgccatcgccgacctcggcgtgggcaccgagaacaagatcgccatgcacttcgacagggtcttttggcccaacgtcgaggtgctgggaatggtcgggccgacgcccaaagcctgtgggtacttcctgaacctgcacaaagccaccggcaatccggtcctcgtgtacatggccgccggaaggttcgcccaggaggtggagaagctgtcggacaaggaagccgtcggcctggtcgtttctcacctgaagaagatgctcccggatgccactgaaccgacgcagtacctggtgtcgcgatggggctccgaccccaactccctggggtcctactcgtgcgacctggtcgcgaagccggccgacgtgtgcgcgaggttcgccgcccccgtcgagaacctgcacttcgccggcgaggcggccagtgccgagcactcggggtccgtgcacggcgcctactcgtcgggcatcgccgctgccgaggaatgcaggaagcggctcctggcgctgaagggcatcccggacctggtccaggtcgcggcgtgggaggagatggccggagctgtggctcctctgcagatttgcaggacctgagtgagattggatcactggctgcctttggacattggagtggatcgtggatcgcttcgctgctccctgatggttgccgagtcttttttttatatttaccttgaaggccgttgtgtcttgtctggaataaatcaagattgactggcactg

SEQ ID NO: 33191 - DNA, 1385 bp, Zea mays
  Clone ID: UC-ZMFLMO17073A06_FLI
gcggcggtggcggtgctgctgatggcgacggggctgcgcgcgcagctgcgggtgggcttctacgacagctcgtgcccagcggcggagatcatcgtgcagcaggaggtgagcagggcggtggcggccaacccgggcctcgccgccggcctgctccgcctccacttccacgactgtttcgttgggggctgcgacgcgtccgtgctcatcgactccaccaagggcaacaccgcggagaaggacgccgggcccaacctcagcctgcggggcttcgaggtcgtcgatcgcatcaaggcgcgcgtcgagcaggcctgcttcggcgtcgtctcctgcgcggacatactcgcgttcgcggccagggacagcgtcgcactcgtaagtcactgctttttagtgtcagtggacgcctgccttttgattttaacccgacatgattagtctacatggatttggaatccaatgctggactagactgaaaagcatatgtgtctgttcgacctttttttgacgcacatgatgccgcgtgcagctgcctgaaagaactcgatgcattgccgggcccgggcatgggtccaactcccaactttatttttttacagtatttgcttactctccaatccatccatccatccatccatccatccgtacgtataggccggcgggaacgcgtaccaggtgccggcggggcggcgggacgggtccgtgtcgcgcgcgtcggacaccaacggcaacctgccgccgccgacggccaacgtcgcgcagctcacgcagatcttcggcaccaagggcctgacgcagaaggagatggtcatcctgtcgggcgcgcacaccatcggctcctcgcactgcagctccttcagcggccggctgtcggggtcggccacgacagcgggcgggcaggacccgaccatggacccggcgtacgtggcgcagctggcgcggcagtgcccgcagggcggcgacccgctcgtgcccatggactacgtctcccccaacgccttcgacgagggcttctacaagggcgtcatgtccaaccgcggcctgctgtcctcggaccaggcgctgctcagcgacaagaacaccgccgtgcaggtcgtcacctacgccaacgacccggccaccttccaggccgacttcgccgccgccatggtcaagatgggctccgtcggcgtgctcaccggcaccagcggcaaggtcagggccaactgcagagtcgcctgatccatcatcatcatcactcgtgtggagttgtagattcgttatattgatttggaccggacgacgtcgacgggatggcgtagcatagcatggcctgcttgcgcaattgtatgtatgccctgtacttgcgcgtgtatgggtttcgctgtgcaaattttcgttggctcccc

SEQ ID NO: 33192 - DNA, 1825 bp, Zea mays
  Clone ID: UC-ZMFLMO17073D11_FLI
cttcctctccccaccgcacgcatccagtggctgctgccgcctcgcccccgctcctcctcctctcccgccacccacgccgcgcaggcctcaccaactggtcgtcgttgcctaggggccagaacgcaggatccacagccccgccggccgccaccgcctccaagcctgctgcgccgctcactgtcaacctgcctcgccaagtcgcccggatctcgacgccccacctgcggccggcggcggccccgccaaggtgccctgacagagttcgtgcgctggctggttgtctgcggaagactctccctctggcatgtaccgatgcgatctctcaactagtcataagcagctgaaagtagttcacatatatacttaaatactcaatcaatgaaagtagtgcactaaaatttgttccgacatcaagtttgctaaactattacggcaacatctaagctatgcattaacatacaccacgcagttcgattgtccagctgataaaaaaacgaaagctacgttgtctcctgctcctagagtgaactgagtcgacagaccacatactgacatacgccttgcattcttgtaaatatatcagattttgcatcatctggacgctagatagttttttcttgtgttcagactttcgaagttgaattgaacaaattataaggatgtttagaattgctactgaattgttagagaattatatagatatgttatgttaccgacttttttttacctgatgtgttcttttatctcggcaaccctggatttgaatcctagctccgccactgccgctacctccctgctccaaccccgcacctccgcttcgccatgaacccttcgtcgtcatccacctcctcctctggcgggtaccactctagggccgctgcctttgcttccccgcagccgcgcggcggtggcggtggcggtggcggcggccgagatgggagcgaccgcatcgacgccctcggtcgcctcctgacgagggtgttgcgccacatggcggcggagctgcgcctagatatgaggaccgatggatacgtgcgcgtccgcgacctgttgaagctcaaccttcagaccttcgccaaggtccctctcaagtctcacactgttgacgagatcagggaggcagtcaggcgggacaacaagcagcggtttagtctgttggaggaagacggcgagctgttgatccgggcgaaccaggggcacacaatatcaactgtcacatcagagagcctgctgaagcccattttgtcccccgacgaagtgtcagtttgtgtgcatggaacttacagaaaaaaccttgactcgattttgcaatttgggctaaagcgtatggcaaggttacacgtacatttctcaagtggcttaccatcagatggagaagtaaccagtggtgtacggcagaatgtaaacatcttgatacatctggacgttagtaaagcacttaaaggtgggatgaagctttatatttcagacaacaaagtgatcttgacagaaggttttgatggcgtcgtccctgtgaaatacttcgaaagagtcgaaacatggccaggacgagctccaataccgttccaaagataacagcccatgtttcagcattgctagttcgtacgtactgaaaaatgatttgccgtgctgtatcccggagaaccattgggtaaatttgattgtgctgggacctctcagtgattcgattgatgattttccggactccgtgaaaagttgtggttctttgtgagtcttttcggtttttgtgtaacgaaaccgaaagacgagtgagttagtttctctgtgcctaggatgtcaagatggtttgtcaaccatctatcct

SEQ ID NO: 33193 - DNA, 1920 bp, Zea mays
  Clone ID: UC-ZMFLMO17073E03_FLI
ggtgaaaaaaacaactacaatacagatggctctcctatgcaaccaggaaagcatcctgttgatccaaagacatcagtcttggataaatgtgattcaagcatgcatgaaagtaacaaaagcacaaattctcttcaggatagaaatggatcaactcattgcccaccagatggaaatcctctgctcggtttaccatctggaaaagagaaatcatatatcaacagcaacaagcaagattcacagaagcctaaaccccagatggtctgctcacctttgaaagaaaacaaactggattctcactccacaccattaaaacctaatgggtcaaaattgactccacaatcaagacaatacaatgctcaaaatggaggacgacatggcactgcaaagcatgcaattcctagtcctgctgatacttctagtccagctaggaaggacaatacttcaactgcatatgctctcaaagaagcccgggatttaaagcataaggctaatcgtttgaagggagaaggaaaagagcttgaaagtacaagactctactttgagtctgccctaaaatttttgcatgttgcatcacttttggaacctcctagctttgatggattgaaacaaggtgatgcagcccagagcatgtattcagatactgcaaaactttgcaactttgttggtcatgcatatgaaaaatgcaagaagatggctgctgctgctttagcatacaaatgtgttgaagttgcttatctgaaggctgcatactacaaacacccaactgcaagcaaagatagacaagtgttacaggcagttgtacagactgcaccaggtgaatcaccatcatcttcagcctcagacattgataatttaaataacaatggattatccaaggcctcttcaagcaaggatgctaattcaccacaagtggctggaaatcatttgttgctggccgctcgaaatcaaccacacttgatgcggttactagcttatacaaatgatgtcaatagtgcctttgaggctactcggaagtcacacatggcaattgcttctgctgctggcaatcatgaaaatggagtcgatggtcttccttcagtaaaaacagtactggattttaacttccgaagtgtgaatgatctactaaggcttgtgcgaatttcaatggagtccatcagctgctgacgtgttcagaatctgagaaagtgccacccgttggaagttcctgttggatgtttaatccaattaacttttcttgatgaagtagcatgaaactgaatagttcaacagtgaacagtgtaaaagcataggtcttctcatttgagcttgctggtcaatttgtacagagactgatcgtggaattcttccttctttcttattttgatggcacccagttagtatacaaagttgcatatccacttggatgatttagttagtgaggccacaggttaagatgagctttgcactgctcaatgctcgtaatagttttgaggaagaaggatgctcttgcgcatgcagttgatgattcatttgagcagtgcaaaatggtgtgtccctatcttgcgcatgcagttaatgattcatctggaaagcggcttgctactgagcattctcttccgaccgtatcatagtttcctttgagcagtacaagatggtgtgtcgccacttcaattttgatgggagaggacagcaaagccaactaattgtgctaaccaagaaatcagctactatgccatgtcttctggatgaagttcacgcaggtttcaaataagaaatcacttggactatcggacttgtatgaatgttgtacaaagatctctaatgtacattaaccttttttttttcagccagcgcatgtacatggtggggcatttgttaccacgtgctggtctctatgtatgacgcctttggttctgccaagcctgtctttcattattcttc

SEQ ID NO: 33194 - DNA, 1712 bp, Zea mays
  Clone ID: UC-ZMFLMO17073G12_FLI
acaaactaggcagtagtgcactctacctatagctctctccgatccatgcagagctcggtggtcatgttgtcgagcacggtggcagcggcggccatggcatcgctgcgcaccctcccgctgccggtgctggtgcccctcgtcgcctcggggctcgtcttcctggccaccgtgctccgacgcttgctaaggcggcagcggccggtgtacctcctgaactacagctgccacctcccggacgcggagcggcaggtgaacctggaggtgtgcgagtacttcggcctcaagtgtcgccgctactccgacgacatcgccgacttcatgcggctggtgtacagcaagtccggtctgggccaggagaccttcgcgccgcccttcatctactcgggcaagttcgagaagacgctggcattcgcgatccaggaggccgaggagggtctgttcgccgtcgtggagcagctcctggcaaagtcggacgtgagtcccagcgacatcagcgtcctggtggtggcctgctccatgttctccccgatgccgtcgctggcgtccatgatcatgcaccggttcaatatgcggccggatgtgaagtcgtacagcgtggccgggatgggttgcagcgcggggaccgttggcatcgacacggcggcgcggtcgctgcgctctcggcggacgcccgggtacgcgctggtggtggtgacggagaacacgagcctaaactggtacttcggcaagaacaagcacatgctggtgaccaactgcatcttccgcgtgggcagcgcggcggcgctggtgacggacgtcccgtcccggcgcccggacgccaagtacgagctggtgcgcacgctgcggacgcaccacggcgcggacgacgcggccttcaacgcggcgctgcagatggaggacgaggagggcaacctgggcgtggcgctcaccaaggacctggtccgcgtcgccggtgcggcgctgcggaggcacatcaccacgctgggtccccaggtgctgccggtgtccgagatgctccggtacgcgtggcgcgtggcgcgcgcctacgcggccgggaacagcaaggccgcggcggcggaggtgcccgacttccagcgcgcgttcgagcacttctgcatccactcgggcgggaaggcggtgatcgactcgatcgcgcggctgatggggttcgggccctacgtcgtggagccggcgcgctccacgctgcaccggttcggcaacacgtccagcagtctggtgttctacgagctggcctacttcgaggccaagcgccgcgtccgggccggcgaccgcctctggatgctggcgttcgggacggggttcaaggcgtgcagcaacgtctggcgcgcgctccgcgacgccgcgcccgacgccgacaacccatggaacggatgcgtccaccgctacccagtgccgccgccgccaccgtccaagacgcacaagcatgcttgatatagtactatgtgctcctccgtcgccgcgtctcgtgcctgtgtctgcgtcgattgtttgataagcaacatcaacgaaggcgtatgtatcctagctagggaccgggtcagttgtttgatacgcttggatgcatgatgatcagctgtctcattggctccaagaagacctatggattgtttgatttctgtgtcagtgatatgtcatatgacaacatgagtatccctgtttggaaagtgaaatatataagaaatttaaatatt

SEQ ID NO: 33195 - DNA, 1053 bp, Zea mays
  Clone ID: UC-ZMFLMO17074B08_FLI
ggcgcgggcgccgtggtcgtgttccggcggcggaggcgatacgtgacgcacagcgacgtgacggccagcctgacgctcgccgtctcccacaccatcaaccgcgcgcagctgcagggctggtacaaccgcctgcagcgcgacgaggtggtggccgagtggaagaaggtgcgcggccggatgtcgctgcacgtgcactgccacatctccggcggacacttgctcctggacctcatcgccggcctccgctactacatcttccgcaaggagctccccgtggtacgtacgtgtacgtgtctacctgctctgccgccccacatgcgtggaaacatgtacacgacgaggacgctgcagattgcgatttgatttctccgcagggcccttgttgtgttcatataatcagatcgtttaagtcgtcagtcaccggcaccgcgcaagcttcttatcttgcgtctctgcttttggtgcaggtgctcgaggcgttcgtgcacggcgacggcgacctgttcagccgtcacccggagctggaggaggccacggtgtgggtctacttccactccaacctggcccgcttcaaccgcgtcgagtgctggggtccgctccgcgacgccgccgcccccgcgcccgccgaggacgactccaccgcgccggccgccgcctccatcgccatggagggccagatgcccgtgggcgagtggccgcaccggtgtccccagcagtgcgactgctgcttcccgccgcacagcctcataccctggccgaacgagcaagacatggccgccgccgccggccaggtccgacagcagtagtgaagctgcacggaggaggggcctttgcctcataccctggccaaacgtcctagatacactactagcgcgttgtttggtttgctattgctattgctagatgcaagcgtgtgcgtgcagtgcaggtgtggagtggcgtcaacaccttgcatgcacgcgctattctttaattggtagcttagctcagctcagttcagttccacttgtacaccttcgtatttggaagcagcttggttgaggttgggggatg

SEQ ID NO: 33196 - DNA, 596 bp, Zea mays
  Clone ID: UC-ZMFLMO17074C02_FLI
tggcgtgcggcgagccctcgtggcgctgcgctccggttccccgtctactatctctgcaacgctctcccgccaggcggcagctcgctcctcggagctggcgggtgcgcccctgccgcgcgcctctcgccggcgcctcgggatctcgaggtagcctgcctgccgcctggagcttttgaatctctagcggagcatttctattcttctccttggctcagatccggtggtgcagggtgccggttgtggcgctcggcggcgtgcagggttcgctgatgccgatgcacagcgccaccgcgtcggcgctgctcacctccatgctcgggcttaagcctgactcttggggttggctctccgagggatttgctacacctctataacaagacacaagagcctgatttttcgcctttgtactagaggattccaataacatttttacatgccttgcgggagtacgcccttggacttttgctgatggaatctgcgaccgaaaacttatggtcttatttccatgatatgcatcgatttttctcggattatctcttttttttcccccttgtatggagccatgggaagtatcaggatgtgttatctggagcatc

SEQ ID NO: 33197 - DNA, 1928 bp, Zea mays
  Clone ID: UC-ZMFLMO17074C05_FLI
ggaaattcatcgctcagccatggcaatggaagtgaaattggacgctatcttggttgggctatggcaataatttatatgggtgggcgccttccccagattttgttaaatatgcaaagaggccacgctgaggggctgaatccattaatgtttacctttgctttactgggaaattcaacatatgtaggaagcatacttgtaaatagcttggactggtcgaaagttgggccaaatctcccgtggctcgtagacgctggaggatgtgttttgctggattcttttgtatcctttacacctctcctactttggtcacaatatgtttctactccataatacttgtctgagtataaataaaacaaacgtttgagaagaatactagttacagaaaaagactggcccttaagtgagtactgagtacacagcaagtaccctttatacttggccgtgacaatgttaacctctgattccttttggttgaggtcaacccatgtagaagttaaatattgaccaataattagtcaaattatatgaatacttaacatagatagcggcaccaatagcttcatattcaaatcacatttaagaccccgctgattttgtagcattgataataaaatgtaggataaaacatatttttaaaagctattcctaatttaaaatacgcaccagattgatagacgaatccagtcatttttgtgtgcgtcaatgttcaaaaaaaaatgggatgagcgtactaagcggttcatgtcatggaccttcggtccatagggatagttgtcttctccggcgaggttatacccctctgccgcaggcttggttctagggtagcagccctaggcgcttgagagttcaagagagagattggtttgataatgtattccttcttcctttgtctcctgcatacaggcctatatataggccaccggttgaccaactaggcaaccactaattaggtaagtgactaattggaattatcttccctacaagctaaccactaattaggtaagtgactaattggaattatcttccctacaatttaggtctatcaatttagccaccaaattagtcactttcctttgccatgccttccttgcgcgcgctttcctttgccatgctttccttgcgcgcgctgctgccaaatcagtcacttttctttgtcatgccttccttgcgcgtgctgctgccagcgcccgtgccttccttgcgcgcgctgctggcagcgccccctgcggtctctcgcttttggcgcgtataggtgcggccccacatgagtgaccgttccctatgatgcccatgacatctccccctcccttgaggaccagctcgtcctcgagctgccatagacttacatgagtgaccgctctctatgatgcccatgacagttcaaccaaaaaattgaactgatggaagaagttagtcaattcacttatatactttaacagtcctcatgcaggaaccgcacatgttggttttatgtgaacctgttaacctatgctccactgataaaatattctccaactttgctgcacaaaatatttggaatagttgtattgttaatttacttttagtggacagcccttaaccatgttgcacagatcattcttcagttcctttatttccattatcggaagcaaagggagctttcagatgagcacgacaaagcagataaagcctgacagaaatggtttcttcttcagtacaaagaactgaagctgaaatgagtgctcatacaactggctctgggtagcagcatcattcttacgtgaagagcaccactcatactcaggagtcggggacagatttggagcgtcatttcactggttgctgcttggggagggtagttctcacggcgtcatctcttgtggagaggcttgtgcacttaatttgccttgtagtatcaaaacgtcttgtataatattatctctgttctc

SEQ ID NO: 33198 - DNA, 2712 bp, Zea mays
  Clone ID: UC-ZMFLMO17074D02_FLI
agaaaatgtaaaattgttgcttacgggacaaaatcatcactttggaaatcctttccttagctggtcatcttctctttgctatggtgatattcatccggatgcactacttaacaaggagaagcacataaaaaaggatgagaaggcatatcatgttaacttgcttaattaccattccaacatggttgaaaccttgaagagttggaggaagagatggctaagttgcggtgatacagagaatttgttcagggataaccctagtaatcagatgcaaggagttatgcagctgaaagctactaacagtggaatgcccatgaaggttgcacaaagaatcgatgtttcaaagtttatgtcatacatcaaagttagtagaacacagctcaaccatataaagagactgaagcaatctggggatggtattcagaccaagcatgtttcacgtgtaattggcggccttgataaatctcatgtgaaaccttatggagctttattagaggatgaacagaggagactgcgcgagcattggctggaaatgtcttgcaatgatttacctgctgcctttgaggttcttagggaaaggaaggtgctgatggagaaatcaataaagttattaggccttgagcttcagcagaagaatgtatctgtcttgagaaaggcagaccagttaacagacataatgaaagggctaggacaacctggtgctagtgaaaatgatggtaccccagtttttcaaaatgaccaggtagaatgctcaccccaaagtatattgcaaggtgggcatgttcagagcacatctcttcaccatcaggatgatgagcagtctgtttaccatattcaccgtatgaatgtggaagatcatgatctcatggtagtcaggggtatagacataactagtcagagtgagaaaaactctgatgtgccagatcaaagtcgtaatggtatcagctgcgtagataaaggcatttactgctgtgccaacaaccctgataagcagagtgatgttctcatggacatcaaattatgtaaaggtggactggttgtttacaatcctgactgcaaaaatacgcaactagaagatcttgatggagtttcttacaaaggtccatcagttcatgcttgtgaccaagatcaggacctggaaagcattggccatgctgttgtgaaccacaattgtcacaatagtccaaatatttcttcggaaatgagtcatccaacgacgaacgctgtaattgaccaggaaactgagaatgttatgaaaccatcttgcagttcttcacaactacctaagtcgtctggagaacaaatgcatgtggaagattttctgtatctaaatgaccaagcagcaaaatttgagaaagtcagtgggcagttggcaggccctcttggccctccagagaatatgatgtataatgactcaggtgacttgcagattaaacagacttatctctcttcaggacaacatttttcttcagtttacttgaataatggcattttaagccatcagcaacctcaacttgccacaccagcttttgctttggacaatccagcatcatttattgagcctttctcaaatctgcagagcaatcgtcagcccgagacagaaaaggacattggagcagtcttctatccctttcgacacgcaactaacatcaaacattcagcgagtttgcattgtttagtgaataaaggcttggctcaatctgcttcatttcccaggttgttgcaagagcggcatcagttaatcgatcagagtgacagtgacctctatgcacaacctcatgaggattactgcacagatgtgagttgtccaactaaagtgaaccttcatatctctgaacagcattcttatactgcttttgcttcgatggatcataggtataactggttccccgagggctgtcagtcacataataataatgataatctgttggggttgcagtcaggtaacttcttaccccaggccttaccaagtggaagcagcaccgatggagctctgttcagcaccgcatcccagtacaatcagccatcagtacacatgggacatggtgggtcaaaccgcagccaactcattgagccaaggaatcaatttggcccacctcagaattttctttctaagagtcaagacacaaaccctatgtttccggatatgtatggcttcacccagaatatagccagtggcacaagcagtcaggtagcacctatagggtctctggattgctcacattggacaaatttcatacaacaaaattctggaatgccgtctgactttacaaacaggccatctcgagggccttggaccagataactctatgacaccctggactggatgtactagattggttggttttaggcgccacctaagttggttaataaggaaactggggcaggttggaacagaatgttttccagcatccatgacttatgtcatgtagtggttttgatctgtttgaatggtgtggtttcaggaattgcttttgcaccatacctgtctgaacgcaagcgctgggaatctggagtcaaagctgaggattcccgcttttgctgtcttgccctgctgatttttttttattttgataataagctgtgccccagtttccatgtgtagtctgcctatggtgccctcagcaaaacatgatgctgtgttgttctcaattattttgttatttttttttgggttgacatgccagttatatatgaagacaagatatgtatacc

SEQ ID NO: 33199 - DNA, 1807 bp, Zea mays
  Clone ID: UC-ZMFLMO17074D09_FLI
gctcgccctcatcccctcaaacctccagctccccacctcccccgctcgctcccttccaggagctgccataccggcgacggctcccaactctccctccacatctcgccttctccccattcctctcctggcaagatctcctagccactgcgtccgcccccaccctcgttgcctggatccggcagtccctccatgctcatccgcgcctttcccgctctctcctcgaccggctcgctcccgtttgcaaccacccacatcccgttctgctacagagatagtcctgatggcgctgaaggaggagacgcagcagcggatggatgacgcatcgactggaggtcattggtggccactcacgcctcctcagacctcaccctcacttcgtcgttagcgcaggttcggccaacggcccccgacccgatcgcaggtcctcctcacggcgaggcacagttatagcaaaagaaagaaaaaacaccttcctagcagaactgaagatgccatctcatcaagataaaaagaggaatatatcttcaaatttctcaaagcacgccgtcaaagatgaagatgaaccagcatggacacctcttcgtgacacatacatgcttggttctaaattgaaggattgggacaaaatgaaggcttttgcaaatgctcttgtgcacattcatccaagccacccagggcacttggactctgctaattccattgaggagaaggacaagatcattgagataacaggactccagaacttggccaagtcattatctgcacagcattgtgttcagataaagtctgctgaatacatggaaaggagagcttcaggtgttcatgagaagtataatttgcaatcaggaaaaccaaagttaacaggaagttcaatattcaggctagggattaaaacgaggcttactccatttatgaaagccctacttacaacagaagttaagtgatccagccaaaaattcatgatcctttacatgccaattataaaagtaccaccgcatgggaagaaaagtagcaactgcaattctgaagtttttgtggtagatgccgactgcattatttggtttgtccgaactctaaaatgccaccattctctttgtccttccgatgccaccattctattttagttaattactccattcctgttgatttttgcgtctccttccaattaaagaacatcctcgattttataaacttaccaaggacatcatttacaggcaattggttggcaattcactataaccatttcatctcctagcagtacattttaagggttcaaattgatcgaaagtgtagatctagctcctctcgaggagctgatcgatcccctgacaggaaccgggccatgctgatgttcaaaagagttgtcagaagttcatgacatctggtatttattatatcttcttttgtagtgggctggtgtggtctgcttagcagcaggtagcactacaaccagcaatgtatggatgaattgaaggtagtaaagaacgcagacaattttatagaaactctgcatcttgaaactggcatgattgacaaagaagctggatgaatcctttggattggtgtcttcttatcaccaagcagtaatgtgaagcaagttcatttgttgactaagaacagatgagcacaaatcagtgaagagttcgttgcactagagatggaggatggataggtggtagatttcaatatggctttgatactattgtttccctttacaatctttgtacagaacaagaaaaatgacgttgtatgtggatactattgtaattcaagaatttatttctgaataataaatatatttgtttat

SEQ ID NO: 33200 - DNA, 1575 bp, Zea mays
  Clone ID: UC-ZMFLMO17074E01_FLI
ccgctccttcctccccctatctagctagccttcccgttcccgttcctgcatcgcggcggagatgggcgcctccaccacgccgctcgcgtcggcggcggcggcgctgcttctgctgctgctcgcgccgctcgccgcggcggcggacatgtcgatcgtctcctacggcgagcggagcgaggaggaggcgcggcggatgtacgccgagtggatggcggcgcacggccggacctacaacgccgtcggcgaggaggagcgcaggttcgaggtgttcagggacaacctccgctacgtcgacgcccacaacgccgccgccgacgcgggcgtccactccttccgcctcgggctcaaccgcttcgccgacctcaccaacgacgagtaccgcgccacctacctcggcgtcaggagcaggccgcagagggagaggaggctcggtgacaggtacctggccggcgacaacgaggacctgccggagtccgtcgactggcgggccaagggcgccgtcgcggagatcaaggaccagggcagctgcgggagttgctgggctttctcaacaatagcggctgtggaaggcatcaaccagattgttactggcgacatgatctccttgtctgagcaggagcttgttgactgtgacacttcatacaaccaggggtgcaatggaggtctgatggactatgcgtttgagttcatcatcaacaatggcggaatcgacaccgaggaggattacccttacaagggcacggacggacggtgtgatgtcaacaggaaaaacgccaaggttgttactatcgacagctatgaagatgtaccagcgaacagtgagaaaagtctgcagaaggcagttgcgaaccagcccatcagtgttgcaattgaggctggtggcagagcatttcagctctacaactcgggtatcttcacaggaacctgtggaacagcgttggaccatggtgtcacggccgtcggctacggcacagagaacggcaaggactactggatcgtgaagaactcttggggcagcagctggggcgagtccggctacgtcaggatggagcgcaacatcaaggcgtccagcggcaagtgtggtatcgccgttgagccgtcgtaccctctgaagaagggcgccaaccccccgaaccctgggccgaccccgccttcccccaccccgccgcccaccgtctgcgacaactactactcgtgccccgacagcaccacctgctgctgcatctatgagtacggcaagtactgcttcgcctggggctgctgcccgctcgagggcgccacctgctgcgacgaccactacagctgctgcccccatgactaccccgtctgcaacgtcaagcagggaacctgcctcatgggcaaggacagcccactgtcactgtcagtgaaggctacgaagcgcaccctggccaagccgcactgggctttctctggcaacacagctgctgatggcatgaagagcagcgcatgagaaaaacgcagcatggcattaggccgtcaacagccagcatgattagagcccccctgcatgcagaatgatcacccggtcccgtagttcacgacgaaagcatggct

SEQ ID NO: 33201 - DNA, 943 bp, Zea mays
  Clone ID: UC-ZMFLMO17074F02_FLI
gcggaaagcagtgtccatgtctttcaaatgggacatgttgtgagaaatactgtgggtgtccaaaaatttgcaagaatcgttttcgaggatgtcactgtgcaaagagccagtgtcgcagccgccaatgtccatgttttgcagctgacagggaatgcgatccggatgtttgcagaaactgttgggttgggtgtggtgatggtacattgggagttccaaaccagagaggagataattatgaatgccggaacatgaaactgcttcttaaacaacaacaaagggtcttacttggaagatcagatgtctctggctggggagcattcctcaagaatagtgttagcaaacatgaataccttggtgagtacactggggaactaatctcacacaaagaagcagataagcgtggaaagatatatgatcgtgagaactcatcgttccttttcaacctgaacaacgagtatgttcttgacgcatacagaatgggtgacaagctgaaatttgccaaccatgcccctgacccgaattgctatgccaaggttatcatggtaactggtgatcatagagtgggcatattcgccaaagaaagaatcctcgctggtgaagagttattctacgattaccgctatgagcctgacagagcccctgcttgggcccgtaagcctgaggcgtcgggagcaaaggatgatgggcaaccgttcaatgggcgtgcaaagaagctcgcccaaaacaacagaggctgaatctgatttgattctttcattgttaggacaaatttggcagccattcaactaatataaggaacctgtcattcataggccccaatttatttgaactcgtcattgtaactcgtatgtgcttgaattctccatggcagctggtcctgccatccgtagagttaggtcccgtttgttttgaggaactaaaaattaatccctctattttagtc

SEQ ID NO: 33202 - DNA, 813 bp, Zea mays
  Clone ID: UC-ZMFLMO17074H04_FLI
cctgaagcgagtgctgttcgagttctacggggaggagccgctgcggtcgccggacctgtcgcgcgtcgtcaactccaaccacttcaacaggctcatggcgctcatggacgactactcggtctccggcaatgtcgcgttcggcggccagatcgacgagcggcggctaaggatcgccccgacgctgctgctggacgtcccgctcgactccgcgatgatgaaggaggagatcttcgggccgctgcttcccataatcacgtaggtggacaagatcggcgagagcttcgctgtgatcaactccatgcccaagccgctggcagcttacctcttcagcaacgacgggcagctcaagcagcagttcgagaggaccgtctcggcgggagggatcatgttcaacgacaccggcatccacctgaccaatccgaatctgccgttcggaggagtcggggagagcggcatgggcgcctaccacggcgccttcagcttcgacgccttctcccacaggaaggccgtcctggaccgcagcttcctcggcgaggccagggccaggtacccgccgtacacgccggcgaagctcgccatcctcaggggcgtgctcaatggcagcccgctagccacggttcaggcggctgcggggtgtacaggaggggcatcagctgactgactgactgaccccccttcataattattattaataataagcataaatattcaccgcatacacattgctgtgcttttattaaggttgttgtgagggcgaaaaatgtattgaccctttgcgtgtgcgcgtgcgtgtatagcaactattaataaaag

SEQ ID NO: 33203 - DNA, 971 bp, Zea mays
  Clone ID: UC-ZMFLMO17075A03_FLI
ctcttgcgcagcgtaaagaagacagaaaggcaaagctacaggcacaattttcacaaatgcgtcctgttgcaatggcgccttcagtaggtcctcgcatgcccatgtttccacctggtgtccctggagttggtcagcagctgttctatggtcagccaccaccagccttcatcaaccctcaggctggatttgctttccagcaacctctgatgcctggtatgaggcctggtggtccaatgccgaactttatgatgcctatggttcagcaaggacagcaaccacagcgtcctgctggtagacgtgctggtggaatgcagcagcccatgccaatgggtggtcagcaacaggtgttccctagaggtggtcgtggctatcgctatcctactggacgtggaatgcctgatcctggcatgcacagtgttggtgctgtgatgccaccttcatatgagatgggagggatgccaatgagagaagctgccccccaacctgttccaattggggcgctagccactgcacttgctaacgccccaccagatcagcagagacttatgcttggtgagaacctgtatcctcttgttgaacagctggaacgtgagcaggctgccaaggtcactggcatgcttttggagatggatcagacggaggttcttcacctgctggagtcgccagatgctctgaaagccaaggttgctgaagccatggaggtcctccgctctgcccagcatctccagcagagcaatgtttctactgagcagcagctggctaatctatcattgaatgatggcgtcgtctccagctgaacgttaatgtttctgatgtttcggaagtgctgccagtttttgcttgaatactaccctatctagagtgtaatgactttgtttacttggtttgttggagttttagctgctcctattactaggggttggttttgtcttgactttgttattttggttgcatggataatcgtttcgttt

SEQ ID NO: 33204 - DNA, 923 bp, Zea mays
  Clone ID: UC-ZMFLMO17075A07_FLI
catctctctccgttcattccctctctcatgcgtgcttgggttgggttgggtatagacagttcttgcagtccacaccacctcaagtgagggggtgaccccccaccctcctccctagcgctcctcaccgccatgctgccaagaaggcagagcatcttccacctcggggaggagggtggcgccgccgccgtgcaccaccgcgtcagcgtcgtcggagcggcgtcttcgtccatggccatgggcggcggccggcgtgctcgcgagcgtgagcgcctcgtcgtggggctccagatcctggtgcaccaccaccaccacggccggcacgggcacgggcacgcgcacgcggcgaacgtagtcctgaagcagatggtgaggccgcgcgccgccgtcgccgccgccgctggttcgcgccacggccacggcagccacgccttctcgtgcagtttcctcaaggcctgctacctctgcaagcgggagcttagccctgacaaggacgtctatatgtatagaggtgaccaggggttctgcagcgaggagtgccggtggcagcagatactggtggacgaggcgcgcgagcgcgaggcggcggcggtgatgagcaacaaggagctgcagcggcgagcgcaggcccgccaccacagcccccaccgcacgcccatgcccatccgtggcaggccgccgaggaagacacttgccgtagcctagctagcaggtcctctgtctgctgaggaggacaaaggaatcaatcatggcgcatgacgaggagcactgctactactagctagtacgggtctactggactgcgtgggtaaaaaaaaattaatcatctcttctaatcaccgagtggactgctagagaccagacgacttgcttgtgttgtcatcatcaaccaataatcaatgaatcaagctgcaagtatatatacc

SEQ ID NO: 33205 - DNA, 2039 bp, Zea mays
  Clone ID: UC-ZMFLMO17075A08_FLI
ctcaattatctgttgcaggcaaggcatctgttgcttttttcctttataatacaaatccgccttcacttcaattcttactgtactagctcgatctgcataccattttctatttgccatgctgttcagggcttcttactcctgctagtgtactggattgcctaatattatcccctgcatttgtcatggtaatgcatcagatttgaagttcccctctgtcatgaaaatatagctttgaacaagatgtgtttattgcaaatttttcagcttagattccaaagatttgaaacgtcagcacactatgaatgagatttagcagggttgtagctatattgccttcaagtctatactggaaccttaattctttgcatgttgccatattctaccagtaggaaatagggaacacatccatagcttgatgccgttatgttgaattttgataggaaattgtaacattaatgttctattcttcatctcttcaggttacctattgagcaccggtaagctgtattatgccctggtgttgcttgggctaacaattcctcaggtgttctttcaggtatacctgagtgttgttgttgcaccttgtttttttgtgggtgggccagtggggatttttttgtttgttccagatgttttcatgtttgaagcaaagtgccttcctccctgtgtgttactaggttcaaactttttgacctgaggattagctttgtgtaaggctgcagaactgcatatcttttggttaccttcagaaaacagtattgaatatatatctctgcttagaatgaaatattggtactaaggacatctttatccacaatgcataaaggaaacaagaactataccacaaagtggaggagagaagaggggctgccataaagggcctaattcattaacatatccacttctatttttgttctccctatatagactatgataatccaactagtttgaacataggtttggtttgtgttaaataaaacattgcagataagcacatttcttatgtctaacactgcatgtctgaaacatgaacaacgtagcggaggtaacagggttgtctgttactctgtttcattaacactgccacttatgtgtttgtgcattctaatacttattttcctggagcagttccagtacttcctgaaggaccctgtgaagtatgatgtcaaatatcaggtgtgcttcagctggttctcccactctcttactacttccgatccagctccagctcttccctttctaaaggtcttaggtagtgtttggttccggagtatggtgggacacgactcctaatttattgttgtttggattgattccatatatgacagagtgactctaaaaagaaaaaaaatgcttaaatattgaaccatccagctctccaggatcttctggacggagccgttctctgatattgaaccgttccatccaattggctccagaaccaaacactagtcagaacttacaagtaggaaacagcttaaagtaaccctaagggcccgttcggttcttacggaaccgtcgactggaatggttcctagttgaattgtttgcctaatttatataagttttggtcaactggaatgatttctggatgaatccgggacaaacgaacaggcttcatctgatctgatccggacaattttactttgctgataggcaagcgcacaaccattcttcgtactgggcctactggtgacagcactggcaaccagccattaatgaaggcaaacttaaacagaacgagcaaccgttctgataccgaagaggcacgtctggtgaccattaataagctagctgcttgtgtgcagggtaggaagagaacgtctttttacttgtagaacacagatcgattttgtaagggttatgtggtgggaggaaaagttagcaatagcactggatgttgttgtagtaggatctgtagttgcacggtaagatcgttacttcgccattgttagcggttgaactggcaatgctttgaacaaacagttttgtgtatcggccgtattgttgtatgatcaaccctggaagattgtacaacc

SEQ ID NO: 33206 - DNA, 1273 bp, Zea mays
  Clone ID: UC-ZMFLMO17075B11_FLI
gaaggtatggttggtttggacctgatttgaaccaacaaagtagtgaaccatccttggcatcagcgtactctgaagacaagattattggcagcaggcctcctgatcttgttttcaatgaacaaaaacatatggctggttcagatgaatttgcaaatcattttgtgacaccctccattgtggataaaataaatacatcacaaatggcggagaatccaagcaaggtggcacaactttcatggcttgactccatatctaatattagttttggagcactgttatctgaagctgcgccttctcaagacaccaaacaaccaccttcacaaaatagcatttgtctccagcagatccctgccacatgtgattcatttgacgctgctattgcttcactgattgcccgtcagcaaccaagtaaccaaccaaaggtgttaaatccatccctttgggaagccgaagaaacttgccatgcatttcccttccagaatcaaactccacatgcatcaagttcagttcctggcaacagctttgctgctatgacctcatcagtcttgtgtgccattccagaaactggcacagatgatcagcaatgtgctacggatggtaggaaagaggaactaaacagtcaaacatcagtagagggcgatggtattaatgcaaagccagagatttcaatgcaggagtcagctggtgacccagagcgtgaagcatcttgccccagactcttgggtggaaccgacagtataggactaagctctttgctcactgacagcctggatgcgttccagaaattctctgttttctgaagctcagaaatccataaagaacgacgggcttatacaatatgaactaagcggaggtatatattaaccaggtttctgtttcgtgaacagaactaattgttttgggcttcctaagttatttctgtagataaaaccccccatatctgtattgtgaagttttttttattatctctagtttactactgttcttgtttatttgtcgcggtttagtttaaaaatgtactagctgacgacaaatattcgagaacggaggtagtacttggaagaaatatgtattctgaagttgaaatttctttcgctttattttatcttaaggtagcaagtgcctagcctatagtgaggctctgccaactgggctgtcacccagttatatttgtcattgcatcttgctgttaattgaacatttgttctttggaacattgatcggctgtggtattatagtgcaataacaagcggtaatctggccgttttgctgt

SEQ ID NO: 33207 - DNA, 496 bp, Zea mays
  Clone ID: UC-ZMFLMO17075C03_FLI
atgagcaaatccattcccacagccaggcattaaagagccacccccagatagaagagctgaaggaatcaggagagaccagtcctgctccatcttctgaggcgagcaagacaccaccactcattgaggaagcagattctaaccagaccttctcactgcaacgccccaagaacaagcagtgagcttcgctcaagtgtttgaagtccttttttctatctgttgttctgaaacatgagtgccactgagaaacaccactagtaggttttagttttctttagtctgagagagctgatatgtggcggagaagggatagacccctaggcatttggtttctgggagctaaatgcgaccggagagacctagagagattttgattctcgtgaaggttatactttggttccttgttggaatgaagtttgtaaaaaggcaaggttgggttaacgttggttagacaaaatgcataaatgcttaagttatttctttcttgctgagcttgact

SEQ ID NO: 33208 - DNA, 2680 bp, Zea mays
  Clone ID: UC-ZMFLMO17075D03_FLI
gcgaggggagtggagaaaagcagagcacagagagagagaagggagagggaaaagagagagagaaaaaaagatccccgtccaccgcccacccgctgcgccggcgctgcacgcacggacggacagacggacctcccccccaagcggtgccggattcagtgcggtgggccaggggctgggacggagtgggcgacagatcgagcgctggcgatgccgcacccgacggacccggaggcggggcccgagcagaaggcgccggcggtgccttatttggcggctgcggcgccggctccggtcaagaagaagcggaacctccccgggacgccagatccggacgccgaggtgatcgcgctctcgccggggacgctgctggccacgaaccgcttcgtgtgcgaggtgtgcggcaagggcttccagcgggaccagaacctgcagctgcaccgccgcggccacaacctgccctggcgcctgcggcagcgcggcccgggcgcgccgccgccgcgccgccgggtgtacgtgtgccccgagcccgcctgcgtgcaccactcccccgcgcgggcgctcggggacctcaccgggatcaagaagcacttctgccgcaagcacggggagaagcgctgggcgtgcccgcgctgcgccaagcgatacgccgtccaggccgacctcaaggcgcacgccaagacctgcggcacccgcgagcaccgctgcgactgcggcacgctcttcaccagacgggacagcttcgtgacgcatcgcgccttctgcggcgctctcggggaggagaccggcagggtgctggcgccaccagcgccgccatcgcctcggccgcctgatttggaggctgacgaaaatgttgctgatttggaggctgacgaaaatgttgacaaggacaacgacaaggagggggaggaggagaatgaggattctgccgtggccgaggtggaggagcctcagcgtgtggaggtggtgccagaggagccacagcgcattccatctccacctccattgccgaaggagccaccgtgccgtccgtccccacctccattgccgcaggagcaactgtccccacctccgtcgccaaatgagccaccgtgctgccatccgtctccacctccactgccaaaggagccacagcggcttccatttccaccggagcagcatgcagttgtggtggcattggtgccaaatgtggatgagccagaggtggttgctgtgccaagtgtgactgccgaattagaggatgaaaccgatcaagacgaagatgcctgtttcctggaagctgatcagtacaaggactcggagcttgaggtctccaatctgctggacaaggacaccccgatgcttccttgcttcctcgcgtcgccctcggaagccattggcaccgatggaagcggcacaacaacctgcggcgcaggtggcagcgtctccaattccatcgcgccgtctacaaccaccaacaccttcgccggcctcttcgcgtcggccacaacaagcaccacttcccacagcacatctctgcgcgatctcatcggcgtcgatcccaccttcctctgcctcgcgatcggagcgccgtctctgttcccgcagacgggcgcgagcaactcaggcaccttcgccctgctgccgccggcgccgcacatgtccgcgacagcgctcctgcagaaggcaacggaggctggagcgacgcagtcgagctcatcgttcttgaaggagtttgggctggcctcttcctcctcctcgtcgtcgtcgcaaccttcatcgaagcagaatcatcatcaacagagggagatggagccaagtttgcaacaatggcacccctctagtacccagcaaacggagatggagcgccgccaccggaatcatcatcaacagagggagatggagtccagttcgcaacaatggcaccgccaccaccggaacgaccggcagatggggccggagagctaccggagtaatcagcaaatgcagatggagtccagctcgcaccaatggctgcaacacagaagctctgagcaaatggtggggcggcggcaccacctggagaggggggaatccagggggatgctgctgtctggtggccttggtctgggcctcgcatacgaaagtggaaaatcaggcttgcctgatctgatgacaggaccatcgccatcgccatcgccactgttgggtcccaagccagccacgctggacttccttgggctcggcatcggcgggaccatggtcggctccacgggcctcccggcattggtggctggaggagagctggacatggggtcgtcggcgcaggtgcctgccccatgggacgacgcccagaggaaggccaacggccgcacgatcctgtgaggttttctccttttttttgggtgacctgaccttcttagaggagttcggtttgcccattctttttcagtcgcagctttgcttttggtggggctagaagctctgtgaggtgtagcagtgcagtgcaggcctgtacatagctcgacctcgacgctcctcccgatcctgcatctgtgttgtgtctgaaaaaacaccgagttgaggctgctattatagccacaattcgatcccggcaggatggatggaaatggaacctgactttgatttgatgccccgacgctttgggataatcggatgtgacggggcaacagggttattataaatcttgcggtgataattcatt

SEQ ID NO: 33209 - DNA, 1603 bp, Zea mays
  Clone ID: UC-ZMFLMO17075D04_FLI
gttggctaacatatataatgaagttggatatagtggattatcaagtgaatgtttttctcaacaactgactgggaaacatggtggtgatatcatagctccacaatcccatgatcaagatcctaataagatgcttccagttggggattacttttcccagaacagttcaatggagttcttcagtggctatgaggacatgcattttgatggtgaccttttgcctcctggttctaatgataaagtatcttctggaattttgggtactgaaaaagattcttctgtgcctgtgctggatgttcctggtcgaaataaagaagaatcccccgctgggacttctggatttatagaacagaaggacaccagcaatgttacgaatatgcttcctgatcttaatttgtatcatttggcttctacggcttcaactcactcaagccattctgttagtattgagtctcttgaggattctgttgctgatgccagaagcaataagaatgatctgttaccttctttggagttggttacaaaaatgatagaggatgttgagcttcttgaagaaaaggctaaagtagccaaacgtgaatcatctgttgctgggacaggcattctaaccaaagttgaggagctcagagaaatgttaactcatgcgaaggaagcaaatgatatgcatgctggcgaggtttttggcgagaaagctattttaaccacagaggcacgtgagcttcaatctcgacttcagaggctttcagatgagaggaataaatatctggtgataattgaagagatacgacaaactcttgatcaaagattggttgctgcacagcaagaaattgcagcagccgagaaagaaaagcttgaaaaggaggttgctgctcagacactactcaatgaacaggaaaatatgatgaattctattgttgaagaatcgagaaaactgcagaaagaagctgaggagaacctgaagttgaaggaattcctggttgagcggagccaaattgttgatatgctgcaaggcgagatgactgggatctgtgaggatgtttcgttgctcaagcgagtggtggatgagcgcctatcattgagcaagttgcagccctcagctatgtcaagcctctcttcttcactgcattcttctcatcacaagagctggacttcctctgataggaccaccgaagccaatgggtctctagataagcacacccttgctgaacctgcaagcccagcgcgcaaagatctgaatggcgacgagtgcactgtgcaggtgtcagatggcaacgacactggtaaaggcgttttgaagcgtgtggattccaaggacggcgatggatgggagctttgctgaaggtgttcaggaatagcgcggttgcgagtggatgctgaagcatagaaattactataaactagtaataatggtgaataaacgtttactagtgcgttgctaatctagtcgtaatgtgggaactgtgtcgtggaactgactcactagctcaccgcagtagtatgtgggatgggtccaactgcagcttgacgtggtatatataaatgtgaagaattcagctgcccctgctcctgtctaaattttatgttgtttttaattttgttctaagtt

SEQ ID NO: 33210 - DNA, 2234 bp, Zea mays
  Clone ID: UC-ZMFLMO17075F02_FLI
ggtgccagccgccgtgcgcgctctcttcgccctacggaaggtgcggaggtgccgagatcttgctcgatctcttcggcggcgaagagcgccaaccagatccgccctgtttgttggtgtggcgccggagcaggagtaggtcgcggccacagaaccctaggagcgaccatggcgactttcgcgaagcctgagaacgcgctcaagagagccgaagaattaatccatgttgggcaaaagcaggcagcactgcaggctttacatgatctcattacctcaaaaaggtacaggtcatggcagaagcctctcgaaaagatcatgatgaagtatgtagaactctgtgttgacctgaggaaaggcagatttgcaaaagatggtcttattcagtataggattgtgtgtcagcaagtaaacgtgtcatccttggaggatgtcataaagcactttatgcagctttccaatgagaaagctgaacaagctaagagtcaggtagaagccctggaagatgctctggatgttgaagatctggaagcagacaagcgtcccgaggacctcatgctcagttttgttagtggggagaaaggaaaggaccgatcagataaagaggttgtaactccatggtttaagttcctctgggagacatacaggactgttctagagatactgaggaacaattcaaagcttgaagcgttatatgctatggctgctcatagggcttttcaattctgtaaacagtataagaggacaactgaattccgtaggttgtgtgagataatcagaaatcatctcgccaatctgaacaaatatcgcgatcaaagggatcgtcctgatctgactgcacctgaaagtttacaactatatcttgatacacgtgttgagcagcttaaagttgctacagagctttgcctttggcaggaagccttccgatccgtggaagatatccatggtctgatgagcatggtgaagaaaatgccaaaaccttctatcttggtggtgtattatgcaaagctgaccgaaatcttctgggtatctgatagccacctttatcatgcgtatgcgtggctcaagcttttcaacctgcaaaagaactacaataaaaacttgtctcagaaggatctacaattaatagcatcttccgtcttacttgctgcactatctgtggcaccttatgacaaaaaatatggtgcatctcatcttgagacagagaatgagaaggagcgtaacatgaggatggccaaccttgttaacttctcgcttgattccaagcgtgaaaatagggaaatgccttcaagagcatctcttctatctgagttggcctccaaaggagtcctttcatgtgcttcccaagaagtgcgagatttgtacaaccttttggaacatgagtttctacctctggaccttgcatcaaaagtgcagccacttctttcgaagatttcaaagatgggagggaagctttcatcagcttcttctgttccagaggttaagttatctcagtatatttcagcattggagaagctgacagcattgagagtgttacaacaggcctcttgtattttccagtcgatgaagattgatatgctctcaagaatgattccgttctttgacttttttgttgtggagaagatttctgttgttgctgtgagacgcaattttgttgctataaaagttaaccatttatcaggagctgttcattttggtactgtggacatagaatctgatggcttaagtgatcaccttagtgttgttgcggattcattaaataaagcgaagattcatatttgtccaccagttaaaaagccatctaaactcggtgaaagttttattagtttggctggaatagtggagaatgagcataagaggcttcttgcaaggaagtccataattgaaaaacgcaaagaagagcttgagcgtcaaatattggagaaggaaaaagaagaagaaaaaaagagaatgagcagtcaaaagaaaaccgcagatgaggaaagggtgaggcttctcaatgaacagagacagagggagcaggaccggattcgtagagagatagaggaaaaaaataaagccgaagcaaaaaagttgctagaagacttgaagaaggcagggaaaaaacatgtcgttgttgaaggggagcttactaaggaggccataatggaattgacacgaaatgaacagttgaaggagcgccacgaaatggagaaaaaactgcagaagtttgcaaaaacaatggattatctggaaagagc

SEQ ID NO: 33211 - DNA, 1370 bp, Zea mays
  Clone ID: UC-ZMFLMO17075G09_FLI
cattgctgccccacatcgaccttctactgctcacaggcgccctatatccaaagagtcggcaccaaagcatttcaatgttgctagcccacatagaccttctactgttgaaaggcacactagtggcagagatatgacatcgaagtatgttggtattgctacctcatatctgccatctgctgtcaaacagcgccctatcactggagagggtgcacataagcatgctgatgttgtcaccctgagctgttctactgctgataggcgccccattagagacgttgcaccaaagcatgccactttagctctgccaaggaggccgtctactgccgagaggcaccccattgctagagatattgccccaaagaatggtttatcactcagaccttctactgcagagaggcgaaccattgctagaaatgttgaaccaaagcatgcaccggcacagaggccttctactgctgagagacgtcctgttaccagagagactgtactgaagcaagctaatgttgccaactcatgtttacctttgacgccagatagacgcctcaccaaaaaaggtgacatttccacccttgagtgcccttctacaggaggaaggtgccctatcaccagtggtactgcactctggtcaagaacaatgccgtactattcaaagggtgctttggtcacagaagttactccccagaagacaataactcccagggttgttagaaacagcaagctagaaaacctaagctatgcaaaagaaagggtggaacttcaagtggatagaaagcaaaagtcaagtccttttaacctgtcctcgaagaaaacattgacttccaacgttagagatgaccaaggtcttgaaatgttcaaaaagccaaacaaggaggggggagttcgggctcatgcatacaaatcaaataatgcaactccttcacggaccggaaatgtaaagataaaggctcctgtgcctccgcctctgccaccgcaccgaccgtactgcactgagaagaaaccgaatgtcaacagttcacctgttggtggaagaaagacaaaggcctcagctccacactggcactgaccccattgtctaggatcctgcagcataactctgaagccgtgaaggtaaaagctatgcgtctgacgtgacctagaagccgcatccatcaagcaacgattgatgttatctattttagcttaccagcagtcttgtgacttgtcacctgtgttagaataaccgtagtagttagtgtatgtagcaacgcgtagcatatatatatatccactaatgtctaattgaaccgtagtagaactgccctggatttaactagaacattgtatatacctggaataattggagcttgagtatcgaaccaggaattatccgc

SEQ ID NO: 33212 - DNA, 814 bp, Zea mays
  Clone ID: UC-ZMFLMO17075H06_FLI
gtcttgatgagacacttgtgcattcaactcttgaacactgtgaggatgctgatttcacatttccagttcattttaacttcagagagcacacaatatatgttcgatgccgcccctatctcaaggaattcttggatagggttgccagcgtgtttgagacaattattttcactgctagtcaaagcatttatgcggagcaacttctcaatgttcttgatcccaaaagaaagttgttccgtcatcgtgtttatcgtgaatcttgtgtctatgtggagggaaactacatgaaggatctgacagtacttggacgtgacttaactcgcgtaatgattgttgacaattctccgcaggcctttgggttccagttggacaatggcattcctatagaaagctggtttgatgatcccaatgacatggagctgctgaaattgctcccgttcttagaaagcttggtcggcgttgaagatgtcaggccttatatagcaaggaagttcaacctaagggagaaggtagccaccgcatcttctcttacaatagacatgcagatgtgatccgtccaatgctgccaggtatttttcaggtgccaaaggtcgccgtgatgacaaatgtaggaccggagctgatatagtggttcttgttgaatgtagcatgtcaggatctcctggctccttgcattattgtatgctctaccgaccgcaatgtacaattttcgctgcagttggcagttgtagacttcacttgcattttgttggcccagttgacatgggaagggcctacttgaacattttgtcgatcagttaatatcgtgttgattcat

SEQ ID NO: 33213 - DNA, 1630 bp, Zea mays
  Clone ID: UC-ZMFLMO17076B11_FLI
gcagttccacggcgccaaggagctattcctctccgaccatttcgacctgcagagcgcccacacaattgaggggaagtgtgttgtccactctttcaagaactataccaggcttgacaatgttgggcctgaggacttcttctgccgattcgagtacaaggcggccaccggttcgttcacccctgaccgcgtggcagtgtatgaagctcctcaacccttccattgctggctgtcccttttactgtgcatgcatttttagcttgcttgtgatgattgggttgtctattttctctcaaggtattgcaaatgtgagatgccgtacaaccccgatgacctcatggtgcagtgcgatgcttgcaagcactggtacatttgttacaatgatttgcaatttacatttcactgatatttgcctttgttccccgtctattatgtgactgtacaaagcatgttttaaatctcctgatattgagtttagcggcatcatcaccgagctgctaacacagtgccaaacgcaccacccagagtcccagacctacctcttcagtccttgtccacgagttctcgctgacgctcacaccttttatctgttttcttgcccaactctgtcttgcctgcactctgccactctaactttccaatactcactctgctgcaaaacggcttctgctgcattgctgctggggaggactttgcgcccaacagcacacacgtttgtggctgcgcttggggagagtgtcgtggatgagatggccatgattcagcagggctcagtgctcctatcctagatcgaggaggagctcaagcacacatcacaggggctcaaggacactgaggtggtgggccagaaagcgccgagcagagggcaagagtcacacagccagtagtcagggcacctcgccgactggagctaggtgcttctgtgtgcagaggggggggggagccggcatcaagtggagctgttgcttcttctattggtgcgctgaggtggagagctggaattggacgatgctcgacaaggaggtactcttgtaactgcggcaggcagtagagaaggtctcagcctgctgctggcagtgttccgacgggtgttctgcgaggaacagcaagtctcaacaatgtaagcggtagcgcggtactaaatcacatcttgattagcagatttcgcgcactaaatccggctattagtgctaaaagtcaactatcccagccgctgttctgtgcagctgtggtctctagttgtagcgtccactatagctggagatttagaacttcggtacaaaggcaggaatttcacgtcagttttatctgcttcacagcccaagaggcttcgctggcccagtgcccttgtttcaagcccagtggattgtttagctggagtataagtagaagtagccgtgtaggagactccaacaattgtatcgaaatgtttaactcataatcatttaactgttatgttgtcgttctcttctgtccccttctttccgaaggctaccgtcacaatttgtatcagattcatggatcctagatctgttcccgctgctgcattaccattcaccagattccagggagcctgcggtgcgatgggcttgctcagagcttcactgagcatggtgccaagttggagtgttgc

SEQ ID NO: 33214 - DNA, 1791 bp, Zea mays
  Clone ID: UC-ZMFLMO17076C09_FLI
cttgcatacagcaagtaccaaccatgcttcctgaatcggcagttgattactcttctctcaacacttggggttagcgataatgtctttgagctaaagcagaaggaagccttaaggcagttgaacagaatggtaactgaaccacaggctgctcgtgaagcagttgaacttatgcccatgggagaagtaaccaatgtagttaaagaattgttgtcatgtggctaccagcctgatcatgagccatatctttccatgctgctacaaacttttagagcatccaagcttctagagttgaaaacaaagtcaaggatattcatcacacaggggcgagcaatgatgggttgcctggatgaaacctgcacacttaagtacggccaggtattcgtccaagcttcttacagtgcagatgaccatcgcaaggtcgttgtaactggaaaagtagttgttgccaaaaatccttgtctccaccctggtgacatacgggttctccaggctgttgatgttcctgctctgcaccatttgtttgactgtgttgtctttccacagcagggaccaaggccgcaccctaatgagtgttcagggagtgatcttgatggggacatatattttgtttcttgggatccacatcttattccaagtcgtttggtggatcctatggactatactccagcttcagcagaaacattagaccatgatgtcactattgaggagatacaggagtacttcacaaactacatagttaatgagagtcttgggattatcgccaatgcgcatgtggtctttgcagatcaggaacgtatgaaggctgagagtccgccgtgcgttcaactggccaagctcttctctatagctgtcgatttcccaaagactggagtgccggctctgattccacacgagctacatgtcaaggagtatcctgacttcatggagaaactcgacaaagtcacctatgaatcaaagggtgtgatcgggaagctctatagggaaataaagaagcacacaccacacataaagcacttcacgagggaagtggcaaggcggtcttatgacaccgatttgattgttgatggctatgaagattacattactgaggctatagagttcaaggaagagtacgatttcaggctgggtaatcttatggaccactatggcataaaaagtgaagctgagataataagtggatgtattctaaagatggcaaagaatttcaccaagagtagtgatgctgatgcaattagaatggcggtgagatctttgaggaaagaagctaggtcgtggttcaatgagatgagcacaggagaggatggccaagatgccatggaggccaaggcctctgcttggtaccatgttacttatcatcagcagtactggggcagctacaatgaagggtatgatcggccgcatcttattagcttcccatggtgcgtatatgacaagcttgtggccatcaagcaggggaggaatctcctcacgcagatggatcgaaacttgaggttccgttgagcattgccagcagggtttgctcttgtacatatccctgatcgtttgcaatcagcactgccagcaagtgtgcatgaacgatctgatgaattaagacgggcaaactgccacaagctgacgctctggcgtacgtgcgtcttgaaactttcggatgctgccgtctagctaaatgcatgttccttgatttccactgggaccttgagtttgaagtgtgtaaatatatgctgcttatgatgtttttagtatttgacctctatcaactgccgttctagttagtaacaatggttgccagtc

SEQ ID NO: 33215 - DNA, 719 bp, Zea mays
  Clone ID: UC-ZMFLMO17076D08_FLI
ggagaatctgtcggcccacttgctgcctattataaactgccacttaatcgtgtcctagtggcgtttgatgacatggacttgccatgtggagttctccgtctacagccaaaaggaggttctggacgacacaatgggaattggacggccagctggccagatggatcctaaagcctttgttcttcagaagttcaataggactggtcgtgaacggatcgattcagccgtgagagagggtgtcgatattctgaagatggtggctgcgaggggtttgacagaggcggcaaaactgacaaatgcggaccagaagtataagcatctgagatcacatggtatccagactaacgatgactagacaaagcttactagggggactactcttttcagcacatctcccgatattcagactaaagacgaaactcgttttatggcctgttgtctagagcatggtaggcttgagaaacaggcgctcgatgagcccctttagaccgtcgctgaacgtgaacgcgtccttgttgtcaccgtacatcaacggcatgctggcggttatgtcggcaactcgctgcactgctggaagtagtttgctgttctcaaagcgtgctccgtttatagttttccatgcatcttcaatcagggagcttatctgtgcaaaggcaacctcagctgtgacgccatgctcactgatgtagcattcgaccgagctgtccacgtcgtttttgttc

SEQ ID NO: 33216 - DNA, 1858 bp, Zea mays
  Clone ID: UC-ZMFLMO17076D12_FLI
gctctctctctcaccgaatcacacacacaggcaggccagtgaggcaggggcacgaaggcgcggctccctctctcaagcccctcgccattactcgctcataaaggaagaacagagcgagcgggtagcgaggaagaagctgggccgcggggcaagaggagagaggtccccagccgtaggtctgctgtgcaactccggctcgccgcctgccaaccgcgcggcgcggccaccacgctaggcccctcgccctcctcgtaggtgaacagagcctgcagtcgatacaacagtaaattccgcggcattccattcgctttccctctcgaaacgcaccctgcatttactgcacgtcgctcgccctccggccatccgcgatcttcaaatcttccactgtaaaaagcgggcggagacgggaaggccgtgcgctcaaggatggcgcgcgagcagctggaggagtccatcgtggccgacggcaacggcaaggaggaagaggtcggggtcatgggcatcggcgccgcggacggcgccgacgaccagcacggcggcggcaagctcagcatgaagagcctgctgtggcacggcggctccgtctgggacgcgtggttcagctgcgcctccaaccaggtggcgcaggtgctcctgacgctgccgtactccttctcccagctggggatgctgtccggcgtgctgctgcagatcttctacggcttccttggcagctggaccgcgtacctcatcagcgtcctctacgtcgagtaccgctcccgcaaggagaaggagggcgtcagcttcaagaaccacgtcatccagtggttcgaggtgctggacgggctgctgggcccctactggaaggcggcgggtctggccttcaactgcacgttcctgctgttcggctccgtcatccagctgatcgcctgcgcgagcaacatctactacatcaacgaccggctggacaagcggacatggacgtacatcttcggcgcctgctgcgccaccacggtgttcatcccgtccttccacaactaccggatctggtccttcctgggcctcggcatgaccacctacaccgcgtggtacctcgccatcgccgcgctcctcaacggccaggccgaaggcgtggcgcactccggccccaccaagctcgtgctctacttcaccggcgccaccaacatcctctacaccttcggcggccacgccgtcacagtcgagatcatgcacgcgatgtggaagcccgccaagttcaagtacatctacctgctggcgacgctgtacgtgttcacgctgacgctgccgtcgtcggcggccatgtactgggcgttcggcgacgagcttctgacccactcgaacgccttctcgctgctgcccaagacccggtggcgcgacgcggcggtgatcctgatgctgatccaccagttcatcaccttcggcttcgcgtgcacgccgctctacttcgtgtgggagaaggtgatcgggatgcacgacgccaagagcatcttcaagcgcgccctggcgcggctgcccatcgtcgtgcccatctggttcctcgccatcatcttccccttcttcgggcccatcaactccgccgtcggcgcgctgctcgtcagcttcaccgtctacatcatcccggccctggcgcacgtcctcacctaccgcacggcgtccgcgcgcatgaacgccgcggagaagccgcccttcttcctgccgagctggacggggatgttcgtcctcaacatgttcatcgtggtgtgggtgctggtggtcggcttcgggctgggcggctgggccagcatggtcaacttcgtgaggcagatcgacacgttcgggctgttcgccaagtgctaccagtgcccgaagccgccggtcc

SEQ ID NO: 33217 - DNA, 1235 bp, Zea mays
  Clone ID: UC-ZMFLMO17076F09_FLI
tcctgcactgtgctccttcgtctcctcctcccctgcctgccaccaactgccaaggtgccaagcaagtgcagataccttccctgcctcacaaacaacgccatcagggtcttcaaccagggcaggttctcttctttcattcagctatgggcaacctgtgctgctgtgttcaagttgaccagtcgactgtggccatcagggagcagtttggcaagtttgacagcgtgcttgagccaggatgccactgcatgccttggttcgccggcaagcgtgtagctgggcatctcacactcaggctgcagcaactggatgtgcgctgtgagacaaaaacaaaggacaatgtttttgtgaatgtggtggcatctattcagtaccgcgctctggctgacaaagcaagtgacgctttctacaaactgagcaacacaaggtcccagatccaagcctacgtctttgacgtgatcagagcaagcgttcccaagctccatttggacgatgctttcgagcagaaggacgagatcgcaagggcggtggaggaagagcttgagaaggccatgtcggcttatggctttgagatcgtgcagactctcatcgtggacatcgagccagacgagcatgtgaagcgcgcaatgaacgagatcaacgcagctgcgaggctcagggcggctgcaaacgagaaggcggaggcggagaagatcgtgcagatcaagcgcgcggagggggaggcagaagccaagtacctgtccgggctgggcattgcgcgccagcggcaggccatcgtggacgggctcagggacagcgtgctggggttctccgtcaacgtgccgggcaccaccgccaaggacgtcatggacatggtgctcatcacccagtacttcgacaccatgaaggagatcggcgcgtcgtccaaggcgtcctcggtgttcatcccgcatggccccggagcggtgcgcgacatcgccacgcagatccgcgacggcctcctgcagggatcctctgtcgccaaacactaagctgcctgcctgctgttgccgctgctgctgctgaagaacaccaccaccactattatatatataatataatgatgatcttggtaccagagtgatgcttgtctatattgttcatcactcatcgtcaccatctgctaggatggctatctttatgcttggggattggagaaaaccttatctaaccttttagggaaccggtaatatatatataatgcagcatgagtttgcagt

SEQ ID NO: 33218 - DNA, 1688 bp, Zea mays
  Clone ID: UC-ZMFLMO17076F11_FLI
agaaccactggtgccgctaactagtggtcctgcctcgctcagagaccgtttttgcagcagtgatgaagattacctcaggaaattcaccaaaaccagacctcggcctatttaaacctcagctgggagagctggcatcctgcctgaggcctgagctgcctccatatttgcattcttcaccctcgcttcacgtcaccaccattgccatccaagaacaaattaagcgggacactggaaacaaagagagacatgggccttcgcggcggagctcttgccctgcttctgctcctgttcgtccacggaggccagcgagcagcagaggccggcggggacgcgttcgtgagggtccagggcacccgcttcgtgcaggacggcaagccgttcttcgccaacgggttcaacgcctactggctcatgacattcggcgccgaccccgcgcggaggggcaaggtcacctcggcgctcagccaggccgccggcgccggcctctccgtggccaggacgtgggcgttcagcgacggcggcggcggcggcggcagcgcgctgcagtactctcccggccgctacaacgagaacaccttccaggggctggatttcgtgctgtctgaggcaaggaagcatgggattaagatgattctgagcctcgtgaacaattacgacagctttggagggaggaagcagtacgtgcagtgggcgagggagcgggggcagaccattggatctgacgatgagttcttcactaacccctttgtaaagggcatctacaagaaccatatcaaggccgttctgacgagggtgaacacgatcaccggcgtggcatacaaggacgacccgacgatcatggcgtgggagctgatgaacgagccgcgttgccagtccgacgtgtcgggccacgccatccagtcgtggatcacggagatggcggcgcacgtgaagtccatcgacgggaaccacctgctggaggccggcctggagggcttctacggcgcgtcgtcggcccgcaggtccgcgaacccgtcggggtaccaggtgggcaccgacttcatcgccaacaaccgggcgcccgggatcgacttcgccaccgtgcactcgtacccggaccagtggctgggcggcctggacgcgcaggcgcagctgcggttcctgggcgcctggctcgacgcccacatcgccgacgcgcgggcggtgctgcgcaagccgctgctggtggccgagttcggcgagtcgcgccacgacccgggctacagcggcggccaacgcgacgcggtgttcggcacggtgtacgccagggtctacgactcggcgcgcgccggaggccctgcggcgggcgcgctcttctggcagctcctggcggaggggatggactcctacggggacggctacgaggtcgtcctcccgcaggcgccgtccaccgccggagtcatcgccacgcagagccggaggctgcagggcctcgccagggcgttcgtgcgcgcgcgcaaggcccaccaggggaaggcgggcaagggcgctaagggtggcggcaactgaaagtggggtgaaacgtgtgtggcgagatcaagaagagtgtgtgtgtgtatgcgtcgatgtctcctcgagatgatttgaagattcatccgggagccaagagttacttctacatactatctagcgttgtcctccatgttttattatttagaggacttgcgttt

SEQ ID NO: 33219 - DNA, 1134 bp, Zea mays
  Clone ID: UC-ZMFLMO17076G10_FLI
gaagaatgcttattttgacgagtatgactacagggtcaagcttctccagaagaaacaatggaaggatgagatccgcaggttgaaggagatgaagaagagggggaaaactgatctggatgattatgggtatgctaatatcgctggtgagaacgatcaggatcctcctccagagaatgtatcggttcccttgcctgacatggtgcttcccccttcatttgattgtgacaatcccacataccggtaccgctttttggagtcaacctcgactgtcctagcaaggcctgttttggatgcgcatggatgggatcatgactgtggttatgatggagtgagcgttgaagagacactggctatccttagcaggttcccggcaaatgtagcagttcaggtcaccaaggacaagaaggaattcagcatccatttggactcttccatcgcagcaaagcatggagagaatgcatcatcacttgctggttttgatatccagactgttgggcgccagcttgcctatattctccgcggcgaggcaaaaatcaagaacatcaagaagaacaagaccacaggaggcttctcggtaactttcctgggtgacattgtggcaactggactgaaggtcgaggaccagctctcccttgggaagaggctgtcgctagttgccagcactggcgcgatgcgagcccaaggggaaactgcatatggagctaacttggaggcacgcctgaaggacaaagactatccgattggccagtccctctcaacgctgggtctctctctgatgaagtggcgccgggaccttgctctgggcgcgaacttgcagtcccagttctccatcggaagggggtcgaagatggcagtgcgacttggtctgaacaacaagctgagcgggcagatcacggtcaggacaagcacctcggagcaggtccagatcgcacttctgggtctcgtaccggttgcagcctccatctacaggagcttccggcccagtgaaccgtccttcgcttattagcctgtcaggagtctcagtccaattacttcataaccatgtggtttctcttggcaattttcttcttcacatgaaccatgtttcttgctgtttcagtttactcccttgtaattggcagatcgtttcctacc

SEQ ID NO: 33220 - DNA, 2175 bp, Zea mays
  Clone ID: UC-ZMFLMO17077A12_FLI
cagctgtccagctccacctcgtcgactcctccccgcacaagacaaaaaaaccctcgccttggaggcgcgtgagcccgacacccagagcgaaaaaaagcgaggggtctgaccgccggcgatggcgtccatctccggagcggcggcggcgccatcttccgctgcgtgccggctgcggctgcgtaggcacctcctgctgcggccctcgcacctccgcctccgcgcgccccactccatcgccgacctctcccgctcctccagctcctctaattccgccccgacccgggcccagccgctgggctccaggccggagaacggcggcgtccgcgcggtggagaaggacccgatcaagctgtgggagcgctacgtcgagtggctctaccagcacaaggagctcggcctcttcgtcgacgtcagccggatggggttcacggaggacttcctgcgccagatggagccgcggatgcagcgggccttcgccgccatgcgggagctcgagaagggcgccatcgccaacccggacgaggctcgcatggtgggccactactggctccgcgacccggccctcgcgcccaactccttcctccgcagcaagatcgagaccacgctcgacaggatcctcgccttctcccaagatgtcgtctctggcaagattcaatccccatctggtcgtttcacttcaattctctctataggaattggagggtcagctttgggccctcaatttgttgctgaggcacttgcacctgataaccctccactgaagataagatttattgacaacaccgatcctgctgggattgatcatcaaattgctcaactaggacctgaactggcaactactcttgtaattgtcatttctaagagcggaggcacacctgaaacccgcaatggtctactagaagtacagaaagccttcagagatgcagggctgcaattctcgaaacagggtgttgcaattactcaagaaaattctctgttggataacactgctagaatagagggatggttagctcggtttcctatgtttgattgggttggtggtaggacttcagaaatgtcagctgtgggtttacttccagctgcattgcagggtattgatatcaaggaaatgctagctggtgcagctttaatggatgaggaaacccggaacactgtggttaaagaaaatccagcagcattgcttgcattatgttggtattgggcatcagaagggataggcaataaggatatggttgtacttccttacaaggatagtttgttgcttttgagtagatatttgcaacaacttgtcatggaatctcttgggaaagaatttgatctggatggcaaccgggtaaatcaagggctatctgtatatggaaacaaaggaagcactgaccagcacgcttacattcagcagctgagagaaggtgtacacaacttctttgttacttttatcgaggtcttgcgtgacaggcctgctggtcatgattgggagcttgaacctggagtcacatgtggtgactatttgtttgggatgttgcagggaacacgttctgctctttatgcaaatgaccgtgaatctatctctgttactgtgcaagaggtaactcctagagctgttggagcactggttgcactttatgaacgtgctgtggggctttatgcttctttggtaaatatcaatgcctatcatcaacctggtgttgaggctgggaaaaaggcagcaggagaagtgttggcccttcagaaaagggtgctgactgtattaaatgaggcaacctgcaaggacccttgtgagccattgactatagatgaaattgcagatcgctgccattgccctgaagatattgagatgatctacaaaatagtccagcacatggctgctaacgacagagcaatcatagcagaaggcagctgtggctctcctcgcagcgttaaggtgtacctcggtgaatgcaatgtagacgaagacttgcaggccgcgtaggttccgagcctggatccgtgtaaaattgtatcaggcgcaacaagatagcgatgcaatgcatgggtgttggcggatcctgctgtgcagtttgtttcttgtttggtgtttcttgcacgcgaatacgcgattgccgcaacgacgtattttagaatttgaatttttttggaacccttgaaaatacaaaataaagaagataaggtggtgtc

SEQ ID NO: 33221 - DNA, 1838 bp, Zea mays
  Clone ID: UC-ZMFLMO17077B08_FLI
ctcaaccccacccccccacaagaacaacaagccacatcccatcccaactccacggtgaggtttgagcgatccgagcaaaaaaaatcaaccgaggcgcagcaacgcaggttcgttctctgaactctctggttcttttagcagcagggacgcgcagcacaagaaaggtccggttcaagaggctcttcttttgggtttattagaatcctcaaaggaagcgtgttcttgggttaggatttttttttctcacctcatcacacctctcctaggaggagcagagatccagagaaccttttttctcttctggattctcaccgcttcttttttttttctctgcacaaacacaccctcgtttctctacttttattgaggaacagggctgatttccaaactttttcctacccctgttttcataaacaagctccttttatttcttcccgttttaagttctgcccagcctcttcttctagctccatccaagctttctccatctagtagttccaatggccgcagccatagacatgtacaagtactgcaataccagcgcacaccttatcgcctcctcgtccccctcggatcaggagctcgcgaaagcactcgagccctttataacgagtgcttcctccccctaccatcgctactcgttggccccagattcttacatgcctacaccctcctcctacaccacctcgcctcttcccacccccacctcctcgcctttctcgcagcttccgccactctactcgtcgccttacgcggcttcgacggcgtcgggcgtggctgggccgatgggcctgaaccagctcggcccggcccagatccagcagatccaggcccagctcatgttccagcaccagcagcagaggggcctgcacgcggcgttcctgggcccgcgggcgcagccgatgaagcagtccgggtcgccgccggcgcagtcgaagctgtaccgcggcgtgcgccagcgccactggggcaagtgggtggcggagatccgcctccccaagaaccgcacgcggctgtggctcggcaccttcgacaccgccgagggcgcggcgctggcctacgacgaggcggccttccgcctccgcggcgacacggcgcgcctcaacttcccgtccctccgccgcggcggcggcgcgcgcctcgccggcccgctccacgcctccgtggacgccaagctcaccgccatctgccagtccctggcggggtccaagaacagctcgtccagcgacgagtcggccgcgtccctgccggactcccccaagtgctcagcgtcgacggagggggatgaggactcggcctccgccggctcccctccttccccgacgcaggcgccgcccgtgccggagatggcgaagctggacttcaccgaggcgccgtgggacgaaacggaggccttccacctgcgcaagtacccgtcctgggagatcgactgggattccatcctctcatgaacgatcaactacaactagtattttagtagtagtagcagcagcagcagcaaggttcagtcagtgatagctctgtgtaattttcgatttggggtttgcagctgcggtggatcgatggcattttagacatcggccatggcggctgtgttgtgatgcagaagtaaacgtacgtgctaatctcctggttgagctgccggttgttttttctcacggcacggccagtcgagaaagtcagtgtaatcccctgtcatgatctctctgttgcaacttaattaactcttctggcgtatgtatgtaaccatgtgtgttcatcttgaacgtatcgtgatgatgtgcgtctttttggtctcacgtcgcatctatggtgtgcgcacttgtgatttgtgatct

SEQ ID NO: 33222 - DNA, 866 bp, Zea mays
  Clone ID: UC-ZMFLMO17077C01_FLI
cgcgctccctggcttctctcccacccgctgccgcctctatctctcccttccctcttctctctcccctcacctctctcctcccttccctcgcctcgctcctctccccgaccgagtagcagcggccgagccgccctcccccgacgtgcctgcaccgaccgcgcccaggtccatgctcaatctagcttcccttgccgcaatcgcaagccccggccccgcaaggcgataggaagccggtagttcagccgcggcttcggttctgccgttccggagatggagtccggcatgagcagcgcccggcggcgccgcttcggcctggaggcgtcgcgggggatgctgcccctgctggctctgcaggtgatcatcgagtacggccacgcgggggcctcccgcccgcccgtcacggtcgcgctgctcgccgtcaactcactcgtctacctccgccccggcgcgctcggcggggtcctgccttcgctcgcgcgcgtctccttcaaccctcagctcatcatcgaggaagatgtcaactgtgacaacacacagacagttgagcaacaacagccctctgacgacagacagacagttgagcatgctcctcttcaggaaactgatccaggcaaagagacacatgtttcagaggctaaaacgctcacagcagatgctgatggaaatttgagctcaagccagcaaactggggagtacaatgaattgctgagacaatactattaaattgttgcttaattttaaattgttcattgtaaactagaacttattgtgattgatcatctatggagcttttttgaatgatctagctagctatctgtaaatgatatagttgggaatggtattataattgtgatgcttttgtgaat

SEQ ID NO: 33223 - DNA, 2032 bp, Zea mays
  Clone ID: UC-ZMFLMO17077D12_FLI
cgacgcgcacgcgcagagctccgcaccggccaccgcccgcccgcccgcgccggccgccggcggcgtggatggggaagctctccgccctgaagcgggaagcggtcggagtggactaggcgctcggtgacttcctagtttagaagcggtaggtggaggcgatgcggggcggggcgatgaaggccctgcggcgatccagcacctcctcggcgccatcgccaagggtgccgtcttccccgcggtcttattcgtggatccacagccggtcgcttctcgttacctcgccggcctcgccggcgacgtcctctgtgtctgaatcggcgaatttgcccgcggagggttcggattcagcgccagcgtcagtggtggcagcttcctcgtcgccctcgctggctgcttcgtctccgaacatggaatgtacatttcattctaggggtggaattaaatctccgtggtctcgaagaaaaaggaaacgggcgcttacttgtcaacactggaatcgtctattttcagcaaatgggaagcttcgtgatgggggaagaaagtttctaaagaaggttcgcagtggggggattgaaccgggcataagggctgaagtttggccatttctgcttggagtctatgatttgaacagctctgaagaggacaggaatactatcaagataaagaaaaggaaagaatatgaaaaattgaggcgacagtgccaccgcatcctgcattgtaatagagaaaatggtctgaatgttataaatgagttcatgaacgaggacttttctgatggggctgaaggttcagagtcaccatattcaaatggtgttagtaagagggtttgtgtgatgcccaaagaattgaaatctttaggcagtaaggcagaagaatcagagagttctaactgggatgctgtgaaatgcatagatgaagacataacctctgttgatccatgtttggtagaatcagaatcttctgaatctgagtcttcctatgaagaggaccctgatagaacacctgtctctaccaatatggaagagaactgtggtcccaaaccaaaatttgcccggaccgcttcatctaagtcggagattattatttcagacagaactcctgaggattttgccacatggcagcgcattatacgtgtagatgctattcgagcaaatacagaatgggttctgtttgcccgtaaccaggctgaagtctctaaagagaaagcgctgcagtctgcaatatctgtcgggttgaaagattttgaccatttagagccttacatgatctatcatgctgcacgattagttgcactgcttgaggcatatgcactttatgatccagagatcgggtactgtcaaggaatgagtgatctcttgtcaccaataattgcagtcatggaggaagatcatgaagcgttctggtgctttgtgggtttcatgaggaaagccagacacaacttcaggcttgacgaggttgggataaaaagacagctgaaaaccgtctcgcagatcatcaagcgcaaggattcacacctctacaggcacctgcagaaacttcaggcggaagactgcttctttctgtaccgaatggtggtggttctcttcaggagggagctcacttttgagcagactatgtgtctgtgggaggtcatgtgggctgaccaggccgcgatacgagctgggattggaaggtccacttgggcaaggataaggcttcatgccccgccaaccgacgacttgctgctctacgccatcgcagcctgcgtcttgcagaagaggaagctgataatcgagaagtacagcagcatggatgagatactgcgggagtgtaatagcatggccgggcagctagatgtctggaagctcctagatgatgcccaccacttggttgttgaccttcatgacaaaatctgatgcgactgccttcctcagctatgtttttgggtagagtatgcagacatgaacacattttccgaggtgtatttagtaagctgttgtgtactgttcatcacccggaataaaaaaaaactttcatgggagtacatgtagag

SEQ ID NO: 33224 - DNA, 2123 bp, Zea mays
  Clone ID: UC-ZMFLMO17077F06_FLI
gaaaatggcgtgcgcagttctagcagggagggcgacatggtggcaggcactgggatctcgtcaccgatcaagaagaggaaattctcaccgataatttgggacagggatagcccaaagccaccgcattctggtgcagccagggacaagaaatcggtagaatctgttccttctgagctccctccgccgccgccgctgccacaagaccacatcccactgagcttgtctgtggagaagtcacctatggatgtagaaactactgttggtacagagagtgctgagcagttgccggaacatgaggtcaataaggtgatagagcaggaagaggactatccaagtccaacaatgaggaacatatcgacttcaagatgggcgggtgcaaatgatgatgaggaaggtggggcagctccaatgaagaagagaagtgtttcacctgcagactcctctgtaccaggtcagtggaaacgagcaagcccagaacctggtgaagtctctggaggaagggcaatgtctaggtcatctgattcagggaaaataggtaatgatgagaaagaagattccgaggtcgataaagatgactatatggatgttgacagggagcatgctagtgacagtggtacagaaaactgtatgtcggatactgactcagacaatgaaatgtgcaggcctgaaacccctgaaccagagaggccaccacacaggtgtatcaatatgcttcaaggttgcagaagtgttgatgagtttgagaggctcaacaaaattaatgagggaacatatggtgttgtatacagagcaagggataagaagacaagtgagattgttgcattgaagaaggtaaagatggagagggagcgagaaggtttcccattaacctctcttagggaaataaatatcctcttgtctttccaccatccttcaatcgtggatgttaaggaagtagtagttggaagtagtttagatagcatttttatggttatggagtacatggaacatgatcttaaaggtgtcatggagaccatgaaacaaccatatacacaaagcgaggtcaaatgtttgatgcttcagctgctagagggtgtaaaatatctacatgacaattgggtactccatagggatctgaagacctcaaatcttttgctgaataaccgtggtgagttaaaaatatgtgattttggactgtctcgtcaatatgggagcccattaaaaccttatactcaactggttgtgactttgtggtacagggccccagaactgttgttaggaacaaaggagtattctactgctattgatatgtggtccgtgggctgtataatggctgagctccttgccaaagaaccattatttaatggaaaaacagagtttgaacagctagataagatttttagaacacttggcacacctagcgagaagatttggcctggctatgctaaattaccaggcgtgaaagtaaattttgtcaaacaaccgtataataggctaagggataagttcccagctgcatctttttctgggcgaccaatcctgtctgaagctggttttgatctattgaatagactgctaacttatgatcctgataagcgcatatcagcagacgatgctctgaaacacaaatggttctctgaagttcctctgcctaaatcaaaagacttcatgccaacatttcctgctcttaatgaacttgacaggcgtaccaaacgttatctgaagagtcctgatcctctggaagagcaacgtctgaaagaactgcaagggaacataggcaaccgtgggctttttggctgaactaagagtacttgattggattcctgtccgtactaactgttatgcttcaccctgaatccacgaggtcagatgtcttctgaggcttggtgccggtttgagtggataaggtttctccttgtggcccatcatagaaattttgttgcaggattaacactccatccagattgatcataaaagcaaatataaaccgtcttcatcgtaaggtgtgacatgttggctttgaatgggtacaccagtttcacctttggaacttctgtatgtaaaatattccagattggtacgttgtaaacaatccccagtgtgtcggatttaaatttaaataaaacatcatcattattagtttt

SEQ ID NO: 33225 - DNA, 2422 bp, Zea mays
  Clone ID: UC-ZMFLMO17077G03_FLI
attgcctgctggtacaattcatgtgaagtttactggaagtgctggtcaaagttttggcgcttttctttgtcctggaatcactcttgaactggaaggagacagcaatgattatgttggtaaaggattatctggtggaaaaattgttgtgtacccaccaaggaacagttcttttagtccagaggacaatattgtcattggtaatgtggctctgtatggtgctaccatgggagaggcatatttcaatggtatggcagcagaaagattttgtgttcgcaactcaggtgctcaagcagtggttgaaggaattggagatcacgggtgtgagtacatgactggaggcactgttgttatcctcggaaaaacagggcggaactttgctgctggcatgagtggaggcattgcctatgtttatgatgttgatgggaaattcagtgctcgctgcaacaatgagttagttgatctatatcatgtggaggaagaggatgacatcatcacattgaaaatgatgattgagcaacatcgtcgcaacactgagagtgttttggctagagatatactctccgattttgataaccttcttccaaaatttgtaaaagtatatccaagggactataagagggttctagaaagcatgaaggtggaaaaggctgttgctaagcatgcaaaggagcctaagatggcaaatggaatttctgtgacaactaagaaagtacaacctgatcagtcagcaagccgaccaacacatgttgccaatgccaaaaagtacaggggctttattacatatgagcgagagagtatttcatacagagatccaaaagagcgtgttagagattggaaggaagttgcaatcgaatctacacctggtccactattaaatacacaatctgctcgttgcatggactgtggcactcctttctgtcatcaggaaagctcaggtgctggttgtcctcttggaaataagatcccagaattcaatgaattagttcaccagaacagatggcgcgaagcattggatcgactacttgagacaaacaacttccctgaattcactggacgagtttgccctgctccttgtgaggggtcatgtgttcttgggattattgagaatccggtgtctatcaaaagtatagaatgtgcaatcatagacaaaggttttgaagagggatggatgattccacgacctccacttcaaagaacaggaaggaaggtggccattgttggcagtggaccatctggtttggctgctgcagatcaactaaataaaatgggccacttcgtaactgtgttcgaacgtgcagatcgaattggaggtttaatgatgtatggtgtgccaaacatgaagacagacaagattggcgttgtccagcgccgtgttaatttaatggctgaagagggtgtcacatttgtggtgaatgccaatgttggtagtgatcctttgtactcgattgaacgtctacgttctgaaaatgatgcggttattttggcttgtggagcaacaaaaccgagagatctcaccatccctggacgcgagctatctggagttcattttgcaatggaatttctccatgcaaatacgaaaagtttactcgacagcaacctggaggatggtaaatatatctccgcccgtgggaaaaaggtggtggttattggtggaggtgatacaggcacagattgcattggcacatctattaggcatggttgcaccagccttgtaaatcttgaactcctgtcaaaaccaccaagcactagagctgctgacaacccatggccccagtggccaagaattttccgtgttgactatgggcatcaagaagctgctaccaagtttgggaaggatccaagaacttacggagtcttgacaaagcgttttattggcgatggaaatggcaaggtgaaggcccttgaggtagtgcgtgtgaagtgggagaaagtagatagaagatttcaactcaaggagatggaaggatcagaagagattattgaggctgatctcgtcctcctagctatgggattcttgggtcctgaagcgacaatagctgagaaattgggtttggagaaggacaacagatcaaacttcaaagcgcagtttggagacttcgctaccagtgtcgatggtgtgtttgccgccggggactgcagacgtggacaatcactggtggtttgggccatcacggaggggcggcaggctgctgcagcggtagacaagtacttgtcaaggtatgatcagaatgctgctgctacaggcgacagcactccctccgggacagggctcgttcagccggttgcggcatagtagcataaactggagcaagttttacgtttgtcagtgtatcctgtggttccacacagcaaacaccgttcttgtagttgtctaaaagaaacagagaaatccgggctcattaaggaatgaaagcccttctat

SEQ ID NO: 33226 - DNA, 1216 bp, Zea mays
  Clone ID: UC-ZMFLMO17077H02_FLI
cggcgtgctcggtggcgccatgttcgtctcctcggtcgtgctcggggtcatcgccatccgcctcggcggccaggaggtcgccgtccaccgcgccagcttcttccgggacgcagccttcctcttcctggcgctcgtcgccgtggccgtcgtcgtcgccgcgggccaggtcacaatctgggccgccgccgggttcgcctcgctctacctcgtctacgtcctcgccgtcgccttcaccccggaccgctggaccagacgccacgacgcgcacgcggtggatgaccccgcctccgccgctgccttctcggagctccacaacgtcacggagaccaagttctacaccgaccaggaagcccgagatccactgctccccgacaccgcaccgctacttcaatactacgccggcgaagcaaacagcaacagcaacgacggctccactggcaacaagagcgtcttctggaccgtcctgcgcgtgctagagcttcccctgaatctcccgcggcggctgacgatcccggacgcgagcaaagagcggtggagcaagacggccgcggtgaccgcggccacgctcgcccccatcttcctgtccttgctctggagccaccgcgccacggggggcccgttcgttaccgtcctcctcggcggccttgctggtctcgcgctgggcctcattgccttcctcaccacggatcccttcgccccaccaacccggttcctcggcgcttggctcgccggcgggttcgccatgagcgtggcgtgggcgtacgtgatcgccaacgaagtcctgtcgctgctggtctcggcgggaatcatcctttccgtggactcggcggcgctgggggtgaccgtgctcgcctggggaaactccatcagcgacctaatagcgaacgtggcggtggcatcccgcggcggcggcgcgcaggtggccgtgtccggctgctacggcgggccggtgttcaacgttctcgtgggcctgggcctgtccatgctgttagcgtgctggagcgggtacccgcagccagtggagatacccagggagcctgggctttaccggacgctggcttttgttgtcgctgggcttttgtgggccgttgtgatgctacctaggagaggaatgagggtggacaggacactgggcgttgggctcctagtcgtatacttttgcttcctctgtattaatgtttcagagcttaagaatgcacggtaatatattgggttt

SEQ ID NO: 33227 - DNA, 2693 bp, Zea mays
  Clone ID: UC-ZMFLMO17077H03_FLI
aacagctgaaggcctgaagcaccctcactttccccactccggagctgcacgggcacgcacgcagtttatccaacgccactgggcctcaacaacaacaatctcccaacgccgccgcttccgccgcatcaagcgctagaactaggaacccctcccaaaggatctcaagaagacaaggacaccgtcgagtcgccgccagtcgctcgatggggtgcgggcagtcaaagatcgatcaagaggaggcggtgtttcgatgccgggagcggaagcggctgatggctgacgccgtggcctcgcggaacggttttgccgccgcccacactggctacactgtccgcctgaagagcaccggcggcgcgctatccgatttcgcccaaggcgaggcgccggaccctagcctggtgtcctcccatacccaccacgctccggctgtggcgacgtcatctgtctcgactccgccaggcccctccgcagcttccgtcaacagcccctccccgccgccgccgccattcgccgacttctctcattctagcctccaaagatcctcatccacccccaacattcctatgccggagccgagggccgcagccaaaaaccgccctcctgccgatgcttctatccgagaggaggatgaggatgaggatgaggaggaacaggatggacatatcaagatcgatagcgatgacgacagtgacgacgacagtgacgaagacgacgatcaccatgagcatgacgatgttagtgtggatgacatggtgcatggacaacaatcaaagcggattttgatgagtagtgtgggatcttctccagtaacaccacctccgcctccaaggttgaaccacaccccaccaacgcttgccacagcaacgccaccgcccccggtgctggagtcacagatggctacctgggactacatctttggcccaactcccaccccaccacccaccctagagcagcctgctgctgatactttgtggatggaaaggcgtgataaggagccagtggctgaggtgaaggcacctgtggcaaaaacagttgttagtaagccagctgctactgaggaaaggccaccagagacggccgtagagaaggataaagcaattgaggagatgatggctaatctaccgccatcaaaacctattgtgaggaagccacccaaagcacctggcccatcacaagaagcagcacactaccagcatgcctcttcgatgggtgcagttgaaattcggaaggggaaggtaatggtggcatcaggaactgccagcttgctacagattgttacacggcttgatgataactttcttagagcttcagagagtgcgcatgatgtgtcaaaaaaactggaggccacccggatgcattatcactccaaccatgctgacagccgaggacatatcgaccactctacaaaaattatgcacgttatcacatggaaccgctccttcaagaacttacctgaccatgaggacctgaacgataattttgagattgatgatagatttgaaactcatgctgcagttctagatagaatgcttgcttgggagaaaaaactgtatgacgaagtgaaggctggggagcttatgaaaaccgattatcagaagaaggtgtctctattgcagaagcaaaagaaacggggtgttaaacttgaaaccttggagaagacaaaagctgctgttagccaattgcacacaaggtacattgtagacatgcaatccatggattcaacagtttcagaaataaatcggcttcgggatagacagttattcccaaagttaatggaccttgttgatggaatggccaagatgtggagttctatgtaccgccatcatagaagtcagttcctgatcatttctggaataagaggtttcgagattcctcctattccaagggagacaactgattctcattacatccagacttgtgagctacgtgacattgttagggagtggcatacgcagtttgagaaattgatggacaatcagaaagcatacatcagagcactcaatgcatggctgaagctcaatctcatcccaattgagagcaacataaaggagaaggtctcctcccctccaaggctggtggatccacccatcaagcacctgctgcatgcctggcatgacgagctcgaaaggcttccgattgagcttgcaaaaactgccatcaaaacctttgctgaagtcataagcactatcgtgcatcttcaggaagaggaagtaaacctaaggaggcggtgtgatgaaactcgtagggatctgaaccgaaagaaggcacagtttgaggactggcatcaaaagtacttggagagacagacagcagaaactcaaaacatagatcctgtcgaggataggaaacgcaccatcgaggaactagagattcggctgagagaggaggaggggcaccatcttaggcatgccaggcaggtgcgggagaaatcacttgcaaacctccggacacacctgccagaacttttcaggaacatgtccgattttgcttacttttgcaaagacatgtacaacaatcttagaaaaactgctgcgctgtccaaagatgaagtctaaggctgatgatatttgtgcgtgtgtatgtatactcgacaagcagtagaatgtttgctggtaacttgtcctgatgccgtctagaatacataatagtcggcattaattatgtttgtaaattggaatggacattccggactc

SEQ ID NO: 33228 - DNA, 1965 bp, Zea mays
  Clone ID: UC-ZMFLMO17078A09_FLI
gtgaccacaaacatatattggagattagggcgtacaccttgagcctatctcatactttcctttgttattcatatctgctcttttggtcttccccagccgtttgtctgaatataatttttttaaggatctgtggtaataactggtaatctgttcaggacctgccagcttgccgaatcccatgttttgcaagtttttttagaactcgaacagtattctattttcttcccgaggcaatttcgagctggcaataatagttctaaccttgaacaaggagccaagtcttggagtcaatattttatgctgccatgcacatttcatataaggtagtggttccatttccttgctgacataagtttccttatctctgatagctagattattggataacttgtcgatggcacaaaaagtagcacgcggataaccataacaaaggggacagaaacaaagcacaaaagttgtaggccccagtacaaaagggatagaatcaatgactgctgctgacgcacactacactactaggtactaaaatattagaatcatcactgctgactcggtctactaggaaagacgatggattcttgggtaaaagcgcaaccagcatagactctcatggacatttgcctattaacacgttttggagatttacctaacatctgcttcagttgtcacacttgttcaatgtattcggacagactctctaggaccgggatggtgtggtgtgcgcctaaaagctgcttactacgtggacccctctatttagttcgatcgttattgcctattgtctctactagcttcgtctctgcctcataaatcagcatatattaaaaagtagaaatgtggttggtgattcgcttcgttgcttccagtcttcttgagctctgctctggcatgttgctttatcaattgtatgtattcctactgacgtcctttgctttctccgtcttttgcagtactgtcataaccgaactaaaacagtttctgagaggaagcatcgcgattgccatggaagctgggagaatggatcagccatttatggctgctatcaatagccagcctttcgtggaggatattgagccagtgaagaaagccagtggggacatgcctgcgacaacaggaagcggatgcttcgaatgcaacatctgccttgattttgcatcagaaccagtggttactttctgtggtcatctctactgctggccttgtatctacgagtggctgcgccctggggtggagtcagctgccagcgacaacagcagttcggcaaggcggcaatgtcctgtatgcaaggcaacactctcaacggacacccttgtgccactatacggccgtggaggcaactcaaagaagtcacttgatggcatggccatcccgcgccgccccatggtacaccgggagactgttgaggagcaacagaatgcacagagcaatgtcaatgaccagcactaccaccagagcatggaagacaactctcagcgccagccattgctgcaagcgcaccaccatcccattcccactgggtttgacttcatctaccctccagcaccagtagggcgtggcttgatccactcaactgccggaggggtgctcggagggatggcagagattgtgcttcccttggcgctccgtggccagatgccagcgagcttgtactacacgaatccataccatgctgcgacgcagaacgtgaaccccaggctgaggcggcatcagatggaaatcgagaggtccctgcaccagatctggttcttcctctgtgtgtttgtggtgctgtgcctgctcttgttctgagacaagactattctatacacctctttgtagatattgaaagtgggagggggatactaatggatgatgcgtatagtaaacagggtaatggtctgtgtcgacaggcatgtgcttaagcatgctgatgtagagttgtaatatgatgagacacggaggtgaaatgcatatttcattcttctc

SEQ ID NO: 33229 - DNA, 675 bp, Zea mays
  Clone ID: UC-ZMFLMO17078A11_FLI
gagcttaacagcctgtgtaacaaaaacaattacccaacttcccaagatagttaatgcactatatatccaaaacctgatacatgcatcaatttgtcttaaaaagtacattcataaaaatataaatgtataaagagttcatttgtattttaacaaaagtctttggtcaaagccatattctggagaccgtgtcagtgtcctagaccacaaataacattggagggagtaaattatatctcatgtctatcaacgaagttttactttttaggttctattaatgtctaattcttgtaacccctcttttttggtatctcaattgttgcagttaggaaaccttccattacggccttatttctgcagaagtatgacaccaactttcatctattctctaccaccaaagagatggaaaagcaggttgcccccacccccatagctttctgttttgtccctataacaggtttacctatgttatatatagacaccgtagcaatgcacgtgtaatggtagattttctgattggttagtttggaagtgaagtaggtgccaatgttgtgcatgagcagaagaaatattattcccttcaatattagtagaggtagagatatttacttttatcagtatttgtgttgtgatagctatttttagcctaatgtttcaggtcaaagggccatacttcat

SEQ ID NO: 33230 - DNA, 1715 bp, Zea mays
  Clone ID: UC-ZMFLMO17078B08_FLI
tcgctctcaagcttcaaaatcccactagcgaaaggaaaacgggagaagctaggaagcagcagccgcggcatttcttccttgagcgttcgccttcggctgctcaacgcgtgcttggtttcaggagagccttggtggcatctctgtttcatggccgagatctgctgtgaggcggcggcggcggggtcggaccagaagggggagtgcgccggcagccgcgcggcgcggcggcggaggatggagattcggcggctcagggtggtggccgaggaggcgtccgccaagaggcggaggctggaggcggatgaggaagacgcggttggggggcgagcgccgaggtacggcgtgacgtcggtctgcgggcggcggagagacatggaggacgcggtgaccgcccgtccggagttcatcaacggccaccacttcttcggggtgttcgacggccacggctgctcacatgtggcgacgtcgtgcggggagcggatgcaccagattgtggccgaggaggcgacagctgccgcaggctcgtcggtttcggacgagaccgcgcggtggaggggtgtcatggagaagagctacgcgaggatggacgccgaggccgtcgtctccagggagaccgccggcccggcgcccacctgccgttgcgagatgcagcttcccaagtgcgaccacgtgggctccactgccgtcgtggccgtggtggggcctcgccacctcgtcgtcgccaactgcggcgactcccgcgcggtcctctccagcggaggcgccacgatccctctctcagctgaccacaagcctgaccgccccgacgagctcgaacggatccacgcagcgggagggcgcgtcatcttctgggacggcgcccgcgtcttcggcatgctcgccatgtcccgagccatcggtgacagctacctgaagccgttcgtgatctccgacccggaggtgcgggtggtggagaggaaggacggcgaggacgagttcctgatcctggccagcgacgggctgtgggacgtggtgagcaacgaggtggcgtgcaaggtcgtgcgcacctgcctccggaacagggcgccacgtggtggccgggagcagtcgagcccgacctccaacctgagccccaggcagagcagcggcagcggcagcggcagcagcagcggggacgaggaggctggtgggcccagcggcgacggcgcggggtccgagagcgacggcgagagcgccgaggacagggcgtgcgccgaggcggccatcctgctgaccaagctagcgctggcgcggcagagcgccgacaacgtcagcgtcgtcgtcgtcaacctcaggcggcgcccgcgatcgtgatcggtggtggctctgtgatggactagccgttcttggttggtttggtttcctggcccagttcaccttcgcttcggccgagcaatcattggacaagatgtcaaagcgaagatcgaacaaaatagtgagatccttagcaaaattgcatgctacttccttttacagtagtacagcagcactattgtttcgttagcgttcttttttcatgggtgttggagccttggagggtgcgtttgtgatctggtcggacagatcatcccgcctttcttcccccggtaaattctccaaatagaaaagcgcatgcgtctccgatgtttgaagaaactttaccgtgcgtccgaagagatttaattgtaatatatagtccagtgcccctttcactagcc

SEQ ID NO: 33231 - DNA, 1283 bp, Zea mays
  Clone ID: UC-ZMFLMO17078C05_FLI
attccggttccggcttccgccgccagcggcagcaatcccctcctcctcctccctgttcctggacgccggctccggcgccggctcctcatcgtccgcgggagactgaagtggtgaacacggaagaaggttgccattttactaagttaaagttagatcattggagcaatgccgccccataagatcgagactgggcaccaagatgtggtgcatgatgtcgccatggattactatggcaagcgcctagctacatcctcctctgataatacaataaagatcattggcgtaagtggaacctcacaccagcagcttgcaactttgagtggacaccagggcccagtatggcaagtcgcatgggctcatcccaagtttggttccatgcttgcatcctgcagctacgacggccgagtgatcatctggaaggaaggaagcaagcctgatgaatgggcactggtacacacctttgctgagcacaagtcctccgtgaattccatcgcgtgggcgcctcatgagctgggtctatgcttggcttgtggttcatcagatgggaacatttcagtcttcactgctcgttctgatggaggttgggataccacgcgtattgatcaggcgcatccggttggtgtgacctcagtttcttgggctcctgcaatggcaccgggagctctaatcagcgctgggtcttctggtcagtttgagtatgttcagaaactcgcttccggtggctgtgacaacacggtgaaggtgtggaagctcaacaacggcagttggcggatggactgtttccccgccctacagatgcacaaggactgggtgagagacgtcgcgtgggcgccaaacctgggccttccaaagtccaccatcgccagcgcctctcaggatggaacagttgttatctggacagcagcaaaagaaggcgagcagtgggaaggccggttgctgtatgatttcaggacccctgtgtggaggctgtcgtggtcactgactgggaatatactggcggtgtctgacggcaacaacaatgtgaccctgtggaaggaagctgtggacggcgaatggcagcaagtgacgactgttgagccataggtctctagagttgtccctcgtctatattgccttaatacttgtagtttttgtgtacctatggccctgtgtgggtagcaagcaggccacggtgcatgactacttgagacgtgatttcaggctcgggcagaagtgaaaaatgaacttgttgtatatgtggagcattctgtttctcgattcagtgccttttctttcccatggtt

SEQ ID NO: 33232 - DNA, 998 bp, Zea mays
  Clone ID: UC-ZMFLMO17078E03_FLI
cgcctgctactggcgctcggcctcctgcccatcccctgcgtttttcccctgctgaagcttttccatggcgtcctgttttctgcgcgcgtttctcggcgcccggctccctgctcgagctccccaaccatggccgccctcaaccccatggtcgagctcgcccagctccctgctccggtgactagcgctcagcgtccggatccctggatgcttgccctgctcgccgctggatcctgcgtgctccagccatggcgccctcccttgcttctctctccctctgccatcctccagctcgcccagcccctgctcctgctcgccatggctgccgcgccctcccagccgcagagttaccgcgcgcgtgagcttctctgttggccatcgctgttccctggtgcggtcgcctatgccgcgcgctctctctccagcgcccacccccagctcgaccctccacctccctctcgtctggataccggtgctgctcgccctgagctcctgccttggccgtcgcagcttcaaatccgtggacgtcgcccatggaagctcgccgaactgtgtccatatctttcctgcgtcggtcgtggtcttcaagccccgacgcgcgtgtccctgctcccagatccaaggccggtcgtcgtgtatgctcgcctcggctgtgtggccatgctcctgtcccagtcatcgccggtgaaggtccgtcctgcagcagcaccctagtggtcgtcgacttggagctctgcgatgactccatgcccgagctcgccctcaactctacagcaccgccgagcttggtccggtcctttgctgcagctcgtccccatggccgccgcagtcctgccgagatccctgtcgttcgcgcgctgctcctccctcgccatgccgcgcggatccctctccttcctaccctgctcggattgtgccgcgcttgctgtcgcgttcggcctgctccggatccgaagttggtcgcctcgttgtgaaatcgtcgtcgcgtccgggattttgac

SEQ ID NO: 33233 - DNA, 1507 bp, Zea mays
  Clone ID: UC-ZMFLMO17078E06_FLI
aaaagagaagagttctatgtgaagtggatcagttacaagcctaaagccttggagttggacattgtatatcttcagggtagatttgggactttgttcaaaacaaaaaaaaaaactatccaaagcagagtttcccttctcaacactctcagcttgtagatagatgtaccaactctgaaccctttggcaccccccttttagatgaccagctggtcactgttgattcttgttgccattagttggagcatggcaatgtgatagatcactgggagaatagctggcacactaaaaagaatgataaacacacgccgcgtggtgaaggaaacagattccttatgctgctgccagatctcaaaccttgagagacaacactgaggagatgaaatggcaggattctctttgtctaccattcaaaagatgctgccacataccctctgtctataaatagggtctcgccagagacttgaatcatcaaccaaaaactttcgcttctcattacttcacctcatttcaatatacatccagccagagactagagatcgacatggcttgccatcttaggtcgataagcttgccgtctaggcctcagtccggcgaagccgcagtgcagcaagagctgtgtattctagatgcaatcatctcctcgccatcaacatgtatcgtcacgatgtgtgacggtttgaggaggcttggagacatctacaacagcgttgtggagatgactcacttgccaagcaaccaagtctgctcttcccagcaaaggaagatgctggatggagaaatcgaatcttccctcgagctgctggatctctgcaacaccatgcaagagatctttgttgagttgaaggccatcatccaagagctgcaagtggctctaagaaaaggagatggcgtaaccgttcaagccaagatccagtcctacagccgcttggtgaagaaggctaaacagtctttcaagaagtcaagcaagaaggccacttctgacaaggcagactgtgcagtggtcaggctcctgaccaaggccagggagatcgccatctctctacttgagaccacggtgcagctcctgtcaaagcaaattgaggtgccgaagcagtcacttgtctcaaaggcgttttccaagagaaaagcagttgtctgcgaggaggaccagttacaggcgttagagtgcagcgttggagatctcgagagcggagcaggacacctgttcaggatattggtccagagcagggtctctctcctgaacatccttagctcatagacactccttgttgctcttgacatcctgtgattggcatccgcgtttttgaggattagctaatcttgatgcagttttgtaatatgtatagagtacaaatgtacaggggggggggaaatcggaaaggaaaaaaaagacacagttttgatccaattcatttttgttgacgtgattttgtgcattcagtaaggattgctttgttttcggatgcttaatttgtggatcttgccctgcgtacaagaagcatgccag

SEQ ID NO: 33234 - DNA, 1301 bp, Zea mays
  Clone ID: UC-ZMFLMO17078E11_FLI
cgcaggtacgacctgctgctgctggcggcggacggcgaggagctgaaggcgctggtggacgaaggctacgacctcctcgggcagctgaactggtccgaccacctcccgtggctggcccgcttcgacctgcagaggacccgggccaggtgctccgcgctcgtcccgcgggtgaaccgcttcgttggcaacatcatcgacgagcaccgtgcgcgcctcggcctcggcgacaccggcggcgtcacggacttcaccgacgtcctgctctccctccagggcgtcgacaagctctccgacgccgacatggtcgccgttctctgggagatgatcttccgaggcacggacacggtggccgtcctaatggagtgggtgctggcgcgtctcgtgctgcaccaggacgtgcagagcaaggtccaggaggagctggaccgggtggtcgggccaccgggccaggccgtgaccgtgaaggagtcggacaccgcctcgctcgtgtacctccaggcggtcatcaaggaagtgctgcggctgcacccgccaggcccgctgctctcctgggcgcgcctggccacgtcggacgcgcgcgtaggcgggtaccacgtgcccgcgggcaccaccgccatggtgaacatgtgggccataacgcatgaccccagcgtgtgggccgagccgacggagttcaggcccgagaggttcgtgggcgcctctgctggtgctggtgctggtgccgaggacgttccgatgataatgggctcggatctccggctcgcgcccttcgggtccggcaggcggagctgccccggcaagtcgctcgcgctggctaccgtcgggttctgggtggccaccctgctccacgagttcaaatggttgccgccgtgccgcggcgtcgacctgtccgaggtgctgaggctgtcgtgtgagatggctgcaccgctggaggcgagggtggtgccacgtcacgcggtgtgagatgacgaggatgggacacgtggcctggggaggaggagttgcccgatcgtcttatcttagctttgtttaccttgtagcagagaacgtaacgtggcccggcggcgatggatgagatgtgtaaaagaagaaaaagagcatgcccgagtgccatatgctttagagtcgactgtgtatatatgatgatgctagcagctagtggaaggcagtagtacgtagtagtaccacctgcagcgccggtttgatgcctacgtgtgtaatgtaatgtaactttaccagcttgcatgcatgcatgtgatatgtgcctgttagtgtagtgcaccagatgagatgagcgtgac

SEQ ID NO: 33235 - DNA, 1163 bp, Zea mays
  Clone ID: UC-ZMFLMO17078F05_FLI
cggcacccagtccccacctgttgcacgcgatcccttcggtggcaccggctgtccccttgagggaggagacggagacagagagggaggcgtggcgactgctgcggagggcggtcgtcagctactgcggcgagcccgtggggacggtggcggcggagaaccccgagtgcatggagatgctcaactacgaccaggtcttcatcagggacttcgtgccctccgtgctcgccttcctcatgcgcggtgagaccgagatcgtccgcaacttcctccttcacaccctccagcttcaggatttttaggcacagattgtggacaggccattcaaagtctctgaaaactgagcatacacaggagacctggtaatggcatccagacacttcacctcgcgagatgttgcctgagaagatggaaatacaaagtgtcaacaaggcaaaaagtaatgatagtttcatctataagactgagggaagtaagcttatgaaaaatttccttccatagatgcctgactggtttgatcaatattaatctatgcaacttatttcatacaatactagtagatgggatgaaattatttggttttgtccatggcgagttctagctgaagtattttgtggattcagtcaagaagtggggaacacgttctgctacttttcactttcatcagggaagcaaatcagtatctgtcaattattttgtagaaatctagtgggcagcttgtgttcttttttatacatagtttagataattcttgaataattctgagagcatttacatcccttagttatttgttgatatatgatatagtattttcctgctctttttgtatgccatatttatcttctaggcttcaagctccaagtaacagcatgggattcaccttgaaggcttcccaccgatatggtctatttcaagaatatgttctagtgagtctatggtatatacgagtagtcacttatgcctctacgatataagataatgttttatcagtttctacataatactttgcatgccaaccatatcagtgtatttgtagtagtatggtgtataaatgttgctggtcataaagccacgcttgataaggtgttctacgcttgaataaatgatgtgacaggttgttgtagagcagcatgatataagtgaatgcataactctactcttatatt

SEQ ID NO: 33236 - DNA, 1290 bp, Zea mays
  Clone ID: UC-ZMFLMO17078H04_FLI
ctcctcagcgagcttacgcataccatgaaagtaaatttcatacttggtgagccgagggagtgtgtcagactcgccatcatagttggggaatgtcagcttgtggcaatgagggtcgaagttttcgtgcaagctccggtcgaagaaaccatcgccaccagcacttggaacacgaccgctacctttgctgccaccaatggagaggggatcagttggaggcatctcagatgtagaattatccgtgggtcgcttctctagtcacgccaactcgcgatcctcggaggccattcaattgttgagggttgtaagctgcggcaagatctggtccaattttgcaatgtcggaagtcgctatgttaggatctttgacaatgccggacatggttgtcgatgtgtcggttgttcctgataccaattgatgtgttctagtttttctaggaggtgtacgcatgggagaatagagcaacaaagaggattatggtagagaacgcagagaacacggtggacgaatagagggtcggattccttcgtcggccgctctggcatgaaactccactagggtggtgaaggaacaaactgactctcgcaataagtagcaaaccaactcctaaacaaattctttgaggatatctttgtttctaaacttatctgattgctaaatcttagccacttctgttgttattttcttttcggcttggctgtcctgtctgattatgcgttctctggtattggtggccatggtaagagtacataactatcacttgcattgcaatagcattaatcccttttagctgactgaggttgaaggtgtgctgattttgcactttgtatgcgtcgcaataactgaatacttgtattagttttttttgctgctgcttttgttagaaaagttgtcgactctataggcctcagtttctgtgcttatgtctacaatctgcacaggtattcatacgatgagcaaactggaacatacaaagaaattcaggatgaacaaactggcacggttaaagaagagctgggagatgccatcaaggagtaaccgagttgctacggcccttctcgttcttgattgctgatgcaactgaggtagttcagaccgcccagtgttctttaaagcgaggcagcgagctgtagcttcagtttctcggtaggcgctttgggccacgactcgctaaactgccttgatagatgttttatgaagaaattaagaggaaaccagtcagatcatactataggttgtaaaccagaaagtgatcgactgcaactgtacaattgcaatattaccgttctcggc

SEQ ID NO: 33237 - DNA, 928 bp, Zea mays
  Clone ID: UC-ZMFLMO17078H06_FLI
caagtttcgtgggtagaggaggcactagatactgtgccagatcggggtctggtagtggcagttgggtgattacgacggagtgggatgggcctcctcgacaagctgtgggacgacaccgtcgcgggcccgcgcccggacaccggcctcggccgcctccgcaagcagcccgcgcgccccgccgccgttaagatcagtgatccggccggggacgctgcagcgctcgtgccgccctcgccggcttcgggtagcgaggagacgccggtgaaggtgacgcgcagcatcatgatcaagcgtcccgcggggtacccgtcttcgccgaggagcgcggcaagcacaccgccggcctctccactagggactaccccgcccatctcgccgtttgccggcgctggtggtcgcttcagaaggaaatcatcatccgacgcatatgagagggcaacccctccagggacgaccagccaccctcctcccttcgaagtgtgaaccggctgcaccctcacacttgttttgctccttgacaagcatctcttcacctataataaggtagaggcagggaggagagaagacgacatcaagaggggaacggggatgagttgcgggtttacctctgctgtgatatattgtaggtgccactatgtgtattgttcccccctatctactacgtggcataggttgtattctagtatgttgaaagctcatggtgccgtgctgtatcaataaggtgttatgcgcatagagtggctcaggaccagggctgcgtttgcgctttgccactggctgtgttgtatgtttcttctgctgctatgccattagggtttagggatggtgtgtggatggcgtcgtgcttgtagtgttagctgggtttgaagcggactacatgtaggtttgttcaatgtctggtatctattagctgaaggtgtttgcctgt

SEQ ID NO: 33238 - DNA, 854 bp, Zea mays
  Clone ID: UC-ZMFLMO17078H12_FLI
tgaacaaatggatgttcctacatcacctccgagtatccagccagtcaatcctgtccaggctgcacaagcagctcaaactgcagctccatctggaccaaatgctaaccctctagacctctttccccaagtaactcccctctgtgcatgcagactgacatttttgcaactagttgactttggatctcatattcgtcattgtctgaactgtagtctcttccgaatgcttccgccaatgctggcacaggaaaccttgatgttttgcgcaataacgtacaattccaaaacctgcttggtttggtgcaggctaatcctcagattttgcagccattgcttcaagaattgggtaaacaaaatccccaggttatgcagctaatccaggaaaaccaagcagagttcatgcggatgatcaatgaaccacttgagggagacgaagagaatgaaatgatgctggaccagatggcggatgcagctgagaccattgcagtgactccagaggagaacgaagctatacttcgtcttgaagggatgggctttgaccgggcactggtcctggaagtgttcttcgcgtgcaacaagaatgagcagctgaccgccaactacctcttggatcacatgcacgagttcgacaacgatgacgggctcggagggccaccgctatgagggcgctctcgatccctacatcatgcgaacgaaggctgtagggcagtagtaggaaaacgttttgggattcgtcccgtctgttcgctcactctacatattcgtttggctttgctgtttagtacagaatttctagatttacggacttactacttgatatcctgatatagaggtcacggccaagcttactttttttc

SEQ ID NO: 33239 - DNA, 1676 bp, Zea mays
  Clone ID: UC-ZMFLMO17079A04_FLI
gatttagcgatgcttctgtacagagtgacattaagcactggcccttcaaggtcattcctggacctgatgacaagcctatgatagttgttcaatacaggggtgtggagcagcagtttgcagctgaagaaatctcctcgatggtcctcgtcaaaatgcgggagattgctgaagcctatcttggcaccacagtcaaggatgctgttgtcactgttcctgcctgctctaccgacttgcagagacaggccacatggaatgcaggagtgcttgcaaatcttaatgttatacgcatcatccctgagcccactgctgctgccttggcttatggtcttaataggaaggctgcccagattatgggtgaatatgacgttctcgtgtttgatcttggaggtggtacctttgatgtctctgttctcgcaattgaacagggtatctttgaggtcagggccacagctggtgctgctcaccttggaggtgaggacttcgacaacaggatggtaaaccactttgtcgaggaattcaagagaaagaagaagaaggacattagcggcaaccctagggctctcaggaggctaaggacagcctgcgagagagcgaagaggaccctctcctcctatttagaggcgagcattgagattgattgcttgtatgaggacatcgacttctactcagccatcacccgtgccaggtttgaggagctcaacatggatctcttcagaaagtgtatggcgattgtggaggactgcctcagtgatgcgagttatgtacgttcaattcatgatgtcgtccttgttggtggttcctctagaattccaaagatccagcagcttcttcaggagctctttgatgggaaggagctttgcaacagcatcaaccccgatgaagctgttgcctacggagctactatgcaggctgctatcttgagccgagagggtggctatgagatccagaattatctcctgttggatgctacccctctttctcttggtttggagacggatgggggcctcatgaccttcttcagcttgttcgctgcggcttgctgcggctgcaatccggctgcggctgcggcttctacagtatttttctctctatggattgcagctgcagcagtccaaacagctgcaacagtgtcggcttgcagccaaccgaacacgccccttgatgattccaaggaataccaccattccaaccaaaaaggagagggtcttatcgactgactccgacaaccagccttgtatccgaatccgagtgtacgagggtgaggggtctattactcgtgacaaccacctgttgggtgagtttgagttttcccttcttcccgcacctagcggcgttcctcagatcactgtttgcttcgatgtcgacattaacggtatcctgaatgtctccgctgaggacaaaaccactggccagaagatgaaaaaagtcatcacaaagaggtttcgtttaaagcgttaattatctgatcaataactacacgaactagacagttttatgtcctttcataggattgatcgtctccaaggtcaaggcatatagtactggtgtttgtttagacagccgatgtcttattttacttgccaagcttggtggttgccttgtaaattgagcattttatttggaggttgtaaactgtttaatacatctatgtgtctatgatcaaagcataagtgtgt

SEQ ID NO: 33240 - DNA, 1690 bp, Zea mays
  Clone ID: UC-ZMFLMO17079A05_FLI
catctagcggccaccaagctgcgccatcttgtcctcttcccccctaaaacgcccgttcctggacggctggacctgcttatacggtgcctatgcccacgcatcgggctgtgggaggcgggctctgtttctgactcgctggagtggtgggcgtacgcgggcatctccttcttcctcgtgcttttcgccgggatcatgtccgggctcacactggggctcatgtcgctcggcctcgtcgagctggagatcctccaacgcagcggcactgacgccgagaaggctcaggctgctgccatccttccagttgttcaaaagcaacaccagcttcttgtcaccctgttgttgtgtaatgctgctgccatggaggcacttcctatatttcttgacagaatgtttcatcctgttgttgctgtggtattgtcagtgacatttgttcttgcctttggagaggttataccgcaagcaatctgtaccagatatggcctagcagtgggtgctaactttgtatggctcgtacgcattctcatggtcatttgctatccaatttcttaccctattgggaaggtcctggactgtgctcttgggcacaatgagtctgcactttttaggcgagctcagttgaaagctctagtttcaatccatggcaaagaggctggcaagggcggagagcttacccatgatgagactacaatcataagtggagccttggacctgaccgaaaagactgctgcagaagctatgacacctattgagtcaactttctcactagatgtggattctaagttggattgggaagcgattgggaaaattcttgcccgtggtcatagtcgtgttcctgtatactcaagaaaccctaaaaacatcatcggtctcctattggtgaagagtcttttgactgttcgtgctgaaacggagacgccggttagtgctgtttcaattagaaggattccaagggttccttcagacatgcctttgtatgatatactcaatgagtttcagaaaggaagtagtcatatggctgctgttgtgaaggctaaacctaaaactgaaccaccgcctgacagaactgaaccaaatagggaagcagttgggccagcacagttgactgttaccttgttatctaatgctgaagaaagtgcagacaatgtggttgtggatatcgaaagaccacataacaggcagattaatgggatcccagcatctaacgcagtgcctaggtcatcagaggatattgaggatggtgaggtcgttggaatcatcacacttgaggatgtatttgaagaactcctacaggaggaaattgtggatgagactgatgaatatgttgatgtccataaaaggatccgagtagctgctgctgctgctgcatcatcggttgcaagggctccatccgttaggagattaacgggccaaaaggctgcaaaccttcagggagcacagaatcgccaaggacagcagcctcctggaattctcaagaaacctactgagggtgattcaaactcatcaaaacaagtgaaccttgtcgaacctcttcttgaaaagaggaggtaactctaaaaacgtagccgataaaacgcatggaatcaagccggaagagcctatggttcttgctattataacaagaggtaaatatagatgaactcgttgttgtaaattccaacaggagcttttggtgtcatggacattagtcatg

SEQ ID NO: 33241 - DNA, 1345 bp, Zea mays
  Clone ID: UC-ZMFLMO17079B02_FLI
aacgactggcgaaacgccatgtacccagtcgtcccggggtaaccgatccaatttcgctagcctagacgccccggatgctgtcgcaaaacgatttgctagacgccacagcagtggcactatgatccgaccaactaacagcctctggccccgtcggctggcgtggcgtggcgcgcaggcacgagatcgtgggcgtggtgaccggcgtcggcggcggcgtcacgcggttcaaggccggcgacacggtcggcgtgggctacttcgtggggtcctgccgctcctgcgacagctgcggcaagggggacgacaactactgcgcggggatcgtgctcacctccaacggcgtcgaccacgcgcacggcggcgcgcccaccagggggggattctccgacgtcctggtcgcgagcgagcactacgtggtccgcgtccccgacggcctggcgctggaccgcaccgcgccgctgctctgcgccggcgtcaccgtgtacagccccatgatgcgccacggcctcaacgagcccggcaagcacctcggcgtcgtcggcctcggcggcctcggccacgtcgccgtcaagttcggcaaggccttcgggatgaaggtcaccgtcatcagcacgtccgccagcaagcgccaggaggccatcgagaacctcggcgcggacgagttcctcatcagccgggacgagaaccagatgaaggtgtgccgttgccgtcacatctgggctgtgatgaaccccccttctccacgctcactgctatgtaatgtaactaacgcggggacatatatacgtatctatgtgtgatttgagcaggcggcgacggggaccatggacggcatcatcgacacggtgtcggcgtggcacccgatcacgccgctgctggcgctgctgaagccgctggggcagatggtgatcgtgggcgcgccgagcaagccgctcgagctgccggcctacgccatcgtgccgggcgggaagggcgtggctgggaacaatgtcggcagcgtcagggactgccaggccatgctcgagttcgcggggaagcacggcatcggggccgaggtcgaggtcatcaagatggactacgtcaacacggccatggagcggctcgagaagaacgacgtccgctaccgcttcgtcatcgacgtcgccggcagcctcggctctgccgcctaggcgtggctgcaaaggtttcaatcagagcccagccgcaataatttgttagctaccgaatgaatgatggtctacgcttgttgatgagttggtgctttgtcgtggttttgtggatgtaataattcgatgtacaaataaaaaaaagggagacaaggtgcttgttcccttggtttggtgac

SEQ ID NO: 33242 - DNA, 584 bp, Zea mays
  Clone ID: UC-ZMFLMO17079B06_FLI
gccacgtgctcacgctcgcagctggcggcggcagcagtggtggtggtcgtcgtggtgggcgcgatttcgagaaactggggggcgaggagagggaagcggtgacgaagttcttgaaggagagggaggtggacgccgagctcgccggattcttgcacgactacatggcaaacaaggagaagatggagctgctccggtggttgaagactgtcgaatcattccttaacaagtaggataagatcgcacacagaagacaccgccgatgttactgcctggtttgggaacgggtacgctccaacaacaactcgtgacggtctcctgcagtctctgtgatcatccgcatctacccctctgctgacaattgtgtgctgaagatgtttgtttttaatcagcttagatagctcagcgcacagcgctcttggaaactggtgatctgaatatcctactggtactttcatttctttgtgataagattgttctcaacggtgtatcttttaagatacaccccattggggtttttttcccttttgcaatataccaaatctcattttggatttccaaccagttgctatgtgcgtgcttagagt

SEQ ID NO: 33243 - DNA, 892 bp, Zea mays
  Clone ID: UC-ZMFLMO17079D10_FLI
gaattaaagaaaaatgaataggatcaaagatacttgtagtggtagtaggtgttctttctgtctcggtcgctgcatgcgactggctaataacaaaggaagatgacagcgctgaagacagctctcaaagaagcccaggtattccgctaaactgatgtgtgctgtcttgcgccgggacgcatacatgagtacgtacgcatgacctctgccacggttgatcgataatgacgcgacatccgatcagaaacatctagactgctgcacggttgttcagctgcctgcctctgatgcatcgcaatggatgcgaaaacgacggtaacggctgcgcggaccgtgcgtgcatgggaaaagggcgggaaggagacgacgacgcggagaggccgcgtttctgcctcttctttcctgcgttgcggttgcggcctgcccagcgcgctgcgcaatcgccgccctcctcccctcgcccaacggcaacgaatctgcctgccttcctgcagcctcaccggctcatcacttcgtcagccatcttcacagcccgcctggcgccccccagcatcagattcccctgctaaaccctcctgttgcggtttctatctggtccagataatcactcccttccctccaattatttttccactgctcgaaggcccggggcgcccaccggagccaatcagttccgttcacctttccaccggaatccaccccaccgccaccggtggatgatttgatggagttgccgttttgcggaccgtggtaactactctctcccaccaccaacaatcaagagtccgctctcctccaacctcctgccaacagcacgcctgcctctctctctctctgtgtgtgtgtgtgtgtgtgtgtgtgtgtgtgtcaccgagggtccgaggcggtcctactc

SEQ ID NO: 33244 - DNA, 1347 bp, Zea mays
  Clone ID: UC-ZMFLMO17079D11_FLI
gctcgctcgtcccagctgatcaggtcgagcacctagtagcgacctgctcgatcatcagtgtagagtgtcggtaggtgtctgtctctcttggtggctggttgcaacggtcatggcgacgtcgtctcgtcgggtgcccttgctgctgctgtgcctgggcgtgctggtgtcctgctccttcgcggcgggcagcttggaccaggagctggacatcacgtggggcgacgggcggggcaaggtccttgacaacgggcggctgctgacgctgtcgctggaccgcacgtccggctccgggttccagtcccggcacgagtacctgttcggcaagatcgacatgcagctgcggctggtgccgggcaactccgccggcaccgtcaccgcctactacctgtcgtcgcagggcggcgcgcacgacgagatcgacttcgagttcctgggcaacgtgtccggcgagccctacacgctgcacaccaacgtgttcacgcgggggcaggggcagcgggagcagcagttccgcctctggttcgaccccaccgccgacttccacacctactccatcctctggaaccccaagcacgtcatcttcatggtggacgacatgcccatcagggacttccgcaacctggagagcaagggggtggcgttccccaagagccagccgatgcggctctactccagcctgtggaacgcggacgactgggcgacgcagggcgggcgcgtcaagacggactggtcccacgcccccttctccgcctcctaccgcgggttcaaggccgacgcttgcgtcgccgtcgcgggcggccggacccgctgcggcgccaccgtcggcaccgagggcaccggcgcccccgcctccgccgccggcgccggggactggtacaaccaggagctggacctcaccctgcagcagcggatgcgctgggtgcagcgcaagtacatgatctacaactactgcaccgaccccaagcgctaccagcagggcctccccgccgagtgctccatgcagtagcgcccggttattcctcgcccgtccaacaatggcgcgcgcgcgcgtgtgtgtgcatgtggtccgctctactgctaccgctacgacgatcggtgtcgatcaccggatcaaggcaagacgaaaggcatcgaaacatggtagataaataaaggacttgacgatttgtaacgcagtagctggtgcgtgcgtggtgtggtggtaagaaattcttctgctgcctgtgttcttgtagcctcctcgtcctcgcccaccctgttggtacgtgtacggtgtacgtagtctgccgccgcgcgctgttcgtgttcgtcgtgtctcgtgtctgtattatactcgtcctccccatc

SEQ ID NO: 33245 - DNA, 3596 bp, Zea mays
  Clone ID: UC-ZMFLMO17079E04_FLI
gcaaattatttcggatcgtttcattctttcaatgctggggacagattttaatgactttatttatctcccttctgttggggcagccgggggcattctagtggcctggagacgacatttgggattcactggtcaaaaaagactggataattacagtgtctcagttcagttttgtaatagtaggggaaatgaatggtggctgacctgtgtttatggtcctcaaggaggcaatgagaagattttgttcctgcaagaaatcagagaaattagggccgaatgtcttggaccgtggatgttggctggcgatttcaatctcatttataaagactcagataggaacaacagtaattacgacagagcaatgatgggtaggtttcgtagattaattgaggatatgaccctgaaggaaattcccttgcatggcaggcagtacacttggtccaaccaacgaaatgtgcctgtactggtcaagctagacagagtgttttgttcagtggattgggagtttctctttcccaatgttcttcttcagagtactgcctcacaagattcagatcattgtcctctaattttggggcttagggataataaatccggaaaaaggcgttttcactttgaatccttctggaccaagcttgaggggtttcaggatattgttcttgccacatggaattctattgagtcagctacatgcccttttaagtccctggaaatgaagttacaaggagttgctaaaagtttgcaggcctggagcgaaaagcaggtggggcacgttagatcccaacttgctcttgctaaagaaatcctacatatgctggaaatagcgcaggatggtagagttctcagccctgctgagcgctggctcaaattcagactcaagaaacaagcattattattgtcatcttgcaagcgatccattgcaaggctgagagcgaggatttcttggctcaaagatggggacgctaatacaaagctattccaccttcacgcccgtcatcgtaagaggaaaaattttgtggcatgtctggttgagggggaacaaatcctaaccagccatgaggagaaagctgagtgtgtggaccatttctacaccatgctgttgggaaacagtacggatagggaaagggcgattgagttagaggctcttggaatgcctaattttgatctgaccgttctggaagcccccatttcagaacaagaagtctgggatgccatcaaatgtcttccttcagataaggctccaggccctgatggattcacaggaaggttctataaggtttgctggacaattattaaggctgatattatggcagctatctcggctgtttggggcaggaaatttgccaattttgggcgccttaatacagcctatatcacattgatccccaaaaaagacggagcagataatataaaagatttcaggcctatcagtttggtgcatagttttgccaagctggtcaccaaaatccttgctaatagattggccagcaagctcaatgagatggtgtcaccgaatcagagcgcatttataaaagggaggttcattcaagacaatttcatgctggttcaacaaacttccagactgttgcatcaacaaaacaaggccagcttgctgctgaaattagatattacaaaagcttttgattctgtctcttggcctttcctgatcgaggtgatgaagaagttaggtttcgggcagatttggacggatatgatatgtggtcttctggccacctcctctactcagattattttgaatggatttccaggtcgtcatattaagcaccgcaggggacttcgacagggagaccctctctctcccatgctatttattttagttatggatgtccttgtctacatgttctcaaaggcagaaaatgatggtttgcttcagcagctttctagttcaaaaaagctccatagagtctccatgtatgctgatgatgtggtccttttcttatgcccaacaccgacagatatagaccttactcttagcattcttcatttgtttggagacgcctctgggctacacaataatgtgcaaaagtccaatgtgtatccgattagatgctctgaggaggttctactcgaagtccaatccttgctgccatgtgaaatctcaacctttccttgtcggtatttggggctccccttatccttacacaagctaacaaggcagcagttccaaccttttgtggataaaatagctgatcagcttcctaattggaaggcggacttaatgacacgggctggaagaagagtgcaagttcagcatgttcttactagcatgatagtatatttagcaatggcagtagatatcccacagtggggtttggatgctattgataaaattagaagaggttttctttggagaggccgcaaagaagctaaaggtggtcattgtcttgttgcctggggaaaagtttgccgccccctaaagcttggcgggcttggtatttctagttttccagaattatgttgggcacttcgactaagatggctttggttacaaaagactgatcactctcgcccctggtctgggcttcaaatacaaatcccaaaaaaggctagagccttcttttctgaagttgtgaccactgaagtggggaacggaatcaacaccaaattctggaaggataaatggctgaatggaaaaagaattgcagatctgtttccaaggctgatcggcgcaattccgaagcggctaattaattgtaggacagtccaggaagcaattgttagtgccaaatggatttctgacatcagaggagccttgtcagtgggggttttgacagattacattcagctttgggaattgatttctggcatcgagctgcagccggaggttgaagacaggcatatcttcagtattgccccgaatggtgtatactcagccaaatcagcatatgaaggtctgttcctgggatctgtgtcatttggacactataaaagaatctggaagtcttgggcattgcccaaatgtcgcttcttcctttggttggttgctcataagaggtgctggacagctgatagattggcaaagcgaggcctaaatcatccagataagtgtcttctatgtgatcaagaggaagaaactatagaccacctccttgtacaatgttccttctcgcgggaattctggtaccttttacttaggaaatttggtcttcattcacttgctccacagccaactgcaaactccttcctggattggtgggaagtggtggagggagcagttattggactcacaaaaaagggccttaactctctcatcattttgggagcttggactttatggaatcaccgaaataactgcatttttgatggctgcaatccaagtttgtccttaagtctcagagctgcggatgaggaaagaagaaaatgggaagttgctggtgcaaaaggccttgttcatttggccgcaccagtgatagaggcttaggaagtttgagtagtatgttttttgatccccttatggatctttatttgtatgcctgtttctggcctccgtaaggaggttttatctgtaaaccattgttttttttttctattttcttctgcttaatatataatggggcgcagttctcctgcgcgtctcg

SEQ ID NO: 33246 - DNA, 875 bp, Zea mays
  Clone ID: UC-ZMFLMO17079F10_FLI
ggcaagtggttcttaaaggggctagattcccatcgccaagtaactagtgaggtctacttaccatcatccaatacatggtcagcaattgatgatgagatggtcacaggctggcggaacccaagtatttctttcaatggccgtctctattcagctgactgccgggatggctgcaagcttagagtctatgatgagaacacaggaacatggacaaggttcatggacagcaagcaccacttgggcagctcacgtgcctttgaagctgcagctttggtgtcactaaatgggaaactctgtgtcatcaggaacaacatgagcataactcttgttgatgtctccaacccaacaatgagtgttgagacagatagtgcgcgcatgtgggaaactgttgttcggaagggccagcacaggtcgtttgtggcgaacttatggtcgagcattgcaggacggaacttaaagagtcacattatccattgccatgtgctgcaagtttgagggcaggttttgttagtgggaacatgatcaagttttttaagaagcaaaaggttcagatcagtgacagaaccctccatttcgaaggtagtaaggtttcattgcagaatcgcggggaaaaaggtcattggcgtgccactgctgcccccaaagtcccaaatagttatttgctctcttccagaactgaaaattccaattactttctggcaacatttgaagactcttatcattaatggataaggtttttcagattttgagtgcaaaccagaaagtgagtaggaacttccctagtgtaatgacattttccccttgctggcaggctgggaaatgtgtttggtggatatattggtctcttatcatatttatctatctttgcatcgtgtaat

SEQ ID NO: 33247 - DNA, 1998 bp, Zea mays
  Clone ID: UC-ZMFLMO17082C08_FLI
cttgtgtggtgatgcttgtgactcgtgttttaaattgctgtaaaagttctcgcacttgacgtgaagatcagccttctgttaatagaaattgtttcattcaggaagcatcttgtggaaactttttttttgtaaaacgacccttatttatttctaacattgatcaataagattttaagatcagctttccgctaatagaaattgtttaattaaggaagcatcttgtgggtatcatatttttggtaaaagaaattcttctctttgtttctaacattgacccattggtcttatatgcaaagaaatcttgacaaaagctattgagcaacatggttttcttttccaaattggaggttttgagactgtaaccagatttaagatgtgtctacaacatggttgttgccttctttttgtcctttattttgaatttgacagtggtgctgatatatcatgcttgcacaagtacctgctgtactcctttgtattcacattatgaaatgatgggcaagaagttacacttcccaacatgtacttctattcataaattgtattgttttttctagtgatgtttggaaatggatgtctgcatatcataattgcacagttgtacttgagtacaatgttttctcttttttttggaagattcaagtcggtggactgataagtacaatagaaacaacaatatcttctgtttagtgtgacaaaacaaatgtatcaacatatagaattgcttgaagtgataactgtacgtgagttccaatgtagagtattatgctatctctgttccatgctttatcacagtagtcagttagagctgtgttatatttttcagacttatgttcattatatgtttgcttgtttaggtatctgactatgcaagagaccttgaagagatgcagatgatatccaaggaggattatctcgtgtctcttaggagaaagagcagtgccttctacagggggttaccaaaatatcgtgggcttcttaggcaacttcataattccagatgggatacatctttgggactcggcaatgactacatgagccttagttgtggcaaggatatcatgttggatgggaaatttgcaggaagctttggtctagagaggaaaattgatcttacaaattacatccggtggtggctaccaaagaagacaaggcagtcagatacatctaaaacagaagaaattgctgatgaaattcgagctattgaaagttcaatgcaacagactgaaccctataagttgccttctcttggcttcagttctccatcaaagccctcttcaatgggcttatcagcatgcagcatattatctcagtctgatgcctttaaaagcttcttggagaagtctacaaaattatctgaagaatgtagtcttagcaaagaaattgttgaaggaaagactgttgcctcggtacctgctactggatatgatacaggggcaattaatattaacatgaatgagttgctagtacaaagatctacttactcaatggcccctgttatgcctacaccaatgaagagtacctggagccctgctgatccttccgtggatccacttttttggagcaactttgttttgccatcgagtcaacctgttacaatggcgacaataacaacaacaacgtttgcaaagaatgaggtaagttcaagtgatccattccagagccaagagtgactgcacgagcttactgaagcaggatattttagattggtcaaagacagcatcccgtgcgtcaactagattctttttgtcaagcttttgatgtcgcaacttgtgagcaatactccttgtttatccatacttcataggacatgaatagaaggtatgacaagtgcaagcatagttatgtaatatacagtggctagttgccagaaaatgagatttagttgtgtagagctgtttgtacatattgagatggttgtttcagttcaatctcaacaggtttgaggaaaatatccaacgaaatgatacagttttaatgctaaattagttattttgt

SEQ ID NO: 33248 - DNA, 2574 bp, Zea mays
  Clone ID: UC-ZMFLMO17082C11_FLI
ccgaactcgcttcagacaggaagaaggcccatcggattttacgtgtggcctgcctcggcgcctcgctgctcgccgcagtctcccatccattccagcccccctccccttcgcctcgcccctcgcctcccacggcctcactgctcgccgcggccccagacgtcagctcgcctccatcccggcctccctccccttcgcacctcgcctcctcctcgacgcttgtacctccgccaaggatctctcgggctgtgccagtttcacatgtctatctcatgcttcctctcctctagctacaaccccgccttgtggcctcgctgctcgcccaaaacgttatgaccagggacagagagagggaggtcgggcctagcagagcacggcagtaatggtgtgtgaggaacaagagcaattcgtcgcccacgtccaccatgagccaccgctggtgccggccggggctatggactccccccacggtacgcacgctgctatgcatcttttcacctcccttgtgttttaataatctgtcaattggctttagaacctcagtggcgggtgagagtatagtggccccaaggaatttctggaacaatggtgtacaaatttgagaattgcagggaccgaccagagttgactcagaaggaaaattgagggaagtttagtgcatgacatgcaattctcaagattcaaaaacacaaggctgtggtatttaaagagcaacactacaatgaccttatggtcatttgctgcttcagtgaaatcggattgttttccaaatcctcaacatatggatttccatttcagactgtattctcattcaccatgtttttgtctgatgcccaaattggatttccccaattttagtgttgacaatcctcgcttgtgggaagtccattttgagatatagtttgaagtgcatgccatcaatgattctttgacgccatgatttgcagcacttaactttgaagggctgttgctaactggttgcaatcagttgagctcaggggcaggttatgaccagtaatattatttcttgtgcaagacttttgactttcggtaatgtgagagatcatttgacggcatgagtgctgaatcattacaaccacacaattggccagtattctcatccagggcatgagaaaaaggtaaatacactagaggaatctgtttagaatctattttttgtgttgattgttgctacatatgcagtgtattagtttcctgcatcattctgccatctttgggtattgacgtctcaattctagaagaagcagattattagtccttgtatatgagatttgcatgatgtggttggcatggtgtcccttctgttatttgactgctggttcataatgtagaagcatggttttcatgtattacctaacactgagatgtacataaattatcatgatattatatgttcccattgcaaggcacgggcactcacctatttagttatataatgctaatagtttgtggcaatgtttcttggaaggatttctgtttttccttatgtgtctaatggttttatgacaaccaatggctggagatgcgatcaatatagttttggatccaatatttatgtttgtgttccaatatggtgttagtggtgccgccatcgctcatgttatatcacatgtatggtggaacattctgtagatatttcattacatccatactcttatggagattaaggctgcatgttgatttgttgccacctagcttcaaacatctgcagtttggctgatttcttaaaaatggttttctgttacttgcacgagttattgccacaacatgttgtgtcacactatccgcttcaatggtcgcacggctaggttcaactccaatggctgcattccagatctgcttgcaaacctggttggcttgctcacttcttgccgatggattggcttttgctggacaggccatacttgcaagtgcatttgctcgtaaggaccatccaaaggccactgccacagcttctcgtatcttgcagctggctttggtcttgggacttctcctaagcatacttcttggtgttggtctgcacatagggtctagattatttacatccgatcagggtgtactgcatcatatctacataggaatactgtttgtttgccttactcaaccaatcaacgctctggcttttgtttttgatggaatcaattacggagcatcagatttcggatatgctgcctactcaatgttttattggaatctggatagctctggtgatctacatgagcctccggatgtttgctggattttggaggatagggacgacacaagggccctaggcttatcttcgcggctgaacatagcggcagatgcaaaattaagtcatggttggctactatgcattgcagggctgcaatacatgtttccatcagggagcctgtcagaagtttaacacacttgttgtaccaaggcgtgtgaactatagctatttttttctgtcctaggacaaactgtgccacgacatgttgtagctatttttctgtcacgtattcatccgagcagatacatggtcctacaagtaacacatatatgtaactaaaaatagtgaggactgttccatgt

SEQ ID NO: 33249 - DNA, 1114 bp, Zea mays
  Clone ID: UC-ZMFLMO17082D09_FLI
gcggctcgtgttcgtgcggacgaggacacgggcgcgcccatcgacgacgcggcgcgggtccggcgcgtcgagtccaggctcaggcacgtcctccgcggcggcgcgctcggcgccaggatggtccgggcggacgccgcggccgtcaacatggaccggaggctccaccagctcctcaacgaggacggggaggccgagagccgcgccgaccaggccacggcggtcgccgtgcaggattggggggagagggggtactcggtgctcaccgtgagctgccgtgaccgccccaagctgctcttcgacgtcgtctgcaccttgacggacttggattacgtcgtgtaccacggcacgttcgatacggacggcgatcacgcccagcaggagttctacatcaggcggttggacgggcggccaattagctcggcggccgagaggcggcgcgtgatccaatgcttgcaagcggccatcgagaggcgcgcatccgagggcgtgaggctggagctgcgcatcaccgaccgccgcgggctgctcgcctacgtcacgcgcgtgttcagagagaacagcctctcggtgacgcacgccgagatcaccaccaggggcgacatggccatgaacgtgttccacgtcaccgacgtggccggccggccagcggatcccaagaccatcgacgaggtgatccagaggatcggcacggagagcctccgggtggacgaggaacggtggccgcgcctgtgcttgacagagggtgacgcgggccgcggcggtgcggggatcttctcgctcggaagccttgtcaagaagaacctggccagccttggcctcataagatcctgctcgtgaggacgcacgcaaccaagtgggcacgtgctcgatggggtccttgtgtaaatatgggatggtgcatgggttagtttgtaaatggagtagggatttaatttgacgtttctaggtttagttgccacgtgtacatagtagcaagtggagatggaaggttttaagagttgctggtcggcaacagcctggagcttaaagggcctctttggtgggtcatgacataccatgtatccatatctagctttttattttacataaaaatagatggatggaagaattaagt

SEQ ID NO: 33250 - DNA, 1426 bp, Zea mays
  Clone ID: UC-ZMFLMO17082E11_FLI
cacgacctggtgatcgccgcggcgctcctctacttcgcgctggccatcataccggcgcgggcaagcccgctccgctacgcggcctggccgctgtactggatcgcgcaggggtgcgtgtgcaccggcgtgtgggtcatcgcgcacgagtgcggccaccacgccttctcggactactcgctcctggacgacgtggtcggcctggtgctgcactcgtcgctcatggtgccctacttctcgtggaagtacagccaccggcgccaccactccaacacggggtccctggagcgcgacgaggtgttcgtgcccaagaagaaggaggcgctgccgtggtacaccccgtacgtgtacaacaacccggtcggccggctggtgcacatcgtggtgcagctcaccctcgggtggccgctgtacctggcgaccaacgcgtcggggcggccgtacccgcgcttcgcctgccacttcgacccctacggccccatctacaacgaccgggagcgcgcccagatcttcgtctcggacgccggcgtcgtggccgtggcgttcgggctgtacaagctggcggcggcgttcggggtctggtgggtggtgcgcgtgtacgccgtgccgctgctgatcgtgaacgcgtggctggtgctcatcacctacctgcagcacacccacccgtcgctcccccactacgactcgagcgagtgggactggctgcgcggcgcgctggccaccatggaccgcgactacggcatcctcaaccgcgtgttccacaacatcacggacacgcacgtcgcgcaccacctcttctccaccatgccgcactaccacgccatggaggccaccaaggcgatcaggcccatcctcggcgactactaccacttcgacccgacccctgttgccaaggcgacctggcgcgaggccagggagtgcatctacgtcgagcccgaggaccgcaagggcgtcttctggtacaacaagaagttctagccgccgccgctcgcagagctgagaggacgctaccataggaatgggagcaggaaccaggaggaggagacggtactcgccccaaagtctccgtctacctatctaatcgttagtcgtcagtcttttagacgggaagagagatcatttgggcacagagacgaaggcttactgcagtgccatcgctagagctgccatcaagtacaagtaggcaaattcgtcaacttagtgtgtcccatgttgtttttcttagtcgtcgctgctgtaggctttccggcggcggtcgtttgtgtggttggcatccgtggccatgcctgtgcgtgcgtggccgcgcttgtcgtgtgcgtctgtcgtcgcgttggcgtcgtctcttcgtgctccccgtgtgttgttgacttgttgtaaaacaagaagatgttttctggtgtctttggcggaataacagatcgtccgaacg

SEQ ID NO: 33251 - DNA, 1410 bp, Zea mays
  Clone ID: UC-ZMFLMO17082F10_FLI
gcctgataaaaaaaggttcactaacaaaggataggatgcacaaggccatgtcgcttttcaagggcgctttggattattcagatttcaaggatgttgatatggttattgaggctgttattgagaagattcctttgaagcaatcgatattttctgacattgaaaaaatctgtccgaaacattgcatacttgcgacaaacacatccaccattgatttgaatgttgttggcgagaagacaaattctcaagatagaattataggggctcactttttcagccctgctcatattatgcccttgcttgaaattgtccggacggagaagacatcaccacaagctatccttgatctcatcactgttgggaagataataaagaaggtccctgttgtggtcggcaactgcacaggatttgcagtcaaccgtacattttttccttacacacaggcttctcatcttctagttagtcttggtattgatgttttcagaattgatcgagtaataagcagctttggcatgccaatgggaccttttcaactccaagatgtggctgggtatggagtggctttggcagtaaaagatatctacgctgatgcctttggagaaagaaatttgggctctaaccttgtgggcctgatggtaaaggatggacgacaaggaaaggtgaatgccaaaggttactacatttatgagaagggtgcgaagccaaagccagaccctagtgttaagcatgtgatcgaggagtaccgaaagcaggcaaacacaatgcctggtggaaagcctgttactttaatggatcaagatattttggagatgattttcttcccagttgtgaatgaggcatgcagggttatggatgaaaatgttgtaattcgagcttccgatcttgatattgcttctgttcttggaatgggctttcccaaatacaggggtggtcttgtcttctgggctgacactgttggagcgccttacatacattcgaagctaagcaagtgggccgaaatgtatggtcccttcttcaaaccttcatcgtatttggaacaacgagctaaaagtggtgtaccattgagcgcaccaggaacatcacagcaaggttcggcgaggtcgcgcatgtgaggtgctgtccagcattgggaagaagaattcagaatacttgcggccgggatgagccatagacggctgcttcgcagatcaaaaacacctccttgaatacaaataggaggcacagaaatgatgaaaaataaatggttttgcatagctgtaacagttttggtgccttgaactgtaactatggcagagtttctgtgaacagagtggcatgcattaattatacttgaccactctatatgtcgctgtttgtataattttcaatacgtacaagaactaaaatatattattggatagtattttttataat

SEQ ID NO: 33252 - DNA, 1055 bp, Zea mays
  Clone ID: UC-ZMFLMO17082H08_FLI
ccaccgccggccgggaagcaagctcaaaccctaatcgccgtccgccggcgacgccagcacgatggcccgctacgaccgcgccatcaccgttttctcccccgacggccacctcttccaggtggagtacgctctcgaggccgtccgcaagggcaacgccgccgtgggcgtccgcggcacggacaccgtcgtcctcggcgtcgagaagaagtccacacccaagctccaggactccaggtccgtgcgcaagatcgcgtgcctagacactcacatagctctggcgtgcgcggggctgaaggcggacgcgcgcgtgctcatcaaccgcgcgcgggtcgagtgccagagccaccgactcaccgtcgaggaccccgtcaccgtcgagtacatcacccgctacatcgctgggctgcagcagaagtatacgcagagtggtggagtccgccccttcggcctttccaccctcattgtcggcttcgacccctacaccgacaagccagcgctgtaccagaccgatccatccggtaccttctctgcttggaaggccaatgccacgggaaggaactccaactctatgcgtgagttcctggagaagaactacaaggagacctccggcaaggagaccatcaaacttgctatccgtgcacttctagaggttgttgaaagcggtgggaagaacatcgaggttgcagtgatgacaaagaaggacggtctccgggaactcgaggagtctgagattgatgagtatgttgccgagatcgaggcagagaaggctgcagctgaggctgcaaagaagggtgcctcgaagaacgcctaatttcccgtcttgtgctatggctcccttcaaccctgtgtgtgtgtcccgtttttatgttccatagcaccatcttaactgttctagaaggatgctagatctttaggtgaaactacgcttatatgcctgtgggttaaatgatgtacaatgtgctcgtctacatgccttcttcggaggttttcaatttcgtgtattctgtcatctggacagcgacagttcaaatattcattttacctgattccttgtc

SEQ ID NO: 33253 - DNA, 2367 bp, Zea mays
  Clone ID: UC-ZMFLMO17083C08_FLI
caaaaatggaaagtacagaacactacaagccatggaattagaaagtggtgttgggcggcagtggcgtctttggaaatgggcatcatattgtgcttcagagaaaatcgctgagcaagatggaggccgttatgagatggctgtatatgcttacaatgcagtaacttaaagcgtgtcttgccaatctgtactgactgggagtcagcttgttgggcaatggcaagatcctggctagatgttcaagtggatctagaattatctcagtaccaaacaagtagaccagaaaagcaacttgatgacgacatgaatggagcccaaagttcagttggtccagaaagttggccataccatgttcttgatcagcaacctcatgatttaactgctcttctgcagaaactccactcaagtgaccttgttcatgaaactgtctctcgagcatgccgagagcagcatcgacaagttcagatgaatctgatgagtggaaatatatctcatcttcttgaccttctatggtcatggttatcacctgctgaagagaaccataataatactgcaaggccccttgatgaccctgagatgatacggttcggggcacatattgttcttgtgctgaggcaccttttcagtgatgggatggatgatgagttagatgaaaaactggttactgtcggtgatctcatcatcaacatgtacgtgaggtatttgttctcagaggatcaagaggagttggttggaatatatgcctcacagcttcaacatgacctttgcattactttgtttgtagaaatgatggaactaaggttaaatagcagtttgcatactatgtacaagctcttcctttctgctgtggagtatctgccattctcatctgataatgtatccaaggcttgttttgaagagatcatcgagagggtgctttcaagatctcggcaaacaaaacccactaagtatgatggggatttctctgatgttgcgcatcaacatcacctgcaatcacttcaaaaggctatggttattcagtggctttgcttcacaccaccatcctcgattccagactttcaaatgatcagtgggaagcttctgatacgggcattgacacatagcaatacactgttcagggagttttctctgatatcaatgaggagagtccctgagctaccagcagggccacacaagttgcttgccattttagctgaaccgttaaagcaaaaagaaaatttaatttcacgggaagatccggaggtatctgataacttgccggagtttgaagattggcatgaatattactcccttgacgcgacttaccgcagttggcttaaaattgagatgatgaatgccgctgtttctcctgagatgctttcggcagaggaaaagggtcaagctgttgctgcagctaaagaaacactgaacttggcatgttcgttactacgcagggatggaagaccatggctgtatgctgtcgagagcagtccatttgaatcccccgatgttattttccttgagctgcatgcttctgcaatgctctgcctaccttctggagaatgtctgttaccagatgcaacatcatgcacagctttgacaagtgcactatattcaactgtcagtgaagatgatgtgctgcatcgcctgttgaaggtggatgtccaggtctcttctagagacccctgctgtattgaagttgctcttcgctgcttagcagcagaaggtgatggatatgggcttcatgaagccaacgatggaggtcttcttgctgcagtcatggctgctggctttaaaggtgaactcagtcggttccaacctggagtttcgatggcaatttcacggcttgatgcttggtattctgaccggagtggttccgtggagagcaccgctgcttacataattcgagggctgtgtcggaggtgctgccttcctgaaacaattctaagatctatgcaggcatgtatcgcactctccgcggctggtgatgatctagattactctctagataaatgtgacgaacttgttgagttagttggttcagccgagtctggaatgatgcatttgttcagccagcagcagttgcaggagttcctgattttcgagagggaatatctcatatgtacaatggagcttgaggaggaccggttgccttgtgatggctaagctttttccccacttgctgactaatccatgagacatgaccggcatgtgcattttgcggcgccgtgacccaagaacctgctgtgatgtatcgctacaccatttcaaagcggaaagatggaatttagtgcgtaacgtggttctgcccgtttgtgcacgagaattggcccgttttggaaagtcaatataagattattcaagtcgaaatccaagatttttgttcatgat

SEQ ID NO: 33254 - DNA, 1220 bp, Zea mays
  Clone ID: UC-ZMFLMO17083D10_FLI
ggcggcgagaatggcagcagcgtcttccgaaggagtgcgcagggaggagatgatggcggacggctgactgtagacagtggtcggcagggggcagccacgaacggggcccccgccagtcgtggtgacatgtggaaaaccgggcgctcgcagctcctctcttttttcttgtttctttctttcgatctgcgagccgtccaggtccagtactctcctttccgtgaaggaactcttgcagccggcccctctggtttcctcgaattcttgttccccggtccctcctcctgtccccgcgtagatccgtccgtccgaggagcacaccgtccccacccccatgtttacccaccagttcctctgacggccgccgtgctccgatgaagctgagcgtgctccgtatccgccgctcccactccttctccgtcgccttcctctactggttctacgtcttctcatgaacgcatcgcccctctccacctgctgatccttcgccgtctctctctctctctctctctctctctcttagatagtcttttgaatccatctctagggctcttgtttctccccatcctccccccaccccaccccccaccaaacagattcaatccgacaagacaagcatccatgtcgtcgtcacgccggagctcgagccccgacagcaacgacacgacggacgagcgcaagcggaagcggatgctgtccaacagggagtcggcgcggcggtcgcgcgcgcggaagcagcagcggctggaggagctggtggcggaggtggcccgcctgcaggcggagaacgcggcgacgcaggcccgcaccgcggcgctggagcgcgacctgggcagggtggacggcgacaacgcggtgctgcgcgcccgccacgccgagctggccggccgcctgcagtcgctgggcggcgtcctcgaggtgctccagatggccggcgccgccgtcgacatcccggagatggtcaccgacgaccccatgctccgcccctggcagccgtccttccccccgatgcagcccatcgggttctgagaatctgagcctcagccggcgggagagagccaatttctgtcgtcgtgccgctgtctatctcgtattggtatctattcataaatcatcgttgtcatggtttgctcttcttgtcagtgttataaatttgcttcttgttagtgttataaacttggccatcggaaagtagtaataatgatcagttcgtcgtggttctc

SEQ ID NO: 33255 - DNA, 2212 bp, Zea mays
  Clone ID: UC-ZMFLMO17083F06_FLI
tccgattgctcctccgagtccgagactccgttctctcccgcatccaccgccgtctcatccccaatccgagcaacgcctcccctcgcctccaaaaccctacccctcctgtcaccggcgggggcatgaaccggtgatcgcttacctggtctcgtctgtctgcgcacgcgcgaggtcagtgagtgagcattgcggtggtccgatcgcccgcggggggccatggcgtctgtggcgggatcgggcggcggggcaagcgcgggggccggtgggttgaagacttacttcaagacccccgaggggcggcacaagctgcagtacgagaagacgcactcccccgccgtcgtgcactacaaccacaacggcaagaccgtcgcccagatgacggtggcatatttgaaggagaagccagcaggccagggttccacgccttcaacaccaagtgctggtagtgggatgcggtctgcagctgcgagactgcttggcactgggaatggtagccggacacttagcttcgggagcaatggtaccagcagggctgtctcaggaagcagccgcatgggtggaggtattggtgtgtcaactagtgcaagtggatcgcaaggcatggcgaactacgatggaaagggctcatacatcatattcaatactgcggatacgctcttcatcagtgatctcaactcacatgacaaagatccaataaagtccatccacttcagcagctcaaacccgctttgccatgcatttgacccagaggccaaggatggacatgatctgctcattggggtgttctcaggagatgtctattcaatgtcactgaggcatcagttgcaagatcctggaaagaagcctgtttcataccagcattttgttaataaagacaaagacaaagataaagatccaagtcaaggtggcgctgccagcagtcagtgcacctgtgttgcatgggttccggagcgtgaaggaatttttgttgttagtcatgctgatgggaatctgtatgtgtatgacaaattcaaggatggaaatactgattggacatttccaactgttaaggatcaaagccaggtgctaatttcacatgcaaagtcgagtaagggcaatccaattgcaaggtggcacatctgtcaaggtgcaatcaatggcatttccttttcaccggatggtgcttacttggcaactgttgggcgagatggttatttaagagtatttgacttcacgaaagaacaactaatatttggtgggaaaagttactatggtgcactgttgtgttgctcttggagtgcggatggcaaatatttgttatcgggtggtgaagatgatcttgtgcaagtatggagcatggatgacagaaagatagttgcatggggtgaagggcataattcatgggtgatattatccttacaattgtttttggctatcatcacataggcatttttaattgaaacttgcattttgagtcaaattaatttgcgattatacaggttagcacagtttcttttgatccgtattggtcccaattaatttgcaattatacaggttagtgcagtttcttttgatccgtgttggtcccaaccaaattcagatgaaactgaagaaaatgtcatgtatcgctttgggtcagttggacaggatacccaactgcttctctgggatctggcattggacgagattgctgtccctctacgccatccttccggtgggtcaccgacattcagtagtggaagcccttctgcacactgggataatgcatgccctccaaccggtgttctccaaccctctccacggatgcgagatgtgccgaagctctcacctctcgttgcacaccgggtacatgtagatcccctatctggcttggaattcaccagtgaatcaattgtcactatatgccgtgaggggctaatcaaaatttgggcacgacccatccatagtgaaaacaaccagcagccagattcttctgaacaggttataggcagtgccactgctaaggataagatgttaacatcgtcaaataaagcagagtagcttgggaaggcttgcagtaaaggattgaagaggctttgctagcatttttgttagccatttcttatcctgcttcatcggcaacgtttctagttacagaagtgtcattgttgccatcaatgttggcgaaagaaaataacagaacttgctcctgtacatatacagacattgccataagatgaaatattacaagctt

SEQ ID NO: 33256 - DNA, 388 bp, Zea mays
  Clone ID: UC-ZMFLMO17083F12_FLI
caaatttgaagagtatgtatatgcgtatgctatatatatcactgaaatccattttcatccataacagttaagaactagacatgaattgcagcagtatgtatagcaccaaaatacatgtgacactggcagggaaacagatagtgcacagcatgattgctacatggattcggttcagaggaatatatgcagtgacacagggggtttggtttcgtcccttaaacaagatacaactgaatggtcggcgttttcatcaggtctaaaagcatctctcaggaaaccactgaccctggtacagtatatatagattgtttaaccacatgtatatcctgctataagattgatgtgcagcagaacaggacgtattgggagattgcagaatttggatctt

SEQ ID NO: 33257 - DNA, 3372 bp, Zea mays
  Clone ID: UC-ZMFLMO17084A01_FLI
gattgatacgataaatctgaagaagtttgaacgttcgttggtgaagccagggtctatgtggagagagattctaatatcaagtggacaccctacctgggttttaaacttctataccaccttgcgccaaaagtactcatatgatacactgtggggtgattctccaattgctgtctcttgcagacagcttatagtgcagttatgctccttggcaggctctgtgtttcctaatgataatggggatgcacagattaaacaccttatgctgatattatctgctgttgttcaatggattgaacctcctgatgtaatcacagcatcaatccgaaatgggggaagtgaaagtgagttcatagatggttgccatgccttgctttcaatcgcatctttaactactggctcactttttgacaacctcctaaaatctataaggccctatggtacagttaatctgctttctgctttgacgtcagaagctgtcaagtcggttctgaataaccagagtgaagaggaaacctggggcatagattcccttgatattttgttagaaacatggaatgttcttttgggggacgtagatgccgataaaaatccaatctcaaccgatggagcacttgcatcttcaagtttgtttaagatgattgtggagtcacacttgaaggctgctgctgattctgcgttcgaggatactgatgatactgaatattttcatgtttctgtttcaagtatgcttaaattcccgacagttcatctgttctagtatctctacctcttttggattcatcaaataataatgaagtacttcttccagaacgtgatgaacagttagccttgtatgctctaatagcacgggcttctgcaaatactactattccatttcttgcacagttgttttcagaacgatttgcccggctaaatcagagaaatggtgaaagtgatcctactcaaacactggaagagctctattggctgttgttggttactagtcatgtcctaactgactctggcgaaggagaaacactacttatccctgaagcattacaggctggattccctaatgtgattgaagcagcacatcatcctgttgttacactctcctggtctataataaatttttccaggcagtgtttagatccaggaattagggcaaaatacttcagtccacgactaatggaggctgtgatctggttcttggccagatgggttgcaacctatttagtgccacttgacgtgagtagaggaaaagtaagcagagaaattgataatgtgggtacaaatggatcccaacattccagaaaactgctaaacagttttgcttgggaaaataaccaaggagagcttgttcttgattttgttgttctcatttcaatgttagctcttactacctatcagggagaaaatgagttgcagacactgacatgccagaagctacttgctacagtcgttcgccggaaacacacatgcacttatcttgttcaactggattcatggcgtgatcttacaagagcttttgcaagtggacggtctttgctttcattgagtggacgtttacaaaggtctctagcagaaacacttgcctctggagcttcctgcatcaaagatcctgaagcatctgcacagtacctgagggatctcatgggaccagtggcagggtgcctggtagaaaatgctagcaggagtgatctaaaatctgtggcacagcaagcagatgttatttacatggtctgttgcctattggaacgactaagaggcgctgctagagctactcaaccccgaactcaaaaagttctatttgagatggctcatactgtgatgaacccacttttgactcttctggaggtctacaaaaatcattccacagtcgtatacatgatactcaagtttgtggtggactttgttgatggtcaagctgtattcctggatgctaaagagacatcagctttggtgagcttttgcttgcaactactccagatatactcctctcataacattgggaaggtaatgctctctctttcttcaagtctgcgtaatgagtcacaagcagaaaaatataaggatctgcgagctttgcttcgtcttctgacaaatatatgttcgaaggatttggttggctttctgtctgattgtggcggtgaaggttcacctgatatcgcagaggttatctacattggtcttgatattgtgacccccttgatatctttggatcttctgaaataccctaaacttagtcgtgattattttgtgcttatatcgcacttgttggaactgtacccggaaaaggttgctcacttaaatagtgatgcttttacaaggattattggaagtcttgacttcgggctccgtaatcaggatagcgatgttgttgagaggtgcctggcagcagtaaatgctcttgcttcatacaatttcaaagaaagattaggagggagaggaagactgaactcgcagctcatggaatctgaaggatctaatggcaaactgcaggaaagcatatcaagtcacttcttgagacttctgttgcaaatacttctttttgaagatttcagatcggagttagcaggttatgctgccgatgctttgcttcctttattgttctgtgaacaggagctatatcagaggttggtccatgagttgctggataaacagcagaatccgaccgtaaaatcaaggctggcaactgcgttccataaccttacaagttcaaacaatctctcaagctcactcgaccggccaaacaggcagagattcaggaaaaacctccttagcttcatggcggatgtatcgggcttcatgcagataaagtagatgcgatggcagggaacaggtgatgtttgaccggtcaattaaaccccgaggaagcactgcaccactgtggtaggggtgcatgtgggcaccacatgtctgtggattgatgagagcgaagactgccacgacaagtctagtagatcttgaagagctagtgtcaccagaaaagacagggagatgagctagtcttagggttggcattcatagcgcatttgctggacaagatggaggcgtccctggccacgagatcgtcgtgtaaatgcgtttgttagacgcacagaaacggtggggattttgtggtggcgactcgttttgttcaattcccacaggcagaaggtagagatgttaagttgatgtaaataccgtttgatttaaacatgccttattcgtaggagaaagcgacacggcttgctgtaacttagggtttattactctttctcgtggcataggatccccaaagaagtctttgctggggtatttgcagccaaacgatgaccagtatgattgcgagaggttttcaatcttttgtaccaaatttggcctgcagttatgatgacactgagtgccgat

SEQ ID NO: 33258 - DNA, 2222 bp, Zea mays
  Clone ID: UC-ZMFLMO17084A02_FLI
ctccgccatggccacctccctcctacgcctctctcgcccccgccgcgcgctgctcgccatctcctccgtccgccttgcgctctccacccagccccacgtcccatctccgtccccatcccctaccccctcctccgcccgccgcctcccgcatttcctctccttcctcgccgccgccgccgccgctgggggagcaaccgtcgcgctctgcgactccggcctagatcaccgggtcgggggcaaggacagcgccgatctggtggttcgtggggagcggaagttcgtgccgcaggagttcatcgacgagctcgcgtccttcctcggggacaacatcactctggactacgaggagaggagcttccatggcacgccacagaacagcttccacaaggcggtcaacctgcctgatgtcgtcgtgttcccgaggtgatgatgcttactaagaactccagtggtcatcactctgttgaaatcaagggcttgtaggagacgttatatgtttcaagcgttttgcctagaatggtctctgacttgtctgacccatcttacaatgtcatgtatcggcacttgatgttgggatccgctgaatgtaaagcctaaatcctccaacaggtcacacgaatacaggatcacacaagaacgcacacggacacaagtggtttggtgattggaatgacaaaggcaggctgtgatagcctcctaataaatgcagaaattcactcacccaattagcctattaatccatgctgaagtttagctaaagtaaatgctatgaacctagacacacatgattatttacgacactgaacctgctccatatctcaagcatgtattgattgaatgatctatttcttgtaatgaagtgatgcattcatcgtctattttccagctcgcaagatgaggtacaaaagattgtgatggcctgtaacaagcacaaggttccaattgtaccatatggtggggctacctcaatagagggtcacacactggcacctcatggtggtgtttgcatcgacatgaccttgatgaagggcctggggccaccattggaggaatgtgtgctactcgttgttctggttcattagctgtgagtttgtaggtatggaacaatgcgggataatgtgattaatcttcgggctgttttaccaaatggtgatgttgtcaagacaggctcccgggctcgaaagagtgcagctgggtatgaccttgctcgtttgatcattgggagtgaaggaactttgggtgtaattacagaagtgactttacgactccaaaagcttccatctcattctgtagttgcaatgtgcaatttcaaaacaattaaggatgctgctgatgttgctattgcaacaatgctttctgggatacaggtttcaagagtggaattgttggacgaggttcagataaaggcaataaatatggcaaatggcaaaaatttgcctgaagtgccgaccttgatgtttgaattcatagggacagaagcatatgctctggaacaaactctcttggttcaaaaaattgccactgaacaccatggatcagattttgtttttgtcgaggagccagatgctaaagcggaactatggaagatcaggaaggaggcactttgggctggttttgctatgaaacctgatcatgaagctatgataacggatgtttgtgtccctctatccagacttgctgaatgcatatctacatcaaagcgattgcttgatgcgtcgccattgacttgtctggttattgctcatgctggtgatggaaattttcacacaattatcctgtttgatccaagccaagaggaccaacgaaaggaagcggagagactaaaccatttcatggttcatacagctctgtctatggaaggtacatgcacaggagagcatggtgttggcacagggaaaatgaagtacctggagaaggagttgggcatcgagtcacttaggacgatgaaaagaataaaggcggcgctggatcccaacaacatcatgaatccgggaaagctgatcccgcctcacgtctgcatatgaccgtcacctgactggaggatcgatccccccatggccatcagtgggcttgttggctcactcatcaaaagctttggttccgcgaggcgtgacgcggtgctctgctgacagttgcaataatgcgctgaactgctctgtgcctgtatggcatgcgttggaggcaaatgcacgtaggcatcacatcaaaactataccggtacc

SEQ ID NO: 33259 - DNA, 1962 bp, Zea mays
  Clone ID: UC-ZMFLMO17084A03_FLI
attttttatggtcaccagtgtaactaggtaatggccttatgttaactttagctcccatgtgcaccaaaccagaaatccccatagttctcacatgtgtaaccttgacacacattatcagtacttttttttgaaagtttagaacattgtaataaacaacagtatgcaagatcaaaggaaaaaaaaggaagaatactgttttgtgctaccttatgttccaaattatagttcacgttagctttgtcctaagtcaaacttctctaattgttgaccaatttagtagaaaaatacaccaacatcaaactagtttcttttatattttccatgaaatgtgttttgacatagcatttaattgaatctgtagatgttatataattttttctaaaaaacccgttcaaagttagagaagtatgccttaggacaaaactaaagttaactatacttttgggggtggggggtagcaattgatatgaatctgatagcaacatagaatatgtagttcacatggactctcaacaactttgagtactttcctttaaacagataaatgtttatcccctggtgtttgttcttataagttcccatccttaagagatactgctttgaatgccatatttctgctaatgcaattgcagcattctacaaacatatctagggtgaacaaaggaatgagccttgaagatttcaaatttatatactggatggagtatgcacacagaatgtggggaagagctttgggctttgtatttgcgggtccttttgcatacttcattgcaagaggttatgttactcgccaactggggatcaggctgtcggctctttttgcacttggtggtgcgcaaggactcattggctggtggatggtgaagagcggtcttgaggaaccaacatctgagtatgttcaaccaagggttagcccttacaggctggcaactcacctgacatctgcatttattatatactgtggcatattgtggactgctttgtcagtagtgatgcctgatcctccaaccggatcaatgagttgggtaaacggtgcagcaaaaatcaggaagttggcaattcctgtcagtgctgttgtaggcattactgcaatatctggagcatttgttgcgggcaatgatgcgggacatgcatacaattcattcccgaagatgggtgacagttggattcctgaagatgtatttagtatggagcctttcgttcgcaacttttttgagaacacatctacagtacagctcaatcatcgaattctcgccgcaacaacattactctctgtgggtggattatggttggctgcaaggaaaatagacatgcacccagcagtcaagtcactgatcgggagcacgcttgggatggctgctctccaggttacattgggcatatctacgctattgacgtacgttccaacctcgttgggctcagcgcaccaagctggagcgttgactctactgtcacttacgatccttctggttcacactctgagaaggccgtcgccagctcgtcttaagtcgatcgcaactgctgtgaaatcaacctgataccatttcttggattctaccatcctatagttacgagttgtttttttccttttcccaccctaaggctttgtttggttactccagtataatctacatgtattgaggtggattgaggtgtaaattagtttaacttacacactagtccaccttaatgcatgtgaaggtgaatactagagtaacatgtaatggtgccgtgtttctttgcaccaccttaacactgctgtagcgtttcggaattgctggaaaggcatgcaagctcttgccctcaatgtgtttctagtgccaagtgttagaaatgcccccctagccctttcttttagtaattgctacattgcattgttgacactgagttagtgagttgcatgttgagcctccctggacaagatgctaataaaattcactgcctggagccaggtttgatttc

SEQ ID NO: 33260 - DNA, 1854 bp, Zea mays; identical to SEQ ID NO: 32738
  Clone ID: UC-ZMFLMO17084A11_FLI

SEQ ID NO: 33261 - DNA, 1133 bp, Zea mays
  Clone ID: UC-ZMFLMO17084B01_FLI
cgagttttcacaaccctgatggtagtgctgattggtcccaccccttagacagacaagtatgcatcaaccatcctgggtgtcctcatcacatccaggttgtctggaaggacaggtgtaatcatgttgccatttaaaagggtgctaaagctgtagttttgtgttactatggtgcaatagttgcagttccttgaaactggtcctaggagttgaagtttgagttaggcacacaaaattgtattctgtgaaataatatggtgttaggatcgtaattgcaattttttaatcgtagtttattgagttaggcacacaaaattgtattctgtaaaataatatgatgataggattgtaattgcaatttttaatgttttaagcttcaaatatgcaacagaggagaaatttcgataatctgaaaattttaatgcaacaaattgggttatctttgctcgaaatgggtcatggtctctatcctgttgttggttctaattcttgtgttgggtttgggtagtaacttagtgtgatgagaaattttacagatatttgttttttatttgttcctactaacaacatttggtttttagattgcagctatatctgaacagtcatcagaatcttcaagcgcatcaggagctgactccagtgagaacgccaatggaagtcctgagtggagatcatttgatatgcattctgtgattgcagctacagaagacctatttgatttcattttatcgaggaaaggatggcgggttcgggttttccttgtccaggacatcgttaatgcttcagacgtgttccttcaagaagcgacattcccatatgtatatgcgaaagtgggaaagataggggacctaaatccagagagaagtaagatgatcaggaggctggtgaatactgtgcaatcgttccgccaagctatcaatttggctccagatgcttggagcgccatgctaatccgcactttgttgaaacctgaatcacaaaaatttgttcttgatgtgtttttggccctggctaaccattccagttacaagattccagaaacattctggctatttatgtcaagatttctaaattacttggacaaacaagatatactttaggaacggttaatatatcaattcctctttttttttgtt

SEQ ID NO: 33262 - DNA, 1246 bp, Zea mays
  Clone ID: UC-ZMFLMO17084B02_FLI
agagaggccgtggaaaggaatctttcagctcacacctccctatccctcactcccttcttctcctctcctactgctactgctcgccaggtcccctcgctcgctcgctcgtcgtcttcaacctcacacaattatttgtgctcccgctccttccgtcccgtccttcctcccccctcccatcttcctcttccaaccgccgctcctgctgccttgcctctcagcccaggacacggcgagggacgccaaggtctctgccgggatggtgtaggctgtgcctctcgcgcattatgaggtgtggtggtgagggatgggcgatggcctttgcagatgaaggagcgacagcgctggcggcctgaggaagacgccgtcctgcgcgcctacgtccggcagtacggcccccgcgagtggcacctggtgtcgcagcgcatgaacgtggccctcgaccgcgacgccaagtcgtgcctggagcgctggaagaactacctccgccccgggatcaagaagggctcgctcaccgaggaggagcagcgcctggtgatccgcctgcaggccaagcacggcaacaagtggaagaagatcgccgccgaggtgcccgggcgcacggccaagcgcctcggcaagtggtgggaggtgttcaaggagaagcagcagcgggagctgagggacagccgccgcccgccgccggagcctagccccgacgagcggggcaggtacgagtggctgctcgagaacttcgcggagaagctcgtcggagagaggccacagcaggctgccgctgcgccgtcgccgctgctcatggccgcgcccgtgctgccgccctggctgtcgtccaacgccgggccggccgccgccgccgccgccgccgtcgcgcacccgccgcccagaccgccgtcgccgtccgtgacgctcagcctcgcgtccgccgcggtggcgccgggcccgcccgcgccctcgccatggatgccggatcgcgccgcggccgaccaggcgccgtacgggttcccgagcccgcctcagcacggcggcgccgcgcccccgggcatggcggtcgtggacgggcaggcgctggcggagctcgccgagtgctgccgcgagctggaggaggggcggcgcgcgtgggcgacgcaccggcgggaggcggcgtggcggctgaagcgcgtggagcagcagctggagatggagcgcgagatgcggcggcgcgaggtgtgggaggagttcgaggccaagatgcgcaccatgcggctggagc

SEQ ID NO: 33263 - DNA, 1278 bp, Zea mays
  Clone ID: UC-ZMFLMO17084C04_FLI
taatatccaagctctgtttgtcttagtgagtcgaccacatgaatgcctattatgttctgccacactcaccttcctgttccattagctgctagtgccaactgccagctaaatcctaagcgtgtgtttggaaaatattgaacaatagtgtaaatgcataaagcttgaacctttttttactgttgatggtactgttacatgattctgcattggctcaaccatataggcatgaacaagtatgagatgaagctgggtagaatcgtagtaaaaaattaactgattagtgttttatgcctgaggtgttccagtaataagattgatagtatagaagtagggaactgtcactgtcttgaatcaaagaaactgcgtgaaagataatggtttctctttgctgtaaaaggttattgtttgcaccacaaagttaaagttactatgcgactggctctataccaggaccataatattatcaatcaattcatagcatgttcacagaataagaagaggctgtgcagtgtgtgtaaatttgtgatgtagtgtgcctctgttagagaaaaattcctatttggcactagaaaacttctgctttcgtatttcacagaggtgccccccccaaatgtttgtgtatttactgttatattgcttacccaggtgtacaaagaatatttctgaaggcacgcattgcattttgcacactcgtagagttttttttttgtcttgcatataaatagcatcggctcaaattcatacttcctgagcaaattctgttaactctgttctgtttatggcagttgataaatcctctgcaaatgttctccagcttatctgtttggtaaactattggtggccggataacctcttcctcagatttcttgaactcagcttctatatgctgtgaaatacttatgatttatggaacctaacttgggtatgctaacatgggtgtctgctcctttgcagatgcgattcaggcttatgctgttgagccgcaatgacccattgtcctgtggactgctactcatgtttggtagattcgtaaatactactgttatatgcttgaaggcgtgtgttggcattgccatgtggggtttgtgtgactcgatggaaactttgctgtcttattgtactttaaaatccaataatttgcgcgattgcggacatctgtgattctgtgtttctgtctgggtcgcccacatctggtatgaacaatgttgaagctgatgcttggcatcagtttgccataccgttgattctgttgccttagatgatcgagctgtcatcaac

SEQ ID NO: 33264 - DNA, 794 bp, Zea mays
  Clone ID: UC-ZMFLMO17084D04_FLI
gggttttgattctgcgtcgttcccatcaaaatctgcacgggattctgttgcgccagtgattctcgtgcagagtctactccgcggcggctccgcgcgcgcgcacgcagatgggcatcagcccctccaagcgcgtggacgctgcgctgcgccgcgcgccgttgttcgccgctgcctgcgacgccgccttcgaccggtgcctcgccgacgcgcagcgccgcttcccgggcgtccgccggtaccagctcgccgacgccgccgcacaccttcactcggagctcagcgcgtccgtgccgctggtccggcgctgggtgccctcgccgccgccccgcgtccgagtcgacgccgcgctccgcgccgctgggctagaggacgaggcagagctctcgcgactccagttccgggagtttgccgtcgagctgttcagggaggccgtgctggccggagccgcggacctcctccgcgccccggcagccgcggccgggatcgtcgggataggcatggtggctcgagccgctcccccggtggtcgggaggatcgtcgccgtctgcgccgctagcgtggccactgcagtttacctcagcctgggctagggttttcccccaaattctagtgatgattagagaacctatacaaaccacttcccacagctctgctgtgttacggttgaacctggattcaacggcagttgttgcagtaatgcattttatgatcggatccagctcaaatgccattgaatcagctgtgcaatgtttcactgtcaaatcgcattcctgaaaggatcaagtatttcaact

SEQ ID NO: 33265 - DNA, 815 bp, Zea mays
  Clone ID: UC-ZMFLMO17084D08_FLI
cctcgccaagcgcagcagccgccgcagcacatcgctctcttgatctcagccatggcggaggtggagcagcaacaggacacgccgaagctcttcaaccgctggaccttcgatgatgtccaggtgaacgacatctcgctgaacgactacctcgctgtgaacgcgacgaagcacgcgatgtacctgccgcacaccgcggggcgctactccaagaagcggttccgcaaggcgcagtgcccgatcgttgagcgccttacaaactccctcatgatgcacgggcgcaacaacggcaagaaggtcatggctgtccgcatcatcaagcataccctggagatcattcacctgctcaccgatgccaaccccatccaggtcgtcgtcgacgcgatcatcaacagtggcccccgtgaggatgccacccgtattggttccgctggtgttgtgagaaggcaggccgtggatatctcacccctgaggagggtgaaccaggccatctacctcctcaccactggtgccagggagagtgctttccggaacatcaaaaccattgccgagtgccttgcagatgagctgatcaacgctgccaagggctcatccaacagttacgccatcaagaagaaggacgagattgagcgtgttgccaaggccaaccgttgaacggagcttgtatcctggtgcactctgcgctggaaacttttatgttgctggcagtcgtatcggttcctgttttaccaatgtttagagttttttgagacctatatgcggttttggttttcagtgcacaattaaaattactgagtaatgtagttgattgggaacag

SEQ ID NO: 33266 - DNA, 1839 bp, Zea mays
  Clone ID: UC-ZMFLMO17084F11_FLI
gtttttttactcccgaaaccaggcaggagggaggaggcgacgacatcgccatcacaccagatcactgaagaagagagaggcgcgtcgagtctccccaaagaacgagctagtacaaagtctcctcttcctttgactccgaatcccctagaccattgatggttgcgggggcaccggaaggagccactgacgatgggcctctgctcctcctccaccgccgcccgggccgcctccgaccccggcgccgcagccgcgggtgatgccgccgcggcaaagaaggggcgcgggatcgtcgcgtgcgggaagcggaccgacttcggatacgacaaggatttcgaggtgcgctactcgcttgggaagcttttgggccacggccagttcggctacacctttgccgccgtcgatcgcgcctccaccgagcgcgtcgccgtcaagcgcatcgacaagaataagatggtccttcctgttgctgttgaagacgtaaagagagaagttaaaatcttaaaggcattacaagggcacgaaaatgttgtacacttttacaatgcattcgaagatgacaactatgtttatatagtcatggaattatgtgagggtggcgagctacttgatcggatattagccaagaaagatagtcgttacagcgagaaagatgctgcagtagttgtccgacagatgctcaaggttgcagctgagtgccacctgcatggtttggttcatcgggacatgaaacctgagaacttcctattcaaatcaaaaaaggaggactcgccccttaaggctacagattttggtctttcagacttcataaaaccagggaggcaattccgtgacattgttggaagtgcctactacgtagcaccagaagtactcaaacgcaggtcagggccagaatccgatgtttggagtataggtgttataacctatattttgctgtgtggaagacgaccattctgggacaaaacagaagatgggatatttaaagaggtcttaaaaaagaagccagatttccgccgcaagccttggtcaaacattacttcgagtgcaaaagattttgtacaaaaattactagttaaggatccccgtgcaagactaactgctgcacaggcattatcacatgattgggtgagagaaggaggaaaggcatctgaaatacccttggatatatcagtattacataatatgcgtcagtttgtgaaatacagtcgtttcaagcaatttgctttaagggcattagcatctacattaaactcagaagagatgtctgatcttcgtgatcaattcaatgccattgatgttgacaaaaatggaacgattagtcttgaggaactgaagcaggctcttgcaaaggatgttccatggagattaaagggtccacgtgttttagagatcattgaagcgattgacagtaatacagatgggctagttgattttgaggagtttgttgctgcaacactacacgtgcatcagctggtggaacatgatactgagaagtggaaatcattgtctcaagctgcatttgataaatttgatgttgacagagatggctacatcacacctgatgaacttagaatgcatacaggaatgaagggttctattgatcccctcctggaggaggctgacattgacaaagatggcaagataagcctagatgaatttcgccggctcttgaagactgcaagcatgagcgcacgcaatgtacaaactcctaggggtgttcgcaagtcatagttttctgttttttgtagttcacataactgaactagagagcagcagcacatgtgattggagaaaggcttttccatgtaaattagacaatcaataatacacatgaatggaggt

SEQ ID NO: 33267 - DNA, 2053 bp, Zea mays
  Clone ID: UC-ZMFLMO17084G07_FLI
ccggaaccgcccccaccccgccccgagcgccaattgcaccgccgctcccggccaaaccggccaagtcaacggcgcatccacttctccttaccatcccggaggtaatcttgcgccgattcggtgccgatttgcgccatccgcgaccggaggctccgccgggtcttgtgttcttgcggggcgggggctcaggacaacctggcctctgcttgattggattcggggcgttcggcgcctccagctcgcgatctttcctgccggtttcgtcgaccgctggtcaacctggccggtcggtcccgggggctcttcacctccgtgctgcctgccaccgtcgctttagtcaagtctcggccaagattttagctatctccggtcaaaaggctttaccgattcttggattggtggcttcttgggggcgagaagccggttcctgtttcgtctcttgtgctccagcatgttctgtagcacaccggttccccatctccagtgaaggtgttcgtgtgctcttggttttgtgcctcccggaatcgttcccggaaagctacttttggccgctgcggcgatggcgtcgagcaccagcgagatggccgaggggaaggagaagctgaagaggtccggcagcttgggaagcaacgatacgtatgtgcgtgcagacaagattgatcttacgagcctcgacatccagctggagaaccagctcaccaagacctggggcaaagccaatctcaaatcccaggggccaaaggaggagtgggagatcgaccttgcaaagctggagatccgctatgccatcgctcaggggacgtatggcacggtctaccggggcacctacgatggacaggacgtcgcagtgaagcttttggattggggagaagatggttttgccacagaggctgaaactgctgctttacgaacatcatttaagacggaggttgctgtttggcataagctcagccaccctaatgttacaaagtttgttggtgcatctatggggaccacagaccttaagattccatcaaacaattccaatggtgctgcacgtacaaatttgccagcaagagcatgttgtgttgtggtagagtatcttgctggaggaactttgaagcaatatttgataaagaatagccgacggaagcttgcttataaagttgtggtccagcttgcattggatttggccagaggattgagctatctgcactccagaaagattgtacatcgggatgtgaaaagcgaaaacatgctgcttactccacagagaaaccttaagattgccgatttcggtgttgctcgtgttgaggctcagaatccaaaggacatgactggtgcaacaggcacacttggttatatggctccagaggttcttgatggtaagccatacaacaggaagtgtgatgtttatagttttggcatttgtttatgggaaatctattgctgtgacatgccttacccagacctaagttttgccgatgtctcatctgccgttgttcaccagaatttgcgcccagacattcctcgctgctgcccaagcgcatttgcgaatgttatgcggaaatgctgggatgcaaaccctgataaacgccctgatatggatgaagtggtgcagcttttagaggctctggacacgagcaaaggcggtggcatgatacctgatggccaatcatcaggatgcttatgcttcacaaaggctcgtggtccatagatacttttcatggtactcccttcccttggcaacactttccccgtgtaaatgactgggccacagcatgcttctctttgcacgacctgtgcagtcgtcgcttacagttctccatagctgccttgcgatcattgcgtgtcaacctgtagctctcatacgatttttgctgtcctctgtcgacaatcttttcatatactagtgtgctgctgtaattgtggttctaaaagagatttggcatacgcgttacactcttgaaactgctgtatgatcagtataaatctttactctgattattatttccatttgtgctaagaattgagtacaagaatggcctgaaataaattcgtgtttagctgatcc

SEQ ID NO: 33268 - DNA, 1066 bp, Zea mays
  Clone ID: UC-ZMFLMO17085B01_FLI
gggggaagaaaagcgagtagcccgtgagctgctgcggtgcgagggagcccagggtttcgtctcgtctggccctcttctcttggcgcggccatggacgcctacgaggccaccaaggtggtgttctcccggatccaagccctagacccggaccacgccgccaagatcatgggcctcctcctcatccaggaccatggcgagaaggagatgatccgcctcgccttcggccccgagtctctgctgcacgctgtcatggccaaggcgcgcaaggacctcggcctgctcctcccggcctcgccgacctccgtcgcagccgccggccacgcgccgttcctgcagctcccacgccagaactccgggcgcgcgggcgcgccgtcgccgctctcggtgtcctcgccgtcgtcatggggccacgcgcccgtgttctccaggagcaacagcacgagtaatggcaccgcggaggaggcggcgggggctggggaggagctgcccagtcccgtgaacggcggcgcggcgccgttctttcctcgtcaggccggagacgcgctcctggacgacttgcagctgcaggagcagctcgcgttcctcaacgagggcggcgggaacccggcccaccagctcctggggttcgacggcggggagtgccggagccccggtcccggtgatgccgatgggatgttcgcgttcggcctcgggtggcacaacgggggcccagcgcaccgcaggagctcgtcagtcaacgagctctgccttggcggcggcggcgatggtttcggttggaagccctgcctctactacgcgcgcgggttctgcaagaacggcggcagctgcaggttcgtccacggcggcctctccgacgaggctgctgcgctcgctggcaccaagatggaggcagccgccgatcagcagcagcagtgccaggacttcctcatccgctccaagggccagcgcctcggccccgccgccttcccctactcccccaccggctccctcccaggctcgccctccgccgctagcaagtgcctcagcttcctgctgcagcaacagcagcagcagcacgacagagccg

SEQ ID NO: 33269 - DNA, 2866 bp, Zea mays
  Clone ID: UC-ZMFLMO17085D05_FLI
ctccccacgccgccgagggccgccgaccaggaggagatcacgcgctcatctctcatggagtccgtctagcttccgctcgtctgcgcccactccaagcagccgcagcggaactcaactactgcaggttgagatgaacggtccatcgaatttcatgcctactcctgaacaggatgttctggacgtcaagcccttgaggacattggctccaatgttccctgcttctctgggtgtcaatacatttaaccactcaaccacgccaccattgatatttgtcactccttctggacaatttcaagggggttttggtgattggaataattctgctgccaaatcatttttcgctttcagcagcaaggatgctcgtggaggcaaggctgatacatttagtgatcagaatactggtactggcaaggctgccacttttggtgatcaggatgcttttggcagccagaatgtttttgctagtgatcacagtactggtactggcaaggctgccacttttggtgatcaggatgcttttggcagccagaatgtcgccactggtgtgcaggatgctgcgaaaggccagactgcaacagattggacagatgtgagtgccaatgccaatcctaatggcccaattgatgccattgccatttcagcttacaggtcaacacagcctaatgttatatcactggatgatgatgacgacgacgatgatgagccttatgctgctaacaagacatcagcatctggacgcaagatcaagaggccatcccacctcagcggatacaatgtgagtgatgctttggtaagtgacagctccaacagcatgaaggttaagcgccccaaatcctctcacgggaaagctgctgctgacaacgagcatgccttgcttcctccttctgaggatcccagggaaattgtggaggcagttctcatgacctttgaggcgttgcggcgtaggcatctccaattggatgaggcacaagagactaacaaacgtgcagatctgaaggctagtgctatcttgatgtccagtaatatcagggctaaccctgggaagaggataggggttgttcctggagttgaaataggagacattttctacttcaggatggagctatgtattattgggctgcatgctcctagcatggccggaattgactatatgactgccaagtttggtgacgaggatgattctgttgcaatatgtattgttgctgcaggtggttatgacaataatgatgatgatacagatgtactggtttacagtggttcaggaggtaatagcaagaacagtgaggagaagcatgaccagaagcttgagaggggcaacctggctcttgagaggagcttgtccagaaaaaatgtaatccgtgtggttcggggctataaggatccaggttgcttgactgggaaggtttatatttatgatggcctctataggattcacgagtcatggaaggagaaaacgaagagtggaatattttgttttaagtacaagctgctgcgagagccaggacaacctgatggggttgcaatctggaagatgtcccagaaatgggtacaaaatccactgactagaggcagtgttttaaatcctgatctatcatctggtgcagaaaatcttccagtgtgtcttgttaatgacattgacagtgatgaagtgccacaccatttcacatataccactcaggtcgaacacttgaaaccactcagttctgtgaagcctttacagggttgcagatgccttagtgtttgtctgcctggtgatgccaactgctgctgtgcacagcgtaatggaggcagcttaccttacagctcatcaggactgcttgtatgccgcaagactatggtttatgaatgtggtgaatcctgtcggtgttctttcaattgtcgtaacagagtgacccagaaaggagttaggatccactttgaggtctttaagacgggaaatcgaggctggggtcttcgttcgtgggacgctatacgggctggttcatttatatgcgagtatgttggtgaggttattgatgatgctaacattaatctgaatgatattgaagatgattatatatttcagatgtcgtgtcctggtgagaggacattaaaatggaattttggacctgaattgataggggagcaaagcacaaatgtttctgctgatagctttgagactctacccattaagataagtgctaaaagaataggaaacatatcacgtttcatgaaccatagttgtgctcctaacgtattttggcagccagttcagtttgaccatgaagatgatcatcgcccacatatcatgttctttgctttgaagcatattcctcccatgacagagttgacttatgactatggtgacgttggagctgatcctagtggtgtacggtctcctagagcaaagaactgcctttgtgaatcctcaaattgtcggggattctttatctgaccgtggaaaatgcatattctatgattctatctatcaacattcaaccctaccagctagatcctttttggtggcacctgaaggaaaagtaggactgttcgaacagcttgcatcactctgtcgttgacattttacgcagatcttttagatgaccattcagcaattaatgcacaaacgttttttttgtgggggaagaatgttggtcttggaagatcaattttgtgtagtttgtagacttgtagagcatttagtgctgctaaacttgtgcaccttaagtcttttggctgtaaaagagcctccaggctccagctgaattggttagtcagtctaagtagcatttctttgatcctgaatttgactccacgtggagtcaatttcaagctggagttaaaaaaacattcttatgttctatactaaagtacagttctaaggctc

SEQ ID NO: 33270 - DNA, 926 bp, Zea mays
  Clone ID: UC-ZMFLMO17085E04_FLI
ctgggagctctgagaacaaatacatggatgaagcacggaactatcgaagagatggctatctgcagaccttgttgcatgcacttatcatttggatatgttctgttgcttgattctgccagggcctctgctgtgtgtacactttatatgcttaagcgccaacatttgaagtatcaattgaatggttttgcttttatgttattgaggtcctgggatggagatcgctggaccctcctctcctcatcatggcttctcatccccatcaacagtgctccatgtgattaacaaaggctcagatgtcctaatgcgatcctccacaacatgtcagaatcgtatagaaagcaaaatctcacagattttcatcttcgcctctatggaagccaatttggacttggaccaatcaccacttaaaaaaagttggctcaaagcatccttatgcttgtattcgtgagaaaagcagaagtgaaaagcattggcaaatcgagtggctacatgtctcaataaatctgggacatagaagcacgcaggcgaaatttgtagtgccccacaattttttattgagatcattggaaggcatcttggcaacatccagaggcatggcctattccgagcactaacaccacgctacatttgatcattgtccttggcataaagtttatttcatcatccaaaaacaggatatggtctactccatatcatcacgtggccttatcggttcattgattataaccctgttttggtgtcgagtacttactctagcttcactgctatacgggccatcacactctagtcttgtcattcacactagcaactagtcttcgtagccaagtcattttccttatgttttctatttgatgccatgccttgtatgcaatgagctctttaatcaacacatgtgggggatatggatagatatcccctgagtcgtc

SEQ ID NO: 33271 - DNA, 525 bp, Zea mays
  Clone ID: UC-ZMFLMO17085F08_FLI
ctgaactcgtcggactcgccttggtttggacttcgccaagttgttgagcagccgtgaactgcaccatgctcaggccctgcccgcttcctttccatctgggttgatcctacttcgtcagaacagcagcagcgccagcgtcctctcctagcttgtgttcgtgaattttctcgtcgaaccggcatcgtgtcatcatccgaacacgtagaagaagtgatgtttgaagaaggagttcacttcagtgcatgttgatccagcggtggagtttcatctaactacttaccagagtagaataaggttttgaatcttctctgcaacaaggagaagttttattcccttatccttgggttagttacttcatgtggaggacttgaagcttagaaggtttttatatttctcttatggaaaggcttcacccttccaattattgtaataagttatgtcctttgagtactatcaagacttgtaataaatacatctctttctaccatgtaaaacttgagttctggaatgtaaagtgtactttgt

SEQ ID NO: 33272 - DNA, 2440 bp, Zea mays
  Clone ID: UC-ZMFLMO17085G05_FLI
cacgtacacactgcagccatcaaaagccatggaaggccgcgcgcgcctctccctcgtccacgccgccgccgcgctggtggtcctgctgcagctgcatggcggcgccgtcgtggttgcgtctgagccgccctacacctgcggcgccggagcgccgcccaacatcccgttctgcgacgcggggctgcccatcgaccggcgcgtcgacgacctcgtctcgcggatgacggtggcggagaagatctcgcagctcggggaccagtccccggccatcccgcggctcggcgtgccggcgtacaagtggtggtccgaggcgctgcacgggatctccaaccagggccgcggcatccacctcgacggcccgctccgcgccgccaccagcttcccgcaggtcatcctcaccgccgcgtccttcaacccgcacctctggtaccgcatcggccaggtgatcggcgtcgaggcgagggcggtgtacaacaacgggcaggcggaggggctcaccttctgggcgcccaacatcaacgtgttccgggacccgcggtggggccgcgggcaggagacccccggcgaggacccgacgatgaccggcaagtacgccgccgtcttcgtccgcggcgtgcagggctacggcctcgccggccccgtcaactccacgggcctcgaggcctccgcctgctgcaagcacttcaccgcctacgacctcgagaactggaagggcgtcacccgatacgtgttcgacgccaaggtgacggcgcaggatctggcggacacgtacaaccctccgttcaagagctgcgtggaggacggccatgccagcggcatcatgtgctcctacaaccgcgtcaatggcgtgccgacgtgcgccgactacaacctgctctccacgacggcgaggcaggactgggggttttacgggtatatcacctcggactgcgacgctgtggccatcatccatgatgcgcaaggctacgccaagacggcagaagatgcagttgcagatgtgctcaaagctggaatggacgtgaactgcggcagctacgtgcaggaccacggtgcctctgcgctgcagcaagggaagatcacggagcaggacatcaacagggcgctgcacaacctgttcgccgtcaggatgaggctggggctcttcaacggcgaccccaggcgcaacctgtacggcgacatcgggcccgatcaggtgtgcacgcaggagcaccaggacctcgccctggaagcggcgcaggacggcatcgtcttgctcaagaacgacggcggcgccggcgcgctcccgctgtccaagcccaacgtcgcgtccctcgccgtgatcgggttcaacgcgaacgacgccatcaggctgcgcggcaactacttcggcccgccgtgcgtgacggtgacgccgctccaggtgctgcagggctacgtgaaggacacgagcttcgtcgccggctgcaactcggccgcctgcaacgtcacgacgatccccgaggcggtccaggcggcgagctcggcggactccgtcgtcttgttcatggggctggaccaggaccaggagagggaggaggttgaccggctggacctgacgctcccgggacagcagcagaccctcatcgagagcgtcgcgaacgcggcgaagaagccggtgatcctggtgctgctctgcggtgggcccgtggatgtgagctttgcgaagaccaaccccaagattggggccatcctgtgggctggctaccccggcgaggccggcggcattgccatcgcacaggtcctcttcggagagcacaaccctggtggaaggctgcccgtgacatggtatccccaagatttcacgagagtgcctatgacggacatgcggatgcgcgccgacccggccacgggctaccccggccggacgtaccggttctaccgcggcccgacagtgttcaacttcggctacggcctcagctactccaagtactcccaccgcttcgccacgaagccgcctcccacgagcaacgtcgccggccttaaggcggtggaggcaacggcgggcggcatggcgagctacgacgtggaggcgatcgggtcggagacgtgcgaccggctcaagttcccggcggtggtgcgggtgcagaaccacgggcccatggacgggaagcactcggtgctggtgttcatgcgctggcccaacgcgacggacggcagcggccggccggccagccagctgatcgggttccagagcctgcacctgagggcgacgcagacggcgcacgtggagttcgaggtgagcccctgcaagcacttcagccgggcgacggaggatggcaggaaggtgatcgatcagggctcgcacttcgtgatggtcggcgaggatgagttcgagatgagcttcatggcgtgatcccggttgtgttggaagcctcgagtgtttcctcagaatttccgatgctctctaacttattcaaacgag

SEQ ID NO: 33273 - DNA, 533 bp, Zea mays
  Clone ID: UC-ZMFLMO17085G10_FLI
cgagacaggcgacactgagaggatggacgtgaaccaagctgggcagccgaagccctatgcagcaaacaaactacctgcaactgttgatggtcgcggcggccattggtagatctccacgttgtgtaacacgttatcagcatctgttacttatgctaagcgctacattattctgacaaattcagaaatgtagttctgtacagatccgtattctttccccggattcctaagtactgtagaacggtgctcgaaatcgctgggtttccacctcctgtcgctattcattcactgaaagatctgctggctggtggagatttgtcagactgaagtatactggaagctcactggcaacagcgggaactcaagcaagcagagttcttgactgacgttgtcatttgttcttcagcctggtaggtctaacgagctgaatactggtagttcctgtgaatcatctacacgtcaggtgcagaattctgttgagctagctaggaggtgcaagcatgttgtacgcttctgaatatcaaagtcattgatgt

SEQ ID NO: 33274 - DNA, 1152 bp, Zea mays
  Clone ID: UC-ZMFLMO17085H03_FLI
catcttgctattgtcatggaatatgcctctggcggtgagctttttgagaggatatgtaagaacgtgcgattcagtgaagatgaggctcgctacttcttccagcagcttatttcaggagtaagctactgccattcaatgcaagtatgccaccgtgatttgaagttggagaacacacttctagatgggagtgacgctcctcgcttgaagatttgcgatttcggttattccaagtcatctgttcttcattcccagccgaagtccactgttggaacacctgcttatattgcacctgaagttttgttgaaaaaagaatatgatggcaagattgctgacgtttggtcatgtggtgtaaccctctatgtaatggttgttggcgcatatccttttgaagatccagaagagcctaagaacttccgcaagacaattcagcgtatcttgaatgttcagtacgcaattccagacaacgtgaacatatctccagagtgcaggcatctaatttcgaggatttttgttggcgatcctgctacgcgaataacaatccctgaaatccggaatcatagttggttcctgaagaaccttcctgctgatctgatggatgatgatagcatgagcaaccaatatgaggagcctgaccagccaatgcagaccatggatcagatcatgcagattttaacagaggccaccataccacctgcctgttctcgcagtataaatgtcctagctgatggactggacatggacgacgacatggatgatcttgattccgactcagatcttgatgttgacagcagcggtgagattgtgtacgcaatgtgagtaacatctcagcagccatctcagcagtcaaccaaggaaccaatcaggcatgggatgccctgttgtatactctggcaaagggcatgcttccttttgtgaaaaacatccatgtagttttctcaaggaatcgcaatgtgttctgtggaacacatatgttgtagtcaaactcgggttactcagcttgtaaaactagcctcctcttgcttcctggttactgggctttggatactctcaggcttcgacttgtgtgttgctgttaaatatgtataagaaacttctactcaggttgatctgtgaatctggattcgggtagtggttttgctcagtgttgggtgt

SEQ ID NO: 33275 - DNA, 1971 bp, Zea mays
  Clone ID: UC-ZMFLMO17085H06_FLI
ctctgtggaccatggcagtggatcttctggtctcaaatcaccattagcttcacgcccttcttccttcccagggattggtgttccttctgaagcccttgtgagatggcacatgcgccttgaatattttgcttatgaaaccttgcaggacctacgaattggcaaactttttgaaataattgtagattaccctgagagctctcccgctattgaagacctaaagctgtgtttagagtacacgggccaacactctaagcttgttgactcatttatctcatcgcttcgatatcgtctacttactgctggtgcatcaacaaatgatatattgcaccaatatgtgtccactataaaggcattgcggacaattgaccccaccggggtgttcttggaagcagttggtgaaccaattagggattatctgagaggtagaaaagacactatcaaatgcatagtgacaatgctaactgatgggtcaggaggaagtggaagtggaacaggcaatgcaggtgacaatcttctggaagagttgaacagagatgctgaaaaccaggaaaatgctgattacgacgatcatgcaaacattgatgagaaacaagcatggctcaattctgaaagctgggaacccgatcctgtagaagcagacccattgaaaggcaacaggaacagaaggaaggtcgatatacttggactaatggttagtataattggctcaaaggaccaactagtcaatgaataccgtgtaatgctggcagaaaagctgctcaacaaatctgactttgaaattgattcagacattcgcacattggaactcctgaagattcattttggtgagagcagcatgcagaagtgtgagattatgcttaatgacttgattgactcgaagagaaccaattcgaacattaaaacatctttgctgaagtcatctcaaactgttcctgggcaagaggaggcagaagtgtctcatgatgttttggatgccactataatatcatctaatttttggccaccaattcagatagaagaccttgttgttcctgcttcagttgatcagttgctatcggattacgcaaaacgatttcaccagataaaaactccacgaaagctattatggaagaaaaatcttggaacagttaagttagaactgcaatttgacggaagaagcgtgcaatttactgtagctcctgtgcatgctgcaatcataatgcggtttcaagagaaatctagttggacttcaaaggcacttgctacagaaattggcatacctatggattctcttaacagaagaataagtttctggacaagcaagggggtcctgactgaatcagcaggaccagatgccgatgatcgcaccttcactgttgtcgatagcatgtctgatgtcaacaaggacagtattgtgaatgaacgcatggcagagtatcagatgactgaggaggaaggtgaaagctctgtggcttcagtggaggaacagcttaagaaagaaatgacagtctacgagaaatacatcgtcggaatgctaacaaattttgggagtatgtcgctggacaggatacataacactctaaagatgttttgtattgccgagccatcgtatgacaagtcgctgcagcagctgcaaagttttctttctggtctagtagcagatgaaaagctagaaacgagggatgggctgtacttgctaaagaggtagcagccgtttctatactaggatagtgggttgttagactagggttgtacacttgtactatttgctaatgagttgtttagactagagatgtcaggtaatcagatataacacacttcattatcaaagctatgttatcgggttcagaggcagcttacatatcctatctcacatcctcctttattttaaacttcattatgtaaacaatgactatgaaggtgttactatggaggtatttgagatggctctaggttctagatccagtatggagctgtagtttatgtcagttt

SEQ ID NO: 33276 - DNA, 987 bp, Zea mays
  Clone ID: UC-ZMFLMO17086C07_FLI
aaaatggctaatcaaaatatatttgcaggcgcagaaaccaccacaggtggaaacacggaatgtgttttagctcctaaccatacgctggggaatgctaccattttgccacaacactgcttttcagctccagtaattaagcccagtgctacaaatgtcgcgaactcgagggcgataggcacggcattatctccaccacctggtgtgatggttccagttcataatgcagtaccatctgacttatcagttaaggatgagagggaattgaagcgcgaaaagaggaagcagtcaaatagggagtccgctagacgatcaaggctgagaaaacaggctgagacagaggagttggctacacaagtggagtctcttgcagcagagaacacgtcccttagatctgaaatcggccggctaacagagagctcagagaagctcagactagagaactcagctctaatggtgaagctgaaggacaccgcagaaccgtctcccagcaaagcagccgcatccccatcctctccccgtgcctcggcggagaacttcctttccatgatcgacagcgccaacgcgccgagcgtcagcaggcacacggagcacggcggtcccaggctccggcagctcctggactccagtccggcgacagacgtcgccgccgtaagctgatgatgaagccggtccggcaaatacgccacagcacatgcatgtggcctggggattccgcaggctcatgcggctcgagtgctcgccgtaaacgtcagcgttacggactcggactctgtactccagtttaggcactgattccaccgagggtaccggtaattttatctgctctcgcgccagagtgccgggctgcctgcgaccactcctgtgtacccagagttgtaacgtagtagggtgttgtgctgcatgccgaccttttgaaacttttcgagaccgtcatttggaccatttttttcgtcgcaataacacaatacagatcggagtttgtacagg

SEQ ID NO: 33277 - DNA, 1741 bp, Zea mays
  Clone ID: UC-ZMFLMO17086C12_FLI
ggcagacaagaagacgccgccgtccaagaagtcggcgggccccgcgctcgagcgcccgtccagggagaggaagacggtcgagaggtactcggagctcgcgccgcgcgccacgcccgccaagaagtcccccgctattctccagggctccggaacgaagctcaaggacatacccaatgtttcattcaaactatcaaagagaaaggctgatgagagtctacagagccttcatactgtattgtatgggagaaaatcaaataaccattttttgaagagaaacatatctcaattttccgggtttgtttggacagacaatcaagaaaagcacaggaccaaaataaaggaaaagcttgagaaatttaacaaggagaagttgctagatttttgtgaaattctggacgttattgtaaaagtaactacaaagaaggaagaagtttctgccaagctcttggaatttttagagtctccttgtgttaccagggatgttattctcactgataaaaagaaggggaagaaacgcggaaggaaatctaaagtaagtcgtgaggtaacttctgaaggtgcttctgcagagaagaaaaggaaaagagttcagaaacaagcagctgaagatggtaaagagaatgatgatggggatgatgctgatcttgctggttctgaggatgcatcaacaggagacgaagctgatgtgggctctgactctgaggcaaatgatcatgctgtgagtgatgctgaacctgatgagcctccagcaaagaaaaagtctacagatgtaaaacaggttaaagaaactggtactgatgcaaaggaaaaggatgcaccaggaaaaaagggttctatgaaacctgcaaaacgtgcatcaaagccttctcaaaacagtaaaaatgagcctgaggtagagataaaaaaggttggcaagagagcaaagagctcaaaagaaactgatgcgccaccagattcaaataagccaaacaagaaggtttctaaatccaagaaggataatggaaaagaagcccaaaacaacaaagctgccaggaataagaataaaggaaaaggcaagggtggcccaggtgctgggactgccccaaccaatgaacagcttcatgctgttgttagcagcattctgaaggaagttgacttcaacacagcaactttggctgatattctcagacaattagggacccatttcgaaatggacctcatggacagaaaagcagaagtgaaacgcatcatagaagatgtaataaatagcatgtctgatgatgaaggtgaagaaggctcggaagatgaagcagaagacaacggcaaggtggagaagtcaaagagtgatcccgatggaggagaagagaagtgattctgtggaccggatgtgccagtggtggtttggattgaacctggaaggactattttccggccaattctcccgtgtttggaggtttttggctctgtacaattgggggcaccgcgagaacgagccggtgacctgggtactggttacaaagattgttaaccatttcacagccatacacacctagttgtgcttgacttggtagtggatgtagtctctagtgtatggtcatgtacgatagtttggttgcgtaggtagctagcgtgactgtaatatgcagaacaattctgggcttgtttcatctatttatccatgtaaacctctgtatccgagttctgaatcgttcctgctccttgcatttgttgtttacctagccatcgcaatgttagcgcagtg

SEQ ID NO: 33278 - DNA, 1357 bp, Zea mays
  Clone ID: UC-ZMFLMO17086D05_FLI
gaaaattccggtgtcggtgcccacggacaggcgtgtgcgccacgagcccgacgaacaagggaacgaggctatttccaccggtcaaactaggagctttcacaccaaacacggtgattaagcaagtttcttgtggagctgttcatgtcatggctctatccgaggatggtctactgcaagcatggggctacaatgagtatggtcagcttggcagaggtcgcacttctcaaggacttcagggagctcgtgtgttaaatgcttatgcaaggttccttgatgacgcccccgagcaagtgaagattgttagagtgtcatgtggagagtaccatacagcagctatatctgaaaatggggaggtgtatacttggggactgggaagcatggggcagcttgggcattgctccctccaatctggagataatgagctgatccctaggcgagttgtggcccttgatggtatagtagttggggacgtttcttgtggaggtgtccactcttgtgctgtaactgaagggggagctctatatgcctggggcggaggacatgtgggtcagctgggagtcgggcctcagggtggcttcttctcttgctcccttaatggatccgacatgctgctccgaaacatcccagtcctggtgataccctcaggtgtgttggtgaagtgagacgactcgccgctggaggtggccattctgctgttctgactgatgcatgttcgctgaaagagctgtgcgaattcaagctcgcagagaccgtgaacctttcaaatgctcagctaatagaagatgttgcatcgcggactggtgcggatgccttggcacgcttgtgcgagaaagtaagggagcatttggataaggaaggagaatgtgaattcctggaaaagcaagtggcagaagaggtcaacactataggcagttaggccactagcaaaacagttcaagcagtctgaggctgaagccagtctgggattaaacagggagtcatctacaattgatagcttgacctcccagtaaagttactgattcggacattaattgttgtggtgatcatggaaaatatgtgactcgtcaattgattctgattggtctgtagacctccattggtggtgagcctctcagctgcatcggggaggcgcagaggctctatatgtgtcatgatcttgttccgaactgtcaggttgctgtaatgtagccaaatggaaacctttgtatccctggaacttgaaaggcatgtacctggtatctgcagccagtaagtttggcaatctgaattcgatgccaattcctgggcgtattcgaacgtcctacgtccatgtatttatttcagttcatgtgcatctaaacaatattggtatagcatg

SEQ ID NO: 33279 - DNA, 2547 bp, Zea mays
  Clone ID: UC-ZMFLMO17086D09_FLI
atcaatttgctcagggagaacaagaccctgcaagctcggatactccagtctaaaagtgacaacaaactcttccttgatatcgagaagggagtcaatagaaggccgttatatgaaagtcatcctctatcatcattttcatggacccgaactgacagtatggatatgggggattggtcaaagaaatgcaaggaagcattaagcaagtttgagctgctgaaggaagggaagagtaaagaggacattgtttatgaaaaggctgttcagatattacatggtacaaaggatgaggtgcatgacattgttcaaagtgctcttaagtccagtgatttgaagggtctccatgcacaatgtcttacagatatatggataggcagagagaggtttgcttttgttgatctgagtgcagggccatttgcctgggggccttctgttggtggtgatggtgtccgtacagaacttagtctgccaaatgttgcaaagactgtcggggctgttgcagaagttacagaagaagaagctgaagaaaaattgcaagacacaataagggagaggttttcgtcctttggtgaggattaccatgctgttgatattctattagcagagattgatgtgtatgaactttttgctttcaagcattgtgtgggaagaaggatacagcttgccctttgtaaagaacttgatgagaggatgcatgacctgaaaaaggaactggagggttacaatactggagattttgatgaaactaacaagaagaaagctcttgatgcactgaagagaatggaaagctggaacttattcagagatacttcagtggaacatcatagttacacagtggctcatgattcatttcttgcacaacttggatctatgttatggggctctatgaggcatgtaattgctccttctgcctctcatagagtgtaccattactatgagaagttatcgtttcagttgtattttgtgacacgagagaaagtcaggagtataaagcagttacctgttaatgtaaaatccatcagggagagcctgaattctgtgctattacatcatcaaaagtccatgtttagccaaaacatgctgtcattgtcagaggatccatcattgatgatggcattttcaatggcacgtcgtgcagctgcggtgccacttctattagtcaatggcacctataagtcaactgttagcacataccttgattctgctattctccaacatcagctacagaagctaaatgagcacaattcactgaaaggaaggcattcaaatcacaggtcaacattagaggtcccaatattctggttcatacataatgaacccatattattggacaaacattatcaagccaaggctctctcaaatatggtcgtagtagttcagtcagatgatgattcctgggaaagccatttgcagtgcaatggaagacccatcttatgggatttgaggaaaccggttaaagctgctattgctgcaactgctgagtatgtatctggtctacttcctccacatctggtttatagccatgctcatgaaactgcaattgaggactggacctggtctgtgggttgtaatccctcagctgtgacttctgaaggttcacaactttcagagttccagcaagatgtgattgctcgtaactatattattacttcagtggaggaatccattcaagtagtcaattcagcaattcagcaattggtaatagagcggactactgaaaaaggcttcaaaattttcaaggctcacgaaagtaagatggttgagaagtacaatgccgttgttagcttgtggagaagagtatcggctatgtccaagggattgcgatatggtgatgcagtaaaacttatgtcaatgcttgaggatgcttcaaatgggttttctagtgctgtgaactccaccatttcaagtctgcaccctgtccaatgcacccgcgaaaggaagctcgacgtgcagctagacttgacaacacttcctgcttttctagctgtatttttgttgctttggtttcttctacgtccaaggagaccgaagcctaagatcaactgaacaccgagccaatgagcagcataggccatagactttttgtgaatacgcgcatggattacagatggcgctggagcatggctcgggaattccaaggtccaaaacaccgggtggcagggaacaaggtttcagaagattacaatcctgacacttccccaagttgtagcagagttggaatgtcatgaaaactttaattcatccagtcctgtcccggggaacaaggcttagccaattctgccccgttccgggtaactgagattaatttgtccatgctgtaatgtttagccagtcctgccccgttccggggaactgagagattgtctttatcgcaacattaacggctagcggttagtatcatcttccagtcacctggaatgttactagtacaacccagttgtctgtttcctgccgcttacatgtaaaagtccatattcaagttttacggaaagaaacatgttctgtcatttattacaaaataaagccaaataaaatgttatgggttgtcgg

SEQ ID NO: 33280 - DNA, 2055 bp, Zea mays
  Clone ID: UC-ZMFLMO17086E11_FLI
gttaatgttacaaactgttcatggtcgttataagaaagttgtagatgcttttcttatcttgcttgtgttaaaatttcataaccatatgcctgacagattaggagttatgaatttttcaaactggttgctgtattctgtccactgacagaacagatttcgaaaactgaattgtttgattcagttcagcatagaatcaattcttggtgattacaaaagtatgtagtgcttttgccaagcttttcaaaaagtcttgaatcactctttttggtgatctgaagattaagttatggatgtttaaactctgaagactaaatctgtccaattctggacagcaaagccttctagtgtcttttgtccttagttaaatattgaatcaccttgagatgtttataaatgatatgtagacaattttattacctttccagaaagtccagaatcaattagtttggatgtctgaatctttagttgtgagtttttgaagttgtaagtctgaatctgtccaatctagacagagttgctgtgttagcactttttgaccttgctaagtgttgaatcttgttgagataaaaataccaaagttgtagttcactttttaagctttccataaagtcctagtttgctatttttggattaatatttgaagagttatgattaaaatgagtgactgctgtgctgctgtcccaaacatgttgaatgtgattgattgccctactttgttgtagctgtcttgagtcgactgcttgtttgtcttgggatttgactgaacatgagtaataataataagtgactagtataattggggttatatataagtaagtgttaaattaaaggcaagccccagttttatgcataactgtattattatatgctactttactacacttaatgcttgtaggattgaaatgtgcacttaagtgtaggagttgcttgaaacctctagttgcatgaacttaggattccttttgagatgaatactagtatgctaggtcgagtagctgcttgctaatcaggatctcggtagaagtcgagtgatttttctagcactcgcgcgaggtcaggaattgattgtattcatcttgataacgggatatatgttagtctatggacttggatccagggaggatgccttgtccatgagacgggaaaaatgaattaaggattaatgtgtggatacctgagtcaagcttttgaacgtactaagcacatgctgggaaaaatggtaaccggtaaacctagtacctgagtgaagtcgggcgcggactttatccctcatgcgacctaagactgggtctcccatgctagctatggtgggtacaagtgtggtcactgcacggcggcagccggggtcagtggagcattgtatgccaaggcagtgaggcctggacgcggacggggaatcgatggggacggttgtcatgtgtggggtcggagtaccctgacatgccgtgtgtttaggtttaccttgcaaggttaaaactcgattcgaatcgtctgcttctcgcagctaatgagactgcttgattccttgtactgcatcgagtaagaagtgaaatgtggttacatgagataacttgttgattgaactaattgattgttaccatgtatgcttagaaggagcaaatctagctaagttaatgatgatagaatttgaaaagctaaaatttgcttttagaaacagctagtgcttttggcaaaccaaacccctcagccaaacagctgcatagtctagaggtagaggagtagactcctcacaccggttaagtctagctgagtattagtatactcagccttgcttgtggcacaatttttgcaggtaccattcaggaaatggttgatggtgtgacttggcctaccaccctgccactgggttggacggtcgagtgggatgtggctccggcaggagaggagcacgaggagtagtgggctaggccttgcccgattcctcgttaccgacgacatcgattatccgctgcactttattttgtgaactttatttactacgcaaaaactccgatttatgtaataactcagtacttaatttgaagtttcatgttt

SEQ ID NO: 33281 - DNA, 1355 bp, Zea mays
  Clone ID: UC-ZMFLMO17086F01_FLI
ccaacccagctcgctcgtcccagctgatcaggtcgagcacctagtagcgacctgctcgatcatcagtgtagagtgtcggtaggtgtctgtctctcttggtggctggttgcaacggtcatggcgacgtcgtctcgtcgggtgcccttgctgctgctgtgcctgggcgtgctggtgtcctgctccttcgcggcgggcagcttggaccaggagctggacatcacgtggggcgacgggcggggcaaggtccttgacaacgggcggctgctgacgctgtcgctggaccgcacgtccggctccgggttccagtcccggcacgagtacctgttcggcaagatcgacatgcagctgcggctggtgccgggcaactccgccggcaccgtcaccgcctactacctgtcgtcgcagggcggcgcgcacgacgagatcgacttcgagttcctgggcaacgtgtccggcgagccctacacgctgcacaccaacgtgttcacgcgggggcaggggcagcgggagcagcagttccgcctctggttcgaccccaccgccgacttccacacctactccatcctctggaaccccaagcacgtcatcttcatggtggacgacatgcccatcagggacttccgcaacctggagagcaagggggtggcgttccccaagagccagccgatgcggctctactccagcctgtggaacgcggacgactgggcgacgcagggcgggcgcgtcaagacggactggtcccacgcccccttctccgcctcctaccgcgggttcaaggccgacgcttgcgtcgccgtcgcgggcggccggacccgctgcggcgccaccgtcgtcaccgagggcaccggcgcccccgcctccgccgccggcgccggggactggtacaaccaggagctggacctcaccctgcagcagcggatgcgctgggtgcagcgcaagtacatgatctacaactactgcaccgaccccaagcgctaccagcagggcctccccgccgagtgctccatgcagtagcgcccggttattcctcgcccgtccaacaatggcgcgcgcgcgcgtgtgtgtgcatgtggtccgctctactgctaccgctacgacgatcggtgtcgatcaccggatcaaggcaagacgaaaggcatcgaaacatggtagataaataaaggacttgacgatttgtaacgcagtagctggtgcgtgcgtggtgtggtggtaagaaattcttctgctgcctgtgttcttgtagcctcctcgtcctcgcccaccctgttggtacgtgtacggtgtacgtagtctgccgccgcgcgctgttcgtgttcgtcgtgtctcgtgtctgtattatactcgtcctccccatc

SEQ ID NO: 33282 - DNA, 1323 bp, Zea mays
  Clone ID: UC-ZMFLMO17086G05_FLI
ccgccgtcttcatcttcatcttcatcgctgctgcgctcacgcccacacggagcatcagttctggcgcagcggaagcagccaccctcgcccaggctttgcttggcctcctctccatctctctgcgtcggcctctcctgcctgctgctcggtcccaagctcccctgtggccgcgcctggttctctgtttcctctaccaagtccggtcggagctctccctgctcggtccctacccaagcgtctgctccagttcatcggccgaccatcgctgttcctccggcgctgcaactctctgctcgcgtcgcgcccagtcttcagctcgcggagctctctctcggtctcctatggccgagcttctccaccagacagcgcccgtcctcgccaccaaccctgctcgcccggatccgtaactccctagtacaagtcggctgattcatgcgctggggagccgttctcagttgctcgccagatcgagtctcgcgtcgtcgttctgtgccattatgctcggctatcggtttcaccggttgtcgattttcctattcgctatggtcatcacggcggctgttcctatccgagctagcctcgctcgccagccatcacgccatttttacctgttaggccgtggttgccacgttcacctcagcatactgttgtggtatctggatcgtgctcgtctctactcgaacgagacatactgccatcctcttcgtcaaatggaaattgtcacgctggcacgtcaaggtcatcgatcgccatcctcgtttacgccaagccccaagccgtggagacactctggtgctggccgcgcgtcaccagcttgacaaaaaggaatccaaagggtatttggtcaaaaatagaaactgtgtgcctcgctcgccagccgtcgaccggaaactgtcatcgtacttgcggctatcgcgtcgaattagtcaggaagatgagccaagtcgaccccaagcgcgggctaatccacaggatgatgctgatggacaaatcggaagatggataatctgaacaagtgccaagccaaaagttgatcgtcaagtggacgtcacctaacaacactaacctagtgttactcaggtattaacattgtgctgttgttgatggtgttaagtgtcggtgggctcggctttcttataagtctaagtaactcttctatacttcttattgaggatggtcacttaagctagtatatattttaaacttatacataatttataacattttaaagtttattctttgaaccacttttgtaatcactccgataaatacaatgtaaacttgttgtaacttgtaaaatttggtaataagattttccgctgc

SEQ ID NO: 33283 - DNA, 962 bp, Zea mays
  Clone ID: UC-ZMFLMO17086H05_FLI
cgacacattgtaggtcaaacccaaaatttgatttccacaggtacatgatgcgagctttggaggctgactttaagaaggtggttggcataagctggtacttgtggatatttgttgtggtattcatgttgctgaacatcaatggttggcacacatacttttggatctctttcattccccttctgcttctgttggccgttggcaccaagctagagcatgtcataactcagttggctcaagaggtcgccgagaagcactccgcagtagagggcgacttggtggtcaatccgtcggatgaccatttctggtttggccggccaaagatcgtcctgtacctgatccacttcatcctcttccagaacgcgtttgagatcgcattcttcttctggattctgactacctacggtttcaactcctgcatcatggaccacgtccccttcattgtgccgaggctcgttgtcggggccatcatccagctcctctgtagctacagcaccctgcctctgtacgcgattgtcacgcagatggggactttcttcaagaaggagatcttcgatgagcacgtgcagcagagccttctgggctgggcgcagaaggccaagaagaggaaagcgctcaggaacaatggcaatggcagcaatggcgccgcggccgggtcgtcacatccatctgcgactgcgaggctcgaactgatgagacgagctgtcgctcttgaagaaggcagtgccggtggcaacgggagtgaggctagtgcggccgagctacacgacacgggcccgaagctctgaacgctgtagaaaacgcccggcagagcgtcagaagatgcagtgtttctgtacgcgagccatatgtcactatgtcgtgtggctgtttagccaggtggtgtagtgtgatactgcgtatcatgatttgtatgcttttctggattgagcttgaagcgtgttatggagtggggagctttgtgt

SEQ ID NO: 33284 - DNA, 1015 bp, Zea mays
  Clone ID: UC-ZMFLMO17086H06_FLI
ttccacttcacttcatccctgatcggcgatcacgccgagcgttcttttttataacgcacaatgaacttggcgtccgtcgttccctgcgggcaggcattcaccgtgttaatgactcccgccgctggctcccaccgtcgggtccacacgcatgcggcggcctccaagagcggattggcctgccgcgtcgcgcgcagcgggggcgcccggtggctgccggtctcctgtgcagccgggggcggtgcagttggtgacgcttttgttactgaggacactacaaatgtgaagtttcctcgggaagtaacagttccaggctatacacacccattggttgcagttggcacaggttacagagaaaagttttttgtcaaagtatatgctgccgcgttctatgtagattactcacttcgccttgatactgagcaatggaaagcaaagactggtattgagagctttgacagttcctctgttttcgactccatttttaaggcaccggttgtgaaatcattgagtataattcttgttagagccgttgatggcaagacctttgtgaatgctctaaatgatgtcattgcccgccaaataaaaaacccaaacgccgaggaagaatcttccctgtcaaccttgcagaatacctttcttgggcgcaatctcaaacagggaacaagcatatacttaacttggcttgaacccaaaagaatgctgatctccatttcggaagatgaagatccacgccaagttgatgcagagatcaaatctgctactgttaattatgctctatatgatggcttctttggtaaatccacagtgtgcccttctttaagatcatctacagcccagttgctggacgcgcttctgcttgcgaagtgacaaaccagtcgtggttccatatcagttacgattacgagtggttattcccttctcccttgttttcccgagggaacacaggacggactaggtgtccataatcataagtcccataaaggaaattaatttaattattatagagttcatatgt

SEQ ID NO: 33285 - DNA, 1902 bp, Zea mays
  Clone ID: UC-ZMFLMO17086H11_FLI
ctccttttgctcggaacgcacacaccgcccggtctccgatctccgatccccgatcccctcgtcgatccaagatgcagatcttcgtcaagactctcactggaaagactatcaccctcgaggtggagtcctctgacaccattgacaacgtcaaggccaagatccaggacaaggaaggcattcccccggaccagcagcggctcatcttcgctggcaagcagctcgaggacgggcgcacacttgccgactacaacatccagaaggagagcaccctccaccttgttctccgcctcaggggaggcatgcagatcttcgtcaagaccctcactggaaagactatcaccctcgaggtggagtcttctgacaccatcgacaacgtcaaggccaagatccaggacaaggagggcatccctccggaccagcagcggctcatttttgctggcaagcagctcgaggacgggcgcacgctggccgactacaacattcagaaggagagcaccctccacttggtgttgcgtctcaggggcggcatgcagatcttcgtgaagactctgactggcaagactatcacccttgaggtcgagtcttctgataccattgacaatgtcaaggccaagatccaggacaaggagggcatccctccggaccagcagcggctcatttttgccggcaagcagctcgaggacgggcgcacgcttgccgactacaacattcagaaggagagcaccctccacttggtgctgcgtctcaggggtggcatgcagatcttcgtgaagacacttactggcaagacgatcacccttgaggtggagtcctcggacaccatcgacaatgtcaaggccaagatccaggacaaggagggcattccaccggaccagcagcggctcatctttgctggcaagcagctggaggatggccgtacccttgcagattacaacatccagaaggagagcaccctccacttggtgctgcgtctcaggggtggcatgcagatcttcgtgaagactcttactggcaagacgatcacccttgaggtggagtcctcagacaccattgacaacgtcaaggccaagatccaggacaaggagggcattccaccggaccagcagcggctgatcttcgccggcaagcagctggaggatggtcgcaccttggctgactacaacatccagaaggagagcaccctccacttggtgctccgcctcaggggtggcatgcagatctttgtgaagacattgactggcaagaccatcaccttggaggtggagtcgtctgacacaatcgataatgtcaaagccaagatccaggacaaggagggcattccaccggaccagcagcgcctgatctttgctggcaagcagctggaggatggccgtaccctcgccgactacaacatccagaaggagagcaccctccacctggtgctccgcttgcgaggtggtatgcagatctttgtgaagaccttgactggcaagaccataaccctggaggttgagagctccgacaccatcgacaacgtgaaggcgaagatccaggacaaagagggcatccccccagaccagcagcgtctgatcttcgccggcaagcagctggaggatggccgcaccctagcagactacaacatccagaaggagagcactctccacctggtgctccgcctccgcggtggtcagtaagccatggttcatttaagctgctgctgtacctgggtatctgcgtcgtctggtgccctctggtgtacctctatatggatgtcgtcgtctaataaacatctgtggtttgtgtgtcatgaatcgtggttgtggcttcgttggtttaatggacctgttgtgtcctctgtgttgtacccaaaactcttctgcagcagtatggcttgaatccttatgaagtttgatatttgaactt

SEQ ID NO: 33286 - DNA, 392 bp, Zea mays
  Clone ID: UC-ZMFLMO17087F12_FLI
aaattcgaggtgccagcgaagatcgtgctgttgcctgaaccgtggacgccggagtccgggctggtgaccgcagcgcttaaactgaagagggagcaaataaaggccaaattcaaagacgatctggacaagctctaccactgaagaagcgacagaggacggtttaatttgcacctaccgcttccagacgcttgcggtgccaaaagctgcctggatggaacttttactgacctgcacgagtggtgtgtgtgtgtgtgtgtgtctcccagctgccgatacacaggactacaggagcttcgttcttctgtgatgactgaggaaaaataaacccagtgttggaatgatcttgatttgtaatagcttcacgtcatgggattttaattttgttatagcac

SEQ ID NO: 33287 - DNA, 1424 bp, Zea mays; identical to SEQ ID NO: 32990
  Clone ID: UC-ZMFLMO17087G08_FLI

SEQ ID NO: 33288 - DNA, 2294 bp, Zea mays
  Clone ID: UC-ZMFLMO17089A12_FLI
gagaattgcgcagggttttgaaaatccacgactacgacgcgcctaggcgcgcctagtcgctaggccatggcctcccgcctggactaggggggtaggcgggctgctaggcgttgggagcgcctaggcggcgccaaggggcgattccacggcgattccgcgcgcccaggagccaaggcggcggcgtaggcgtgctaggcgcgcgtgggaaaaaaggcgggcgggaaaagtcgtgcgcgcgcagaagaaaagcgcgcagagaagaaaagcgcgcagaagaaattggcgcgcgggaggatagcctggcgcgtgcagagaagaaaaaagcgcgcagaaaaaagcgcctggcgcgcgcagagaagaaaaaagcgcgcagaaaaaagcgccgcagagaacaggcgcgcagagaagaaaagcgcgcagagaagaaaaggaagagcgcagagaagaaaaggacgcgcgccagagaaaaaaattgacccctgcttgcttatctcctgtacgcgggacttccttctaagcattagagggcttggactcaaaagtgttgagtgcgttcgtctcttgacgctacatcatatggcttttccagtggacacaaatgttggtcggatatgtgtgaggcttggatgggtgccgcttcaaccattgccagagtctcttcagttgcacctattggaaatgtatcccatgctggagcacatacagaagtacctttggcctcgactatgcaagctagatcaacgtacattgtatgagcttcactaccaaatgattacttttggaaaggttttctgcacaaaaagtaagcctaattgcaattcatgtccattgagagctgaatgtaagcactttgctagtgcatttgcaagtgctaggcttgctcttcccgcacctgaagaaaaacgtttggctacatcggaggatccaaatgttgtagagttttgtcaccaaacatacataaattcaggggctgttggcgaacttgagtggagtgcgaactatcctaagcatgctgtttgtggtaacctgcagccgttcattgaggaaccactgagcccagaacctgaacctgaaaatgtagaggcgaaggacggtgcaatagaggatttctttaatgaagaccctgatgaaattcctactattaatcttaatattgaggagtttacacagaacttgaagaactatatgcaagcaaaccatgttgagattgagtatgctgacatgtcaaaggcattggttgccatcacccctgaagctgcttccattccaactccaaagctcaagaatgtcagtcgtcttaggacagaacaccaagtttatgaactgccagattcacaccctcttctggaaggatttgaacagagagaaccagatgatccctgtccatatcttctttccatatggaccccaggtgaaactgcacaatcaaccaatgcgcccaagacattctgtgattcaggggagactggtcaactatgtggaagtttaacatgctttagttgcaacagtttacgagaaatgcaggctcagaaagtcagaggaacactcttgataccatgccggacagcaatgagaggaagcttcccacttaatgggacatattttcaagttaatgaggtatttgctgaccattgttcaagccaaaatccaattgatgtcccacgaagttggatatgggacctcccaagacgaactgtttactttggaacctcagttcctacaatatttagaggtttaacgactgaagagatacaacaatgcttttggagaggattcgtttgtgtgaggggctttgataggacagtaagggcaccaaggcccctttatgcaaggttgcattttcctgccagcaaggttgttagaggcaaaaagcctggagcggcaagcgtcgaagaataataggtacatcgaagaaatatagaggagctaacaaaacggatggatagccctaaatgagatgctgacccaataagtcgccgaatcacctccaagttctaacccaatttttgaggcgacatgacctgttaaattatgttccatctatggtaacagcttagatgttcttgtgagtcgcatattctttactctgaaattcaatatagcaaatgaaaaaaaaacacagtgcatagtctagttctaattgtacctgtgagtggaatcagttgttgtacaacatgaagatgggcctatttgtacaatggtcatacatgttctttgatcatatactataaacaatgtaacctcatcggccgttatttgattgtttcaaaacaaaggaaaagccttttcaattc

SEQ ID NO: 33289 - DNA, 1100 bp, Zea mays
  Clone ID: UC-ZMFLMO17089B01_FLI
aaaaaaacagtatcctgagctgctatcacagtgtctccttagttatccaactacatccgagggcagagaccgttaaccatattattttctgaacttaaatgcaattagtcttccttgaatcactccctgttgatttggcatactgaggggatgtttcaattgtggagttgcttttaagaggagacatcatctcttccgccagtaacatcactgtataagtactatttcgacagtctccttccacgagtgcctctcccaatcctccgacaggtcactagccaccttgagaagctaaagcttccaacaaagcagtcaggaatgactggggattccaacaggcttgaatcaaatgataccgccagaaggcctccttccgtaaaggcttctttgtctgtctcctttggtcagcgcgctccacaccgtgcatccacaagggattcttccccggtccgaagaacgttaccttccaaacaggacaaggaaggtgaccgtgcgaaatcgccaccgatgaagcaccggagtcggagctctgagcgtgatcatgatttggagagggagcgctcggatcgtgaacgtggcagtggcaggtactacaaggatagggagcctgatcggcatgctcgtgagcacagagaccgcgatcatcgtcggtctgattattcgaacagggatggcgaaacacgaggccgtgaaaggagggacagggattctgaccggagtagacatgcaagcgtccgcaggagcaggagcaggagtccagtccgtggcagaagtgatggcgacaaacatcgctccagcccgtttggtagggctccagaattgtcgaacctggcgaagctgaaggatctgtacggcgatgcgacaaacgtgaagaatgatgctggcgacgatagggcgcacagggattctggaacggaagaggtgatccgactgggaggggcaaggtggaggtgagtctcatgttaagggacagtgggacaccacggtgatgcatttaggtccatgaatgaatccaaacagcatcagtggaggaaatgatgggctgtatgtcttaacttgaacctacgatttcaatgctttattctgaaggttttcctctc

SEQ ID NO: 33290 - DNA, 1440 bp, Zea mays
  Clone ID: UC-ZMFLMO17089B02_FLI
tggtagtgctctgttcacaaggggagaaacacagcatggcttctgtttatggaggttgtttagcacttcaagatggtggggttcctataaagtttcctgttgctggaattgaaatgggcctggtccttgatacacaagaatttggtggagatggtagcccacttatactctctgatattactggagctgaagatggttctggtgacatggatttgaagattgctggtaatgaaagtggcatatctgcatttcagatggacactaaggtagttgggataactctacctgtgatggagaaagcactcctccaagctagggaagggagacaacatattctaaattcgctgagattcacgtcggccatttccatcctactggcggtagtgttcatgctcatcagctcggggatcgcgctatacgctctcttcaagggcaccgcgaccatgccgcggatgtttcctgacttctccagactctcctcgccgttcgagctcttcaccgccgtccccgtcatcgtagtcgccttcaccttccacttcaacgtgcacccgatccgcgcggagctgagcaagacgtcggacatgaaggtggcagtgcgcgtctcgctcgtgctctgcgcggccatctacgccgccgtgggcttcttcggcttcctcctcttcggggacgccaccatggccgacgtcctcgccaacttcgaccgcagctctggggccggtgtcccgcaggcgctcaacgacgcggcgcgcctcagctacgcgctgcacctcgtgctcgtgttcccgctcctcctcttctcgctccgggtcaacgtcgacgagctcctcttcccgggccgccggccgctcgccgcggacacgcgccggttcgtgtccctgacagccgtgctcatggcggtgctctacgtcctggccatcgcaatccccagcatctggacgctcttcgagtactccgggtccacgttcgcggtcaccatctcgttgatcttccctggcgccatagttctcagggatgttcatggaatagcgaagcgcaaggacaaggcattggcggcaacgatgatcgttctggcagtggtcacgagcagcatcgccattgcctcgaacatcatgagctccatcagtgacgaagacagaggaggtcatgtagctggtagacgataatggctcagatcgaatcaaattaaaatgtggtttccaggccaaccgcgcgtgaagattgctgctcgtgtcatgcgttcctcctgggtattctttctttgcagcgagattgcttcggcccctgagatgcaagtttagtctgtgccccctcatggtgtagatgtttgtggttgagaggagatacgttggtacatggtaaggaaattaccagttggccaatgctgtatacttgtttcggtgatacattacagtgtaaaatagaaaacggtcatattttctt

SEQ ID NO: 33291 - DNA, 2183 bp, Zea mays
  Clone ID: UC-ZMFLMO17089B06_FLI
gttcaaccacttccggtaccagctgctcttggtttatctgaaagcgacaaacaatgcattcgtgatcgtagctgcataatggcacggcatattttttctgaccaaccagaagaatatatacagagtcaggtcaatacgttgctgcattcgcttgatattgacaaccgtatgagaggacctatgcatgggcaatacccagaactacaggagtactggaagcagtcccaaagttctacgcgtcctgccccaacgcataatgctgctgataaatggattactgagtttggcaagcaaaataataatccagaaaattgggcgaactctttcgaacaacaatatggccccaatgggtgggcctctgagtttgaacagcatcagtctcagatggccatgcgccagatgggaggagcgaacatggccaacctggctgctatggagcaatcccgagtgcttgcacaaactttagcaagtaataatgatcccaagtttcagaattctaagttcttccagtttgtttcaaagatgagccgaggtgaacttattatagaagataatcaagtaaaagaaggttcagcatcccaatccagtggctgggctgatgaatttcaaacaccgtacattgctaatgcaaactcatgggcagatcagtttgcacatgaagagctttcacaaggggcggataagtgggttagcgagttctctagtcaacctaatcatggtgcactaaatgagaactgggttgatgagttctcgaaattaaatgttactgacgaatgggcagaggaattcagtggaggtggttttggcgaaagctctgctgatccatgggtagatgagttccaagaacacttgtcatctttcaaacaaagtccgggcgcctctcgaggggtttatgttttttctgagaacaacccgtatgttggtcaccctaatccaatgcaggaaggacaggagctcttccgcaagggcctcttaagtgaagctgttcttgctttagaggctgaagttttgaagaatcctgataacgcagaaggttggaggttgttaggcgtaacacatgcagaaaatgatgatgaccaacaggccattgcagcaatgatgcgtgcgttggaagctaatccaacaaaccttgaagttcttcttgctcttggtgttagtcacacaaatgaattggagcagggggaagcattaaggtatctttataggtggcttcagaatcaaccaaaatatggtggccttgtccctctgcagtcaactgattcaccttatggtcctgatgttgttagattgtttaatgaagctgctcagatgtcacctgaagatgcagatgttcatatagttctgggagtcttatataacctatcaagagagtatgataaagctatagcttcatttaagacagcactacaactcaaaccacaggactattcactctggaacaagcttggtgcaacccaagcaaacagcatccagagtgctgatgcaatattggcgtatcagcaggctctggacttgaaacccaactacgtgcgtgcatgggcgaatatgggaatcagctatgccaaccagggtttgtatgaggattccattcgatactatgtaagggcagttgcaatgaacccaaaagctgacaatgcctggcagtacctgaggatctctcttagcaatgcttcgcgagcggacatgattgctgcatgcgacgcccgcaaccttgacgctcttcagaaagagtttcctctgtgagccctccggtccaaggcattagagcttccatggaaggaagcagcacactagcaagccgagtgactgcacctgtggtcatggaaatggaattggaaaccagtagcgttttgtatttgcctgttgattcttatatttatttttaggaagtgggggaatgtgtagcaactaggaagcgagggaacaacatccagttgatgtgaagcattcatggcacagtaggcaatagtggcaaaggggtactatacatacacacttacgggacgcacaacataaataaagaatggttgattaataaactatttattttggggacacacccctaggatcaacccctacttgtttcgagtttgaatactgatttgtatcaacaggcaataaataatgcgctttgtaaccttttatatcataatgtaatgcgcacgcccaaatcagttgtgtct

SEQ ID NO: 33292 - DNA, 647 bp, Zea mays
  Clone ID: UC-ZMFLMO17089B07_FLI
ttctcgtctcaacacatatggttttaatcattttgcacttttggcaagggacgagccggtcatcacattaccatggtggacatttgagatttgcaaccttgttgtgcatagttttacacactaagcacccattgcaccgaaaaaacttacaggatgaactagatgcaaaacctgaagagctggaaggagaagagttggaatctaagcttctagagcctgttgcagctctttcggtgcatccagtgcatgtcccaggaaacaagcaactagcttgccctacttcacagaaagttatagctaaatacgatgagctggctgcactacaagctgaaatggcattgtgatcaggattaacgcatggaccgaggaagcgcaatgacaagcctaatagcctgcaactgatgaaaggaatggtctctactacatgtattattgtccatcccatctttgtttaatggtcgtagctgctttatacaattattcctacctatgctagactgtgagccattgtatatcaatgtattttatcatattgatttcgtagcaacgtacgagcatatacctagtatatttataaacaatgtgtagcacttgccacatttaaacagctaatcttaaaaagacacgacatgcgaggattgttaatc

SEQ ID NO: 33293 - DNA, 831 bp, Zea mays
  Clone ID: UC-ZMFLMO17089C03_FLI
gaaagctgtctggtgtgttagaaaacaactgcaagtgtatcttatgctttgcagttccagtggtcactttagttcttccctatatatgagattatattggtcacattggtttttcttttctgtaagaatttgatttatgtactaactccaatgtcagataacgtctttataatttcatatttgctggactttccagtccatggaacatgctaggacatgtggatggggaaatctatggcaagcaaacaagatacatttctcgtcgccagatacttgagaactaccaagcttatggtgattcaataattgaccagtatggccccagcaggccaaatgtgagacaacttgtcaagccactgttaaacttattccactcagaacctggcaacagcctatggaaacgcaaagctgactctgcattgcgtcattgcaagacagtgaaaactttcttggaggagactcttgacgcaatatcggacagcgttcttgacaagccagtaaacagggaaccatccagtgacgaagaatattttgctagtgtcgattctctgttgccaccaaaatacacgacaccgatgcatgaaagacttgtagccgcatccacttgaacagcgtgtcgggaagcggattgcctgcggtactgcagggtgtagttgggtcactgcgcgtgggccctgtcgcacggggcagtgcccacgcagggggggctgtgaaaatgatctatgtaattgttgtaacacatatacgtcgccacgtcggggtatatcaatagctgtagacataaccattttgactttgcggtaaaatccttgctcatgcttccccaaaagt

SEQ ID NO: 33294 - DNA, 1159 bp, Zea mays
  Clone ID: UC-ZMFLMO17089E06_FLI
tgtctatgccacttgctgctgtgaagtactcccgtgggacgttcatctttcctggtgcacagccagccccccacaggagcttctctgaggaagttgctgcacttaaccgctactttggcggcctgaaatctggtggtaatgcttatgtgattggagatccagcaagacctggacagaagtggcacgtcttctacgccactgagtacccagagcaaccaatggttaaccttgagatgtgcatgactggtctggacaagaagaaagcttctgtctttttcaagactaatgctgatgggaacacagcatgtgccaaggaaatgacaaagctctctggcatctctgaaatcatccccgagatggagatctgcgattttgactttgaaccctgtggctactccatgaatgcgatccatggctctgcattctctacaatccatgtgacgcccgaggacggtttcagctatgccagttacgaggttatgggcttggatgccactgctctatcttatggtgaccttgtcaagagggtcctccggtgctttggcccctcggagttttccgttgccgtgaccatcttcggcgggcgtggccatgccgggacatggggaaaggcactaggtgcagaggtctatgactgcaacaacatggtggagcaggagctgcctggaggcgggctcctcgtataccagagcttctgcgctgctgaagacgctgttgctacctcgcccaaatctgttttccactgctttgacggcgagaacgtggagagtgctcctcctcctatgaagaaggactacaaactagctaatcttctctgctgggaggaggaagcggatgccatggaggagaaggcgggagtgcttgatgagtaagacgggcttctggtgtcgatttgcttctgagttgtttattttatatcgtcgcaatttcgtggttgtcgtttggttattctgtgaagcagccaagccaggctattgttatgaaaatttgtcgtctgtaagcatgtgaacttccgatgttgccacatgctggatcagtctgaataagtaagtatgcagctctaggtggtcagctgcgtctaccacaatgagcatgtacgtatggagaaatatctgtgaacccattttgtttatgaataagatttgttttttttcgagtt

SEQ ID NO: 33295 - DNA, 2304 bp, Zea mays
  Clone ID: UC-ZMFLMO17089E10_FLI
cttcggccccttccccactccactccactccactctcactctcactcccactcctcacgcgccgccgcctccaaatgccggcgcttcacccccaccgccggtccttccccattcccctgctacttctcctatcgctcttcgcctcctcccctctattcttctccccgagccccgcagcaaccgccgtcggagattgccctctggattttagctgggcaaatttcacactagctgcggcagcctgctctgacccaacgcagcgggcggcgtgctgccgctacatcaatgccttcgttgccatctccattgcccgctatgccaatgccaccggcaggctgggtgtccctcctgcctttgctgagatctgtctcagctccgtgtccgagacattcaagctgcgggggatccccaccgacgccgacgtcttctgcggtctgggccccaagataagggtttcgtatcagtgcgctgggcgggataccgtgttggaaatgatgcagtccccgaacttcaatgacgttatcgggagctgcaggggccctctgtcgctggatatcacctgcaagacttgcttgaattatggcatcgtgtacctccatcgcctcatcggttcagacgataatgtcggcctcagcgtgtgccgcaatgcggtttttgtaacccttgccactcaagggggtattctttcatatgaagatatcgtcacgtgcttctttggtgtccagggaatcaccacatttccaggaccggcatctgtcacatcgacaccagcatcctctccgaatgtcactgttgattctccagctccaaggatcaagagtcttccacagaagcaacaccagcactaccggattacagttattccagggataggaatcggtgttatattgtttgctgtgctgctgcaaatcgtcttagcggtactgattcgaagaaagagcagggaattgaagaacgccgaatttcccgctcggaatccagataacacatttcactacaatcaatcctggagatgccccgaaggccaatcaccaatgttccaaaggtttagctacaaagaaacaatgaaagcaacagataatttcagcacagtcattggaaaggggggatttggaactgtctttaaagctcaatttaatgatggctctatagctgcggtgaaaaggatggacaaggtttcaaagcaagctgaagaagagttctgtagggaaatggaactcttggctaggttgcaccatcgccatctcgtgaccctcaagggcttctgcatcgaaaagaaagaaaggtttcttgtgtatgaatacatggcgaacggaagtctaaaagatcacctgcactcatctggaaggaagccattaagctggcagacaaggctgcagattgcaacggacgtggccaatgctctggagtatctgcacttcttttgtaaccctccactttgccatagggacatcaaatcgagcaacattcttttagatgagcatttcgttgcaaaggttgctgattttggccttgcacatgcatcaaggaccggagcgataagctttgaagccgtgaacacggatatacgaggaaccccagggtacatggaccccgaatatgtggttactcaagagctgacggagaagagtgatatatacagctacggggtgcttcttctggagcttgtgaccggacgtagagcaatccaggacaggactaacttggtggagtgggcacagtcgcacctctcgtcgggagcggtctctcctgaacttgtagacccgaggatcaggggcgctgttgacgtggaccatctgcatgtggtggtgggcatcgtgcagtggtgcacccatagagaagggcggcagaggccctccgtgaggcaggttcttcggatgctctcggagaggctggacccggggaacggcagcttcggcgagggcatggaagacgcggagggcggcttctatccccggagcagcaggtgcggcggcgcacatcaccggaacgagctggtcccatacggcggcggtgacatgaggtctctgcattcctcgtcgagcacgaccaggtcctcttactgcagccgcagcatgctgctggagagcgggcagactcaatcgcccccagaaacccagtgatgaatgaatgaatctagttagttcataggcaacttgttggtggttgctgttatttattattatttgctgtttgtttgttttgtaagggggaaaaaaggaattgtcaagtggtcattggaaggaaccagtggcggcagtgaatgagcaaagcagcagcacatgttccatgtggttgttggtc

SEQ ID NO: 33296 - DNA, 1235 bp, Zea mays
  Clone ID: UC-ZMFLMO17089F02_FLI
cggggctccgcccaaccccttcgacttctccaccatgatgaaccttctcaatgaccctagcatcaaggagatggcggagcagatcgccaaggacccggcgttcacggagatggcggagcagctgcagaagacggtggtgtccccgcggcagcagcagcagcagcagcaggcgcggcagcagcagcagcagctggacccgcagaagtacgtggcgacgatgcagcagctgatgcagaacccgcagttcgtggccatggcggagcggctaggcagcgcgctgatgcaggaccccgccatgtccgccatgctggggggcctcaccaacccggcgcacaaggagcagctggaggcccgcgtcgcgcgcatgaaggaggaccccacgctgaagcccatcctcgacgagatcgagtccggcggccccgccgccatgatgaagtactggaacgaccctgaggctctgcagaagttcggccgcgcgatgggcgtcggcgtcggcccgtccggcgaggccggcggcgcggagcacgccgaggcggaggacgacgctggggaggaaggcgagtacgaggacgagtccatcgtccaccacaccgccagcgttggcgacgtcgagggcctcaagaaagcgctggaggagggcgcggacaaggacgaggaggactcggaagggcggcgtggcctccacttcgcgtgcggctacggcgagctccagtgcgcgcaggcgctcctggaggccggcgccgcggtggacgccgtcgacaagaacaagaacaccgcgctgcactacgccgccggatacggccgcaaggactgcgtcgcgctcctgctcgagagcggcgccgccgtgacgctgcagaacctggacgggaagacgcccatcgacgtggccaagctcaacaaccaggatgacgtcctcaagctgctggagaagcacgccttcgtatagacgtcccatgccgccggccggcccgtcttgctcgtctgctcctgtcgccgccgccgccgccacgtcgcttgcctctgctactgctgctgccgccaccgccattaatgctttgttaatttctctcctggtgtagacaacgcaggttccttcatcacttcactgttgagtatttgcattgggtgtgtatgtatcggattttgctttgcgtgatcacggtatcatatttatttgtcggactcctcgttcatcaggaggttttcgtaatgaataaggaagaaatttccatttc

SEQ ID NO: 33297 - DNA, 2743 bp, Zea mays
  Clone ID: UC-ZMFLMO17089F04_FLI
ctaaaaatgaagcaagaaactgaatttgacccaggccactgccgtggtagtgtggcacataaatgaattttgttacataactgaatttgttaggagcacacatttcagaactggatttttgagttgcacacacatttcttttgtttcagaactgaatttttgaggtgcacaaacatttattttattttagaattgaattttttgttttagaactgaatttttagtgaagagcacacatatttaatagtttcggagcatgacattttaaaactaatacaaaactgaatttattacagttatacatggttgttcagatgtgacagcaatgactaatgggacaaatgtcgagataggtccaaaaggccaagaaccaccatcaattagctctggcaatattagttttgttgttcgtgtattggctaagttattgcagatggcgcttgccttttgcttcagctgatcaagatctagaattcgaattgggccatgtgaagcatttcacatttcacgatctgcaaagtgcaacggacaattttaattccaagaatatattaggtcaaggaggttttggaattgtgtataaaggctgtttgagaaatggaactttagtggcagtgaagagattaaaagatcctgatgttaccggtgaagtccagtttcaaacagaagttgagttgattggccttgctgtgcacaggaatctcttgcgtttgtatgaattttgcatgacctctaaagaacgattgcttgtatatccatatatgctaaatggcagtgttgctgaccgcttgagaggtaactcaatcgtctacaacatttcaatgttaatgaagtctacaattggcattctgtgcaagtcttttgcatttcttgtaaatattttgtttaacattatgtgttttggttggttctttgccacgaccatatactctgcttatatatccttatacatttgtaatatacggggttgcaattttcagattatcgcaatggaaaaccatctcttgattggagtaaacacatgcggattgctcttggcactgccaggggttactctaccttcatgaataattagtgtttttgtatattaatgtatgagtaggatcacaaataaattacgaaacatttttctataatattataacacatttgtacatgagttatcgtggtattttatctttccgttgcaacgcacgggcatccacctagtattacttaagatggtactccctcctttctgttttatttgtcgtgttttagttcaaaaatgaactagccggcgacaaatattcaagaacggaggtagtagtttgaatccttgaactcattttttgttgacattttcctatttatcgcaggaagctatgcattctaaagggtgtctttccacgtcagccaaagaagaaggtggaagggaaccacaagacctactaccacacaaaggatattgcattcctcgctcatgaccctttgatcgagaagttcagggagattaaggtccatcgaaggaaggttaaaaaggctgttgctaagaaaaacagggatcttgcagacaggctgttgaatcggccaccaacttacaagcttgataggcttgtccttgaaaggtatccaacattcgttgatgctcttcgtgacttggatgactgccttacaatggtgcatctgtttgcggcattacctgctgttgacggtgaacgtgttgaggtcaaacgaatccataactgccgcaggtttatcaaatatcctacatggtaaccttcaaacctgcatgtaatctgtggactgcactttgtggtcctcacatagtcacatccaaagttaagccatgaatgcttgacatttatttccgtgaagggcatatattatcaggctgaagttcaaggacaaaagatcacctggctaactccgcatgctcttcagcaagtattaactgatgatgttgatttcaatgtgatgctttcttttctagaattctatgagactcttctaggatttgtgaacttcaaaatctatcattcaataaatgtaaattatcctcctattctggatccacgtctggaagctttagctgttgagctctatgcattgtgccgatacatgtctgctggttccagaagaatgattgggaattcacaaactgacgaagtaatggaagataaggatgagaaaagtaaagctgaggaagtaattgaggaagagaaggttgtgaagaataaagcaagctcaaaagcagatgaatctgagttcagattagcacagcttcaacatcagctcccaaccaatgaacctggtgcactgatgaatcttgtagaagaatcaactgccgatgatgcagatgatgatgatactaaagattgtaaaggtttatttaagaacttaaagttctacttgagtcgagaggtgcctagggagtccctgttatttataattccagcatttggagggactgtttcatgggaaggagaaggagctccatttaaagaaatagacgaagatatcactcaccaggttgattccatttgcaataatttattacaccaaagtttaactatatagacggagacattgtgtaccatccctaaagtaagatgcccctctaagtaccacgacagcaatgccatactagggcaatagttactacaatacaatttttgtatgtggctaactgttcatattttacactctaccatcatatgatcatatctagcgaagtaaaataaaatggcctgtggattttttt

SEQ ID NO: 33298 - DNA, 1067 bp, Zea mays
  Clone ID: UC-ZMFLMO17089F06_FLI
caaagctatcaagccccgcagtcgcgagtaaagaacaacagcaggccaccgctgctataaaaccctccgcctccaccggcggctcgccaaactccgtttcgaattctagggttttgctgctctccgaccccgagctccgaaggccgcagcatcaggcgcggcccccctcgcgtgtgaccgagatggcgctgccgaatcaggggaccgttgattaccccagcttcaagctcgtcatcgtcggcgatggtggaactggtaaaactacatttgtgaagaggcatctcactggagagtttgagaagaaatatgaaccaaccattggtgtggaagttcatccgttggatttcaccactaactgtggtaagatcaggttctactgctgggataccgcagggcaagagaagtttggtggcctcagggatggatactatatccatggccagtgtgcgatcatcatgtttgatgtaacctcaaggcttacttacaagaatgttcctacgtggcatagggacctgtgcagggtctgtgaaaacatccccattgtcctctgcggtaataaggttgatgtgaagaacaggcaggtcaaagccaagcaggttactttccacaggaagaagaatctgcagtactatgaaatttctgccaagagcaactacaactttgagaaacctttcctgtacctcgcaaggaagctggctggtgatccgaaccttcactttgttgaagctgttgctcttaagcctccggaagttaccatcgacatggctatgcagcagcagcatgaagctgagcttgctgcagcagctgcacaacctcttcctgatgacgatgatgatctgattgagtagaaaggatcatgagtcttgaacttgagcaggagttgtgccttgcgtgttttaagttgttctagggtgaactcttgagttctcattgtctggatcatctttttctccttggatgtgttgcatcttttgagtgtggaaatggatggtactcctcgccatgaatttgctggctactttatacattgctttgtaactctgtttgatgataaactttgttgtggc

SEQ ID NO: 33299 - DNA, 1737 bp, Zea mays
  Clone ID: UC-ZMFLMO17089H06_FLI
gtgctttggagaatgagatgcttctgaggattaagcagcaaggccttgatatcactccgaagatcctcattgttaccaggctgttgcctgatgctgctgggactacgtgcggtcagcggctggagaaggtcattggtactgagcacacagacatcattcgcgttcccttcagaaatgagaatggtatcctccgcaagtggatctctcgttttgatgtctggccatacctggagacatacactgaggatgtttccagtgaaataatgaaagaaatgcaggccaagcctgaccttatcattggcaactacagcgatggcaacctagtcgctactctgctcgcgcacaagttgggagtcactcagtgtaccatcgctcatgccttggagaaaaccaaataccccaactcggacatatacttggacaaattcgacagccagtaccacttctcttgccagttcacagctgaccttattgccatgaaccacactgatttcatcatcaccagcacattccaagaaatcgcgggaagcaaggacaccgtggggcagtacgagtcccacatcgcgttcactcttcctgggctctaccgtgtcgtccatggcatcgatgttttcgatcccaagttcaacattgtctcccctggagcagacatgagtgtttactacccgtatacggaaaccgacaagagactcactgccttccatcctgaaatcgaggagctcatctacagcgacgtcgagaactccgagcacaagttcgtgctgaaggacaagaagaagccgatcatcttctcgatggcgcgtctcgaccgcgtgaagaacatgacaggcctggtcgagatgtacggcaagaacgcgcgcctgagggagctggcgaacctcgtgatcgttgccggtgaccacggcaaggagtccaaggacagggaggagcaggcggagttcaagaagatgtacagcctcatcgacgagtacaagttgaagggccatatccggtggatctcggcgcagatgaaccgcgtccgcaacggggagctgtaccgctacatttgcgatacgaagggcgcattcgtgcagcctgcgttctacgaagcgttcggcctgactgtgatcgagtccatgacgtgcggtctgccaacgatcgcgacctgccatggtggccctgctgagatcatcgtggacggggtatctggcctgcacattgacccttaccacagcgacaaggccgcggatatcctggtcaacttctttgacaaatgcaaggcagatccgagctactgggacaagatctcacagggcggcctgcagagaatctatgagaagtacacctggaagctctactccgagaggctgatgaccctgaccggcgtgtacgggttctggaagtacgtgagcaacctggagaggcgcgagacccgccgctacatcgagatgttctacgccctgaagtaccgtagcctggcaagccaggttccgctgtccttcgattagtacggggaaagaagaagaagaagaagcccaggccggagaaccatcgcctgcatttcgatctgtttcaccgcaattcgcattgttagtcgtgtattggagttatgtgtacttggtttccaagaactttggttccttctctttttttttttccttgtttgagcgtttttgggcagcgctggcctggttcctagtatggtgggaattggctgcaccttttgcttcgaataaaaatgcctgctcgttcacctgt

SEQ ID NO: 33300 - DNA, 1293 bp, Zea mays
  Clone ID: UC-ZMFLMO17090B02_FLI
cactaggaagtagcaggggaatatttgagttgcggtttactgctaatctgctactcgttctctttgctatcttttgattcgctatgtagttcgccctactgtgcgtgtgtggaactaagcgattggtgcgaattgtcccaataattttccattttctgattggcctccgcaagcttgctaaggacaagcggaagcaccgattcatacccccaaacccagactcggcgtgtcactctttacttaaggactaatgtttcggtcaaggcggctgagaaatacagctgccgagtcctctgcaaaactgacaatttttcaagcaccagcattcatcacacgcacgcacgctctctgcacctgaaactgccgggtgtttttcctggctggcgacatgtctgtcactccactcacacccactgcgggtatgcgctgaacctgagctcctcggcgcgggacacagagggcattgagcccaagtaccgcaagtagatcaggaagggcatcatcgccttcgtcgcggtcgacgagagccggttcacgctggcccacgagctcacctgcacgccctacttccgctccgcccgctcctggggcctcctcaggaggcggtcgcgcctgctctgccgaaagtgcgggggcacatcggcagcgcctacggggaggaggaggatgccagggacgccggctcctccagcctcttcggcggtgacggctcctcggacgacacgcgcccgagctccggcttgggccgccgcagcagcgtcgcgtcgagccagaagaggtacgtggtcaggatcagcacgctgcagctgtcgttggatgactgctgtcgttcccttcacgcaacgttgaagcaggtgtcgagttggtgtgccgtgttcttcttccagcctggatgaatttgaatttggtgtaacctgggatggcgatagactgcaggaggacgaagtggagcaagggaagatctttcttggcatgtctagacttttcagaggtttgatcagctgcatgctgcttttagtcatcttgctgttcgtaatgcctctatgtttcctctgtacattggtaagtatagagcaacatggcttttgaaattttggttggtgtcgggaaaatgattaaaggttttctgtattttgattggttctatagcgtttgtattatgtcatagaattgaaattttgattagtcttgtactcttgtctcgcttgcatgtgtggatgatttagcttcctagctctcttactttcttggaaaaacatttttctggtactgtgatatcagtatttgaatttt

SEQ ID NO: 33301 - DNA, 1909 bp, Zea mays
  Clone ID: UC-ZMFLMO17091A08_FLI
ctagagttgaaacctaacaagaagtcaccagagagagagagagagagagagaaaggggagggggaaaagctttcgagagcgctaaaagggaaaatgcctaatcacggttcgagcacgtggatagtttctttccaagcacttctatccaaacacaactccattgggatatttcatttcttcaagtcccttttgattgtctccttccatgtcaagtttggccgtcctctacctctcttcacattattgtcccatcttatgatgcctctgggggtcttcggtggacatgcccaaacaatctcaatcggtgttgaataagcttttcttctactcctagccgatcgcatatgtcatcgtttctcacttggtccaatcttgtgtgtccacatatccaacgcaacatacgcatctctgcgccacttagttgttggatatgtcgtctcttagtaggccaacactcagccccatataacatagcagacctaattgttgtcctatagaacttgtctttcaacttctgtggcactctcttgtcgcataggactcccgatgcttgacgccattttatccaccctgctttgatcctatgactaacatcttgatcaatatcaccgtctctttgtagcatcgatcccaaatacctggcctcccaagcttacatatccatcctcactaattgtagtaccaaagtcacatctcatatacttggttttagtcctgctaattctaaatccttttgactctagggtctgacgtcataattctacctttctatttactccttcccgactttcatctactagaactacatcgtcagcgaaaagcatacaccaagggatatctccttgtatatccctcgtgacctcatctatcactaaggcaaatagataaggactcagagttgaaccttaatgtagtcctatgttaatcaggaaaacatttgtatcaccatcagttgtttggacgctaatcacaaccttttcatacatgttcttgatgggcgtaacatactttgttgggattttatgcttatccaatgcccaccacatgagattcctaggtattttatcataggccttttccaagtcgataaaaaccatgtgcaagtcattctgctccttttgtccataagttaagggagtattacttcagatttgaacatattcgaaaaattgctgtaaaattgaatcagttcagtccaattgtagtgttaattgtcttaggacaccaatgaattagattgtgcaactggttccaggctatagaagagttcaagaaagggaaggttgaatacagagttgataaatcaggaattgtccatattccctttggcaaggttgactttccagaggaagatctcattgcaaacttcatgtctgttgttgtaagatctatgttcctacaaaacatctgtttctgttcatcatattatcgaggatagtgttgatatacttcttgctattcattcacagcgctctgttgagaggaacaagccatctggtgctaaggggatatactggaaaacggcgtacttgtgctcatccatgggaccttctatcaagctaaacataaaagaaatgcttgactatggtttggagtcatctgactagatgtgaccacaggcaccagttaagtcagctggcatcgttatcaccttcacagattaactatctgccccttgcgacaaatgagcagaaacatggttggtgtatggcaagcaggtgcttaggtacagttttctcagttttacgggcacatcatgagagcagctaaagtcacccaaattgacaaagagatggtttgttggtcatgtatttatgagaaaattatgcatggtttcatagatgtctgtctctgagacgtttgttgtaatgttccatattttgtcaatagtcgtccttgagcttaagcc

SEQ ID NO: 33302 - DNA, 1260 bp, Zea mays
  Clone ID: UC-ZMFLMO17091B02_FLI
ctaggcccttgctcgaccgctcggccgtccatctctctcctgctcggccgcgcactggaccttgctccagctcgccgaccggagcttcgctcgtccccatggcgactgctcgcggtctgcgcactcggcgtccatctccagccagcgctctctccaaccaaggtcttcttcccgtgcgcgctatcctgcgcacgcaccgtgacctgctcggtccttccccatggcacgccccttgattctccctcccatggcgagctccaccttcccttgctgccgtgcctctctgctggtcggagcttcagcttgccgcgcccgtggccgaggcttcctccctacgcgcgcaccagctccctatgtcgcgttccattcgcctaaaccggagttcgcccgccgtccatgcttgccggtgtgctgctgctctagttcggatctcgcccaagttgctgccatggttgaccggtgtttggcccgcgccgattcgcgttcgctcatatcgccatcgtcgtgttgtcgctggtgatagctttgcgtgcgcgtcaaactcccgcgtcgagtctttttcctgctcgccagcgcgtcctctcggctcgcttggccttaatccccatcgcgtcgtcgacctcgtcggttatcatcgttcgtcgtcgcgtcgtgtgtgcagctctatatacgtcaccctcctgtatcgtcgtcgaacccgtcatcccctgttcgacccccacctcaccagctcgctccaaacacgatctcgtcgtcgtttcgtgtgtcgtcaagaaatcccaagcgtcgggtgaagacggaaccagcagcgtggtattcatcgagtgcgtgacaaaaagttcgtgtgacacctgccaagcgctcgccaaattgttggaatcggaaaatcattaccgatctcgcggattcaagtcatatattagaacggtacgttaaataatcacgtgatgcgaaggaccaaagctgagtcgaccccaagatgctgttaagcgtgggcttcttcgcaaggcgatgctgatggacaaacctgaagatggtcatcaagtgctcatcgactaacaacactaacctagtgttacccaggttttagttttgtgctgctgatgatggtgttaagtgccggtgggctcgaccttcttataagtctaagtaacccttctatacttcttattgaggatgatcacttgagctagcatatatttcaaacttatacttttgtaatcactccgataaaataatgtaattttttttataacctgt

SEQ ID NO: 33303 - DNA, 2339 bp, Zea mays
  Clone ID: UC-ZMFLMO17092A06_FLI
gaattcctgagatggtccagcatgtttgccagtctcaattttggttcaatatggttgaagcaatgagagatcagcattctattgaaaggttgacagaagagctgttgcgtcaacttgcgtcacaacatataagcgatgaagaggcttattggattctgtggaccctctttaatcagagcttcaagcgtttaactgtcatgaggacgatgtttgttgacaaatttttgctctggaaaacatttcctttatgctgcctgagatggattcttcactatgctgtctttgaatgtccaccaaattcaaccacagaaattctgatgcaaaggacaccaaacttttttggtatattgcaaagtttggttagtatttggtccaagaaagagtttattcagtcatattcagtggagcaacaagcttatatcactgcagcaattggattatgtttggaaaagctaacaaaaaaagaattagaaacaactaaagatgtattgaattctattcttcaaggagtaagctgcaggttagagagcccaattgatttattacggaagatggctagtgctgttgcattgacattctctaaagttgttgatccgaaaaatcctctgtaccttgatgacaactgttgtgaatatgttgattgggactttggggttctatctccaaaggagtttaaagctcctttagatgctgtagaaactaaaactaaaccaaaaacacgtgagaacaagaaaaaagcaggtgagaagaagacaaaagcaataaaacgtgatattccagacgtcagagcgaaaatcgtagagatcaattctatagatcatgatcaaatgcctgatactgctacgaatgggcagtttgaggaggaagaatgtgatgaagaagacatgaacatggatgcatacagtgattcatccctcgagccatatgatctatcagacgatgacacagatttgcaaaaaaaaattagccacctgagtgatcttgcagcagcactaagaaaacctgatgatccagatggtgtcgaaaatgctcttaattatgcggaaaagcttgtgagagcatcacctgatgaattacgctacaactctggtgaccttgttagagcactggtgcatgttcgttgttctgacgtggcaatggaaggagaggaagattctgctgaagaaaagagacagaaggcattggtttccttgctggtaacctgcccatttgaatctctagatgttctgacaaaattgctatattcatctagtgtggatattggtcagcgcattttgattattgatgttatgactgaggcggcacaggagcttgctgaaactaaaactgtgaagacagaacagcgacgtggtaacttgataactgacacttctccttcttggctggttccgagtaatataggacctcctggggcaggcccttggagagaggtatctgaaccaggcacgcttctaagttggtcacaccgttatgaaagagaggttccatctaaatcgggtcaattgaaatcaggaaaatctcgtaaatggggtcttggaaaagcgaaagacttgcaggttgagtggtctaaaaatagatttcctttgtatgccgctgcttttatgctccctgtgatgcaaggatatgataaaaggtcacatggtgttgacttgcttaatcgggactttgttgtcctcggtaaattgatatacatgctcggtgtctgtatgaagtctatggccatgcacccagaagcatcagctctagctcctgctctccttgacatgataagatctagagatgtttcacgacatgctgaagcatatgtcagaaggtccgcgttgtttgcagcgtcttgcatattgatatctttgcatccgtcatatgtggcgtcatctcttattgaaggcaaccaggacatttctactggattagagtggatacgcacatgggctcttcaaattgctgaagctgatcctgatacagaatgctcatcgatggccatgacctgcctgcggctccattctgagatggctcttcagacatcgcgcgcactggaatctgcaaatcactccaagactggcagagccataccttctaagctcgacagcattattctgccattcggcaacatgatgtggtaggtaaactatatataagttgtgcagggatgtgtcctgctgttgtacagaacttacgtagcaaattctggttatttagaaggtggaccgtcaagttgtaccagctggtttacgtgctggtcctgtggttgtctgaaaggtgagagtgagagatcggaactctacatttttacggtgttattttgtttccagtccagtttaaatgagcagccccaccgt

SEQ ID NO: 33304 - DNA, 993 bp, Zea mays
  Clone ID: UC-ZMFLMO17092A12_FLI
cgtcggcctcggaatcggggcaacaccgttcataagcattctacgggatctgcttaataacattaagatagctgacgagctgatggacttggcaatggagaccagcaggtctgaagacagcgccaacagctttagcgtctcaacggcgagtagcaaccggaagagagcatacagaacaagccgtgcacatttctactgggtcacccgagaagccggatcctttgaatggttcaaaggggtgatgaatgaggttgcagaaatggacaagaagggtgtcatagagctgcacaattacctcactagcgtttacgaggaacgcgacgcacggacaactctgctgtccatggtccaggctctgaaccacgccaagcacggcgtcgatatcgtatcggggaccagggtgaggacacatttcgccagacccaactggaaggaagtcttcaccaggatcgcctccaagcatccgaattcaacagttggtgtgttctactgcggcgcacctacgcttgccaaggagctgaaggctctggcgcacgagatgagccacaggacgggcactcgcttccatttccacaaggagtacttctgagtttcgacagatagaatgggcagtcgatgctcgttctaacgtgatctggtcttttctgatctgatctgatctcgatagcgttaggtaccggtaaagaagacagaattttgcacagatgcaagacaaaccaagctgacctctcctcctgatctggaactgtacatagcataaaagaagcaccacagggttagcttagtatacgtagcacaattcaaataaatatattgacaaagaaaagaaagagagaaagggcaggatagaggctgttgttgttaactcgaagatattgatgataggcatggcggtatacgtgtatacagtatagttaggtgataggtatagttatatatatatgatatatgggtcgatgaatatacgaggagccacatgctgctgccattctc

SEQ ID NO: 33305 - DNA, 987 bp, Zea mays
  Clone ID: UC-ZMFLMO17092B01_FLI
ccgaattccctgcgattcctctcccctcgcctcctcgtctccccctaggggatcgtcggagaggaatcgcaaagagggccgtctcatccgagttaaggaagccatggagcacaaggaggctgggtgccaggcccccgagggacccatcctctgcatcaataactgtggcttcttcggcagcgcggcgaccatgaacatgtgctccaagtgccacaaggagatgataacgaagcaggatcaggccaagctggctgcctcctctatcgacagcatcgtgaacggcagcgacgccgtcatggagccggttgttgctggcagcaacacggtagtagctgttgcccaagttgagttgcaaacaatgaacgtgcagcagcccgctgatgttgccggacccagcgagggggtggcggcgatctccaaaggggggaaggtagggccgaaccggtgcagcgcctgcaggaagagggttggacttacgggattcaactgccggtgtgggaacttgtactgcgcactccaccgctactccgacaagcacgactgcaagttcgactaccggactgctgccagggacgccattgccaaggctaatccggtggtgaaggcagacaagctcgacaagatctagggggggttccctacggttgggtatcaggaagattgtaaaccgcggtaactcgtcatgcggaactgctgccttgccccccgcgcctttctcttccatgtttgctgctacaatcttgttgttgggcattgcagtgcacggtgcacacttgtgtagcccgcctcgagaattcctgcctctgcatctggtcagttctaaaatgatttgcatgttggctatgttgtgtaagctctatttatggtggtctcgctgagacgggtatttggcttcgcagttatctagctatgtgatgtactgttgtcttgtccctgggtattatatggtacactgcagccagtaatagtaatctgcaactgtgcgtt

SEQ ID NO: 33306 - DNA, 1360 bp, Zea mays
  Clone ID: UC-ZMFLMO17092B06_FLI
acgagagccagctctcccagcacacgagcacatggcgtccaccaccctcctcgctgtcttgctgctcgtggctgcgtccgcagcgccggcgcggtcttgctcacctcgcgacctgcaggcgctgttgagcgtgaagcaggcgctagggaacccgtcaacgctgtcgacgtggaccccagcgtcgcccgactgctgctcgtgggaccacctccggtgtaacgacgccggacgcgtgaacaacgtgttcatcgacggcgcggacgacgtgcgcgggcaaatcccgtcggcggtgggcgggctgacggagctcatgtcgctgaccctgttccggctggcggggctgacgggccccatcccggcctgcctggccgcgctgtccaacctgcagttcctgaccgtctcccacaccaacgtgtccggcgccatcccggagtccctggcgcggctgcgcggcctcgactcggtggacctctccagcaaccagctgacgggcggcatcccggcgtcgttcgccgacctgcccagcctccggtcgctggacctcgggcacaaccagctgacgggcagcatcccggcggggctggtgcaggggcagttccggtcgctggtcctgtcgtacaaccagctgacgggcccgatcccgcgcgacgacgcgcgcgacgagatcaacaccgtggacctctcccacaacaagctgacgggcgacccctcccacctgttcgccgccggccggcccatcggcaaggtggacctgtcgtggaactacctcgacttcgacctgagccagctggtgttcccgccggagatgacgtacctggacctgtcccacaacctcatccggggcaccgtgccgctgtcgctggagcggctgtccacgctgcagaagctggacctgagctacaaccgcctgtgcggcccgctccccaagggacacggcgtcatcaagcacgggtgcaagccgtacgcgcacaaccagtgccgcaaagggaccccgctcgcgggctgccaggacctggagtggagtgagtgagccggccggtatggttttctatactctgctctgctctccctcgccggcgtgcttcccgatcgtggtgtgtgtaaggaactaaggacgacggtgcctggtttaggcgtttagctatagacgaaagcacgtacggccgcgtgcctggtctagctacgcggccggttgatcttgagcagttaagcgtgtacgaaacgacagcgctgtgtacgtgtactgtctgctgaagtgtgagatgtactgtctgtgtgtatttggtatggatccgatcggcctgatgtatgaaaaggatgtttacgtactatataaagatggaaaatcgtatttgcctcc

SEQ ID NO: 33307 - DNA, 2095 bp, Zea mays
  Clone ID: UC-ZMFLMO17092B09_FLI
ggattcttttaatccttcggcatgcaggattgtctactcaaataaggtgataaatactaaagtatgcttgcacaacggcttcaggtacacctgccccctacacgcgtgctagggtgaaaaggcgtgcacataatgtcgaatgtcgtgctcacatttaatgcgagccatgcagtagttatctcttcgcaaagcgaccaccataccgaataccagggtaagtatgataacctatgacatcggcttctatgacctgggcttgttggcctcgagtgatttgtcggcatagtccctgatagtttattgtatttcttggtacaccatgcatgcgcttgtgtggttttaggactggcgtgtgcaccatgtagcggccttgagtgccctgcggtctatgttgcatgtctgcacattgagtcagtcccataatatttctcctcgtgcatttaatgtgttgtacctgagacttaaccatcgtccatttcgtccaccatgctttgattctatggctaacatcttcatcaatattcccgtgttgttgtagcattaatcctaaatatcaaaatgtatccatcccgagcactacttgatcttccaaaataacatctccttcctcgtgtgtagtagtgtcgaagacacatctcatattcggttttagttctattgagtctaaaacccttggattctagagtcttcttccacaactatagttctctatttactcgtgtctagctttcatgaccaacgccaaaaatagggggcgcggtcacccacaggctgagtcgatcaagatgtgatcggccagatcaagatgtgatcgaccaagtagagtttgttgagagtttttagcaaataggtaaagataaaattgttagcaaataagataagcagagtttttaggaaagtttgttagatcaaggactatataagccacatggcgcaagtaatggaattaagcagtaattcatctatctcttattcctcttctctaccaggaacataggtagctgaggggaaaacctcgctccgcctctaccagcggctacgccctgcgcggcttgggcgcgccgccaccgctaccagccctaggcacccagccacaccataatagttctattgagtttaaaacccttggattctagagtcttcttccacaactatagttttctgtttatttgtgtctagctttcataaactagcactacatcaattatgaataccatacttactattaaatagtggaaattgacatgtgttgaacatgaaattgttttgccatttttgtttttttggagccccataactgtagctaagtcttgtatgaattggtcatttgtctagtgactaactaactatagtatataatatctctacatatacatttttccccgaaagggtggcaagagcattgccacatattttattacaagagactctgcatagaattaccatttgctttgtttgaaaaaggttgtattttatttattgtctggtgtctttccttaaaaaacgaattggtatcttaataatgaatgtaggtctattttgttcttcatctaacaatatgactgttccgaactgtagccatcttcataatttctattctgatgttgcgtttttcataacgtctcaggttgggaccgtgacagcaatttgtgttacctgctttctgataagatgtgttgtggtcgcgctatctgcatttgatgctgatgtatctctcgaggttttggaccatccagtcctggatttcttctattatatgtttgcggagatactcccttctgcgctggttctcttcgtccttcggaagcttcctcccaagcgggtatcggcgcaataccaccctattaactagggagttctttgtttttatgatgttacatgctaagaactccggataagctggaactgctgaaaacctacatccggttgtattgctgtaatattttatggaagcatcccagggttggcaagatgcatcatcaccatcatgctctatgagaaaagagttttgagtggtgctaatgagtttgtgctactgctagccagagcatcacatgacatctccagcagagtaccataccattatttgaattgc

SEQ ID NO: 33308 - DNA, 1774 bp, Zea mays
  Clone ID: UC-ZMFLMO17092B12_FLI
agtccagtcccgtcccgtcccgtccgactgctcaccaccctccggcgcgccagtcccgtccccgtcccactcattccattccattgcacaaagccctgacccctgatcggcagcggcggcggcggcggcggagatcgacagaggcggcgcgcgcaggatgccgtaggcggcggtgccggtgaccatcgtgcggtgcggctgcccgtgctagctctctcccaccacgtcatatcccgtgcgtgacctcgcgccgctccggctgcggggcgatcccgcgcgacgaggtcgacgcccgcttggcaccccggcgatccccaccggtctctgagggggctgaggaccgcatgcgttttgggtctccgacgcaccaacaattcaggccgaacacttccgccagcagcttctaaagcccgcgacttagattctgccttcatcacccaaacccaaactaaccgaaacaattttgttttcgaccacaaaaaatagcaatctctcgaatttctccatttctttccgacgaccaagaggcgggaaacctcacaaaggccagaaaccaagcaacacttcacgatgcagggagatcccgggtacggctacggtagctacgggtacgggtacggctacggttacggagccggcgccgccggctacgactacgacatggccggctacggcagcggcggagccgcctactactcggcgaccgaccggtatcccgccgcgacggcagctgcctatgaggacccgctcgtcgctggtcagaggcagcacgacgtgcccgcgccgctcacggggctggagttccaggcgtccgacacgtgccccaagaactacgtcatcttcgaccatacgtacgaccggagccgggtcatgttccacccgtccctggccaacaacttcgcctcctcccccgccgccggcggcggcggcgggtacgactacgaccgccagtgctacggcggctacgaccagaactacgccggcaagagcgcctactacgtctgcgccgccgccgccgccgacgacgacggcggcggggcctcgatacggcagaaggaggacaccgacgagatcgacgccctcatgagcacggaggacggcgaggacgacgacgacgacgacgtcctcagcacaggccgcacgcccgggtgccgtgccgccggctcccccgactctacgtgctcgtccgggtacgctgccgccggcgccggtggcggcgagaagaagaaggaacggatgaaaaagatggtgcggacgctcaaggggatcatccccggtgtcgaccggatggacacgccggccgtccttgacgaggccgtgaggtacctcaagtctctcaaggtggaggtcaagaagctcggcgcgcgcgggtcaagcagctagctaagcgcgctggcctcgtcggtatgcggcggcgaccatgataatgtaatggcagtcgaaatccctctcttctttctcggcatcggcagctacgacaagccagtcggtgaacaatacatgcggtgatgacgacaagggacagcttctcatcttggcctcagatgcacgtgctctgtttgcaccgacaggatcaggacatggcttcggagagagctcggttgcagggcgctcggcaatcttttgtggtggctctgccacctctagcgttcgtgcgtgcatggattgttacatttcttccttcgtatctctttcgtatctcttgatacctcgtggctggtgttgtaactatcatgctgatgatatatatatacacacaccgtgttcttttgtt

SEQ ID NO: 33309 - DNA, 1453 bp, Zea mays
  Clone ID: UC-ZMFLMO17092C04_FLI
gcaaggtcggtcggaagggtgtggttaccctcgaagaagggaggagttctgaaaactttctctatgttgtggaggggatgcaatttgatcgtggttatatctctccgtactttgtaacagacagtgagaaaatgtctgccgagtatgagaactgcaagctactttggttgacaaaaagatcaccaacgcaagggatcttatcaatgttttggaagaagccatcagaggtggatacccaatcctgataattgctgaggatattgagcaggaggctcttgctacccttgttgtcaacaagctcagaggatcattgaagattgctgccatcaaagcccctggttttggagagcgcaagactcagtacttggatgatattgccatccttactggaggtcagttaaacttccgttctagagcatccttatgatcatgtatgctccttgtttataagcattctttgtttctgcagcaactgtaatcagagatgaagttgggctgtcacttgacaaggctgacaaatcagtccttggaacagcagcaaaggttgtccttactaaagagtcgacaacaattgttggtgatggcagcacccaggacgaagttactaagagggttgcacagattaaaaatctcattgaggcagcagaacaagaatatgaaaaggaaaagctcaatgagaggatagcaaagcttgctggtggtgttgctgtcattcaggtgggagcacaaacagaaactgaactaaaagagaagaagttaagagttgaggatgccctaaatgcaaccaaggctgctgttgaggaaggtattgttgttggtggaggatgcacccttttgcggcttgcagctaaagtcgatgccatcaaggatacactggagaacgatgagcagaaggttggagctgaaatagtaaggagggccctgagctacccacttaaattgattgctaaaaatgccggtgtcaatggcagcgtcgtcactgagaaggtcctttctaacgataacttcaagtatggttacaatgctgctactggacagtacgaggacttgatggctgctggtatcattgatcctacgaaggtggtgagatgctgtttggagcatgccgcgtcggtggccaagaccttcctgacatctgatgttgtggtcgtcgatattaaggagccagagtctgcgccccttgctaacccgatggacaactctggctatggatactaatggagatgagatggccaagccgcatgggaagaagggtgatcaccattttttttttggtaggcgagaagagtcgggtcgaggtagtttttcatcatcagataaaaaaagcgagtttgttgtacgaccattaggcgaaaaataagtgggaggggctgtgtagcccaaatttgtgatgtaaactggagacagacagcagctaaaaacaagcagaaattgctgagtgattttgtaactg

SEQ ID NO: 33310 - DNA, 1583 bp, Zea mays
  Clone ID: UC-ZMFLMO17092C05_FLI
ggcgatctggtggaactcgaggcattggacttgtccagtaatacattgagcggatctgttccacattctcttgataagttgtccaaacttacatcattcaatgtttccatgaacttcctgacaggagccataccatcttctggttcacttgtcaatttcaatgagacatcctttgttggcaaccttggtttatgtgggaagcagataaacttggtgtgcaaagatgcacttcaatcaccatcaaatggtctgcagtcaccttcaccagatgacatgattaataaaaggaatgggaagaattcgaccagacttgttataagtgcagtggcaacagtgggagctctcctattggtggctttaatgtgtttctggggttgctttctttacaaaaattttggaaaaaaagatatgcgtggtttcagagtggagctctgtggaggctcttctgtcgtgatgttccatggggacctcccttactcctcaaaagacatcctcaagaagctagagactatagatgaagaaaatatcattggagcaggaggcttcggaactgtttataaacttgcaatggatgatggcaatgtctttgctttgaaaaggatagtgaaaacaaatgaagggctagatcggttctttgatagagaacttgagatattgggaagtgttaaacatcgctatttggtcaatctccgtggttattgcaactccccttcatcaaaacttttgatatatgattatcttcaaggtggaagcctggatgaagtgcttcatgaaaaatctgaacagttggattgggatgcacgtattaacattatacttggagctgcaaaaggcttgtcttacttgcaccatgactgttcgcctcgaataatacatcgtgatatcaagtcgagcaacatcttgcttgatggcagtttcgaggcccgtgtatcagactttggacttgcaaagcttttagaggatgaagaatcacatattactacaatagttgcaggaacatttggctaccttgcaccagagtatatgcaatttggcagagccaccgagaagactgatgtctacagttttggggttttggtactcgaaatactcagtggaaagcggcctactgatgcatccttcattgagaagggactaaacattgttggatggttaaattttctggctagtgagaaccgggagagggaaattgtcgacctgaactgtgaaggagtgcagactgagaccttagatgctctgctctctcttgccaagcaatgtgttagctcctcgccagaggagaggccgacaatgcacagggtggtacagatgctggagtcggatgtaattacaccgtgccctagcgacttctatgattcagagtagtctcctggacaagccacgctgctgctagtttcccgtgggggcgcattcctttattctttgcgtatattgtgtaaatgcattgccgcggtgtttggtctccaatcggctggctcaacgggtgactcttttttgcgtctgtatacctatgtatgtatctgtcatgctacaagttggctatatgctgatttaataataagagagaactagaacttactagt

SEQ ID NO: 33311 - DNA, 1228 bp, Zea mays
  Clone ID: UC-ZMFLMO17092C10_FLI
caaactcgcccccagttccaccacttcccaccgccgcaggtcggcggcctgccaatcctggagaacctgatgccgatgggccatctagaccagttcctcgccgacccaggcttcgccgagcgcgcggcgcggctgtccggcttcgacggccgccccggtggaagtggctatggaggcgtcggcgtcccgggacagtttggcatcccggacgccggccccatcggcgcattgaaggagctggagctcgggaacggccgggacgagtcgtcggtgtccgatccggcgtccggcagcgcggagatggcgctcaacaaggggccttccgacggcaatgcgaagaaacggaaggctagcgggaagggcaaaggcaaggacggccccgggtccgccgccgccggcgccgccaaggaggagtcgagtgggaagcggtgccgatcggcggacgagagcagtggcgcggaggacaacaaccccaccaccaagggcaaggccgcgcagagcagtagcgagaatggtggtggcaggaagcagcaggggaaggagagcgcgacgaagccccccgccgaggcgcccaaggactacatccatgtccgggcgcggcgcggcgaggcgacggacagccacagcctcgcggagagggtgagaagggagaagatcagccagcggatgaagctgctgcaggatctcgtgccgggttgcaacaaggggaaatgtttctcgtttcaggtggtgggcaaggcagtgatgctggacgaaatcataaactacgtgcagtccctgcaacggcaagtcgagttcctgtccatgaaactggccaccgtgaacccgcagctggacttcaacagcctgcccaacctcctcctccctaaagacatacaccagccctgtgggccgccgcatttcccgctggagacctcaggcgctccgctgccgtacctgagccagcctcaccatgggagccctctaggctgctgcatggacacccaggggggctctatgcacccgctcgacgcggcgttctgccggccgatgaaccctcagcatcctttcctcaacggtgctagcgacgcggcgtctcaggtcgggactttctggcaagacgaccttcaaagcgtggttcacatggacatcggccaaagccaggagatcgctcccacctcttccaacagctacaacggttcattgcagacagtccacatgaaaatggagctttgaggcatggccgggg

SEQ ID NO: 33312 - DNA, 1033 bp, Zea mays
  Clone ID: UC-ZMFLMO17092D01_FLI
acatagccgcacaaagggaaggagaccctcgccaacctcgaagctagtccaaactagtgggaggttgagtgcagggatcgatcgaggaagacgagacaagcttcttcttctgctgccgccgccgccagctctagctcaccacgagttactagccaatctgacaccgaccgtccatggcgcggggcaaggtgcaacttcggcgcgtcgagaacccggtgcaccggcaggtgacattctgcaagcgccgcgcggggctgctcaagaaggcccgggagctctccgtcctctgcgacgccagcgtcggcatcatcgtcttctccgcgcacggcaagctctacgacctcgccaccaccgggaccatggaggagctgatcgagaggtacaaggctgccagcgccggagaagcgacgaccgacggctgcggcaggcacaacaggatggaccccaaacatgaaaccacggtgctgcaacaggaaatcaacctgcttcagaagggactgaggtacatctacgggaacagggcgaacgagcacatgaatgttgacgaactgaacgccctagagaggtacttggagatatggatgtacaacacccgctctgcaaagatgcagataatggctcaagagatccaagcactgaaaagcaaggaaggcatgttgaaagctgccaacgagattctccaggaaaagatagtagagcagagtagtttgcttgacgtaggcatggtggtagcggaccagcagaatgggcgttttagcacagtcccactggtagaagaggtgatcagtagtaacccactgactatactgagtggctattctagctgtaggggttcagagatgggctactccttctgttgattactactagtgtgtaatacatacagtcaataatgtctgtgtaatgggttggttgttctgctgctttggtgtatcatattcgtatcatgtaggccttagataagcccttcaggagtgcccctggtattgtgtcgtcgtgccttttacttttccagaatgaagaaatattgtct

SEQ ID NO: 33313 - DNA, 1589 bp, Zea mays
  Clone ID: UC-ZMFLMO17092D04_FLI
gattctttcttccgcgcgccctctctctctctctctctcctgccttctgcctgcggccggcccatgtccgtggcgcccctcctgccctgcgagctgcttctccagcgaaaaggctgctgcgccttgacgcagcaccgatccaccgccgcccaacccttgcgttctgtccggcagctaggtagcgagctgcgcggtggctgcgaccggaagcagggaggggaacagggcagcgaacgccgggcgattgccttgcttgcctgtgtgctccgcccggcgcgagttggtcggtcgttccatgcatggatgacaaggaacttatctcacagtccgacctgcagtcattctaccagcagcagcagcagcaccaccgggccttcggcggcggcggcgggcagcatagcccgtcctcgctggccgggatgcactccgtcattcgccccatgcccaacatgaacatgagcccgtcggcgatccttaactctatcggcgggggctccttcaccggtatgcagttccaaatggacccgccgccgccaccattgctgcacaccgccgccatgggtgcctcggctcctacctccacccccggtgccgtccccgcgaaccccacggagccggtcaagcgcaagagagggagaccgcgcaaatacggtcccgacggcaccatgaagcagcagcagctcgtcgccgcgcagccaaggatagggccgtctggtcccagcatgatcagcagcgccgggatagaggactcttcgcagaagaagcggcgcggccggccgccgggcaccgccaagaagcatcagccctcgccctctcaaggcaatgcgttcgccggttcagctggaacgagcttcactccgcacatcatcacggcgtctccttcagaggacgtggcggcgaagatcgtcgcgttcgccacccagtcgtcaagggcggtgtgcgtgctctcggcgatgggctccgtctccagggccgtcctccgccacccggccgacggctctcccatggcgagggttcacgcgtcgccgcagccgtacaacaacaaccctgccatctacgaggggttctacgagatcatgagcctaaccggctcgtacaacctggccgagggctcacaacaagaacagggccagggccagccgagcggcgggctcagcgtcacgctctgcagccctgagaggaatgtgatcggaggtgttttgggcggcccactggttgctgcaggcaccgtgcaggtggtactggggagttttcaccaaggagggtcgagatccaagtccaagaaaggcgggaagcagcagcaggcgccggcgccggccgccttcagttccgactcgctcaccggcggccaggaggcgtcgcccagctctgggcacaaccaaaatctaacgccgccgccgccgccgccctccgtgacgggagggtggcccacctccgggatgtttgacaccagcattgatatcaactcatctagaggatagctcatttcatttgtcgataattccagccctcgagaaattttctgttctcgcacaagaatgatcgaaaccatacttcgaaatagattattcggtttctcccttttccct

SEQ ID NO: 33314 - DNA, 2975 bp, Zea mays
  Clone ID: UC-ZMFLMO17092E07_FLI
atgagttttttgttctacagctatgccctatgctaaattcactaacaacatgagacacttctaatcgtctcttgttcctggtataccaccttatgtaaatgctatctgttttaaagttttctccctgcactgtcttgtaaaagtgtatgttgagtctgtttgctagtaaaattacaatatttcaggcatggggtcgttcacaaccccttcccacaagcagagcattttggccagtctgttgcatatgtagcagtgaatggtgctctggctggtcttatttgttttgaggataagctcaggggagattctcgtcaagttattgacacactatctaagcaaggaattagtgtatatatgttatctggggacaaggaaagtgctgctatgaatgtggcttcagttgtcggtatccaggcagataaggtaatatcaaccgaatcttgttgtgttttgttcttgtaaatgacttaattctctatagtaaaatgtggctaggcccgactaacttggtctattgatacaacacccaaccctgagttaggattagggtttcccggggtgagactataattacaagggactaacccccaaaccctaacgggtactctaacatttggcactcaagtagccagaatgaacatgttatgggttgattgctgtctgttgctgttagctgcaccaattacatgacgcgtagtgatcttggagatgcactgcagataatggttctattagtttcagaaacactgcagaaatttctgtggctattgttttgaattaccagaaaatcatgaagtcatttgtcatcaagttgccatgtcatgtattccctccctttatttttatagggcgtgcatgcactccaagcttcaaattctttaaatgaccaaggatttgtctaagaattgtaggttgtagaagatcataacatgagtggttttggatatttggattccttttctatatacccactcatgtctcatgtggtacttcctacgattgatcttatcatataagatacatctgtaatctgtttagagattgacatatacatctagagccatgtgctttggaagcagatcattcattttgggaaaaaggttcgtatatgaaagtacattcttatgatgtcaatttcatgatccgaacaattcagtgctgaaggctgtaccaggttaagccgtgccctactctttggtaaggagggggtatgacttaggaagacaaatttgtcaaaggaaaggatgaatatgtgaaatcatttaaatgctattctaagtcatcatcatcatccacttgaaaaatgttctgtttgtgaagtgcattcgtttctaaaaaaagaaagtaggtggtagcaggttcataaactaacaaacaaaatatctatcagatgatcagattagaaccaactgaagcacaaaaggcagcacaaggaaaaactgtttcagtttctttcatttagattgactttgtgagcatgactttttattgccatttcttctaaatataaacgaaagggtctctagccgagttggtagatggtctgagtagcactcctcaggtcctgggttcgactccctgtgggagtgaattttcaggatgttgttaaaaaaatcctctcgtctgtctcacgctaaagcgcaggtctaaggttcggccccggttgtggtcgttctcacatggggctacaacgccgctgtgtatgggtggggggcaggggttcttaacataatactgtgggagcggtccacagtgttaaggcccattaggcccaggcttactgcctatatatataatagtccttagggactgatgatagactgttaatcctaaggttagtaacatggtaacagaggaggttttgattaggggtttttagccgccgtcgcggccttcctcctggccgccgtcgcggccctcccctaccctatcccacctcgtccgccaccgtctgcgcgctctgcctcgtccgctgtccgctgccggtgttgcgtctgtttcgaccgccgccatcacgtccatcttctacgtcgactcggccccgccagtgtcgtccacagcgccgtccgtccggctcgccagggacttgagcaccgccgcgaccttcttctccgccgccgtccgcgaagtctgccacatctgcgaccttctcctatgccgtctcgttgtccgggcaaccatcgactttttttcttctaaatataatgatacgcagctcaactgtgtgttcaagaaaaaatattgccatttcagtatggtccgcttatctatttatgtgggaaaatgtcttaggttcttgctgaagttaaaccacatgagaaaaagaagttcatatctgaactccagaaagagcacaagttagttgccatggttggtgacggcattaatgatgccgcagcactagcttcagctgatgttggaatcgcaatgggtggatgtgttggggcagctagtgatgtatcttcagttgtacttatgggcaacaggttatcccagcttatcgatgctttagagttgagtaaagagaccatgaagacggtgaagcaaaatctttggtgggctttcctatataacattgttggactacccattgctgctggagcattgcttccagctacggggacgatactgacaccatcaatagctggagctctgatgggttttagttcggtcggtgtgatggccaactcgttgcttttgagggtgaggctgagctcaaggcggaagcgagaaccactgaaagccatctctgatgaggttgagaaaaattactcatccaaatggagtacctgagtagttcggatcttagaccatgttcacgttcactcatttatatgatttggacacacgcatcaaaggcagttgtcagttgaacaaatgaaacagatgtagtatgcaattgctgaggtcagtcagttcctgtggtttggtagatcttcatggtgtgctataatataatacctctattccaattt

SEQ ID NO: 33315 - DNA, 2306 bp, Zea mays
  Clone ID: UC-ZMFLMO17092F04_FLI
atttgaataagttgcacatacattataccatgtttcttgcaccttggtttggctactaactcatttatgcaagaaaagtgacttttggacttagttttgggcatattgcaagtcctggtgaatctgagaagaaaatgtatgtttcctacacttagtcaattggattaagtgctaattatgttatataaatcgtagggaagctatccaagaaagccaaaagaagttggaggaatttggctaaggaaagccaaatctgggcaagtctcggactcactggacgatccgatggtgcatcggacagaccggttgcccgaacgaacaaagtcttcagtctcaggaattttactaaaaaatcaccgaacggttcggtgtgcaccgtacagcccctccaatggctagtatgacattcgcccaacacttcaacgactagattgggtcactagacagtccggtgccgtcactagacagtatggtgcccctagaaaaggaagggcgccaatcaagctaatctgtcgaacgttattattctctatctagtggctcacaagacagtccattgcgctcggagacaggaaggttttggatcttccaaatggaaaagcaatgactcctaggccccttagggctataaaagggactccttggtgccttcaacggggccccaagcatctcaagagcacaccaacacttcaaaactctgcgaccatgtattctagtgattttagtgagatctgagctccattttttgtttgtaattgtgatactgtgttcttacgctcatttcattagatttcttgtgtgtgttgctgcattgtgcttttgtgtgtgtattctgtatccctcccttactctatgttttgattgtgatcatattgtaaggctgtgagagactccaagttgtggaggttccttagaaatgggaatactgatataaggaagaaactgtgacactcaagtttgatctttggatcacttgagaggggttgattgcaactcttttccaaaggaggacaccacaatgtggagataggctttggacgaaccacaggataaaatcgttgtgcctcatgtctcttttatgttattgtgattttccttcttcctaagttctctattctcacttatggtattgctctaagtttaattcatatcttgatagagcaatcaagtgaagtgaacctctctctctctctttttctcctttcagacttggtttaatttgcactaactctaacttttagaccatgtttgtgttgtttttagctattttttcaggatcacctattcactcccacccctctaagtgctctcaattggcattagagccggtctctttcgttgggtctaacaacccaaagagatggctagcgacgatgctaaagggaagggcaaggtgaccggtgagaaggagacgatcaacaacgagcccaagggagacaagcccattgacttgggttcgaacaacaagaagaaggatatgaagaagaagaagtgcatgaagaagatcgtctactacgacagcgatgcttcttcatcttcaccaaaggacgatgatgactcctcttcttcaaagaaaaaagacggtcaaacaaactatactagaacgtcttttaattactctcgcattccttacaatgccaatgctcatttattatctattcctcatggcaagcttcctcactttgatggggaggatcattcttggtggagtcacaaaatgcgtagtcatttattttctcttcatcctagcatttgggacatagtagaaaatggaatgcatatttttgatagtgatgatgagaattgcaatgttatttatatgcaagaaatgattcacaaaaatgcccaagttactactgtgttgttaacttctctatacagggaggaatataacaaagtgagtggtcttgacaatgctaaatagatttggacactctcaagatcgttcacgagggcaatgatatgacgacgatcaccaagatgtagctcattgaaggtgaatttggaaggttctccatgaagagaggtgaagagccaactaagacgtataataggatcaagacccttctaaaccaaatccgcaactatggaagtacaagatggatggatcacaacattgtgtgcctaatgctatgttcatttaccgttcttgatcctaacattgtaaatttgatccgtgagaatcccaggtacaccaagatgacgcccgaggaaatccttgaaaattttgtgagcggacgcatgatggttgtaacacccgaaatcctattttgagattttaaaagtttctccaaaagattggagat

SEQ ID NO: 33316 - DNA, 1914 bp, Zea mays
  Clone ID: UC-ZMFLMO17092F08_FLI
attggttttatgtctctatgcactgccattatgcatgctgcttgttgtttgtacgttcacccatggattaaaatgcctttttcaggattaaggaaaattggtttatccatgcttttgtgtttaattactaccgttttatttatgcatcatggatgattctcaatgtacttaacgtgatttgattgtttaaattgatcaaactcgtagatgaaatattttgactgctaatccaattaactatctgttatgattctggatatagtttttcttaaagataaaaaaggccactgtttgtgtcatcatttcaattttatttttacttgagtcaacacctgattttgtcatatattgtgtcagccatctactgaatagacgtgtggttagtatgcatgcactggcagttttcctgattttttttggtatttcgtgaatctgtcaggtaaggctctttctttcagaggattccccttctcaagctggattaagaccacaggacaatctccaagcaaaaggctcatggttaatgcatgcagctggcccaagctcagatgattctctgccacctggcttcgaatcattgcagccaaccagcgatctcaaaattgacatgtcccaaatcgctcttattaggtggagatgcccaccacagatattgtataatcctgattggtgtgtcgctgctggagaagaaagtgaggaggttgccttgcagaatgagaggatgtttggagcactggaggctatatatccacgaccatcgaacattcctccaaacccactggttactcctgatgtgaaagactcccagtatgatgattcccgaacccaattggttcctttgctcccagttgaagaggatgatgcctctgaccagttcgaagaaccacctgttggtctaccaagtagttaccaccactcagataagtatgatgatgcaatatccagggtcccacaagcctcagatgctctctttaccactgcacaacagcagccgaatggttccatcaacacaacaaggtctggtgtccccgccgaagcagacgtagtggctgctgcatctgctgcttacactgcaataatgcaaagcaaccaaatgggaaacatgattgaccaagatctgctcatcaaaatactaagtgaccctgcccaaattcagaggctaatgaaagaatatggtgcacttaaacatgaacagtcaaccaacagttctgtggcgtcaatggtgcaaggttcaccaccccagatgacagctagtgtccccgtctctgtcccagaccgttccaatgcatttcacaacataaaccctaagctgccgcctccacctgttccgaatcgtctacctccagcttcagttaccatgaatgcaccagcgagttcaagtcaagcaattagctttccaagtggcccaaccaggggtttgaactattaccagaacctgatccatcagcatggaggggagaggcaggagccacttcagcagcatggaatgcagtttgcaatgcatcaccagcctcttgcctcgcaggccagtgccgctgatgttgtcagcagtggtgctatgccagctagggataccaagcaaaggcctacgaagccttgtgcttacttcaacagcgcgagaggatgccggaacggtgcgaactgcacgtttctgcacgatgtgtctgccgcgaggaaagaacagtcaaagggttccaaaaggattaagcttgacagcagaatagccgggcggtattgaggggctgctgccgccggttgatttttgactgttcatttcgccttttttccccttcaaaaacgtttcagtaaatattgcgccccagctccttgtttctttcacttagccaatttctctttgttgactaaatgaggtgttttagaagaaagaaaaatatcccacgatttattggagct

SEQ ID NO: 33317 - DNA, 2200 bp, Zea mays
  Clone ID: UC-ZMFLMO17092G04_FLI
tccgcgaccgcctggtgatcgctgggggttctggacgttggcgtttcatttggttggttggtgggtggcagcagccgtggcgagatggagctgatgctgccggtgacggtgaaggaggagtggccgccggaggaggaggaggaggaggaggaggaggaggaggaggacgtggacgcggacgcggacgcggacgcggacgctccgcggccgatggaggggctgcacgaggtcgggccaccgccgttcctgaccaagacgttcgacctggtggccgacccggccaccgacgaggtcatctcctggggccgcgccggcaacagcttcgtggtctgggatccccacgtgttcgccgccgtgctgctccccaggttctttaagcacaacaacttctccagctttgtccgccagctgaacacctatgtgagtgccccaagtactctgcttgctcagttgctgtcgtgtgaatttttgtttctggttggctttgtgctcgcgcgctgctctggttctgcagttcatctcgcctcttgcattggggagtacagtagcatgagcgatcagtcgacaagtctgtctctattattacttaccgaaagaacaagtctgtatatatataagcattttgtgtgattcacaatgacttggagctgatacaatcgttgaacgcgtattgctttttctttggcggcctagcaaatacaatggcaaaaatggccaaatgttttgaatggttcagaagcagaacgacaatgggggagattgcagaaccagcatctccatgacaagatgttaaattcctctgacatgctctttgttcgccttgttactgtgtagctagatggaccaggacaagggatgaacgaagctactacagcctacgagaaagaaacaaactgcttgtttgtcctaaagataaagaagactcactcctttgatcaccactcaccaccaagcaatatactgctagtgtataccactgcccgtgcctgtaaattcggtcgcaaaacttatgtgaaacctcaagttttacataaatttgccatcttgtcttgttaattggctcagcgcctcagcgtcggcatttgtcgattcttagtgtgtgatggcttctggaaatgcagcttactgaacgctgcgcgtgttcatcgctttgcgacgtgcagggcttcagaaagatcgacccggacagctgggagttcgcgaacgaaggattcctgaggggccagaggcatcttctccggctgatcaagcgtcggaggccggcgccgccgccgccgtacctccaggcgtcgcagtcgcaggggtcgtgcctggaggtgggccggttcggggggctggacggagagatggagcggctgaggcgcgacaaaagcatcctgctggcggaggtggtgaagctgcggcaggagcagcagagcacgcgggcggacatgcgggccatggaggagcggctgcggcacgcggagcacaagcaggtgcagatgatggggttcctggcgcgggcggtgcagagcccggacttgttccagctgctggcccagcagcagggcaggcggagggagctggagggcgcggcgctgctctccgccgcctcccggaagcggaggcggcccatcggcgccgcgccggccaacggcggcttgcagcagcaggaggaggagcagcagcagggcgacgacgacgaccccaccgccacgcgggcgctgttcgcggagctggacgagcgagggaccacgtcggagctggagaacctggcgctcaacatccaggggctcggcaagcgcaggcaggacgggagcgagaagcagggtggccgcgcgcggagccagcagcagggcgggttcgagacggcggagctcaccgacgacttttgggaggagctgctgaacgaagggatgaagggcggtgccgaggctgagacgctgccgccggagaggagacgaccggcttggtacgtcgacgcgctggcgcagaagttgagctccatgagcaataacaccacggcgaagtagagatgatctcgttaattaatcctatacgactagtaacagtagcttaattgtccctccgacaggggtcagtgaattctcttagcgatagctccattgttgtagattgtagtatataggagtgggatcgtgatggttacactgtgtcattttgtgcagagtgcagacgtgtagtgtatagtattcttggt

SEQ ID NO: 33318 - DNA, 2576 bp, Zea mays
  Clone ID: UC-ZMFLMO17092H10_FLI
aggacgctgggatcgatcaggagacctacttgctttacttggttgatgatctcctgcagaagcctacagtgagcgagcttgcagagggccatgccatcctagatgacgggagagcattgcttgacacaggaataatagccgcaacgggtaaagcatggcaggaccttgttacccttgcacattcatctagccattccgtggttaaggagctcatgtcttgtaacaaagagctcagcttatatgaggatcttgtggcggcatgggtaccagccaagcatgtatggttgcggaaccgtccattgggcaaggaactgatttctgctttaggaaaacaaagacttttcagcttttgttcatatgacttctcatttctacattttggcacatccgcggaggttcttgatcacctggcgggttcctattctggacttgtaggtcgaaggcatatgtgttcactaccagagaccactgcttgtgatattgcagcgacagctattattttgtgtacaaagatttcttctggagtctcaataggagaggatacattggtttatgattcagtactttccggtagaatacggatcggctcgcaatgtattattgtcacggtgaatatacgtgagtttgatggtagcgcttgtttcacattacctgatcgacattgcctctgggaagtacctttggcaaactctgcggggagggttttggtttactgtggtcttcacgataatccaaaagtttctattcagaaggatgggacgttctgtggcaagccatggataaatgtcttggaagatcttagaatccaggatacggatctgtggggttcaactagccaggacaaatgcttatggactgcaaagctttttcctgtcatgtctctcccagaaatgcttaatgtgggcatgtggcttatgggatcagaatgtgacccagatgggagaatagcttccttgtggcaaaaatcacagaggatcagcctggaagagctgcatcgtgctattgattacagacaactttgcaccgattcgagcaagcatcaggcaaatcttgcagctgacatagccaaggcttgcatgaactatggcttactcggtcgtaatctgtttcaactttgtgaggaaatgttacaaaaagatacatgtttagcagtctatgaagaattactttcattttttccaagtcacagtgaacagtatcctggggttcttcctcagagcagagaatatcaggtcaagatggatctgcttagagcttctggagatctttccactgcatgtacggtggaagagaaagtgtgggcttccattgcaagcgaaactgcgacggcgataaaatatggatccaaagagccatctagcggcaagatgtcttcaaaccatgaaagcttgcatccaaggaagactgttgtagaattaccagtccgtgtggactttgttgggggttggagtgatacacctccgtggagcttggagcgtccaggttgtgttttgaatatggcgataagtttgcaaggaagccttccagtcggtgctatggtagagacaacagaggaccaccttggagtaaggatcgaagacgacgctggtagacatgtttatatcgataatctggcatctatttcttctccattcaaagaaaatgatccattccgtctcgtcaagtccgctcttattgttactggaatccttggccacgagatattgtcgaaatcaggcctgaacatcaggacatggtcgaatgttcctcgtggaagtggactgggaacttccagtatattatcagctgctgttgttaagggactgttccaagtgatggaggacgacgaaagtgacgacagtgttgctagagccgtgctagtggtggaacaaataatgggcacaggtggtgggtggcaggaccaaattgggggcctatatcctgggatcaagtgcacccagagttttccaggacaaccgttacggttgcaagttgttccagtgctgaccactcctcagctgattcgggaattagaagaacgtctcctggttgtattcactggccaagtaaggctcgcccaccaagtcctgcagaaagtcgtgactcggtacctccgccgcgacagcatcctgatatccagcatcaagaggctagcggaactagccaagatcgggagagaggcgctgatgaacggtgagctggacgagctcggcggcatcctgctggaggcctggaggctgcaccaggagctggaccctttctgcagcaacaggcccgtggacgagctgttcgccttcgccgacccttactgctgcgggtacaaactggtcggagctggtggcggtggcttcgcgttgctgcttgccaagaacccgagctgcgccagagagcttcgacgggcgcttgaagagtccgacaccttcgatgtgaaggtgtacgattggaacgtcgccatgccacggtgaagagtagctggctcaaagggattgtgtacactgtattgctaccatagacgctgttatcattttttgtgtgtcagacgacctagggtgggttggggtggttgtgtgactctgatccaaaagtcggctgttatc

SEQ ID NO: 33319 - DNA, 1813 bp, Zea mays
  Clone ID: UC-ZMFLMO17092H12_FLI
gacagtgacaaaaaacagtgcacttatgaaaggcagtatgctgaaatgagctccagcagtggggtgcttggtgaggacatagtgtcttttggcagagagagtgaacttaagccacagcatgctatttttggctgtgaaaattctgaaactggagatttgttcagtcagcatgctgatggtataatggggctgggtcgtggtcaacttagcataatggatcagcttgttgaaaagggtgtcataagtgattcgttctcattgtgctatggtggcatggatattggtggcggtgctatggtactcggtggaatgcttgctcctccagacatgattttttcaaactcggaccctctccgcagcccatattacaacattgagttaaaagaaatacatgttgctggaaaggcactgcgggtggaatcaaggatcttcaacagcaaacatgggactgttttggatagtgggaccacatatgcttatttgccagagcaagcttttgtggcttttaaagaagctgtgacaagcaaagtacattctcttaagaaaattcgtggccctgatccaagttataaggatatctgctttgcaggtgctggaaggaacgtctcaaagctgcatgaggtatttccagatgttgacatggtatttggaaatggacagaagctctcactcacacctgaaaattatttattccggcactccaaagttgacggggcttattgcttgggtgtattccaaaatggtaaagatccaacaacactattaggaggtatcattgttcgtaatacacttgtgacctatgaccgtcacaatgaaaagattgggttctggaaaactaactgttcagagttgtgggagaggttacatatcggtgacactccttcaccagccccttcaagtgatacaagttcagaacatgatatgtcgcctgctcctgcccctagtaatttgccagagtttgatgttggtctcatcaccgttgatatgtctataaatgttacttacccaaatttgaaacctcatctccatgagctggccgagctgatagctaaagagctggagattgactcacgtcaggttagagttatgaatattacgagccaaggaaattctactctgattagatggggtattttcccagcagaatccgataatgctatgtccaacgcaacagcaatgggtatcatatatcggttaactcagcatcatgttcagttgcctgaaaatcttggcagttatcagttgcttgagtggaatgtgcagcctttgccgagaaggtcatggtttcaagaacatgtagtctctatgctgcttgggattttactagtaattttggtcactttgtcagcctttttagtagtacttgtttggagaaagaaatttagtggtcaagcagcctacagacctgttgattcagtggtccccgagcaagaactccagccactataatccaaattaaagctgtttgacggaacaacatatagatgattctttggtagagatacccttgtgcgggggggttacgcatcacagcggcacgcatctgctgctggagtaagcccttctttgtatgtaacacaagctacaagtttacagaagaagcactgtatgattacatgacttctccattcaaaacttagaggtgttcataaactgtctagtgattcagatcaagagctcctctcttgtgcttacagtagaagaaggttttgttcatgtaatgtagattaagtagggggtagagaagaaactaggcacagccgcggaacgaaatggtgtaatatttattttagtgccgagggtatttgtcttc

SEQ ID NO: 33320 - DNA, 4031 bp, Zea mays
  Clone ID: UC-ZMFLMO17093A11_FLI
tccatccccaaatttctcctctcagcgcgtggggcagtggcggcggcagcgtgggcgcgcggaccgctacgggcacgggagcagcggtggctgcgcaggcagctgtcagcatgcggcatggtgactacgggagcccaggcggcgccggtgcggctgcagccggcggcgggcgaccgtgaggcggctgcgggagcggtgaagtccggtggcgcctgctttgttttgtgttcctatttttgatttgcgaaaggatccaagagagaaaggagggggagaaggcgagaatccaagacaagagcgagcatggagtttgctacgggtgccatgggtaccctcctccccaagctgggcatgctgctgcaggaagaactccacctgaagaataatgtgaaggaggggatcaagagcctcactgccgagcttgagagcatgcaagctgcacttgtgaaggtgtctgacgtgccattagaccagcttgacccaaacgtcaagatttgggctaatgaagtcagggggctgtcctatgatattgaggacagactcgactccttcaaggtgcgcatggagggtcttgattcaaccaagcgcaaaaccatcatgggattcatccaacaaacccgtggcttggtcaccaagttcaagattcgccatgtaatatttgatgacattaaagacttcgggagccaagtaaaggaggtgaaggagcggtatgacaggtacaaggtgcatgatgttgtagctaatcctatcgcaaccacagttgaccctcgtctcttggctatgtataacaaggtttccgaccttgttggcattgacgaagaagctaaggagctaatgaataatttgtttgaagatggtgacgagccagcgaaaaagatcaagacagtctctgttgttggatttggaggactcggcaagactactcttgttaaagcagtctatgacaaggttaagaaggagtttgattgcagtgcttttgtatcaataggtcagaaatgtgatctcaagaaagttttcaaggacgttctttatgatcttgacaagcaaaatcatgaaaatatcattgcatcagaaatggatgaaaaacaactcattgataagctacaggaattccttgcagacaagaggtacttggttgttattgatgacatatgggatatatcaacatggaagctgattagatgtgctttggtggaaagtaaccctggaagtagaataatcataactactcgcatttgtgaagttgccaaaaaggttggtggtgtttacaacaagaaaccactctctcttgatgactccaagacattattctatactagagtatttgctggtgaaagcatgagtcttgataacatatctggtgaagtgtgcaacaaaatcctaagaaaatgtggtggtgtgccattgtccatcattacgatagctagtctgcttgttggtaaacagagggaggactggtctaaggtgtatgattatattggttttgggcatgaagataacgaggttattgggaacatgagaaagatattagctttcagctattacaatctacctccttatctaaagacatgcttattgcacctaagcatatttccagaagatcacaagattgagaaaaattcattgatatggaggtggatagctgaaggttttgttattggcagagaagaactagggttatttgaggttggagagagctatttcaatgagctcataaatagaagcatgatccggtggatagagctctctagtagaagcaagattcgagatggttgtggtattcatgatatggtgcttgatcttatccgcactttgtcaggtgaagtaaacttggtcacggtatcagatgtggagcagcagtgtaccacatcatcatcatattcaccagtcagaagcattagcgctcgaagattagccttccacaaaaaaagaagcattgaacacaaccctggcacagaaataggacaggtgagatcattcaatgctttcaactgctctggtagtaggatgccccgacttttaagcttcagggtcttacgtgtactagctctggagaactgtaatttctcagcaggaaactgttgccttggaaatattggcaaattgcatcagctgaggtacctagggctagtggagacatccattcgtgacgacttgctgcctggagaaacaggacacctcaagtttctgcagacactagatgtaagacgaagtggcataaaaatattgccagcgtctgttggtgagctaatgaaactgatgtgcctgcgtgctaccgagggcacaaggatgatggccgagattgggaagctggcgtcactggaagagcttgaggtacactctgtggacaagtcgccaaacttcgccacggggctggggcagctaaccaaggtgagggtgcttgagatccatttcgacgaaatggacgagagcacagagaaggctctcatggagtccctgcgcaacctgcggaaaatccagagtctgcagatatggtccaagaaggagaggacaattgaccttggcggcttgttggaagactggacgccaacaccttcagatctccgtcaactgatgctgtgtggcatccatttgcccaggcgtccgtcatggattgatccctcatgtgtcccgctcctctcgtacttgtcgctcacggtccaggccgtgcaagtgcaggatctagaaatcctcgggaggctgccgttgctcagctacctctacatctggagtgagggcatcaactgcttatcctatactgctaccagcagagacgagtttcagaatctgagacatctggacacaaacctggagatcatgtgtggacagcagggagcactgcctatggttgagaagttgacatgccgtgccagcatggggaagtatgttgcctttgccaggagcagcatgcctttcgacgatggcagcgtggtgaatcctgctactgttgctgaggcagaattgccagtaattctacctttggacattggctggcccgtgaacatgccttgcctccggggcatcacctatttgctggattaccaggactgcagtgccaaggagtgggctcatgtggagacattgctcttgcacgtgagaaaaatccaccccaactgtccacccttccgaatcaaaaagaactgcagagacaagaagattaccttgatcgacgcattcagctaccttgaagctgtcaaggatgtgttcaagggcaacccctccaaatactcggagttttttgatctcatgattgattacaagagagacaggtcccttctattgcatgctctcctttcatatcttggcatcgcttgcattgcatgccaagcatgatgtgtccgtttcgttctatcgttaacactataatattcctccttgtttgtttttcttatttatcagaatcaaaatcaaagatgtgatcatccgtctcaagaccctatttactggacatgatcctaatctcatccttgacttcagcgtcttcctgcccagggagggtttgtttggataatctcggattgaaatggattgaggtggtatgtggtgtattgaagtgtaatatgaactaattttttttcaatccccttcaatacacctcaatacacttcaatccctctgtacccaaacaaagccggagtgggccatcactctcggggacctgtagaagaagccccttcatgatcgattctagctaggccatcacccatttagttaacaagaccaaggtttcatttaaacaagctagctagttcttttcatgtactactagttcctaatgcctttgttgtaatttttccagtcgggatgacggcgatggatctgatcatgttaccggcacaaatggcgaagaagaggacgatacccatgaagcgtaatatgcaatccctgtcaccagtggaggatctttgcttcagttaattcattgtcaaggataatcttgtttacttagggcctgtttgtttaccccaatggattatataatctagattatttttggagaattatataatctggattatataatttggatt

SEQ ID NO: 33321 - DNA, 1940 bp, Zea mays
  Clone ID: UC-ZMFLMO17093B03_FLI
ccgtcaatcaaagcctttagtaagtaaaaaaaaaaaaactagatagtttagaggaagtgaggaactacagcaggcttaatgccaacctgaacaatttattgatgatatacaagtccaagcatgggagatttgtgaaaatcagtacagcatggaactattacacgcaataacatatcacaagttgtcatccataaagttcagaaatcatactcctctgatttcagtactgcgctttcccatcgttgttaaacagatactgtgtcacaaggccatgctaggaacagtaagggcttgtttgggagcagaaactcaatcccctcgagatcctggacttttctcaggccaagcaatccatgtgtatgccattttaattagccatttagttcttcatagggctttgttcagttattcccatcccacgattgggagggatcaggagaaattttgacttgctatggatttaaacccactcaatcccctctagtccacatggattgagattaaaacgaacaaaccctagggtgtttttcatcctgggtttgcctcccttacttccaaatcaggcctacagtaaacgaaaggctacagtaaaggaaaggggaggccctcccgttcagcaatgcgccaactagtttaaaaaacgcatgccccaccaaaagatgacttctttaattagttggcggtcgaggtccttttccatgagttgtttttaggaaacgtccttttctgagtgatgaacagacaaggataaagctacaaattcatactttccatactagaagaggtcgacgaagtctaggttttgttgagccatccacaaacatgaaggggacaaaagcagccaaatgaatgaaactgcaaaattctagatatttcaccaatccgcaatgaatctgacctcggaaacacacacaggaattaagcacaagcaggaaataaacgcctaaatatttcgccaattcgatgcattgcaatcagagtcaggcaagaatcgatctcccgtccctcccaagctagctctttctcttcagcatcctcatttccttttactggagtatctatatttgcctcctctgtaatactatcagatgaaaatactagagttgagatgttatgtactatgcttgaactgataatgttatttggttcgtttacaaagtgaaagtaattatctggtgatttaaaatttgcaggtgctgctcatgatatgcaggataataactgcatggaaaggaataattttaatagacaaaacaatgtattttcctctttttgctaaccagttattgactccatgcattgttgattgcttcaagtcatattggtattgttttcttaatacatgattaatctagctcctgtcattctgttcactatattgaattagttttgaccaaaaaccatgctaagctggaatcacattgttttgtagatgtttttcttcactataaatgcttaaacttaacctggtaaattcatctacaggctctttcaaatggcaaacccactgttgttgagttttatgcaaactgatgtgaagtctgcagggaactagctccagatatctacaaagttgaacaacaatacaattgggatccaagttgctgcacgacagacagaaccagcgaacaccacggacaacgacgacaagcaggtccgcttatcgctcttgggcggcaagaactgcagcaacgttggtgtcacgaccgccattaggcccatgaacaacgccaggctgaggtccagggatggaggcaacgccacgaccatcacccacagtgactctgtatcggggagcatgaggacgatttgtacgccatcacaatatatgagcattgtactagtagttcttcatagggctttgttcggttattcccatcccacgattgggagggattagaagaaattttgacttgctatggatttaaactcacttaatc

SEQ ID NO: 33322 - DNA, 1441 bp, Zea mays
  Clone ID: UC-ZMFLMO17093B05_FLI
catacacaagcacaagcgcactctagcaatggcttctgaggttgtccgccctagcgacgccgagctactaaaggcacaagccgacatatggcggctcagcctctcctacctcacgcccctgtcactgaggtgcgccgtggagcttggcatccctacggcgatctaccgccatggcggggctgcctcagccgctgagctggtcacggcgctgtctctcccctccactaagctgccgttcctccgccgcctgctgcggctcctcgccgcgtcgggcgtgttcaccgtcgacaagcagagctcggaggaggagcggtaccgcatcagccccgtgtcctacctcctggtggacggcatccctcacgaggaccacatgaaccacaccgctctggtgctcacctgcacctcgacgcgctacatcgaggcggggatagggctggcggagtggttcaagagggacgtggtcacgtcaccgttcgaggagctgcacggggcgactctgttccacgagagcatggggagcctcgacgcagatttccacgacatggcgagcgaggccttggacgcccacgacaacttcggcatcgagatagctatgcgggagttcagggacttgttcgaggggatccagtccatgacctactgctgcggtaacttcggtgatgacaagggtgccagggccattgtcaaagccttcccacacataaaatgcactgtgctggcccctcccaagatcattgccaccaaaccggccgatggagcgatgataaactatgtcgaaggtgacatgttcagtttcattccacctgctcaaactgtcgtgctaaagcttgtgctgcaccacctgaccgatgaggagtgcgtcaagctcctggctcaatgccggaaggcgattccttcacggaaggatggcgggaaagttataatcggtgatattatgattgaccactctgggcctatgctggaaactcacctcctgatggacatcggcatgatgaccatgacaaaaggacggcagagagatgaaaaagaatggagcgagctcttcaccaaagcagggttcagcgaatacaagatcctgaaggaatttggagctcgtgttgccttcgaagtctatccgtgagattgcacctggactatacatatatatttacatacatatatgtatgtgtgtgggtgccttgcgtggcttggcgtgatgatgtcataaataaagagggtgggtgtgcttgcggtattcatggatggccatggatctgagcacatgacgttggatgctttcttaaggctctcgtggatcttctatatttggaagaagctgtaaaataatatatcgccatctagtgttggcgttggcttgtatgtactttgtacctgctttgttattttgtgtaatatcgagtaacctaatgtatacttgcttactactatcactaccgaaatc

SEQ ID NO: 33323 - DNA, 1378 bp, Zea mays
  Clone ID: UC-ZMFLMO17093B08_FLI
attcgatgcatgattggtcacctaagtcctggattactcctaatttttagcaattgccacttgactctgtactctgtagttacacagtttccctgcgttgctcagattgtagcttgccttcatggctgctacttctaacaacagattcagtggcaaaattgatatatctaaaacagtaataccaggggcactagctagttatgtactacttcgacttcctcattaaccattgtaattggcttcatgtacaatctcctgcttgggtgccttttccttagttcttaattagttactatgtttgttttgtgccaaatgacgctctcaagggatcaggagctgtcagagaaatgtccatcacaagagtgtgcaacgggttcaaaagactcagaagtctcagctaatactaataaaagcaatgaagatgaggaggatgattgggaggctattgcagatagtggtgcccttgatgacacactagtgcgctctcttgagcaaggagctagagtatcttcttgcagctcccccgaaaaaagtagcaccccatcttcagggcccaaaaggagggggaggggctcatttctttacaataagagtgttttgtacagtgaccagtgtggttcggaaagagagttggataacaaacagtctaaacctcaggttggatcaaaggatcatgtgaatgagccagagaataatgctgttacagctgctacacagtttgggacaaggcatgtccttgttttttatgactttccgccaagtacacgcacaacagatctggaaaggatttttgagaagtttggggatcacggggttgccattcgctggattaatgatacttctgcacttgctgtttttcggactccatcagctgctaatgaggctcaagcttgcatacctccaagatacaaagtacggtcactgaagccggatgatgatctattgacaaaaatagatggtagagacctagatccgcccaagccaagaccaaagacatctgcaagaacggctcaaaggctaattgctcatgggatgggattgaaacagttcacaaactttgggtctgatgagttgaagaaacaggagggagagaggaaggacagaattgccgctagacaagcaatgcgtgatgaggcttggggttcagattgatggagaacatactatgattgctggtcgcccacatcatgtctgcgagtttgttacattggtgttttagatgcttgtactctttgcatggtcaaatgttgattttgatacagagaaatctgacgcgatgtgtatcgtagtggcgacgtgtacgccaagcatgttgtacgggcagcaagggattaggatgagatttttctgaactgaaaagcaaagcacgcgcagcact

SEQ ID NO: 33324 - DNA, 4103 bp, Zea mays
  Clone ID: UC-ZMFLMO17093C02_FLI
cgaatcgccggctccccaacccaatcctccagctgcggaatggcggcggcggagccgtgctgcatctcgcacgcgttcgagcgcgccactcgccaggaacccggccgcctcgccgtcatccacgcagcggcctcgggcgccgacagcgaggagcgccgcttcacttgcggcgacctcctcgccgccgtcggctccctctcccgccgcatcgccgccgcgctcggcagcaccgccaccgatacccgccgcgaccgcgagcaaggctcagggtttcgggccgccggcgccgtagtgccgagggttgtcggggtatacgcctcgccatcgttggagtacgtcgccgccgtcctcgcggtgctcaggtgcggcgcggcgttcctcccgctcgacccgtcgtggccggaggagagggtctcgtgggctatctcggcgtccaacgcggcgctcgtcgtgtcttcagttgggtcgcgaggagccacgctgtttgagagcagcgcctgccctgttctgcgcttttatggtggcatccggcggcgatttcgggatggaaatggcggggatgacggggaggagcttgtctggccgtgcgagcacgagtggcaccgcaagttctgctacgtgatgttcacctctggttctaccggaaaaccgaagggtgtttgcggcactgagaaaggtcttctgaatcgttttttgtggatgcaaagaaggaatcctctgtgttcagatgatgttttgttgtttaagacatctgtcagctttgttgaccatctacaggagttcctttctgcggtcttgacttgctcaacacttgtcattcctcccagtgagtggagagctaatccagcatccttggccaacttaattaaggtttatcggatatcaaggatgacattggttccatcacttatggagataatactacctaccctggcggaaaaactttctgatggctgtaacccacttaagatcctaatatttagtggggaagttctgtctgtatcgctgtggaagagagtctatgaatttctgccagaggctactatcataaatctgtatggaacaacagaggtttccggtgactgtgcattctttgattgcaaaaaattgcctacaattttggagcaagaagaactaaacagtgtaccaattgggtttcctatttcaaattgtgaggtttctcttgtcaccaatgatggactatcagatgaaggtgaaatctctgtcagtggagcatgcttgtttactggatatttagctgatcccatgacaagtaactgccctgaaggcagtgaagttttagcatactacagaacaggtgactttgcccggcgcctaaagacaggcgaacttattttccttggaagaaaggaccgaattgttaaaatttatgggcaccgtttctcacttgaggaggtagaatccacattgagggatcatcctgatgtcagtgacgctgctgttacttttcaaagtaatggatctctggattttaaggcatacttggtgctgaggagtaataataaatttcttaaatgtactcagggttatagtggattacattcttcccgagatatcattgcaccacttcgaaactggctcatcatgaagtttccactagctatggtcccaaggctttttatccccatgaaatcattacctttgactttgtcaggaaagattgactatgtcaagttatctagcttggtttgtgcatttgagccttgtgaaattcatccagaaagcagtccagctgatcctcatatgcaagttatcaaaaaggcattttctgatgccctactggttcatgaagtgtctgagtatgatgatttcttctccttgggtggtaactcaattactgcagcacatgtggcccacaaattggagattgacatgagattactttatatttataccaccccttctaaactttttcatggtttacttggggaacacagtcatgtaattcctccaactcctgaatttcacaacagaaagaagttgagaaaatatgcaagcatatcagattcctttggcccagtttctgaatatttggacagtaactttcatgaccaagggcagataagtaaagagggtgcatacgatcactttgcagggaatcattggcagaccatggatactaaattttcacttacaaaaggtgtggtctattggccgttgcaatagatttatgcatggttctgaagggatggtacaccttgaagatatttgttcatatgttccatataacaaaaagggttacctcgtgaaaatttggagcattcttctagattcatgtgttgatgcctcacctttgcttgtcataaacaatggaatgatgtccatctttattggttctcattcatatttgtttctttgcattgatggttataggtgagtgttgcctattacatggaattctatgcttctttttttctgatgtacctcatgctctatttttctatcatttaagattattgtatcagtaatttgtttaaattatatttgatgagaaaattagtaccatctggtgtgtggatactgacttttcttagaacttgtttcctattggttttgtagtggttcagtgaggtggagtgtcaaattggaaggccgtatcgagtgttctgccgctataactggtgatttctcagaggttgttgttggatgctataaagggaaaatttacttccttgatatgtctacgggaaaattatcctggacctttcaaactgatggggaggtaaaaatgcaaccagttgtggacaagatgaggaatttaatatggtgtggctcgtatgaccattacttgtatgcgttaaattacaaagatcgctgctgcacatacaaagttttttgtggtggaagcatttatggatctcctgctattgacatggcacaaaatgtaatctatgtcgcatctacgagtggccttgtgactgcagtatcatttaaggaaccatccttcagagttctttggcaatatgaagctggtgcgccaatttttggttctctcgccatagatcatcaaagtggaacagttatttgttgtttagtgaatggcctagttatgacattgaactcacaaggttctgttgtttggaaggcaactgttggtggtcctatttttgctggtgcatgtttgtcacccaccctccctcatcaggtgcttataccttcccgtgatggcaacttgtactcttttgatactgtgtctggtgcccttctttgggtatacaaggctggggatccaattactgcatccacttttgttgatgagctgttaacatcagtgtcatttggaccatctgagagatttgcttgtatctgcacgagttccgggaaggtccatgtcatcagaattagagtagacatcagaactagagtagatgctaagtacaatcaggagcaaggtggtgacggtgttaaatctgaggagttagttcaaggactggatgctaagtacaatcaggagcaagctggtgaaggtgctaaatctgaggagttagttcaaggactggcatccattgatcttccgggggacatattttcgtctcccttgatggttggtggacgcatctttgttggatgccgagatgatcgattacattgtctcaccgtcaccacatagtttcaagtgattttgctggaggtgatatagttttgcccatgcctgctgcccgacaacctctcttccgcgacaagggcctttggcctttcctattggtaaggtgcgtggcaggctggcagcacaacacaggccacgaatgagtttggttgaagctcctgattgcatttggtgatttgggtctccaatgattgctttccatgtctacacaagaagctttccacagcctgctctcgcctaagcaagtgctacttgatgtcttgatcaaagtgagtggaaacctctcaacctcacattctccttgcagcatctgtattcagcccatgtggaacctttgccactgtcctgcaaggctggtcagtcatgccgctgttcccttcagtggaaattaactgataggaagaccagtgatttgcggagactgtaaaaattgttccacatagatctatactatttcctaaaaggagtttatgac

SEQ ID NO: 33325 - DNA, 1396 bp, Zea mays
  Clone ID: UC-ZMFLMO17093C06_FLI
cattcttcaatctcgagcttcttttttatgtacatctgactgtgtgtatggaactgaagaaccagagtagtttgcgttcttcagatgtcgacggtggtcatgggggtggatcttgagtgcgacaagtgctacaagaagatcaggaaggtcctctgcaaggtccaagacaaggtgagcatcaggaccatctcctacgacgagaagaacaacacggtgacggtgtccgggcccttcgacgccgaggaggtcgccgacaggctcaccgccgacgccggcaaggtcatcaccgacatacacgtcgtcgggggcttcggcttcggcttgggcgggggcggaggcggaggcggagggaaacaacagaagcacggcgccgtcgcccccggcaaggcgcccaagccagggaaggccagcggcaacgggcacggccagggcgggcacggaggcggaggccatggcgggcacggcggcggcggcggcggaggcaacgggcacggccatgggcaggccggcgggcacggaggcggaggccacggcggcggaggcaagccgggtaagaataagcacgtcaagttcgacgacatggacatggacatggacgacgacttcgacgaccttgacatggacgagccggccggccgccacgcgcacgcgcacgggcacgggcacggcgacggcaagccgaagatcgtcaggacgacaaacacccccatcgcggcgcggctggaggcgccccgcacgggcccagccatgtcgatggccgcggcggcgcccgtgaggatgccgatgccgatgccggcgatggcgccaatgccgcagcagcagggcatggggggcgcgccgtccatctggccgcccgcccccgagtggggctacagcgcgcagccatacggcagctacagcggcccgcctgccggcgggtactacggcggcgggggcggccccgccccaaccgggcactggccgtacggtggcggctacggctacggccggaacccgtacggccagcagtactacgaggacgaagagcccagcgctgcgtgcagcgtcatgtgatgccaccggctcgtctccgctacgcgacatctcgtgtcacgcgctctccgtgtccacgaccacgaccactgctgtaaaattattcctagtgctcgtgtatgtatgtatattaagctgtatttttattttcgccagccctattttcactgtttttttatggcgtttggtttgcttcatgtgttgtcagagtatcttgtttgtgtgtgtgtgtgtgtgttttggagtggataaagttcgtcatagattgacggtacggtaataggacctaggacgaacgaagctccctctccagactccagtgtgtatatgtatgctacactctttatctaattatgttcttctt

SEQ ID NO: 33326 - DNA, 3451 bp, Zea mays
  Clone ID: UC-ZMFLMO17093D04_FLI
caatagcatcatagaggtaccacacgcagggagatatagcaagggaatgaacatgcaaattcttaagcatgccctctaggcacccagacaaaccgtagatgaaggtgatgattgctcgctcgctcgcttttattttttggttcttctctctgccatcgaatgtcatgatagatttattgattaattaatgtttctcaatcttcaaggaggttcaatgcaaaattagatactctttgttttcactcaccttggaattatttgcactgttcgagtatgagttacaatattgtgctttcgattttggctgcaaacaaggtgtcttcagtctggaagagtagatgtttacttctcggtgaacatgcaagttcaatttttgtttggttgtatcaagatgttaatttactaatgcattgcttactaattttctttcatttgcatatgcaaaataatgaaatgtcaggactaaacttttacactaaatactggtttgcaatttcttgtggccacagaaaacgaacaatactgttgcaagtccttgtgtaccaaatcatgtctctaattcatgttagcattatccgcattttaattcttggatgactaattttgaccttacaactgcttctttatctttaggtcaggacaatatgcgagtcaccttagtattacattggccttagtaccttatttactaatatagagccaggatcaaaaatcacatttactgataggttgcatatattgtcggaactgtattgtgatgtttgttaccaatatgcaccattatgagtgaaatctgcatctaagctttagatcaggtattcttaatcagaacaaaaacattagtgaaacaacatctttcggtttgaaatgctttgtgacaagatctttcggtttgaagtccagtgcagcgaagttgaaaaatacttctgattcttacagatttggcaaaggaggtaattggcaattaatttagttggttattcattggtccactacatgatgtatagtgattacaattttgttttgtgcattgaatttacgtgttgcattaaagagttgaatctatgtttataatattttgtgacaggatctttcagtttcaagcccggttcagcgaagtttggaaattactactaatccttacaaatttctcaaaggaggttcggtttatttcagctcttttcgttcaagctcgtgcaacaggacgtttgatccttctacaatttgttggcgaggcggatgaacactacacagcttaacaagaacgagctatcctcaccaccgaaaatgtagagtattataaaaaagtaggacaaacagcagatacattttaattttaccacaaacttatgtacaggatgaagcacacccaagttgacaaagtcctagattctacaattccagaaaatgaagcttgttacatcctcatgacatgcatgaaggtataacactatctacactcctttgtgatacaaaacatattacccccacgtattatctttcactcgccttagtacccattaaacaacaacaaataattaggcaaacactgttagcacaactaaacctatcttcctctttatgtaaaggaattttcttttgcgtatatgtggagggcttcgtcacttttgaatgaaaaaaacatttatgtacatataaatcacttggtgaagcctttctcgggccatgtgtgttgatgcaaccactgggaaaaaaacaatgttattagctgttgacatatgctacttcaatactgcttgatatgtattgcactctcagttccgtctactgttggtctaaactgcatctgtgtacatacagaccagttgtattaaactttctgaatctgtgtatactaatgcaacctctcgaaaacactgttgttagcccttgacgtatgctatttaaatgctacttaatatgtattgcaatctggttttctcgtacagaactgctacaattcccgttccaatattagttccaatattaatcggctactgtggcctagcaaaatttccttaagtctgctttatgtccatttatttatgtgctttataacgaatatccttcatataacatttccacgctacaatttctatccacttagatatacttacacacattctaaaatacaggtcaacaagcgcgcatggcgcgcacaatacactagttatgatataaatttgcatcatctatagagtaaggacaagtgatttcgctagtatgagacgattggttttggtgtaaaaggaaatacatcttttgtattatgtattgtattagaaaaaaccatgaccatgaaatagttacggttaagtccatataactcttttatgcgcttgttatttgtttgctatataatgacattctagtcttttgtcgaatgcattgcaagtaatgtaggaaaactagaacttcgatgtaaattacaaacatgtgaactaaacaaaccattatgccgtagttgacaatcatgttatttgaaaaatgatatcacaactatatttcacacaattgttgctccaaattatttttctataacagaaacctaatgtaggaatgtgtaggatatttgttttgcctgttaggtaaagatttgataagatgtttgctttgcttggtagggaaatatttgatgggatgtttgctttacgtgataggaaaatatcaacattgtcgtttttgggccaacaatgtagtcaagtgttgttgttgccacatagtcaaatggtcatgtgcttttacttcatgtactatctgaatatagagtacagtgtaaagctccttttgcagattggacctgctggatggtcaggttcttatatgtaagcataatcagttcttgtaagctgcacggtagtaagctattctccccatcaatattgcacactttaacttgttacccatatttagttcgtttgtatgtctttatagtggcttgttaatttacactactggttcttgcagccttttacaaattgatctttgttctcaatagatgattctcacccatacacttaatgatttctgccattaagtccttacactaaggatgatccaaacttgttacaatattaacatctgtttcaaaaacaatttttagagttgttatttttctgcatgtctacgtaatttgcagagcattcatctctattttactttggttgctgacattggtttgaggacgatttctggcttgacttcactagagagcatcaacagtggttggcaatctatttctggcttgacttcattgaagttcaatctattttgctacacgaatttagcatgtttatatcgttaatataatattattgttattgtgatattttgctacatgtattttggtatttgtcgttccatatctatgttttatattttttttattttcgtggcaatgtacgggcacagaagtatagacacatgcaatcatacaacaggtcactttgcc

SEQ ID NO: 33327 - DNA, 1422 bp, Zea mays
  Clone ID: UC-ZMFLMO17093F02_FLI
gcgaaactctatcatgtaccaagcaataaatttctagggtcgtcgattaaactttcttaaattaaatacacagatggaagaggtgctattaatccaaaagggatagagtactataacaatctcatagacgagctagttacacatggtgtccaagtccatgttatgatttaccagctggatctccctcagatcctggaagacgagtatggtggatggttaagtccaatggttgtggaggatttcacggcatatgcagatgtgtgcttcagggagttcggtgacagggtttcacactggaccactctggatgaagtcaatgtggctgcaattgggtcctatgatattggacaaattgcaccgggaagatgttctgatccatttggaacaaaaaaatgtacagtggggaactcaagtgtggagccatatatagcagctcataacatgctactggcacatgcatcagctaccagactgtacagagaaaaataccaagctgtgcaaaaaggagttgttggtataaatatatatacaatgtggtcatacccactaacaaactccactgccgatttagaagcaactcaaagatttctggacttctattccggctggatactagaaccattggtgtttggagattatccaagcgtaatgaagaagaatgttggttctcgccttccgtcattcagtaaagttcaatctgaagccattcgtggcactctagatttcattggaataaaccactattattctttctatgtgaacgaccgccctttagaaaaaggcatccgtgacttctcactggacattgctgctgactatagaggttcgagaactgatccgccaataggtcaggtaaggtttttcatcaacaatcttcagaatttcgacatgatagatacatcctttttattttactgcagcatgccccaacatctattcccgctgatcccagaggattgcaacttttggtagagtacctgagtgaagcctatgggaaccttcccatctatatccaagagacaggttatgcaaccacaaacggcagcctccatgatactgacagggttgattacatgaagacccacataagcagcacattggctgctctaaggaatggggccaatgtgaaaggctacttcgcgtggtgcttcttggacgtcttcgagtacctgtcagggttcatgtcgcaatacggcctgtaccgtgttgatttcgaggacgaggcgctaccaaggcaagcaaggctatctgctcgctggtattctaaattcctagagaacaaggggatccatgtagagggcgagcttgatgatgcgggatcacacgttgagcaataagttttctacagcgacacattgatttgtacatcctctagcgagactattgaatactactgtgcgttgcaataagaacacttatatt

SEQ ID NO: 33328 - DNA, 1328 bp, Zea mays
  Clone ID: UC-ZMFLMO17095A08_FLI
ataataatggtgtttttttcaaacaaagaaattgcatctaacaaatagtcactgagttgaaaagcatcatcataactcatttacaccaacatgcctgtctgtgacatctgtgctgagttggttaggcggcaccgtagcctatgtgagaacgaccatgattaggagcaggccttagacgtgttttgacatgggatagactgtagatgtgaggattttttaactctagcctaaaattcgctcccattggaagttgaacgatggacctaaggagtgctaatcaaaccacctaaccaattcagctatctcagcttgaggccctttcccttctttggtaaaatatatatttatattttataattgcttcttagatgaatagtttgaacattctgataatcaacagtgactccaacacctgaaatattatagctctaacctcaataatataatataatatgattttttttggggggcaggcaacaacaaagattaatgtggctgtcgacagactgccacagttccagtgttgcaacaccaatcttgaaggtggcccagagcacatgggcacaatacacattgggtccgaaagcatggaggaaattgacgttgcatacagggaagcagcagacggcatctcgtccaaaagacctgttatagaaatgacaattccttctgttttggataagaccatctctccgccaggtcagcatgttattaatctctttgttcagtacacaccctacaaactttcagaaggcagctggcaggattctaatgtcagaaaagcctttgctgagcgatgcttctctttgattgatgagtacgcgccaggcttcagctcatcggtggtaggctacgatatgctgactccgcctgatcttgaaagagagttcggcctaacagggggaaacattttccacggcgcaatgggcttggattctctcttcctcatgaggcctgccaagggatggtcggattacagaactcctgtgaaggggctgtacctctgcgggagtggcgcacacccaggtggcggggtgatgggcgcgccaggacgcaacgccgccgccgttgttttggaggaccacgtgaagacaaagtaggtgtagtgtagctcgctggaaaccaagatggcatttttatcatcaggagaaaatctttgatgccatggtgctgttttagtgcctttcttttcttttcctttttggagaattattgtcgcaatccatagtcggagaacttatatcatgtgaagactcgtgtaacaaatcctcactaacatttctgtccctgtccggcgggaaattggaactgtggtaaaatgtggaccc

SEQ ID NO: 33329 - DNA, 1893 bp, Zea mays
  Clone ID: UC-ZMFLMO17095B08_FLI
ctcggaacgcacacaccgcccggtctccgatctccgatccccgatcccctcgtcgatccaagatgcagatcttcgtcaagactctcactggaaagactatcaccctcgaggtggagtcctctgacaccattgacaacgtcaaggccaagatccaggacaaggaaggcattcccccggaccagcagcggctcatcttcgctggcaagcagctcgaggacgggcgcacacttgccgactacaacatccagaaggagagcaccctccaccttgttctccgcctcaggggaggcatgcagatcttcgtcaagaccctcactggaaagactatcaccctcgaggtggagtcttctgacaccatcgacaacgtcaaggccaagatccaggacaaggagggcatccctccggaccagcagcggctcatttttgctggcaagcagctcgaggacgggcgcacgctggccgactacaacattcagaaggagagcaccctccacttggtgttgcgtctcaggggcggcatgcagatcttcgtgaagactctgactggcaagactatcacccttgaggtcgagtcttctgataccattgacaatgtcaaggccaagatccaggacaaggagggcatccctccggaccagcagcggctcatttttgccggcaagcagctcgaggacgggcgcacgcttgccgactacaacattcagaaggagagcaccctccacttggtgctgcgtctcaggggtggcatgcagatcttcgtgaagacacttactggcaagacgatcacccttgaggtggagtcctcggacaccatcgacaatgtcaaggccaagatccaggacaaggagggcattccaccggaccagcagcggctcatctttgctggcaagcagctggaggatggccgtacccttgcagattacaacatccagaaggagagcaccctccacttggtgctgcgtctcaggggtggcatgcagatcttcgtgaagactcttactggcaagaccatcacccttgaggtggagtcctcagacaccattgacaacgtcaaggccaagatccaggacaaggagggcattccaccggaccagcagcggctgatcttcgccggcaagcagctggaggatggtcgcaccttggctgactacaacatccagaaggagagcaccctccacttggtgctccgcctcaggggtggcatgcagatctttgtgaagacattgactggcaagaccatcaccttggaggtggagtcgtctgacacaatcgataatgtcaaagccaagatccaggacaaggagggcattccaccggaccagcagcgcctgatctttgctggcaagcagctggaggatggccgtaccctcgccgactacaacatccagaaggagagcaccctccacctggtgctccgcttgcgaggtggtatgcagatctttgtgaagaccttgactggcaagaccataaccctggaggttgagagctccgacaccatcgacaacgtgaaggcgaagatccaggacaaagagggcatccccccagaccagcagcgtctgatcttcgccggcaagcagctggaggatggccgcaccctagcagactacaacatccagaaggagagcactctccacctggtgctccgcctccgcggtggtcagtaagccatggttcatttaagctgctgctgtacctgggtatctgcgtcgtctggtgccctctggtgtacctctatatggatgtcgtcgtctaataaacatctgtggtttgtgtgtcatgaatcgtggttgtggcttcgttggtttaatggacctgttgtgtcctctgtgttgtacccaaaactcttctgcagcagtatggcttgaatccttatgaagtttgatatttgaactt

SEQ ID NO: 33330 - DNA, 2182 bp, Zea mays
  Clone ID: UC-ZMFLMO17095D07_FLI
gggaacatatgatggatttaataatgcgatagaagaagttactcaccttgatattgatcagataagtccgctaagaatggtgcttactgcatctgttgcttttcatgatcaatctgtaaaacctggctcacctctgcttgtcagtgtgtcactcttatctcatcttccttctccagttgtggttgatcagttggaggttcagttcaatcaatctgactgtaactttgtgatgcatagtgcacaggaagactcactcccttcatattcaaatttgcatggccaagttattcaagatacttcttctcttactctcttcaccaatagatggatgcggttgacacatgaagtaaaatcaggaaagagtggaaagctagaatgtttgtctgtgaaggcgacaataagcaaacaccttgtgatttgctgccatgctgaaagccctgcttccatggaagacttcccattatggaaatttgagaaccaagtggagacactgcccacaaaggacaccactcttgccttttctggacagaaacttattcaagttgacgagccagatgctcaagttgaccttgtcttaaattctgctggccctgctttagttggagagttatttactttaccagtgatcatagagtcaaaaggacatgcagtccattctggtgaactgaaaattaacctcattgatgctagaggtggtggtctgttgttgagtccgagggaagcagaagattctgaaagtcatcatgttgaacttcttggtgtctcaactgtgtctgaggataaagagtcaaaggaagaggctgatagcataagaaagatccagtattcatttggggttgtatctgttcccacattgagtgtgggtgattcctggtcatgcaaattagaaatcaaatggcatcgagcaaaatcagtcatgctttatgtttcacttggttactccctaggctcaagtgaagaagaagcattgcaccggcttaacgtccatagaagcttgcaaattgaagggcagatccccttattagttagtcatcagtttttgagatcatttaggcgagaaccgttgttgctatcagggatcaggtccttaggaagtgatgataaaaaatgttctcttgctatgaatgagtctaacatgctaattgtgactgcaaaaaactgcactgaagtgcctttgtgtttgcattcaatgaccattcaacctgatggtgatggagagcagctgtgttcagtgcaacagatcagtggaatttccaatcgtcatgcaattgttgctcctagtgaggaatataaaggaatattttcggtcaatccacgggctatcagtacaaacttcagactaggtgaaatttgcctgaattggtcaagagattcaagcctcggtgaggatcaagataggcttattatcatgaaagtacagttacctgaggtcaacattgaggagccgccgcttgttgtgggcatggagtgccctccctatgcaatcctcggcatccctttcactatctatgtgaagattcacaattcaacgtctttgcttcaggaaatcaagtactcccttgttgattctcagaatttcgttttttctggtgctcacaatcatgctgctttcattctaccgaaatcagagcacactgttagtcataagtttgtaccgcttggttctggctctcagcagttgccaaggatcacagtaacttcagtgcggtattctgctgcattgactccttcagcctcagcagcgactatctttgtgtatcccagtgagcctaaattcaacttggaaactagccattcaacatccgatgagatcgtgagttgagacctaagcagcctgaagtctcccctctcctgacacttagctcgacccgggctgcatgtgagttaaggtatgctactggaaagaccaccagcttgacatttcatgttgattgttgaagaaacgaatcagattcctgtcggcgagaaggtcgctgtgcaaaagttttggcattatatttcgaggtttcgattttgtagcgcttctggattaaccacatatgtgtaacttatgattacttcattgtttttggttcaatggtgcaacatacacaggaagataggctgttgtaaattaccatcccaccagtaaagtgggggaacaaaccagccccatgtcagtttttactctttgatgcttgcc

SEQ ID NO: 33331 - DNA, 836 bp, Zea mays
  Clone ID: UC-ZMFLMO17095F09_FLI
ctggtgtagtcagccaggagtgcaagactgttgtttctcaatatggacagcagatcctagatcttttgctagctgagacacaaccagcgaagatctgttctcaggttggtctgtgcacttttgatggcactcatggtgtcagcgctggaattcggagcgtagtggatgatgaagctgggaaatcaaatggtggtctcaagagtgatccaatgtgcaatgcctgtgagatggctgtggtatggatgcagaaccaacttgcccagaacaagacacaggagctcatcctgaactacattaatcagctttgcgagcgtcttccgagtccaatgggagaatcagccgtggactgtggcagtcttgcgtccatgcctgacattgcgttcaccattggaggcaataagttcaagctgaaaccagagcagtacattctgaaggttggtgaaggacaggctgcccagtgcatcagcggattcacagctatggatatcccaccaccccgtggccctctctggatcttgggtgatgttttcatgggagtctaccacaccgtcttcgactatggcaagctgagggttggcttcgcagagtcggcctagggatatggtttggcagcaacccgtccagaggcaaacgcgtaatttgtgtgtttatgcggccggcgatgtgtgtatatatgctactacatgtttagtgatgctttccgagacctgagacaacgcccgtctgttttaacgtggcgcaagaataattctggttctgcatgtattctccgtacacaaaggcgtgtctgatactctgatgcaatggtgaccatcttgcggttgcgggtttgaaat

SEQ ID NO: 33332 - DNA, 1009 bp, Zea mays
  Clone ID: UC-ZMFLMO17095G02_FLI
cggcgcagttggttgggtcgagctcccaaccaactcgctcccgcgccagccaagccagccacgacccacgagccaccaccattacccgcccgcccgccacaggccacatcgtttccggccctgctcggctatatatccgcgagcatctgcatatcgccatatccccgccccgcgcaccgcgagctagctagctactgacacccggcgccggcgccgagtacaatacaaggaaagcagcatggtgttcgagcagcaacaggaggaggcggtgttgccgggcgcggtgcacgggcaccggctctccacggtggtgccgagctccgtgacgggggaggtggactacgcgctggcggacgcggacctggccttcaagctgcactacctgcgcggggtgtactactaccggtccggggacggcctcgccaccaaggtgctcaaggaccccatgttcccgtggctggacgaccacttccccgtcgccggccgcgtccgccgcgccgaggcggagggggacggcgcgcggccctacatcaagtgcaacgactgcggcgtgcgcatcgtggaggccaggtgcgaccgcgacatggccgagtggatccgcgacggcggcgcgcccggcaggatcaggcagctctgctacgacaaggtgctcggccccgagctcttcttctcgccgctgctctacgtccagatcacaaacttcaaatgcggtgggctggcgctggggttcagctgggcgcacctcatcggcgacatcccgtcggccgccacctgcttcaacaagtgggcgcagatcctcagcggcaagaagccggaagccaccgtcctcaccccgccgaaccagccgctgcagggccagtcccccgcggcgccgcgctccgtcaagcaggtcgggcccatggaggacctctggctggtccccgcgggccgcgacatggcgtgctactccttccacgtcagcgacgcggtgctcaagaagctccaccagcagcagaatgggcgccaggac

SEQ ID NO: 33333 - DNA, 1895 bp, Zea mays
  Clone ID: UC-ZMFLMO17095G05_FLI
cccgaagcttctcatccgtccttcctcacccgttcgtctgtctcgcctcccccacccacccacagcatcagaacggagggaattagggagcttcggccggatccgcaacatcggggaacggcgggaaccagggagctcccgccgcctagaaccggagctcccaatcgatccactggccgttgagccgacacttcaatggaagcccacgcctcgcggggccgccgcaccctggaggagattcgacagaagagagccgcggagaggatgcaacacgccgtcccgatcgcggcgtctaacgtggactctcacgggaaccaaagagctggagctgagcttcttgctcgagttcaagaacttgaaaatggcaacacggaattggagagggaaaacaaaatgatcttgtccaagatcgctgagaaggaagttgagaaggacgcccttgtaaaccgtttgaatgatctcgagcggaatgtagtgccctctttgaaaaaaaccttgaatgacatttctttggagaaagatgctgctgtagttgctaaggaggatgctctagctcaactcaggagcatgaagaaacggctcaaggaagcagaggaagaacagtatagggcagaagaagactcggcctccttgagagcacagctaaataccctgcagcagcaaatggaccacacttacagtggatatacaatgggaacatcaagtgaggaatctgttgccatggaaaaggagatacaagatttacaggcacagctaaagcaagagtcactgctaaggcaacaggagcaacaaaaattagctgaacaatcccagctgaggcaacaagagcaagaaaaactagcaaaagagcaaacccgtattgcttctctggaggctgaaaagcaacagttggaagaccaaattactatgttgacaaagaaagctacagaggacgcttctgagtttgctgcacgcaaggcattttcaatgcaagatagggaaaaacttgaacagcagttgcatgacatggctttgatgattgagaggctagaggggagtcgtcaaaaactgctaatggagattgattctcaatcgtcagaaatagagaaactgtttgatgagaactcagccttatctgcttcttatcaagaagccattgatgttactgtacaatgggaaaaccaggttagagactgtctgaagcaaaatgaagagctccgttctcacttggagaaactaagacttgaacaagttagcctgttgaaagtaagcaatatcgctacccaatcagatgggcaaactgaaaacagtatctcaaacccaccacaaatggtcatcgagaatatttctctaaaggatcagcttgtaaaagaacagagcagatctgaggggttgtcggcagagataatgaaactttcagctgagcttaggaaagcagtccatgcacagaataaccttgcacgcttatacagacctgtattaagagacattgagagcaatctgatgaaaatgaaacaagaaacttatgcgacgatccagtgatacatgttgacatgttgtgaaactcagtcctctggcatgggctccacgttaggccttgttcggttaatcccgttacccatggattgggtgggattggaaaaaattaagaaaaggtttgacttagttgggatttaaactcacccaatcccactcaatccatgtggattgggagctaaccgaacagacccttactgattttcgttgtggatgtatttatctcatgccatcttcaagatgctggtgcaaagcagttcttttcgtggccaccatttataagtagagttcagtcgagatcgttgtacttgtatcatactcatgtatacccgattcccagactggttcatctcgtaaattggaagccatgtttggatgcc

SEQ ID NO: 33334 - DNA, 2630 bp, Zea mays
  Clone ID: UC-ZMFLMO17097C05_FLI
ctctttgataacgtgcttataattttagctccagcgtgatagcgaatacatcctaaaatctcttcgtcgacgctgccaaagagcatggatccgggctgatagccgcaagatacgacaaattccttcagttccaatatatcctcttcggaaagttgttggccactaaggtgccgaagatcgaaatttttatctttcgaagaggtctcatcagttctctttgccttatcagtagatgtttcagctacatttttctcaggaaccacatcagatataagtctatcaatttttgacattgtggtagcgagattatcaatttcaggtgtaccttcattagctttggcttcaacagtatcttccgcatcagcaggcacaatagtcttttatgccgaagttgggggcgaggtctgttcgatggcttgcattacgttcatcattcgtcgtttcttttgacccccagcattttccccggtatccaaagcggtcttctttgattgcaataggttagtcagatctaaccctagaggacttagcattgcgaatgggaagggttcaatcatgaccttcggaatttctaaaacatcaacagaggaagacgaagaagggcctgctgtcttttttggcacatcttgtaccttcgtctctacaggagatattatgacaagctttcgtttcttgggagtcgaatccttcggctccgctagaactttttgcttcttgacaaccctctgatcttccttgacggaccagatggcctacctgttcagaatactaacaatcctctctgttttcgctcatccggccccttcgtcaagtctatcgtaatctggatattcaaagttaagagcatccatcacccgatccaaccttcatttttcacgggtgccgaaggtagggctggaaaaaaagctcgaggctcgcgagccggctcgggctcgatcaggctcagctcggtgaggctcgcgggcctaaacgagcccgagccgagcctaattccacggctcgctacactaacgagccgagccgagccaggtcggtgaggctcgcgagccggctcgaggctcgatccaaactactacagctatcacttgtcagttgtcagtttgtttactagtgtccagtcatctagatccagtgaccagtgtgttgttttggtcacaactcacaaggaattagagtgtagggacataattttttattatatggaacatattgtgcttcaaatttgagctaatgactgtaattactgttgatgagtacttgagtgtataggttcgcgagccgagccagctcgcgagcctatatcgagccgagcctcattatcgagctcgcgaagtgaccgagccaagccgagcctcgcttggctcggctcgtttctagccctagccgaaggcagctgtcatcagctgatcttctttcttcgtatagttcccgagaatttcattgcacattgtttctatcagctccaaccattcagtgcagggtttgctggatcttttttggaacttaaaccgataaggaagtcgaacaagttcatactttttcccttcttcctttttcttctgcattccccaccaaccagaagttggaaacgccctatttgccaaatattcttgcaccaagtccttagtgccgatatgctctgccacaactctaaattccacctcggtcaggtggtagggggaccccaactacatgttgcacaggggtcgagtcatgccgaagctcagtcttaagggactcattaccatgctcatgagcttctccctcttcttttcgtcacccttcacataaaaccactcatttgtccacccggtcggccacttagtacgataaccaatcacgggggccttggtatcctttcggtatgcaaaattatagcatccaaaattcttgtgcagaccatcacttctagccttcgtctgataatgaagtccgtgcactcgatagaacccttcggtattggcactttttcattggcttcgaagagtccaaatgtacacgctaagtctaacaatggcattgggggtcagttgatgtaggtaaattttgaacttcttcaaaacatcaccgatcatctcataaaggggaatcaaagtcctaccttgaagaagcttttcaagactacgacttcatcctcttttggttctagaatcacctcctctccagcaaaacgaaccagttcgtcatcatcctcaaaaacataatttgacaatgttttccaagtatgcgagcaggtatcttcggaatcaggttgcgggtatacaaaagcatggtcaagacgaagcttgactgaaatggaagacgatcgtgacgaaggatgaaacgatcacgaagctatgtgcagaaaagcttcggcatgacagcagaaaagggaaaccgacttaaagatgaaaagtcaaattagacctcgaagaattactatagagttattaataaaagcaaagggcattaatgtaattttacatgggctgcgtcccgtgcctataaatagatgaacagtactcccgtactgttcacgctgacttggcattggcaccacgcttgtacccttactttccttcaagccgaaggtacatttgtaatttgttgccgtttatataagtaaaataaatagaaatgaatgaatgttc

SEQ ID NO: 33335 - DNA, 1205 bp, Zea mays
  Clone ID: UC-ZMFLMO17097C06_FLI
cccgcccgccagcccccccaaggaggacgcagcggtttgccatgagaagacatctttggttgtgccaaacacgaacagcagcctaggaattccagcatgggttcagggaatctggtaacgaagaaggtggtaaggcggcccagctccatcgaccaggacataaagttcgatcaaagctgggtggaggatgtcgcgtgcccaatctgtctggattccccccacaatgcagtgttgctcaggtgcgcctcgtatgagaagggctgtaggcctttcatatgcgacactgaccagactcgctccaactgtctggagaggttcagaggcgctcatggactgccactgccagtgccagccaacgccagagcctcctcccgtaccgtggctcctctcaacagcatccataccattaccatctcttcgtcgaatgcaaacaacaaccgcccggcttgcccgctgtgtagaggcgatgtgatggggtggttcgtcatcggcgaggctcgctcgcaccttaaccagaagagaagatgctgcgaagagagccgctgctcgtacgtcggcagcttccacgagctccagaggcacacccagcaaaagcatccggactcgcgcccttccgcgatcgaccctgctcgccgggccgattgggagaacctgcagcggtcttccgacgtggtagatgtcctgagcacaatacacgcgcaggttccaaacggtgtggttcttggagactatgtcatcgagtacggggacggtgacgaagctggagacgacgactacgaggtttaccacggggttagagcaagctggtggacgtcctgtatcttctgcaaagcgttctgtaggtcttcccccccaggaggagtccggagaaggacgaggacgagggaaaggagaagcagtggtggaagtggaacaaggagcagcagcaacaggtctaggtctagtcaagaaaggttcactcttgatgaagttgacgatggatatgtagttgcaggggccatggccagggttgctgtgtcagggacaatggctgctcgttacagggatccaacacttggacaccgacgttcgcattcctaggaacatcaaccgggagaaaaaaaataaggaacctgtctttgttcatttttattctttttttctctctcttgggaacttcatgtacatatatatataaatataaagattgtagggaactttttttt

SEQ ID NO: 33336 - DNA, 743 bp, Zea mays
  Clone ID: UC-ZMFLMO17097D05_FLI
caaaagggataaatgtcagatactcaccgatcagaatccgtatttagaactgacaggccctgtgcgtgctgtcctcctatctggtcatgtgatatttgaggcttcattgtatgtgaaaggtgctactagatctgatgacaaagaattgagccttctagctattacttcattgggggaattcgatgatgctcactcatacttggttgagcactcttacactagcagacttagcatacttgaactgatgcttggttatcttacttattctgtggaagctacaatcgaagtgcgagtcatttgcgggacatggccagctgatggttttcgtttcatctttgaggccaatgccggtataggacaatggattgtgttgcttgagactgcagagactgcagatgttggtgataagatcagccttgcacggcaggttgtttctgttgactatcatagagatagagagctgaaggttgtggccaccattacgaatggttctgctacctatacagatgaaaaggccttcaaacctctgaaaatgggtgcaagcttcaaggaacttagtatcggtggcttagggttgcaagtcactgtttattggtcctgcttcccatttgcaccggtttagttagtttcgttgaaagtgctgtttatgcccatatttttcccccgaaaacttggttaggttagatctggtttggtaggttttaacgtgctagaaatcggatataaaacggagatatttgcgc

SEQ ID NO: 33337 - DNA, 1300 bp, Zea mays
  Clone ID: UC-ZMFLMO17097F07_FLI
tgaagatgcaaaaagaattgttgaagaagaaagagctaatgctcatacagaaatagaaactgctaagggttctgtccaaagagttcagcaagcagttcaggagcatgagaagatgtcccaaaataccgggaagcaagacatggaagaactaaagaaagaagttagagaagcccggaggatcaaaatgttgcatcagcccagcaaggcaatggatctggaaaatgaaatacgaattttacgtaacacattcgctgagaagtccaaggattgtgttaatcttttgaaagagttggaaatgcataaaaggttaaaagaaaatggtaccatcccttctttcgatctggagggtctccaatgcttaggatcaatgctacgtatagctggtctgagtggcactcacatggatttgtcaaatatttcaatccagtggttccggatacatccagaagaaagcaacaaagagatcatttcaggcgccacaagaccagtatatgctctagagccacatgatgttgggcgctatttgcaagctgaaatcgatgtcggcggtgaaattgcagttgcaaagacagctgggccagtagaccctgatgctggattggttgattatgtggagacactcgtaaggaaacctgaaactgaattcaatgttgttgtgcttcaattgaatggcattgacctgccaaaagagtcagttcatgttctcaatgtcggaaggctgcggatgagacttactaaagggaagtcagtagttgccaaggaattctattcctcatcaatgcagttatgtggtgttagaggtggtggcgaagcagcctcgcaggcgatgttttggcgacccagaaatgacctcagcttggtgctagccttcgagagcactcgagaacgcaacacggccatcatgctcgctcggcgtttcgctgtagactgcaatatcatccttgctgggccaggcgacaaaactccctggtgatggcacctgtgctgctctgccaatccccaccactcttaacaatccgcgattcgcacagcttgcttgcaccagttcctctgattttccttcctcgtcagtctgggctgtgctgtgctgttctgtgtgaaggcgccgtgcgcaccgttttaaccgcctcggcgccgcctttccatctcgctgtgctgtgtttttttttcagtcgggtgggttgtaatctgttgctaggagatgcgacagtaatgtaagcttggtgcggtacacgtctaattaattgtgtttgacgtgttagcgttggtgttgaagcaatgctaggtaacatgtgtgccc

SEQ ID NO: 33338 - DNA, 1337 bp, Zea mays
  Clone ID: UC-ZMFLMO17097G01_FLI
gggttcactgttcaacttttcttaattaaccatttacatttaccaaaaacttattcaacttttcactgttcaagttcaatttgttttgtgcagtattgatctgttgtgcagtgtatactttgaggttcggttggccgatcttgcgatcgaataccaaaaacttgtgtggtactctgttgctgaataaaacttggatcaggttaccccaaccccaatggcatttaccgagccgatggaggcgaacctgctacgccaagtgctggactatccccccagtgctctgtccatccctccttcagcttcattgatggttgcactgctctactatactataagtgaattgagttaaagcattttttgttcgactactgtttggtgcatgcaacttaatatggctgatttttagtctttctattttagtttataaattgtcaatcacagggattaaaagagactaaaagtaaggtttcaggttctatttctatccatctttaattaagggctgaaacgatactgtcttgattcctaattcacctaatattcctagaccaagaacgactcgggttaatggtcagggatgccaaattgtttcagtaaaactaagcaagctcgtatgatgattatgtacctacttgagaacaaattgtctaaaacatatctgctactacacttcagtaaaacaattgatcacacacaagaagttcagatcagaaagcaggctgtcgctactcccgtcaggttctcggatggttcccgtcaagggctgaccatggagaagagcacagtggtggtcagtgtccctgttgttgtcatggccgagactgctgagaccgactacagctcgagcttctcgcacctttgcaggatgcagagtcccagaaagatgttgggaagggtgataaatcaagggataagggaactgctgagaagtttgcaatatatcagaagcatcgttcttcgttggcagacactgttcaattcaggaggccagctgctccaacttccagtgtgaatgctgatattgtgggaacatccactctgcagtctgcatctctaccgaaacaagaaccctcaacagctacatccaagagctatactttcagagaaggtgatagggtgcgttatgtgggtccagctcagttatcctcattgtcacaaaggctcctctccttttgctggcttcgctgttggaagcgagacatcatgtggtgtggataacgtccttgcagagcacgtgaactcaaatttcactctaatgtcagctagctgctacatagtgcacttctgtatattatgagtatgtatacagaattttaaagtatgaatacatgtgtttt

SEQ ID NO: 33339 - DNA, 2378 bp, Zea mays
  Clone ID: UC-ZMFLMO17097G03_FLI
ggaaggctggatgtatgtaccgtggcaacgtgccatctcctgtgacatccactcctcagacattcagtgctgaggttggtactgggtctgacatctgcaaagctcagaaagatcttaatgcccttgatataacagttgtagagttatatttacaaattgtagacatcaagaatttaccatctgctgttcaaaaagaaaatgtgtatgtacggttcaccaagaatcaatcagatatgttcatcagtgacggcggcaggttggatatctcaacagttacagggaagaacaccggagtttgtttacagtgtgaacctaccagagaactcattcttgcagtaatggttgatcaattatcaaagaaaccagaaccgatagggaaggtttctttcccactgcacgatttgacagggcctgattctaagctctccttcgagaagtggtttgaactgaaagctcatggtgggcatgccgcttcacctcctgttagtcttcgtgttgcagcttctgctactgtcccaagcagcgctcagaaggtgttcaccatggtcaggatggagccattctctctcaagtcatgtcttttgccacattccatcaaggatcagaacacgggcagctggactcgtttcgtaaatgattgtggtaccgagcttatccgtctccagataagagagcacaaggcgaagaatagcatggtggtcgttcgagaattggttggagtattgaagtcaacaaaaaagcaaattcagcttgcagaattcaaggaaaacaagtggaccctaaaagactccaacttgccaataagtcatggcactgatggcagtctactcgatctcaaaggtgacaaccatctgatcaagctttatcggggaaggaaactggaatacgagcaaatgttgcagtgctcactctgaggacgtatcagctgttactgctgtaaagttctgtgctgaacatccatatggcaaagccgttgccttgctagacactgaagctcagcttatcatggtgaacgaggattggctcctacttccatggatctccatatcagtcctgtttatggacggcgatggcagtatgaaacttagcggcggtgccatggttcagaaaggtacagtgtttggatccgacactagcatggtgctagacacacagaccgtcggagcagggagcgtggcaaccaatctagcacaatgtggcacttgcagcgccgtgttcggtggtgatgataaagaaatggcaaactgcaaggttgagcatgtgagctctggcgcttctcgcacagtcgttgcaagtggtgagaatgggcacactgagactgctggctgtggaggcggctgtggtagcaattgtggacccatgatggctgaagaccccaaggccggcaatgccaagtctggaggctgtggtggtggtggctgcggtggcgcgggaggttgtcggaccatggccaacgaaggccaatccaggtccggaggcgttggcaccttgttgagctccaacgccatgggtggtgagggccagcaggcccattcagctggctgtggctccggctgtggtggtggctgcggcagcggcatgctcatcgaaggctccaaggccaacaacgccatgtccggtggctgtggctctggttgcggtggtggatgcggcagcggcatgctcatcgaagtctccaaggccaacaacgccatgtccggcggctgtggctctggttgcggtggtggttgcggcagcggcatggttaacgaaggctccaaggccaacaacgccatgtccggcggctgtggctccggttgcggcggtggttgcggcgccctgttcaacgctagcactgctgccggagagggcctgcacaataagtcggctggctgcggcggcggcgggtgcggctccgggtgtggcggcggcggcggctgtggtagcggcatggctatcgaaggcttcaaggccaaccacgccaagtctggtggctgcggctctggctgcggtggtggctgcggcaccctgttcagctccagcgctgcggccggccaaggccagtccagatccggcggctgcggctctggctgcggtggaggctgtggcagtggcagcatggtcgctgaaggctccaacggcgggcacgccaagtccggcggctgtggcggcggttgcggtggcggaggtggctgcggcggcggaggctgtggcgggggttgcagcaccgtgttcaacgcatgatctcggtggagtggaggcatttgtgcagacatgcagtcgtcgtcgtctattgctagataccacatgctacagcatactgtgtattgctgtgcataatctactaaataaaatgaatgaataaacaatggatggatcggctgcctccgtggcgtttc

SEQ ID NO: 33340 - DNA, 1737 bp, Zea mays
  Clone ID: UC-ZMFLMO17097G09_FLI
cacacacacacactctctcgcttgacctacccccctccgccccccgccgggcctgcagggtgttcgacgcttcgcccgcccgcccgagcgccgccacggcatggcttcctccatctccgccgccgctaaggcctccgcggcctttgcccaaaagaaggagctggccgcgccggcgccgcaccgcgcgggctcgagccgtcggaccaagccgtgccgcgtgcgcgccgtcgcgtcgcccgcgcgcaccccccgcgccccgtcgtccaccggctcggtgaagaccgcgatgacgatgacggagaagatcctggcgagggcgtcggagcgcgcggcgctggagcccggggagaacgtgtgggtggacatcgacgtgctcatgacgcacgacgtctgcgggcccggcaccatcggcatcttcaagaaggagttcggggaggatgccaaggtctgggaccgcgagaaggtcgtcatcatccccgaccactacatcttcaccagcgacgagcgcgccaaccgcaacgtcgatatcctcagggacttctgtctggagcagaacatcaagtacttctatgatatcaaggacctcagcgatttcagggctaatccagactacaagggtgtctgccacattgcacttgctcaggaaggccactgccgaccaggcgaggttctcctgggtactgattctcatacgtgcaatgctggagcctttggtcaatttgcaaccggaattggaaacactgatgcaggttttgtgatgggcactggaaaggctcttctcaaggtgccacctactatcaggtttgtattagatggagaaatgccgccttatttacttgcgaaggatctgattttgcaaattattggtgagatttcagtatctggtgcaacctacaaatcgatggagtttgttggatcaactgtagaaagtctaaccatggaagaacgtatgacactatgcaacatggttgttgaagctggtggaaagaacggtgtcgtgcctgctgatgaaactacatttaaataccttgagggtaggacatcagttgattatcaacctgtctacagtgatgctgaggccagattttttagtgactaccggtttgatgtatcgaaactggagccagtagttgccaagccacattcgcctgacaaccgtgccctagcaagagaatgcaaagatgtcaagatcgaccgagtctatattggttcctgcactggtggcaagactgaggacttccttgctgccgcaaaggtgttcttagcctcgggaaagaaggttaaagttcccacattccttgtccctgccacacaaaaggtgtggatggacgtatatagccttcctgtaccaggatctggcggcaaaacttgcgcccagatattcgaggaggctggttgtgatacaccagcaagtcctaattgcggcgcttgtctgggtggccctcgcgatacgtatgcacggatgaatgaacctacggtctgcgtgtccaccacgaacaggaacttcccgggcaggatggggcacaaggaagggcagatctacctggcgtccccctacaccgctgcagcctcggccctgacggggtacgtcacggaccccagggacttcctcatgtgaacgatcttgaaacagccacagagtgcctgcaccgctgttttttgtgttgaaccttagtttaggcgtgtgcccttcgttgagaaataaactcccatgtcgggaggctgccattgccattt

SEQ ID NO: 33341 - DNA, 2274 bp, Zea mays
  Clone ID: UC-ZMFLMO17097H06_FLI
cctttgcctacaagcccctctctctctctgtctctctccctctccctcccgtatggtctatgccctcccaccctctttcgtagcgcttcttcctatgcctctcgccggaacggaacagcagatagcatctcaatctccagtggctgtgggcatctttccttttcctgccataggccctaggccgtgacgggagctagcttctcgcttgcgggcgtgcttgctccggctatcatattgcctgcctgcctgcctgcctatgaaacctctccggccaatggaggagctacctcttcttcttcttctctagcctttctcgtctctgatccacccattgaccttcggtgcgcccggccactctgcgccggcctctcgcgtgcgtctcgtgtgagtgctacaggcaagcgaagcgatggacatgaacgagagcggcgagaaagggatggagggcaacgcgtcctccggcatcccggtggactggcagacccaattcagcgccgccgccttctcgtgcgcgccgccgcagcagcagcaggttcccatgatggactccgccttcgcgtccgccggcctgtgggcgtccacctcccaggccatggcgctctccgacgcgggcggcaggtcggccgcgcgggccggcttcttggcgccggtccccggtttcctcccgcagggcctcgcccatttccccgtggactccggcttcatcgagcgcgccgcgcgggcttcctgcttcggcggcggcggggtgatggctgccttcggcgcagcagctgatcatcaacccatgaacagcgcgttcagtggatcctcggaggcgctgctggaccaccagaggacgaaggacggcagcgacaagggcgagccggagctcggccggaacggccacgacggggttctgagctcggaggcggctgctgcgggggactgctcgtccaaggggacgtccgactccaagaagaggagaaggcctaacgaggtgatgggaggcgatcaggtccagtcgtcgaacctgcccgccgactcagcgaacgagagcgtgcacagcaaggacaagggcgaggagagcagcctggcaacaaccaccaccggacccggcaagtcgaaaggaaagggggcgagagagacctccgagtcccagaaggaagactacatccatgtccgagctcggcgcggacaggcaaccaacagccacagcctagcagaaaggttgaggagggagaagattagcgagaggatgaagctgctgcaggacctcgttcctggctgcagcaaagtcactgggaaggcggtaatgcttgacgagatcatcaactatgttcagtccctgcaaagacaggtcgagttcttatcaatgaagctcgcaactgtaaacccaaggctcgacctcaacatagaagggcttctatcgaaagatcttctccgcttccctggcgttccttcgtcttcccttgggttctccccggaaatgatgcacccacagctgcagctctcgcagccaggcctgatccagggcggcgctgccggcatggccaatccggacgtgttcaggagaatcatgcaggcacagttaagcgcaaaggacgggtctcagatgccgccccacgcattgaatggggcattcagtgacgtcgcgcagcagcagatggcgtacccgtcgtcccaggacctgagcatcgggccgtcgcaggacgggtttcaaatgtgactgaacatgcccagttgcacatactagtaaaagatgcaaaaaaagggcttcttccatctgaggagtatctgatcggcgaacgtgcgggcgcgcagggggccgcgtatagctgcctgctggtgccgggagcagcagcgcctgctcagcgcgacgccttgaaccgcgtcgacccacggctgtgcctgtgctgctgcatcggtcaggtttttttatcgtgttcagaaggaactgaggaaaagctcgtggcgctggcctgtggcgttgcctggatagatggctggaaattctgtctgtttcggcggtcgcgtgcattcatggcatggcgcgcagtgcagtaacagtgggctgcgtgttggcacttggcacagcgaccaaatgagctgctgcaggatgtgatgcaacgcgaggagccttgttttgttagtagtttccaatgctttttttttgtttttgtttgcataatagctaagggtgcaagaaaacactcataaatttgggggtggggggcggcgctccggcgatgtctatgttgaaacatcatacatttggcaaatttctccttgcgccac

SEQ ID NO: 33342 - DNA, 1318 bp, Zea mays
  Clone ID: UC-ZMFLMO17097H08_FLI
agggttgggcctctggcctctttctgatctctgtcatatgaaggggtgtacaggttccttatatagagatgtgagacccctcaggggcaaagcaggtatttgcccacataaccctaactagggttacttaacaccaacttctaaaaattaccagaagccttctttctgcattgtaccagaaacagcttcctctcgttaagaaggaaaacagaagagtccagggcaaaaaggaaaaacaaacaaagcaactctacggcgaagaaatcctcttcctccctgtcgcgatgcgcaactcccacacgcaacctccaccatccatgattcgtccccaatcccatctccgcttgactttgtcttacatacaaattgctgatagacagagtactatggatggaattggatcagctgctggccgatggattagtagacaaggcccgggcggcggccggggctcggcggcgacagaggcagagacggagtcttcttcggcgggggctcgatggggcccacgtgggagcggaatcccgcggagaccaccgcgtcgcgcacgcaccagtggaacgccggctgccgcatggccgccgccgccgcctcgcactcggggcacggggacggtcgtcgcctcggggaccactgctgtgggtcctcgttatccggatgccccgccgccaccgacaagtgcaagtaggcggggtccagacccggacccgcacccgcggtgctcatcaagtaccagtcgcgctgccgctgcagctcccgcagccgcgcctcgtagtcgtcgtagagcacgagcggcccggccgaggcaccggcactggcgcggggagggagagggctgaccagagacgccagatccgtgggcgggaggcgcttcaggatggtcttctccacggccgcgccgttgactcccttcctgtcgcggcgggaccggccgccccggcgggagcggcggaacccagcgatgacgtagcacccggaaccctcccgcgcgacggcggcggcgaggtcggtggcgtcgtcgaggggcacatggcgggcgcggcggggccgcgccagggacgccgagatctggtgcggcgcggcgcccacgcggtctgccacgacggcctgaagccgcttcacgccgccaaacgacggctgcacggtcaccgtgcccaagtccacgctctgctcgccgtcgacgaagacaaccggcagcacgcgtgcgtcctccatgtccgacgcacgctccttcctgcttcagcggcggccggccacaagcctcgaattgaaacggccgccacccggaccgggtctatctgtttgggctgttgcgaat

SEQ ID NO: 33343 - DNA, 1107 bp, Zea mays
  Clone ID: UC-ZMFLMO17099B07_FLI
ccatacttcatggacgggtcatcgagtgcaaaagatggccatcatgctgttgctggtaataagcgaaaacatgaaaccttagaagttgatgaagatgattcaataattgcagaaagtgaagtactttggcggataaattttgagagattcatattttgtttaaagaagaagttttgtgcagaacgaaagaaagcaaagatgaggctcggaacacttgctatatgggaagcattttttgaggccaatgtaacaaacaacgacaacaagactgtgacatcaccaatagatggaattttggaaagagtaggacaaaaggaaggaggcatgtcaatgactttggatcacataacaagtgtgttgaatgatttagagtgcacttctaccgctaataacccagaagaattcacattcgatttgaataaattggttgagacatgtcgaaacgatgagatagagtctcttgtgaaaaagaaacatgggcaagaagcttatacaatctttaggttattgctgaaacaaggctgtccagttgagacggatgaaataactgacaggacaattctagacaagcaggttgttcatgaaactctatacaagctttggaaagatgaatacatagattcagagagagtcccttcaacatcagcaacaggaacaggaagcgctcagttctttgtttggagagtaaaaaatatttatagggaacacttcatggacaatctttaccatgctgctttaaacttgcgccagatggtcaattatatggctgaactactacttgagggttcaaaggatgaaatcaagcttcggaacagaaaaaacattttggtcctagctctcactagacatgatgaatcccttatgctgttccatgatttttgagaatactggaacaggatctagtatgtcatatttacatatatggatgtaaagttagatgactgagaataaagtagcttaactttttgcagatctttatttatgtgttatctgttgtgatttttttcgtttttcatcatttgatggtgccagatacagatacaatggatactagtaacttgcgcgcatccgcgcgcgcgtagaaaaacaattcataatataagtgat

SEQ ID NO: 33344 - DNA, 2212 bp, Zea mays
  Clone ID: UC-ZMFLMO17099B11_FLI
cttctctatcctctgtcccctccaccaaaaccgacggcgacgtcgctctcctccaccggtgcttggagctctccctccaccagcggcggtccacggacgctcggcgagctccaccggcgggcgctggtcagatccgcttggcagtcatccacctggcacatcgggtagctcacgcctccgttggcagtcccaccgccgcctggccctcccccagtgcccccggtgatccggaccgcacccgcttgctcggcctaacgaccggctcctgccccgccgcagccgaagctcccagcgtcctcctgcaggccgagctgaaggttcagcgcgccggtggagttcgacgacgaaactccgtcacgtcatacctctccgcctcccgtcttccagacgtctccaatcggggctcccagcgtctcggagaagaggagcagcacggcacggcggctgtggcgaggaaggctcctgtcccatcccaacccagttagcagccgcccaaggaggaggagatccaatcggcgtgcgggcgtccgcggtccatccatcgatccaattccaatctgcagaagaagggatcaaggaacagcgaccagagaaaggctgcgtctgctgctgctcctacggctgctgatgctacgaacaagaggcccaggatcaatcctggatccgccactgggcggcaggagggaggccatagagcgggagctgaagaagcttcgggcagagcgggaggagctcgacggccggatacggctgctggaatcgcagctcgaggcagggcctgcgggattcaacggtgcggcagcggggaaaggagtaggggatgatgcgtgcggcgggagtggagcgtgccagagccgcgtgggtaacgggtttgctccggacggtagcctcccggcggatatgatctaccggtacagccgccacctccttctcccggacttcggggtcgaaggccagcggaagctgtcacagtcgtcgattttagttgttggagctggaggtttgggctctcccctggcattgtatctagcagcttgtggtgtcggttgcttgggcattgtggatggtgatgatgttgaattgaataatcttcatcgacagataattcataaagaagcatatgttggacaatctaaagtgaagtcagcagctgatgcttgccgtgagattaattcctctatcaaggtagtagagcatcaccatactctgaagccatgcaatgctttggagattgcacggaaatatgatatagttgttgatgcaactgacaaccttcctactaggtatatgatcagcgattgctgtgttttgctgaacaagccacttgtatctggtgcggcattaggcttagaagggcagttgactgtttatcatcataatggaagcccatgctatcggtgcctctttccaactccaccacctgtggcagcctgccagagatgctcagacagtggtgtccttggggttgttccgggagtgattggttgcttacaagctctggaggctataaaggttgcaactggtgttggttaaacttcgtggaagctctccagattgcacccattgtggcgaaaactccgttttcacagaagaagactttcagaagtttgactatgagagcttcacacagtcaccaatgtctgataaggcagcagcaagcgtgaacgtactcccagagagcgcgcgtatcacttgcagagagtacaagaaactggccgacgatggtgaacctcatctactgctggacgtacgacctgcgcatcacttccagatagcttcgatctctccgtcccacaacatcccgctctccatgctggaagagaagctgcccgcgctcgaagcctcgctgaaggaagcaggggaggggtcagccttggttgtcctgtgtaggagaggcaatgactctcagagagccgtccagcttctccgcgagaagggattcgccaacgcgaaggatatcatcggtgggctgcaggcgtggggacaagacgtcgatcctgatttccctgtgtactagcgagatggaaatggatgcactaccttgtaacagtttggatgccgctagaacgagaactctgatactatgatttgagtactaattttgccataccgtgtacttgcaaaaacaaatatacaactggtatggacacggtattgtgatgaataatgccatggacaaaataaaatttgagtgatatttttttgcaggttt

SEQ ID NO: 33345 - DNA, 2218 bp, Zea mays
  Clone ID: UC-ZMFLMO17099C05_FLI
aaaccctagtcctctgttacttctccctccgccgccactcccctcccattctccgccaccgccaattccataccgtcctccgccacctctgctgagagcgagaagagatggcaggcaagggtgatgggccggcaatcggcatcgatctcggcacgacgtactcttgcgtcggcgtctggcagcacgaccgtgtcgagatcatcgccaacgaccagggtaaccgcaccacaccctcgtacgtcgccttcaccgactccgagcgcctcatcggagatgcggccaagaaccaggtcgccatgaaccccatcaacaccgtctttgatgccaagcgtctcattggcaggaggtttagtgatgcctctgtccagagtgatattaagctgtggcccttcaaggtcattccagggcccggtgagaagccaatgatagttgttcagcacaagggggaggagaaacagtttgcagccgaagagatctcctctatggttctcatcaagatgcgtgagatcgctgaagcttaccttggcagcactatcaagaatgctgttatcacggtccctgcctacttcaacgactcacagaggcaggccacaaaggatgctggggtgattgctggcctcaatgtgctgcgtatcatcaatgagccaaccgctgctgctattgcctatggtcttgacaagaaggcaaccagtgtcggtgagaagaatgtcctcatctttgaccttggaggtggtaccttcgatgtctccctccttacaattgaggaaggtatctttgaagtcaaggccacagctggcgacacccatcttggtggtgaggactttgacaacaggatggttaaccactttgtccaggagttcaagaggaagaataagaaggatatcactggcaacccgagggctctccggaggctgaggacctcttgtgagagggccaagagaactctgtcttccactgcccagaccaccattgagattgactcgctgtacgagggcattgacttctactccaccatcacccgtgccaggtttgaggagctcaacatggacctgttcaggaagtgcatggagcctgttgagaagtgcctgagggatgccaagatggacaagagcagcgtccatgatgttgtccttgttggtggctccactaggatccccagggtgcagcagctgctccaggacttcttcaacggcaaggagctgtgcaagaacatcaatcctgatgaggccgttgcctatggtgctgccgtccaggccgctatcctcagtggtgagggcaacgagaaggtgcaggacctgcttctgctggacgtcactcctctctctctgggtctggagactgccggaggagtgatgaccgtccttatcccgaggaacaccaccatccccaccaagaaggagcaggtgttctccacctactcggacaaccagcctggtgtgttgatccaggtgtacgagggcgagaggacccggacccgcgacaacaacctgcttgggaaattcgagctctccggcatcccaccggctccccgtggtgtcccccagatcacggtctgcttcgacatcgacgccaacggcatcctgaacgtgtctgccgaggacaagacgacggggcagaagaacaagatcacaatcaccaacgacaagggccgtctgtccaaggaggagatcgagaagatggtgcaggacgcggagaagtacaagtcagaggacgaggagcacaagaagaaggtggagtccaagaactcgctggagaactacgcctacaacatgcgcaacacgatcaaggacgagaagatcgcgtccaagctggctgccgacgacaagaagaagatcgaggacgccatcgacgcggccatcagctggctggacgccaaccagctcgccgaggcggacgagttcgatgacaagatgaaggagctggagagcctttgcaaccccatcatcgccaagatgtaccagggcgcgggtgccgacatgggaggctccggcggcatggacgaggacgctccggctggaagcggtggccctggccccaagatcgaggaggtggactaagcggtttgtgtcagtctcgtgtgtctgctgcagtggctggctggcccagtcgctgctcgatttatcgtcgtcgtcgcggtgtatccgcgttagaaccttttgttggtgaacaatattatcgtggcacgcgttttaagtaatacggtattctggttcggttt

SEQ ID NO: 33346 - DNA, 1389 bp, Zea mays
  Clone ID: UC-ZMFLMO17099D04_FLI
atctttcttcagttttagatgtgatagatattggtatgaaagataaaaactagaatgctatgtctgtcaaaggagctttcttcagttcaggcagctccatctcagtcgttgtacccattcaacgccgagctggtggcagcgatgcaggagatgatccagccgaggtgtacaagtacatgttagtggacgtcacctgccaaagatacacagtttctactgtttttcagttggagaaaatatttaagacaacattttcatcgtttgttctccatatggggcttgtttcacgccacttgaaggaaggagggaatgatggtgttaagttcggacaatacatctacacatctatgaaatgtacaaccacgatgtagagcatagagtttctaaagttgggtaagctgtttggctgttttatagaaatttgtatcaacatcaacatagatttttagtcccaaacaaattggggtaggctagatttgaaacccaacaagaagtcaccaaaaagagaaagagagataaaggggaggggaaaagcttttgagagaactaaaagagaaaatgcctaatcacggttcgggcacgtggatagcttctttccaagcatttctatccaaacacaactcctttgggtgtgtggggtgatattagaagcttcatgttaggtgtttgatactttcttgaatataggatttttgtgtgtgtggtgtagtataaataatgtccatagttgaataccaaaatgtggatattgtacagtgggagttatggctgccttcttcattgcttgatcttagttgttggttgcaatcttctaacttagagtatgatgcttgaagagatttggatgatgttggagatgtgctttggtgtagttcatctctcccgaatcaaggttcataccccactattttggtttcctaaactgataggcacaactagaaattatcgagtgatgtctaactttcctacctgtcttgcaatgcagagtctggtttatggggctaaggtagaggctgccatcgccattggattcaatgacttcattacatatgctctgagaggcatttggttctaccagaaggataacatggagatcaagaaggccaatggcaatggcacactgatccctgagcagatctttgaaaagactaggagaagttctagatgaattgatgcttggctgaagagggatgtcagatttgtacaatgctcacccacaaagaataatacatttctccaatgtccactgttttgaaaaatacctccattccaatgtttaacattctaacgatgtctgaatttattgtaaagagacacatgattgttcattgttgtaacttatgtacaatatatgcgtgtgtgaaataaagatcatcttggagcaccggc

SEQ ID NO: 33347 - DNA, 717 bp, Zea mays
  Clone ID: UC-ZMFLMO17099D09_FLI
aatcatctgccttgtactggtgactaatcatcttttcctggcctctcagggtatcttcacaggaacctgtggaacagcgttggaccatggtgtcacggccgtcggctacggcacagagaacggcaaggactactggatcgtgaagaactcttggggcagcagctggggcgagtccggctacgtcaggatggagcgcaacatcaaggcgtccagcggcaagtgtggtatcgccgttgagccgtcgtaccctctgaagaagggcgccaaccccccgaaccctgggccgaccccgccttcccccaccccgccgcccaccgtctgcgacaactactactcgtgccccgacagcaccacctgctgctgcatctatgagtacggcaagtactgcttcgcctggggctgctgcccgctcgagggcgccacctgctgcgacgaccactacagctgctgcccccatgactaccccgtctgcaacgtcaagcagggaacctgcctcatgggcaaggacagcccactgtcactgtcagtgaaggctacgaagcgcaccctggccaagccgcactgggctttctctggcaacacagctgctgatggcatgaagagcagcgcatgagaaaaacgcagcatggcattaggccgtcaacagccagcatgattagagcccccctgcatgcagaatgatcacccggtcccgtagttcacgacgaaagcatggct

SEQ ID NO: 33348 - DNA, 742 bp, Zea mays
  Clone ID: UC-ZMFLMO17099E03_FLI
ggtgagcacggcggtgaagggcagcttcgggtacctggacccggagtacttcaagacgcagcagctgacggaccggtcggacgtgtactcgttcggggtggtgctgttcgaggtgctgtgcgcgcggccggtgatcgaccaggcgctggagcgcgagcagatcaacctggcggagtgggccgtggagtggcagaggcgcgggcagctggagcgcatcgcggacccgcggatcctcggggaggtgaacgagaactcgctgcgcaagttcgcggagacggcggagcggtgcctggcggactacgggcaggagcggccgtccatggccgacgtgctgtggaacctcgagtactgcctgcagctgcaggagacgcacgtgcggcgggacgcgttcgaggacagcggcgccgtgggcgcgcagttccccgaggacgtcgtcgtgccgcgctgggtgccgtcgtcgaccagcttcatgaccacggccgacccggacgactcggccgtcacgggcgtgggcgccgtcgacagcaaggtgttctcccagctcagcggcggcgagggccggtgaacgatgaccggctactggagtgtactaatcgctctctgttttgctatcgtttgacagtaccataggggggaaaatcacgttattatcacacacacagcagcagctcctagagttgctggtgaatgtgctcaactctgcaaccaaaaacttttcgagccaattcttcgccgtccctac

SEQ ID NO: 33349 - DNA, 1548 bp, Zea mays
  Clone ID: UC-ZMFLMO17099E05_FLI
tgaaagggctcaagcacgattagtcagtcttgagagggaaaagggggatctgcgttcacaattgcagacaactaatgaggatgcaagcaaaagtagtgactatttggaatcaagtgatatacttgagagttccttgaacgccaaggagaagattatttcggagttgaatgcagaacttcgcaacattgaaagtactttatcaagtgagagagaaatgcatgtgaacgagcttaagaagttgactactttactcactgaacaggaaagtgctcttatggagttgaagaaagaactccaggaaagacctacacaaaaactggtagatgatctcaagaaaaaggttcagattttgcaggctgttggttacaactccattgaagctgaagactgggagcttgctactaatggtgaagaaatgagcaagttggaagcattgcttctagacaagaaccgtaaaatggagcatgagctaacacaactgaaggttaaaatatcagagaaaacaagtgttcttgaggaagctgaaaaaaggattgttgaactaacttcaaaggttgaagagcagcaaaagctgattttgaaacttgaggatgacatactaaagggctacagttcaactgataggaggggctcactcttgaatgactgggatattcaagaaatcggctcaagtgaagcatccgagggctctgatccaaggcatgcatcggcagatcaagatcaaagttcgatgctcaaggtcatttgcaaccagagggatcgtttccgtgcacgtctgcgtgaaactgaggaggaactgaggagactaaaagagaagcatgagatgctgactgttgaactggaaaaaactaaagctgataatgtgcaactgtatggaaagattcgatatgtccaagactatagccacgacaagattgtttccaggggaccaaaaaagtacgcagaagatattgaaagtggttcttctgatgttgaagcaaagtacaagaaaatgtatgaggatgacataaacccgtttgctgctttttcaaagaaggaaaaggatcagcgttataaggaacttggtttaagagacaaaatcacacttagtagtggccgttttgtccttggtaacaaatacgcacggacgtttatattcttctacagcatcggattgcatctccttgtatttacattactgtacagaatgtccgctttgagctatctcaacacaactcagcaagatgaaatcattctggatgctggtaatcagaggctaacgcacatgctttaggccaagttccatataacagtagaaaaagaggctctctgggttttgatctatagaatctttggacaggatcgttgctgagattgctattgacttgtttgctttgtacccttgatatgtttctgtagataaaaagaaaaaaaaccctgttttgggggcaggcgtgggtgcggcatgggctttgaactatgtaatactgttgtactgccaatttaccattttgttggtaaatgaaagcacacttgtcacaaaggtatacggtatgccataccatcact

SEQ ID NO: 33350 - DNA, 1105 bp, Zea mays
  Clone ID: UC-ZMFLMO17099E09_FLI
ccagtggccactgccattgcttgcccttgcccataaattttttcaaacccctgacgctgcctccccacaccttcttcttctccccaaattcgcccggcccgtcgtcgggagcaagcaatgtgccccagagccacggaccagctctgcggcgccgcaatggctagcgtgtgttcgttggtggaggaggagtacatcgacctggatctcagttcgtgcggtgagctagagttccgggtgcgccggagcggcgcgtcggacgagctcctctgccggggtaggctgcagccgccggcgccaccgaggcctggcggcaaggcgcaggaagctgacggcggcggcggcggcagtggctgtggtggcgccggcaggaggagcgccgcgacggtggcgccgctgcagcactcgcactccgcggggttccgcgacgacacgcagcccgtggcgaggctgcgcaccgagtgctcccgccgcaggaaggcggcgcggacggtgcacgcgaagctgctggcgtcgcgggccttcttccggtccttgttcgccaggactaccccgtgctccgacgagcaatgccgcggcgccgaggtccgggccagcaccagagcggcgccaccacccggcgagacgaagagcgactgctgcaaggcggcgtttgcccagatcaataacggctacggctacggctaccacagcggcagggcggcgccgaccaccctgcggagcagcatcgagcaggagaagctgatggacgaggaggagctcgccgccgcccggcagcgcaagtccttctccggcgtgatcaagtggcggcacgcggcatcggcgcctcccgccgcggcgccggcgaagcctctgtcgtcgtcgtcgtcggcgaggaggagctccggggctggcggcgggccggcgctgaagcggagcagcagcgcccggtcggagtcggaggggctgatccagggcgccatcgcctactgcaagcgctcgcagcagcagctggggctcgccaggaagagcgtcagcgacgccggcgcctccgcgccttcctggccggctcgatcggccgtaacagcagcagcctactgccactagccgtgagccccgtgacgtgtgc

SEQ ID NO: 33351 - DNA, 1489 bp, Zea mays
  Clone ID: UC-ZMFLMO17099F09_FLI
ggcaggcagaggcaagaggcccctcaccctcaggtgatcaggtcgctagctcccggcttaactagtaggcagccatgaatttcggtgggaatggcaacgcgacgatccggtgcaagtactgcagggcgagcctgagcgtgatccccggcgagcgcgccatccagtgcgcgcaatgcaactgcgtgacccgcatccggcgggccgaccgcatcccgctggcgcggccggcgcacgtgccgccggcgttccagcgcgcccggggcaagaagcgcgccgtcctggtcggcatcacgtacgccggcgcgcgccggggctgcggcgacctgagaggccccgtcaacgacgtcaagtgcatgaggaacctcctctgccagcgcttcggcttccccggcgagtgcatcatcatgctcactgacgaccagagggacccgttcaggctgcccacgaaggagaacatccggatggcgatgcactggctggtgcagggctgcagctacggcgactccctggtgttccacttctcgggcatcggcgcgcaggtggcggacgacgacggcgacgaggcggacgggtacgacgaggccatctgcccgctggacgcgttccagagcgggcccatcctggacgacgagatcaacgagaccatcgtgcgcccgctggtgcacggcgccaggctgcacgccgtggtggacgcctgctacagcgccacggtcctggacctcccctaccagtgccgcatgtccaggaacgggttctggcagtgggaggacgagagcccgccgtcgggcgcctggaagggcaccagcggaggccacgccgtgctcatcagcggatacagcgagggcaaaggcaacttcgccatggtcagggacatgatacatacatacatactgctgatcgagctctgctgccttgcatctatctatatacctaacatgcatatgctgctgcttggacgacgcgcggcgtgcagatgcccgacgcccacgcgtcggtcgtcggggccatgacgcacagcttcgtccggacgctggagtgccagccgcgcggggtcacctacggccacctgctcagctccatgagggccatcatgaagaaccgcggcgggggctgcgatctgcagggggccatcggcgcacccatccgcaccgtcgccaacttcagcggcgtgcaggagcctaacctgtcctcttcggagacgtttgacatttaccgcaagcagttcgtcctgtagacaccaccacaccagggtttgcccctgccggccggccgcttgtaatgaattgccgtcgtatcagaataagaaattatctatcgaccatgatatgatatgatatatcaggaaagaaggaactattacccctcaatgtaataactaagcatgttcaatgtcctctttttattagagagagagacagagagaaaacgcggaatttgagacgtgtgcatgcagtttacgtgatcaataaagttacatagaaattatttt

SEQ ID NO: 33352 - DNA, 1028 bp, Zea mays
  Clone ID: UC-ZMFLMO17099G07_FLI
aaaggaggtgataaacagggcgtggaaagaggctgaaatcatagaggtgtcaagggatgagctggaattcctcctagatcatgagtactatgaatacaagagaaacacccctcctcagtattatcttgaaggatttcattttacaagaaactggccacagtactaccactacagccctgaagagatcgctcctatttggcatgacggtataaagatcttgcttgtgacgtatgggacacttcggatccactattacacacctaagtttcatggctgtgtggttgggacagaggatgcactcataactccatacaccactgaccgaacaggttcaggggatgctattgtggctgctgctattaggaagctgacaacttgtcctgaaatgtatgaagaccaggatacattggagaggcaactgagatttgctgttgccgctggaatcatatcacaatggacaattggtgctgtgcgaggatttcccactgagagtgccacccagaacctgaaggaagaagtctatgtgccttctatgtggtgaaatgataaaccatttgtgatgggaatgaacaaatatatgatacaagcatacttgatgaatggtctaacagaactgaacaagggggttttccttttttttgcgacaatagagctacaagagcaacttacatgcactaattggtcaggtctatggttgctttagttaggcggcagacaggtaggagtttgtgcttcatattgtccgatgaacaaggaatctttctatcatctggttgttctgcgaagggttccgctgtacgtacgactcatttgtacaacgccttttcaatcaacggagaaccaggatacaaatggcggaaaatcactcaaatgtactggttcatttgccaagaacgcaagattcatctggttgtaccggagatgtactttaggtgaagtatttccctttctgtcaatgtgatctgtgagaaacacctgtccctacgatttagcctgtggtttgtaactatgctgtgttttctgtggtt

SEQ ID NO: 33353 - DNA, 1051 bp, Zea mays
  Clone ID: UC-ZMFLMO17099G08_FLI
ggtacaatctcaagtcttattgtatttttggactttggtgctcatctgctacagctaatggctatccagactcggaggagaaaaatggttctcagaaatatgatgtcttctttcatttttatgttttattacatttgggtactactactcatctcatataagaggaagtgttggaaaatagagagaaggataagagttagagaacttagaagcaaaatggttctcagaaagatatcatctaggaggcttcactgtgcaaaatccaccacgaagcacagaagaatattttaacttgtgccatgctagagctagaaatattattgagagagcctttggaaggctaaagggccgctgggctattttaaggtctccgtcattttttccggtcatcgcgtggaagaggaaaaagtaaaagggtgtggacttattttgaggatgaagcattggtgaaggcactctatgagctatcccttgatccaaagtggaaaagtgagggtagtttcaagaatggttatctatctgtcctagaagttacacttgctgaaaaaattccaggttgtggcctcacttcaattccacatattgagtctagggtcagacactttagaacaaagtatggtgcaattgaggttatgctagcaaatagtgggttttcttgggatgagaacaggaagatggtacaatgtgagaagcaacaatatgaggaccattgtaagagatatcctgatgcaaagagatgaccatgctttttgcacttccagagactctaaggagggagttcatactacatatgatccagattccggctctcatcaagtgactcctccccctcacgttgactttgcggacagatgtctcaattctagtggtggagctacgaacaataatccgatgtcctgatcgagagcgatggagttaatgtttgaacttgtgtgtttgaacttgtgaactaaaaatgtgaactatggatgtgaacttgtatgaatttgtgaactatatatttggacttgtgtgaatttgtgaaatgaacatatatcaatgtgtttgaaat

SEQ ID NO: 33354 - DNA, 547 bp, Zea mays
  Clone ID: UC-ZMFLMO17099H02_FLI
tcatatcagccatccggtaggagaaatcatatgtgattccctggacaagctcgccatactgggtctcccgatctggattactgagttggatgtcacagcagagaacgagcacatacgagctgatgatctagaggtgttcctccgggaagcatttgcacatcctgctgtggggggaatcatcctctggggattctgggagatgtttatgtttcgagagcacgcccatctggtcgatgctgatgggacaatcaacgaggctggcaggaggtaccttgctctcaaacaagagtggctgacccgtatgaacggcagtgtcgatcaccaaggagagtttaagttcagaggataccatggttcgtacacagtggaagtgaacacgccttcaggcaaggtagctagatcgtttgttgttgacaaggatagcccggttcaggtgatcgctctgaatgtttaatgtgtgggaaatcatgcgcctgtcctgtattttagcgatgtactgaggtgttgaacacagatagtttcatagctgatgccacgccttcagtgt

SEQ ID NO: 33355 - DNA, 1114 bp, Zea mays
  Clone ID: UC-ZMFLMO17100B03_FLI
ctcactgattgctccagttgcgtgctcgcgcgcgcaagctcgtcctcctccatcgcagtcagtggccttatcttgttcgtccttgcctccctcgttgttgcgacttgcgagacgacaggacaggatagcgagctgggcctgggagtatagactgcagacagagaggtggagcggccattaagatccagtgcgacgcgtgcgagggcgcggctgccaccgtggtgtgctgcgccgacgaggccgcgctgtgcgcgcgctgcgacgtcgagatccacgccgccaacaagctcgccagcaagcaccagcgcctcccgctcgaggcgctctccgccagcctcccgcgctgcgacgtctgccaggagaaagcggcgttcatcttctgcgtggaggaccgggcgctcttctgccgggactgcgacgagcccatccacgtcccgggcacgctctccgggaaccaccagcgctacctcgccaccggcatccgcgtcggcttcgcctccgcttcgtcagcgtgcagtgacgcctgcgacgcccacgacgactccgaccaccacgccccgcccaaggccgccgtctcctccgcggcgcagcaggtgccctcgccgccgcagttcctgccacacggctgggccgtcgacgagctcctgcagttctccgactgcgagtccagcgacaagctgcacaaggagtccccgctcgggttcaaggagctggagtggttcaccgacatcgacctcttccacgggcagacgccgaaagccggcaggaggttggccgaggtaccggagcttttcggaacccaggccgcgaacggcgcggcgtactacaggccggccaaagccactgccactgccggcaccggggtgcgccagagcaagaaggcccggaccgaggtcaccgacgacgaggaccacctcatcgtccctgatctcggctaaaataaaagaaagggcacgagttttgtttcttctcctgctgtgtgtacaaccagtgtcatgtgtcgtgcatctttgactgtagtattgcacagctgtgaacatgataactctaagcacactttgtgtctttgttgctacgctagtagcagtctaagagacactttgatgtttttaac

SEQ ID NO: 33356 - DNA, 642 bp, Zea mays
  Clone ID: UC-ZMFLMO17100B10_FLI
gttctatttgtcgcttcaaccatcctgatcggccagggccagctgcggatatagcttttatggttccactggttcaagctactcttccttcatcagcacccattgtccctgcagtggttgaacctttgccaatgatctatcctcaaaggccaggagaaactgtttgtgatttttacatgaagacaggatcttgcaagtattctcagaaatgcaagtttcaccaccccatcagtcgttttgccccgcattccaaagaaaacggggatcctcaacagcctgcgacacttgctagcctgccaaggagagaggacgctgaggcttgtgccttctacatgaggtctggcatgtgcaggttcggtgcgcactgcaagttcgaccaccctcctcgcgaggaggctatttccgagctgcaggcagccggaaaggaaggaatagaagggccgagcctcgtccagcgcgaccatgatgtctaatactgtatcctgcttcagtatgtaataccatgtgaatcgcactgttagttaatgcttggtgctgtcagtcttgttgggagtctgactcgtaaagctcattatcatcggaagtgtttgtcggaggagtgctggcactaactatttatcttcagttggttgtcgtgttgcc

SEQ ID NO: 33357 - DNA, 1787 bp, Zea mays
  Clone ID: UC-ZMFLMO17100C07_FLI
cttttgatgagaacactcctccattaagtgacccgaattatatatcttcgttgggtgctgcaacgttcaggggtatgcagagtggtgacaacgatgctatttggttgatgcaaggttggctgtttacctatgatcctttctgggaacctccacaaatgaaggcactactgcattctgttcctgttggcaaaatgattgttctcgatctttacgctgaagttaaaccagtgtggataaattctgatcagttatatggtgttccctacatctggaaagttctcttttctctttctgccaactccatgcactattaccctccttttattttccttcataaaaaaactcgtgtgaccctttttcaggtgcatgctccacaatttcgctgcagattttgaaatgtatggtgttttagatgctttggcttctgggcctattgatgctcgattaagtgataactccacaatggttggagttggtatgtctatggaaggtattgagcaaaatcctattgtttatgaccttatgtcagaaatggccttccatcacagacaagttgatcttcaggtttgggtcgagacatatccaacaagaagatatggaaaaccagtgaagggactgcaagatgcttggtggattttgtatcgaactttatataactgcacagatggtaaaaatgacaaaaatcgggatgtgatagtggccttcccagatgtcgaaccttttgttattgcgacaccagggttgcatgtgaatactagacaaatgtattctacagtgtcatcgaagaattacatacggaaggacgtttctagtgatgcatatgaacatcctcatctatggtatgatactaatgctgttattcatgccctggaactttttcttcaacatggagatgaagtatctgacagcaacaccttcaggtatgaccttgtggatttgactcgtcaagttctggctaaatatgctaatgacgtttttctaaagatcatcgagagctacaaatcaaacaacatgaatcaagtcaccatcctctgccagcactttctcggccttgtaaatgaccttgacacattactatcctctcatgagggttttctgcttggcccttggttggaaagtgccaagggccttgcacgaaacagtgagcaagaaatacagtatgaatggaatgctagaacacaaattacaatgtggtttgacaacactgagacaaaagcaagtttattgcgcgactatgcaaacaagtactggagcggcctgctgcaagattactatgggccaagggccgccatctacttcaagcacttgttattaagcatggagaacaatgcacctttcgccctcaaggaatggaggagggaatggatcagtctcaccaacaactggcagagcgataggaaggtgttttcaaccacggctacaggagaccctctgaacatatcgcagtcgctttacaggaagtacttgagcaacgctgatctacttgggttagtagaaggtacaggctctccttggaagtctgcaaacttataagtaggtgatgcgtgcaatcatgggtcatttcagattcacagttactttttttctctctcatgtttttcctcgtactcataactatcgtttggctgcgacatggttgctacgaatcagttgtgtgtgaactgtgaagtactgaagtctttctgtatagcagtagaaggacgggtttcttttctttttccagtgttccttgccgtaaaattttcagttctgtatctatcccaattagagcttgttcggttattttc

SEQ ID NO: 33358 - DNA, 2219 bp, Zea mays
  Clone ID: UC-ZMFLMO17100C09_FLI
ggaagatcttgaatgcacttgatcttaggaaggatttctttttcagttactcataccacattatgagaagtcttcagaagaacttggctgatccacaggatggatggaccttatacgagacaatctttgtgtggaatgagtatctgacacggcggatccgtaattgtctcagaaatactttgtggactgttgcattggtccatggtttctttaagcaggataaattctcaatatctggcaaggatattatgctcacactcatcgctagacggtcgaggcattatgctggaaccagatatttaaagaggggggtgaatgagaagggaagagtagcaaatgatgttgagactgagcaaattgtctatgaagctgtgcctggacctactgaagtaagttctgttgtgcagaataggggctcaattccactattctggtcacaggagacatcaaaattgaatcttaaacctgatataatattgcatgagatgcagaataattatgaagctacagagcttcattttgaaaatcttagagcaagatatggaaaccctatcattatcttaaacttgattaagacacgtgagaggcgagagtctatactccgccgagaatttgataaggcgatcaagataataaacaagagcctgtcagaagagaatcatctgaggttcttacattgggatcttcatcaaaactctcaaggaaaacctacaaatgtactcgacgtccttctaaaagtggcatttcgggctctgaatttaactgagtttttctattgtcaagtcgcaccaagttctgagacttctgcacaatgccccaccctactgaatggtcttgatcaatatttatgtgatgacaacaatagtgacgacacggaatgcactgagattgttggtgatgtatcccaagaggatatctcaggcagctctgattcctctggtaatgcaaccacagaagataaatttgagaatagtggactgccaccaccaaaaccaccaaaattccaaaaaggtgttttgaggacaaactgtatagattgcttggatcgtacaaatgttgctcagtatgcacatggtttagctgctcttggacatcaattgcatgcgcttggttttatagaatctccagaactaggtttagaagctcccttggcccatcatttgatgcacttttatgagatgatgggtgacacacttgctgtacagtatagcggttctgctgctcataacaaggtattctctgcaaagagaggtcacttgaagctttttattcagtcacaagagttctttaggacacttcagcggcactacagcaacacctgtatagatgctaacaaacaggctgctataaacttgtttttgggatacttccagccacagcaggaaaaacctgcactgtgggagttagaatcatctgctgggaagcataacaataatctttttgatggccacccaagtacattgaaaagagtaaaatcagatggcactattcttcatgaaagtaatgcttctatatctggctctggtcgttgccataatgaaccgttaagtgcatcgcagcctgatgtccagaatgggtttcaattcccaacttcagaatccgattcacttcatgaaaatgaaatttcatcagcttgtggaagtggagtagcacacctaaggtatactcccacagcctctgacgtgcttcatgtcccaagagctaaagttgaatattgccatgattctggtgattcaaactttttggatcttgaatggctttccacttcaggcaactcaagtgatgaaaggtctattgcaactagcacgccagatgcaaacctatcaaatgagaatgtcattagtggcataactcctgatatcatggaaaaccatcttgctgaaatgcagtatcagaagttacctcggaattttgtgcagtgggttaatcacggtgataccttttggtactaagatcgcaattactggaattcaatatgtcgccagcttcacagggtgggcattaacacggatctgagtagtagattatagagtgatatggatgctgcggcaaggcatttctcccgtgatatactccgcaccatccccaaagtcctttattggtccacgtgtttttacaatgggtgagtagatagatatctttctgttgaaagaaaatagagatgataattaggcttattattgttgacctgaaattgtcattattcatgggaacatgtc

SEQ ID NO: 33359 - DNA, 2219 bp, Zea mays; identical to SEQ ID NO: 33358
  Clone ID: UC-ZMFLMO17100C10_FLI

SEQ ID NO: 33360 - DNA, 992 bp, Zea mays
  Clone ID: UC-ZMFLMO17100D05_FLI
ggagactccagtcgtcagggatcagaagatactgcacgccgtcctccttcagtgaaagcttctctgtcagtttcctttggacagcgtgctccacatcgggcttccaccagggattcatctccagttcgtcgaacagtcacccgtgatggtcatcgaagttcatactcaccatctcgtcgtagtggtagccgtgagggtcctgatcatgaccgttctgaccgggaactggatcattctagtcgtgaccgtgacagagcccgggatcgttcaaaccgggatcggtatcattcaagccgagaccttgaccgtgacaaggatgccagagattatcatcggcatgagcgtgatagcagggatcgtgagtactacaggtccaggcattcagaagaaagacgggacgacagaagagatcatgaaagtagcaggcacaggcgctctagctctcgccacaggagcaggagtaggagccgaagcaggagcaggagaagccgcagccgaagcacgagcaggaggagcctgaatgagcagcgatccagcccattcagggatgcaaataaagagaaggcagccaccgtgtcgagcaacctagcaaagctgaaggacttgtacggtgacataactgcaaagaaggaagacagtgatgctgaaaagcttcaccgtgattcatgcgctgaggaggtcatcaggctgggaggccctcgatggaggtaactttgagacctgtagaactctggtttccgctttgttctgccagcctctctgtaggccttcttgaaaatgctctttatgttcccaaacttgatagagtcgactggtacttcggtatcttgacttgttgtcgcctgacatttgccattaatgtatgttgtttggtatgttattcctaagaattcctatgacattggaacgtactgtataaaccgtggtatccgagcttcatgttttgcttgatgcttatgcaaattgaaggttgaataagtttcagtttcccc

SEQ ID NO: 33361 - DNA, 1927 bp, Zea mays
  Clone ID: UC-ZMFLMO17100G05_FLI
cagaaatgtcctaacgcagcttcacaaatagatttcaatggagttcgacgtccacagcgaacaacttcttctggaagttttggatcattcgatggtagctcagtttccaacaaatcaattgaatcaggttacccacctgatgcaccaacagaaaagtcagtgcattgtgctgtaaaccatcagactgtaccttctcctgaggcttgttcgacacaacaatatacctccccatccgacaatcacaacttgatacctcacaaacctgctgatttaggtagccaaattgttgccaccaggaaaccagtgcaacatagttgcgctcagattgaaaatgtggtgccgatgcatgctccagtacaaccaacgacttccacacctcttggcctctttgatcaatcaactgtgcaacagcctgtcacatctgctgcgccgatagatctgtttgctggctttaatgaacagttaccagcttctcataatacagatggtgtatccagtcattctgttgttgctaaagaacctgtccataatgttgttcagaagggcataatgccatcagctgaagcactcgccacatctcatgctgtgcaccaagatttgttcagtctgtcaattttgcagaaaccagcaacaccctcaccctctcagccaatagatctgtttgctggctttgaccaacatttgccgcatttgtctactgttcagaaaattccatcggcagttccattgcctgctaatgatggatgggctttctttgacgtgcaacatggattgttgacatctgtttcaaatgtgcaaggtcaggtgcctgctgcattctctccatctgatggtattgctaaaggaattgaccaattaacattaccaacttcgccaccaaatgtaattgggtcacaaagatctccggctatgatggataactggagtttaaatgctgaggaagtgaagatccctgtcctcaacgaaaattctcagtcttggaatgcctttggtgaatctactcagagcgcatcaaatgatctgttcacatttaatactatgtctcaagtagaagctcatcaattctctatgccaagtggtccatatgttgaatccagaattccacaggatttagttagggatgagcctgaaaggccaactcctagggatgtgttttctggcttcaatatttcacatgttgaggtggttggatcatcgtctccatcactccagccccatttgggtggcatggtctctcatcctgaaaaatcaacaaatccatttgacatggcatttgaatccgacgttgacgccaatgacatgttcatggatttgacctcactgcaagaaacattaccagatcatcacactctcacagattattcggggagcttaacagagccatggatttctcagaattccaccatgtcatatattccttctgggcctcaaggaggtttatcctatgtggcaggacaggactctcacatgttgagttcaacacatcaaggagcttttccacctaggaatccatttgagtgagactagtaaagagagttttgctggatagtggtggacagaagaggaaggcaatcagcaccggtcgaaactcaaatggatactcaggtctactatactagatgcattgaaagcaactgtgcatcgaatctgaaaccctgaggtaaatatgtgtcttggatttcattgtctatggtctctcgtgtatcagaaaggactgcatagaagtctagatggcaggagtgctggaatttttgcccgaagcaaaagctgtcctctactcccatggactaatgtatctctggcaggcagtgctggtacagcatcaaaaaatttctttcatttcgacatttgcccaatagttgtgttcatgttcttgttaaaccctgttgtgaatgagaagggatgacatttacctccttaatatagt

SEQ ID NO: 33362 - DNA, 1505 bp, Zea mays
  Clone ID: UC-ZMFLMO17100G12_FLI
cacaaatagcagcagtaatgagtatgatgtgtatggttttgaggatgctcctgtttctacatcatctaaagatgatgaacaagatctgtctccagttgcacaatctgctgtggagcatgttccgaaaagaggaagggaaagagcttacaataaacgccctaatcaaatcgttcctggtaaggcaaaagaaccaccaaagagaaaaagaacacgccacagctccactgttaccgagccagatgcacacagagttgttgatgcaccagaaaactcaagaaatttgatccctgatatgaatagattggatcaagtagaaatcccaggcacgtcaaaccagattgtcacctttgaccatgggggcaccacaactgaagctttacaacacagaggagatgctcaagtacaggtccatcctcctggtgctgaggttaatagcttctatagtgctccaactgcaaaccctactcctataagcatatatatgggtgaccagcctataccttatcaaaataatgacagcacaaggccgagatctgaaaatagttttcctgtagatgctcatactggtttaaataatcttcccagcagttatcagaacttacctccgaaacaatcactaccacttcccatgatggatcatcatgtggttcccatgggtatcagggcacctactgatagcattccttacggtgatcatatactaggtggtggaaattcaacttctgttcctggagatatgcagcaactcatagattttcctttctatgctgaacaagataagtttgttggcagttcctttgaggggttgcctttagactatatcagtatcagtagtccaatcccagatattgatgacttgctgcatgatgatgatttaatggaatacttgggaacataacattcggtcaggatgagtctgctagcatttgttttcatccattttagtctcactggagtcatcatcctaacttaagtatggagggctaaacttctcattttgttgccggtcttgtcattggagaccaaccatctgttgtatgctgagtgatgacttgtattctttggcaataatgtgtcatacagtgacacaattgcacatgtggaaggacccaatcgcaaggaaatgatgatgtgttctgtgaatggtggttgagaaccagtttgatcaaactggaaacggggtctcaactcgctgatgactttaggggcctggatgttgtggaagcatcagaatggctgtttttaagggtgctgcacccagtgtccagcttgtccttggatgaatttgggagtaagaataccgctaatgcatgactggagctaggtgcttggagcagcttatgactgctgccacgtatacatataataggttcatccgctagtgtgttcctgaacaattagtgggtgtgtgttgtggttgggcttttttttttgtaaatatgttttcttaatagaaagatatgcagagaaaattaaaagggacccataccaactgttttacattc

SEQ ID NO: 33363 - DNA, 1215 bp, Zea mays
  Clone ID: UC-ZMFLMO17100H04_FLI
tggacgttgccggactggacttttccctgttggagagggggtagcgaggagggctgccgcaccgacgcgagcacgaggacgccgcggagggccgcgacccgaggccactggcgaggacggactgcagagcgctcgcagcggacgacccacgagcagagaagcgagctgcttacgaagctagatagaggatttggaacggcggtggccggcgaacaagcgggctgaaggagtgcggcttgtgggtcactcggcaaggctacgagcttcatcgaacaagaagacacgcgggtcaaggcaatcggcaggattgagaagacgtgtactgatcggccggagtggaagaacaactcacatttgtgcagcttacccaagggatcttcagtgccgtcatattttgggaatccaagcttctgcgctcctggagggggtgggccgtgtattcacggtgtcgttgagagcgcaattgtactgtccaaggggctctgggtgatgacgggatcctctcctggcgctgagtcgttcaccgtgagaacaggccgaccggcggcagcagaagagaagatcaggcggaaggattgtctagtccaataccaaatgataggcacagggttacgagcagatttggtttggtaggtttcgagatgaagacgagggcaaggtctagcagtgccaactctaggtgtgctgctgcttacactgcgcggtggtggagctggtcatgccggcggccgtgcaagtgcccgccacgcccgtgtccaggaaggagacagggttttgacaggaaaggaagatgttcgtgcaataacaaaggaagctcgatctgtggtagaaccacacactaacaaaataaaaaggttggagtatgcgacgggtgggtggatataacttttacctgatgcgaggcaacaggtaaatgcttccgaggcaacaggcggatgctgaagcgtctttttttttcaatgatgcactttcacccgatcagaagcgtgtcatttctatgtgcttgtatcgtcttgatgagaaccattgggtttaataaagtctctttgtcgaaaaagaagcgtgccatttcacgttcggcctccactctcgtgtagggatgaatttgggtgtccggaaatttaaattattcgtattcatattcattaaaaatgcaaatatagatatctgtatgggtatttgattttaatattaaagttttcagatttgattctt

SEQ ID NO: 33364 - DNA, 1882 bp, Zea mays
  Clone ID: UC-ZMFLMO17100H05_FLI
cagccaccgccgtttcttcgtcttcctcgcagcgccggcgcgccatctcggtacgaaggcgacggcggcggcgacggcggcgttcaggatcgggatctcagcgacgacgtcagaggcttcccatcccgacccccgccagtcgcctcgcgccctcgactccggactccggtcctccgcacaccggccggtgaccctgcgtttgaacctgctatagaaatttataaaatggccgcggttgatgcgacaaccaaggagatggatgcactgcatgttggacaaaatgatgaaacaaaagagactctgattaaagaagacaaagctgcaaacagcaatcattctgttgttgcagctcagtccttgccaccagaggacgacgatgatgatgaagcacaagctgatggtccatctcaagatggagcagcagcagctgtaaagaagaaaaagaagaaaaacaaatccaaaaagaagaagggcccccttcaacagacagatcctccatcaatacctgttgatgagcttttcccctcaggagaatttccagagggcgaaatccaacaatacaaggatgacaatctgtggagaacaactagtgaggaaaagagggacctggaacgactgcaaaagccaatatacaactctgttcgccaagcagcagaagttcatagacaggtgcggaaatatatgaggagcatcataaaacctggaatgttaatggttgatctatgtgagacattggaaaacatggtccggaaacttatcaaggagaatggactgcaagctggcattgcttttccgactggatgctccttgaattgggttgcagctcactggactccaaatgcgggcgacaaaactgtgctacaatatgatgatgtgatgaagcttgattttggaacacatatagatggttacattgttgattgtgcatttactgttgcattcaatcctatgtttgatccattgcttcaagcaacgagagatgccacaaataccggaatcaaggaagctgggatagatgcacggcttggtgatgtcggtgctgcaatccaagaagttatggaatcctatgaggttgaaatcaatgggaaagttttccaagttaaaagtgttcggaacctcaatggacacagcatcgggccatatcaaatccatgctgggaaatcagttccaatagtgaaaggtggagagcaaacaaaaatggaggaaggggagttttatgccattgaaacttttggatctacgggaaagggatttgtcagggaggacttggaatgcagtcattacatgaagaactttgatgtcggacatgtgcctttaaggttagcaaaggccaagcaactgcttgggaccatcaaccacaacttcggaacgctcgccttttgccggcggtacttggaccgccttggtgagaccaagtacctcatggctctgaagaatctttgtgacaatggcatcgttcagccgtaccctcccctgtgcgatgtgagagggagctacgtctcgcagtttgagcacacaatcttactccggccaacttgcaaagaggtcatttccagaggcgatgactactgattgcggctggaggaggctccctgtaccaggttgtgtgtgtggagcgccatccgtttatggatggactataggacgtgtcacactcagataaatggtttggtcctccagagttcaggatgttgtatgagttttataataactcgctaaagattgtggatgtacaagtagcagtaatacgttttctgggaacatggacattgttaggctatttccagcggggatttcgtccgagtttcaatctcgattaaatgtgttgccacataagaaaatatgataatatggcaagaatttaataagagagttttattgg

SEQ ID NO: 33365 - DNA, 2377 bp, Zea mays
  Clone ID: UC-ZMFLMO17101B04_FLI
cagctgggcaacactttggggaattttacatcattaatcaccttggatctcagcaacaacaatattggagggaccataccagatggtctaccactcacaatgcagagatttttcctttcagctaaccaactaagtggtagccttccaagtacattgtcatcccttacacttttgacaagcatgtcactcaatagcaatcatttgactggagcgataccagatgtattttcagcactcactggacttgcaaatttagatttttctgataacaatttgaccggtccgttgccaccttcaatgggaaatttgacatcattgactagcctacatattcagaacaatcaaatatctggaactcttaatgtgttgcaagatctccctttccaagatttgaacgttgaaaacaaccttttctctggtcccgtgcctgtgaaattactgaacttgccaaacttcaagaaggatgggaacccattcaatacaagcatagctccatctgcgcagcctcccatcgcgccaacaccattaccgtctatcccaccttcgtcagggcatgtccccttaaaagaacctgcacattcttctagtgttccaggtggtagtacttcaggatcaggaaaacatactacactcaaattagttggatatattcttattggagtggtattagcagtagttcttgtgctaattgcaatgtactgtttatccaagtacaaagaaaaaaggtcgagagatgatatttatatgaaaaacaagataggaagggtacctcagaagcttggagagcctaaaatcaaggagccaccattaaaactcaagaatgatgctgagaaagctccgaatgttgtttctgatggaagagaggagcataagttaaaagtgccaacatcagaaacttcaaatgtggtttatgatccaagtccaagggatgggcagaacttagattcatcaccgacagctgtacctttggctgttacaatgaataaaaaagagcatgtgattgatatggaaaaggctgataattttgttgaggaccaactgcatcctccgcagccgatggcactgcggactgaaaaagtcactgtcaatcccagtgtacgtacaagaaggggaagagtaccttcagttgaaaaggtggaatcgacgactactgtcaagtccttttccattgcatcccttcaacaatataccaatagtttcagtgaggaaaatatcataagagacagcaggtttggtaaggtgtatctggcaaagcttcctgatggagagctactggaaattttgaagattgactcttctaactcaaaagtgccagtagatgcctttcttgagctagttgtgaggatttctgaactgaggcatcctaacatacttggtcttgttggatactgtgcggagtttgagcagcgattacttgtctatgagtactgtagcaagatgaccctacatgatgaacttcgtcatgtggatgactcaagcaagccattatcgtggaatgctcgcctccaagttgcttcagaggcagcaaaagcattgcaacatcttcatgacggttgccaaccaccagttgtacaccagaattttgaaccctctgttgttctgctcaacagcaccttagttgtgcatatttctgaatgtggccttgcatcactagcatcaaaatcagtttctcagttgtctggacacaccttattccattatgaagcacctgaagtgcatgaatctggatcagtaagcgatcgaagtgatgtttacagcttcggtgtagttatgttggagcttctaacaggacgtaaaccttatgacagttcgtatccacgagctgaacaacatctagtacgatgggccacttctcaactctatgatattgatgccataacgaagatggttgatccttccattcgaggacaatgttctgataaggcattatcccgttttgctgacattattagccgctgcattcagcatgaaccagaattcaggccaccaatgtctgaagttgtccaagacttaactcgcatggtaagtaatgtatcaagggcttccatgtaggctatcccttaaacaatggtaaaatgtggaggtccgtccttatagaaattagaattcgaggacgcacctcgttctggagcttcttgctagattcagttctctctggccatgattcaagatgcctttgacgaccattgatgcggtagtaggatattttggccaatgcaaaatgggtggaacacagtggcaggatgcagagactgcaccacgttttgtccactgccagtaatgctcctctgaatctctggtcaatttatagttcaaagctattgttgtaattctgtagtctgcactctgcacaatatatttcttagtgcccagttcc

SEQ ID NO: 33366 - DNA, 1878 bp, Zea mays
  Clone ID: UC-ZMFLMO17101B06_FLI
gccaaggtcccgaccccttcatcttcgtcctctgccgacgctaaatccatcggtgccgtggccgcgctcaagctctccgatcgcacctgcaccggcgtcctcgcctcccacccgctctccagagatatccacatagagtctctttcattaacgtttcatggccatgacctcattgtagattctgagttggagctcaactatgggaggcgttatggtttgcttggccttaatggctgtggaaaatctactcttctcactgcgataggctgcagagaactccctatacctgaacacatggacatataccatctcacccatgagatcgaggcttcagacatgtctgcactacaagctgttgtttgttgtgatgaagaaagagtgaagttggaaaaggaagcggagattttggctgcacaggatgacggtggtggtgatgctttggatcgtgtatatgagcgtctagaagctattgatgcatcaactgctgaaaaacgtgctgctgagatattatatggtttaggttttaacaagcaaatgcaagctaagaaaactcgagatttttctggtggttggcgtatgaggattgctttggctagagcactcttcatgaatccaacaatccttttgcttgatgagcctacgaatcatcttgatcttgaggcatgtgtctggttggaagagacgctaaagaaatttgaccgcatactggttgtcatatcgcactcccaggactttctcaatggtgtgtgcactaacatcatccatatgcagaacaagaagctaaagttatatactgggaattatgaccaatacattcagacacgctccgagcttgaagaaaatcagatgaagcagttcaggtgggagcaggagcagattgcatcaatgaaggagtacattgcacggtttggccatgggtctgcaaagcttgcacgtcaggctcagatcaaggagaaaactctggcaaagatggagcgtggtgggctcaccgagaaggttgttagggacaaaatactggtcttccgcttcacaaatgttggcaaacttccaccaccagtgcttcagtttgttgaggtcacgtttgggtacacaccagataatctcttgtacaagaagcttgactttggtgttgacctggactctaggattgcattggttggtcccaatggggcagggaagagcactcttctgaagctgatgacaggtgagctggttccattggacggtatggtgagacggcacaatcacctgcgcatcgcacagttccaccagcatctggcagagaagctggacctggacatgtcggccctgcaatacatgatgaaggaataccctgggaacgaagaagagcggatgagagccgcagttggtaaatttgggctgtcagggaaggctcaggtgatgccgatgaggaatctgtctgacgggcagaggagccgtgtcatctttgcgtggctggcatacaggcagccgcagctattgctgctggacgagccgacgaaccatcttgatatcgagaccatcgactccctagcggaggcgctgaacgagtgggacggcggtctggtcctggtgagccatgacttcaggctgatcaaccaggttgctcatgagatctgggtttgtgagaatcaggcagtgacaaggtgggaaggcgatatcatggatttcaaggagcacttgagaagcaaggcttgtctatcggattaagggaaggccttggctttccttaccttctctttggagatgtattatcccttgtataattatgtattattataggccctccaagttttactagtagctagctgatcatctgagcaagtacctctgtatctgtatcctgctgagtctcataataagaagcgaaagttttgt

SEQ ID NO: 33367 - DNA, 814 bp, Zea mays
  Clone ID: UC-ZMFLMO17101B07_FLI
caattggccaaaatccaacccaggggctgggggaaacagaaataatcctggccagaggggaccacgagatgtgcaacctggcatggaaaagcgagtgcaagatcagggtcctgttgaaaccaacagatacgccgctcggaggcagccaataagaggagacagcagccaaggaataccccctcaaggtgatagaaggaatgaaaatggaggtcgttatgagaaccagagacctcttgaacagcagcataaccggccgttaccgaggttcaaccaaggtggattatcacaacaagatccaaggaacgaaaggagaagttcttttccactaaataacaaccaaaggcaaccagcaggtggcggtgatcctaatcgagcaagcaagagttttgggatcttcagtagtactcagaaatctggatcatctgagcagaggaagttggatggtaatcctggtaataccgactcgcctaaaagctttgggatttttagttctgggaaatgaggatggacaaagggctctacagaagaggactctgatatttttactttggcacgatggaccaaatcctacttgaaaggttcaacaaacctgcatacatggatgagtttttttggcggtgtttttttgtaaggattcatggacgatttggcgtttgtttagcctcaacagatgtcttgttctgatgatggaaaagggatcccgtgatagcaacattctgagaaatattttctgttgaggggctcttgttggcagggtaaattgctgccgttgtcaagttggaaatattatctggatttgaaatacagtacccct

SEQ ID NO: 33368 - DNA, 1162 bp, Zea mays
  Clone ID: UC-ZMFLMO17101C01_FLI
ccattttgtccttaactcaaacgcgcaagccaccccctcttcgcttccgttcctgtcctctcctctgtccctctacggtgcttctgctcgccggcccaaaatcgcctcatcgaccacgcccccttccaggctcccgtctccatgggtctcctctcaaacaggattgggagggagagcctcaaggcgggggatcatatctactcctggagggcggcgtgggtctacgcgcatcacggaatatatgtgggcgatgataaggtgatccatttcacaagaggaagaggacaggaggtcggaacaggaactgtcgtcgatattattcttgtgagttccaccccaaaacgaagcaacacgccttgcccggtgtgcaccgacgaaaccagcgacagcagcacagagacgaacggcgtggtatcctcctgcctcagctgcttcctagctgggggtgctctctaccgtttcgagtacgcagtcaacccggcgctcttcctcgccaaagcgcgaggagggacgtgcacgctcgctccctctgaccctgacgacacggtggctcgccgcgccagatacctgctgagcaacggtttcaggtgctacaacctgttcaagagcaactgcgaggacttcgcgatatactgcaagactggccttcttgtcgctgagcagggcgttgtcgggcagagcgggcaggctatctccatcatcggtggacctctcgccgcggtggtctcgaccccattccgcttggttaccacgaacatctatgggatggcggtgatggccgtcggggtgtactgcgcgagcaggtatgcagctgatattggcaaccgccgtgatgtggtgaaaatggaagtcgaggacctgacggccggactggccagcggcaggatatgtgctgtggagaacatcgcccagctggtggctccggaggcagaaggcccggccgatgccacggccacggccacgctggctgcttaacggaccattgtgccattgttgctgtgagagagatgtgcgtcagccaacatgtgtgctattgctttggcttatttgtgttcagaatccacttaaactcggtcgaagtgagctttccgttcggcaacgtctgtactcttacgaatctcgatcgtgtatgtctttaagtattgtgttgtgtttcaaagat

SEQ ID NO: 33369 - DNA, 472 bp, Zea mays
  Clone ID: UC-ZMFLMO17101C02_FLI
agagaaagtcgagatagaatggggaaaccatgctctgtccaacagagtgcaagaagcagttgtggccattgtagattttgtcaagagggaggggcccaaaggctgggacgacccatggagctagatacagcagttataatctcatttgtaactagtttgtgcttttcctcctctctcttttctccaattgtaacatctttcttttgcattattattggtccatttttcaatagtgatatgctctttttcttataaccccccctcccctaaaaaaaacatgcatcgcgttctcattctggtatggtgtatcacatatgtaaattgcgttcagaatcttgattatcaggctgtctttggtggatcatgtaaaataggggttgtgatagtttgaaacagaggatgatataggggatgtgacagggagctgttggagacggcaatcagatcaacttcgtgcaaacttcagttttgg

SEQ ID NO: 33370 - DNA, 1276 bp, Zea mays
  Clone ID: UC-ZMFLMO17101F08_FLI
acaacgagtactctgaccttttctatggcattccctggtcccagggaacactggggttccttgtctctgcggagatcaagctgatccccatcaaggagtacatgaagctcacctacactccagtcaaggggggtctaaaggagatcgcgcaggcctacgcggattctttcgcgccgagggacggtgacccggcaaaggtccctgactttgttgaagggatggtgtacacagagagcgagggtgtcatgatgacgggcgtgtacgcttccaaagaagaggcgaagaagaagggcaacaagatcaactgcgtggggtggtggtttaagccctggttctaccagcacgctcagacggcgctgaagaggggcgagtttgtggagtacatcccgacgagggagtactaccaccggcacacccggtgcctgtactgggaggggaagctgatcctgcccttcggcgaccagttctggttcaggttcctgctgggctggctgatgccaccgaaggtgtccctgctgaaggcgacccagggcgaggctatcaggaactactaccacgacaaccatgtgatccaggacatgctggtgccgctgtacaaggttggggatgcgctggagttcgtgcaccgcgagatggaggtgtatcctctgtggctgtgccctcaccggctgtacaagctgccggtgaagacgatggtgtacccggagcctgggttcgagcaccagcacaggcagggcgacacgagctacgcacagatgttcacggacgtgggcgtgtactacgcccccggggcggtgctgaggggggaggagttcaacggcgcggaggctgtgcacaggctggagcagtggctgatcgagaaccacagctaccagccgcagtacgcggtgtcggagctgaacgagaaggacttctggcgcatgttcgacgcgtcgcactacgagcactgccgccaaaagtacggggcggtgggcacgttcatgagcgtgtactacaagtccaagaaggggcgcaagacggagaaggaggtgcaggaggcggaggcggccatactggagccggcctacgcggacgaggaggcctaaaagctcgtggtcgttttgcttagcccattttaattagaacttgatggatgtagtgtgtgtctgtctcaagtcattttaattagaactcttaaagctcgtggtcggtcggtcagtcagtcagtcattgtcgttgatgtccagcgttgtgttttttttatattctctaatggaatctctcagattgattcggg

SEQ ID NO: 33371 - DNA, 2658 bp, Zea mays
  Clone ID: UC-ZMFLMO17101G06_FLI
tccagttccacctgaccccgtcagctcttgttggtggttttaaagatcgctgtgatggattgttgcagttcacgtctcttcctgctattgccttatctgcaattgagagtatgaagctcactagaagcgttcaaattgatcgagtcttctcccagtcagtcacagttttgtctggggagctgggctacagaacagacagtacaactggaattgatatcgcccaacaagatgaaacctgctgttactctcaagcacagaagcttattagcgtttgtggatgggagcctagatggcttcctaatgtccaagattgggaagagaattcgacacgctctgccagaaatgcaggctcagctgaaccagatggccaattccattcccaatttcctgagcgtcatcaaaattcaaactctgtgtcaattaagaaagacaaggggaaaggtaaaatgcatgtcaaagattctggatgcagcatgaggtcacctttgctggattgcaacctgtgtggagctacagtgagaatctgggacttcagatctgtgccacgcccttctcattttagtctgaataacatcgacatgcctgatacaggaaggaagcctgtgttggtccgcggtattagtgctacaagtgggatcaatggactggtcactgaaggagcagagagagaaaatgttgagggacgtgatgaggcaggtattgttgagggtaagtctctgtcaaatgctcaagtcgacttaaatctgacaatggcaggaggtttgccgtcaaacaattctgcattgcccccgatgcctggacatctcaactatggtggaatgggaagagatctagttattgggcaacccactggaagtgggcttggtggccgtgcagcctcaattgaatctcggggccctagttcgagaaaacgtaacctggaggaaggtgggagcacagctgacaaaccaataagcaggcttcagcctgctgacagcattgagggaaccgtcattgaccgtgattgtgatgaagttgatgacgccgcacaagattctggtgctaggagcaaaaggcctcgttgttttaatctttttgatattaatcgcccatcttcttcaggagctggtcccagcagaaatttaagttttgacctggatatagatgttaataggttagatacatctaatgctgaggttccatccgcccttcgcaacccatttccaagggactctatgagggcatcttctgttattgcaatggatacagttcacggcatggaagaaaattcaatggagagtgttgaataccatccatgtgatgttgatgatgttaataagccttctagtgcactcaggagtggtgtaatgagtgatatgttggatccgaattatagcaaccaagcacagcaaagcagttttgtacagcctgctgctgaaactgaaagcaatgcaagagagataggagggagtagtatgaatggaggggaagaagtcctcaatgctgaaacaacccctgcatttgctagagatcaacttagcctgggagttagcggggggagtgtcgggatgggtgctagtcatgaagctgaaattcatgggactgatgtttctgagcataaaactggtagcgttgttggagatgctgatccaattcctgagctcatcgagactatgggccacactggtgagtcagctcctggacctgcattgatggatgagtttgtccctgaagaagttggtcgagaaggtcctaatggtgatagccaagatatggcatctcggttagcggttcgtgctgacagtggttctaaaatttgtggttcaactaaagctgattcagttgagagtggagagaagacgagccgtgagaatagcgcacatccttctctttcttgcaatgcaagagttttttctggcattgatgcatcaaaagacgaagtgactggtataatgctaactaatgatgactatgatccaggaagtggtctaggagcaacaaatggaggaaacgattatgaaacaggtcttccagacttcgatccaataaggcaccacaacgattactgtccttgggtgaatggaaatgttgctgctgcatgctgtattagtaccggttcgagcacagctctttcaggctggcagctcacggtagatgccatcgagactctgcagtctcttggtcaggcccaaaatcagacgatgcagtcagactctgcggcttcattatataaggacgatcacgtccggcctagccggaagctgctgaaaagtgcgaaccacagcaagagctgagctctggagcaagattcttcaatgctcatagaaaagttgtcttgtcgaggccctaacctgagcaggggcgatggcttgcgtttctgtgaaatttggtcttagtgtggtcgtgctgcatttaccggaagagcttagaaaccatggacacgcgtgataagagataattcttaggccgtgatgtgtgcaggtgacatggcttgtcccccgccatcttgccaaattgtttatgtcaggttgattgtatctatctacatacatgttatgttatttcagtctcctggagtctgtaacatgtagcttgccatttcgttgatggtttgtcctactgaataatattgacacagacgaccacatttatgtattttgtgcgaaaacttgcaaggcc

SEQ ID NO: 33372 - DNA, 1066 bp, Zea mays
  Clone ID: UC-ZMFLMO17102B04_FLI
agaggacatacttcaaatgatgttgagcacatcgaaacatgctctagtttggataaacaagccagcgaccaaataggaaaacctgcaaaggaatattctgattcttcaaacatgtcatctctaaatgcattcgaggatccaacaggaattcctcctgagtggatgccaacaaatgttagtgtgcctttattgaacctggttgacaaagtattccagctaaagcgacggggttggatacggagacaggttctttggatatcaaaacaaattttgcagttggtcatggaagatgcaattgatgaatggatcataagacaaatcaattggctccgaagagaagatgtcattgtacaaggaatacattggattcaagataccctttggccaaatggtatattcttcaccaagttggatgaatataaagggaatgcaggcacaagtgaatttgacaagcagtcattagggagtcccacactggctgttggcaataaaaagggccgcacaagctcttttgaacttcatcttgaggcatccagaaatgccagtgaggtcaaaaaaacttattttagatggaactccatcggccttggtcagcataattggatacaagcagtaccggcgcagcgcaagggacatgtactacttcctccaatccaacgtctgcatcaaacagctcgcatatgcaatgctagagcaggtcctcgtgacagtcttcccagagcttcgccagctaatagaagacatacatgagaaaggccgcaaagagcaagcctcattcacataccaactctgacccaagagaaaacatgctaattcagagaggagtcgcaacaattttgaacgcacttgcattgctccacggtgagttactgaaacacaaagcctttgcaattatattttgatggtgcataagttggattgaggaagtgcttggtgcttaagaatgatctgtacagatgtatatcagaggttatgtaaattatccccctgatgtagtcaaccagaactacttacagtgagatcttgtaggtgttgaatgtaatgtatcattctttaattccccccc

SEQ ID NO: 33373 - DNA, 814 bp, Zea mays; identical to SEQ ID NO: 33212
  Clone ID: UC-ZMFLMO17102C12_FLI

SEQ ID NO: 33374 - DNA, 1790 bp, Zea mays
  Clone ID: UC-ZMFLMO17102G04_FLI
gggtccaaactagcctgaccaggtcgtccaacgactccgctcacccttcgcggtcgcccgcgcgatctctccaccacttccccgccggcgcctgctaggcgtccgcgaggagggccagcgatgaagggctcctcccactcgcaggcgggggcgcaggcggtacggaggcggcgctgggggtgtcttctgccgctcctcgttggcgccgccttcctcgccgagatcgcgttcctcggccgcctcgacatggcgaagaacgccgaggcggtcgagagctggaccacctccttttaccgccgctccgccgatttgggcgatgccgttggcgggggcgcagcctcgagggcaggcggcgacagcgaggacgaagagatccggctgtgcgagcagcggctcgagagggaggatgccgtgccctacgaccgcgactttgacagtgatcccgtgcttgtcggtggcgctgccaaggattggaataaatgctacgtaggatgtgaatttggtttttctgcgagtaagacacctgatgctacatttggaattgcaccagatccttctgtagatggtatcctcagatcaatggaatcatctcaatattattcagagaataatattgatgtggctcgagggagagggtacaagattgtgatgacaaccagcctttcttcagacgtaccagttggctacttttcatgggctgaatatgatatcatggcacctgtgcctccaaagactgaagaagctcttgctgcagcctttatttctaactgtggtgcacgaaactttcgtttgcaagcccttgagatgcttgaaaacttggatgtcaaaatagattcatatggtagttgtcatcgtaaccgtgacggcaaagtggacaaagtggacactttgaagcgctacagattcagcttggcatttgagaattctaatgaggaggattatgtaactgaaaagttttttcagtcactagtagcaggttctattccggttgttgttggtgctccaaatattcaagagttttctccgggagaaggcgcaatattacatattaaggagcttgatgatgttgcttcagttgctaagacaatgaaaaatattgcttcaaaccctgatgccttcaatcaatctttgaggtggaagtatgatggtccatccgattctttcaaagctcttattgacatggcagcggttcattcatcttgtcgtctttgtatacatattgctaccaagatccatttaaaggaggaaaggactccaaaatttacaaatcgtccttgtagctgttccaccaaaaagggaacaatttaccacttatttatccgagagagagggcggtttaagtcagagagcatttacatgagatcaggccagttaactctgggagccttggaatccgcagtgctcggtaaatttaggtccctcaaccacgttcctgtatggaaggatgaaaggccaccgagcattagaggtggggatgacctgaaattatacagaatttacccagtcggtctaacgcaacgtcaggctttgtacggttttagatttagggatgattctgaactcgagcaatatatcaaagaccatccctgtgcaaagcttgaagtaatttttgtgtaactactatgcccaaggcttaacgttttccccccgattcttactgaactctgtgtgcgagtttcagttgtactgtaatgtagagtgttatgtgtagcaaagaaactcatgccagtacggatcatgtgtcggttgtaaattttccatgacagtaaacatcattccttcttttcagt

SEQ ID NO: 33375 - DNA, 2595 bp, Zea mays
  Clone ID: UC-ZMFLMO17102G05_FLI
gtttgagtttgacttcatcacaactatttcattattcggactatgatgtcgaggatacagctttacctcttcaaccatcgttgaactatactgcaccagaattggtccaaagtagagattctaaagttggctctgcttgtgatatgtttagctttggatgtttggcttacaatctggttgctcgtagaccacttctggactgccataacaatgttaaaatgtacatgaatgccttgacatatttaacaagtgaagccttttctaatattccttctgatttggtattggatttgcaaaggatgctatcgatggatgcactatcacgtcctagtgctatggcctttacaggttcttctttcttccgggatgatacgaggttgcgcgctcttcgtttccttgaccatttgcttgagagagataatatgcagaagacagagtttttgaaggcattatcagatatgtggaaggattttgattcccgagttcttcgatataaagtgcttcctcctctttgtgctgagttacgcaacatggttatgcagccaatgattttgcctatggttctaactatagcagaatctcaggataaaggggattttgaactcgcaacactgcctgcgcttgttccagtgtttgcttcagcgtcaggtgaaactctacttttgcttgtgaagcatgcagatctcatcattaacaaggccactcaggaacatttgatatcacatgttcttccaatgctggtccgggcttatgatgacaatgatccccggttacaggaagaagttctgcgtcgaacagtaccactgtctcgtcaacttgacaccaagctagtcaataaagctgtgcttcctcgtgtacatggattagctctaaagacaacagttgctgcggtgcgtgtgaatgcgttgcgctgtttaggagatcttgtgccatccttggacaaagaaggaataatgggtatcttggagactgttcggcgttgcacagctgttgaccatactgcgccaactcttatgtgcacacttggtgttgctaatgcaatctataaacaatgcggtgttgagtttgctgcggaatatgtgattcctctcatcttcccattgctcacagcacatcaactgaatgtacaacaatttgccaagtatatgctatttgtcaaggacattacaagcaagattgaagagaagcgtggtgtgactgttacagataatgggaacacagaggtaaaatcatcaccttcattggcaaacgggatccattctgaacctatgtcaggacaaataccagttgcaaagagcagccctgcatgggatgaagactggggtcctactaagaaatccggtgttccatctctttcagttgattctagtgcacaaacaaagcaaccctcagtagacccttttgacttcggtactcaaacaaagcaatccacaacactcccctttgatttgagcacccaggcaaagcagccaccatcagtttctcatgttacagcagctacaatcccacctgcgcaaccacaaccatcactacaatctcttgcggctagttcaggacctaaaatttctggctcatgtgtccctgtcgacattgagtggcctcctcgaagaagctcgtcatccaacttcaatgcacccttgtctattagcaaggataatggttctggaaggctgtctagcgatggagttgatgatattgatccttttgctgattggcccccaatacctagcaatgttaatagcatttcagcaaccgagcattggccaagcataaatcaaaatatttcgggatttagctcaggcaacatagtttttggtggcagcgggaattctgtagggcaaacgaaaagcaaccaaatgagctggtcaaacacgtctaatctaatgggcacaaactcaactggcagctatttgaatcagggcagtgcagctctaggtttcggaaatccaaatggaggattgagcacaggtctctccaatccaagtagttccagtacaggcctgagcatgatgctaccaaaatctgattctggatcattgtcgacgtcggtcaacaatgccgcacatgggctactaagacttgcccctcctccatccacatcggttggaagagggcgcggtagaaatcaaggacagtccgcactctcccgagcatcaaggcctcatgccaactcggcatcaggacaacaacctatcctggatttactctagtaagagatggtcgcctctgttcttcgcgttcggattgtcaatgtgtacatcctcaaacctttgtaaggtgagcatcatactgttcttttggacatgcatgtggcgaaagcagttctttttgttcattttgaagctgggtggccttggtttatagtctgaagggattctacttcggggatcttgcagaggtttaccttttctcatgctcccgtgcttagggttttgaattgggcatcgaggccatcttcatactggtgacagaagaaatgttttgtgtatatttctgtccaaactcggctgtagctttcagagtttgtgaatagttgacatgtttatatgggctgtgaagttttgaaatgtttaatgggccttacaggtgtgtacc

SEQ ID NO: 33376 - DNA, 1342 bp, Zea mays
  Clone ID: UC-ZMFLMO17103C09_FLI
tgaagacaaattccctaatgaagaaattactttaggcactatctctcttaacatggcagacagcagcgttaaggaggaaaagatgcatgacgaagaagtgaacgaggatctagattctcgtgatgatattatggtacatggtcctgataatgtcaaagagaagatgtgtgaggagaccatgtcaggtcccaccgtagacaagttcagtttgcctacatctactgacagtcctgaagagggtaataaggacgaaagcacgcgtgcagaccctctgtcgcacgagaccaatgtggcgcaaaccagcgatggtgctgatgaagagaagaagatcagggagcttgctgttgaccctacttccagcattggtaccatgggcaacataggcaacgctgaagacaagccgagtgaagaaactataacagatcctagacctgttgagaacaccacaacacaaggcacagaggacgcgacagatcctaaacctgttgagaacaccacaccacaaggcacagaggacgcggatagcagcaagcagaatgaaaacactgcgagcataggtggcgttgaaggcaagaagcagggtgaagaaactacagcggatcctagatccgtcgaaaacaccacagttgaaggcaagaagcagggtgaagaaactacagcggatcctagatccatcgaaaacaccacagcacagggcacagaggatgcagaaagcagcaagcagaatgagaacacaaatgtcatggaagaagaaagggtgacggtggaagatacaacctcaagggagatcagcgccatagaaagcacagatgacctgaagggcaaggctaccgacgagaacgaagagatagccgacaaggaaatggtcaccgactcggacaagaaccacgtctcgctgaaggtcctcctcgcggacaagaacgtggaagccaaagagaaggagaagaaggcgactagtgccaaggaccgggtgctgtcgttcaggcgccgggtatccaaggacaacgtgtcgccgccggtgaagccaggctcgcccaccaaagacaaagatggctcagggcagcaggactggaactccccggccaggttgcccgtcgagaagaaacccaaggggaggaaacagcagtgggtaccgtttatttgctgctcgtcggtacagtaatccgtttgccagcatcagcttggggcatccattgttgtgtttgtacttgtacgctgatggtagtagattgagtaggaccttcgttccaggattggaccttggcagctttgctactctacttggattgtgaacccggctctgccgtttttgtatgttataaatatttgttggtggaaggct

SEQ ID NO: 33377 - DNA, 1656 bp, Zea mays
  Clone ID: UC-ZMFLMO17103D03_FLI
cctggagggggcgccggtgcgggaggcgcgggagctggtggcggagctctgtcggcacttctacgcgcagggatgggtcacgggcaccggcggcagcatcaccgtcaaggtcaacgaccccgccgtgccgctcgccgaccgcctcatcgttatgtcaccctccggtgtgcagaaggagaggatggtagcagaggacatgtatgtgatggctgcagatgggaaagtgctttctgcgcctgtagcaaagccatggccaaacaagcctcctaagtgcacggactgtgctcctctgttcatgaaggcgtatctgatgagaggagctggggctgtcattcacagccatggaatagagacttgcatcgcaacaatgctcatccctggtgcaaaggagttcagagtgacccacatggaaatgatcaaaggaatcaaaggtcatggctaccatgatgaattggtcattcctattattgagaataccccttatgagtatgagctcactgactccctaagtgaggcgattgcagcatacccaaaggcaactgctgtgcttgtaaggaaccacggaatatatgtatggggggagtcttggatcaatgccaagacacaggctgaatgctaccattatcttttagatgcttgcatcaagctctatcagctaggtattgattggacaacccctgaacatggttcaataaacaatccaaggagaccgcacagcattttgagccctgaaatttgtaatggatgtcatgctgctgattcatcaaagtgtgttgtactagacattgaggggacaaccactccaatatcatttgtgactgatgtcatgttcccttatgctcgtgataatgtacgaaaacatctgacttctacatttgattttgaggaaactaaagaagacatcaaactattgcgcatccaaattgaagatgatctacgaaatggagttgctggggctgttccagttccacctgatgagggtggcaaagaagaggttatcaattcattggttgccaatgttgaatcaatgattaaagcagaccggaagatcacatcattgaaacaacttcagggtcatatttggaggattggatttcaaaagaaagagctacagggagttgtctttgaggatgttcctgtggcgctaaagaactggcatgctagtggcataaaggtctacatatactcaagtggaagtagagaagcacaaaggcttctatttggcaatacaacatacggtgacctgcgaaagttcctgtgtgggtattttgataccacaactggaaacaaaagagaaacaaggagttattttgagatctctcagtcactcggcgtggacagtccatctcaaatcttattcataaccgatgtcttccaagaagccattgctgctaaaaacgctggttttgaggtgataatctccattcgcccgggaaatgccccacttcctgacaatcatggtttccgcactatcaaatcattcagcgagatctgaggaatctggtgatctggacatgtctagatatatgtaattcgcgagtgctttagcccgcggaccagttcatgcagtagaagcattatagcaccgcagcatgtcaaaacgatgtgacgtaacaataagttacatggcgaaataaaaactttggttcgttgtgt

SEQ ID NO: 33378 - DNA, 2377 bp, Zea mays
  Clone ID: UC-ZMFLMO17103E01_FLI
cttctggagccgccgccgcccacgggggtaccggatctgaggagcaaaggccattacttatcgtaagcaagatttctaattggcggaagcttttatgtgtacctgactgttgaatttactggtctcaagtatagagtaggcaggcaatctgcagtttagtggaacccaatgggttcttctccttccaaagccactggagaggacgccctggttctgtgcaaggatcggatgcgccacatcagacaagccattgactcgagagatgcactgtcagcagcgcacttatcttacacacaatctctccgtagtgtgggcactgcactgcggcagtatgctgagtctgagatctcaccggaatcatcgctctccatttcagaagtggataagtcaccatcacattcctcgatggcatctccctcgccttcgcgtgcagtagagagtgttgcctctctggggcatcgagcaagtccatcgattactccaccctcaacacgaatccattgcatgaaagcagcagcaaccactcctttgacctttgtgatagatcaatctgctgctgaatttgtggggcgtgaatccccagtctcagcttttgtcccacctccaccaccattgcctcccgaattatgtaccacgtgggacttctttgatcccattgatgctgctggtacctcttcctccaacaatgagaatgaggaaagagagccaaagcaaggtgggaccgggaaaccaagtcagttggtggacacttcaaccaaagctacatctgagcaggttgctgcaaagttggaggaaagtgaaatggaaaaagaattatgtgcagaggcagaggacccttcagagttcatcactcatcgagccaaagattttgtgtcgagcatgaaggacattgaaacccggtttatgcgtgcagctgaagcaggaaatgaggtttccagaatgcttgaaaccaagaagatccgacttgacatatgtgctaaaataccaggttctccagtcaagctaccttctgcccgatttgtgtcagcacttcgagtgtgctgcaatcgtgatgttattctcaaccaggaaactgcgcagcatgtttcaaaggttgtcacatggaagcgttctgtctcatctctttcatcatcatctaagagtgcacttatgacatcgataattaaagatgatgtggatgacagtaatagtgattttgttgaggaattcgccatggtatctggaagccattcttctacgttggacaggctacacgcatgggagagaaaactatatgatgaaatcaaggcaagtgaaaatgttaggaaggcctatgatgagaaatgtaacctcctccggcgccaatttgcacgaggcctaaatgcgcaggtgattgataagactagagctgttgtgaaggatctccattccagggtatctgttgtgattcaagctgttgatgcaatctccaaaagaattgagaagataagggatgaagaactgcagccacagcttgtcgagctaattcaagggctaatcagaatgtggaaactgatgctggaatgtcaccacaaacagttcatcacgatcacattagcataccacgtgaaagactcgacctcggcgcgtcaaggtgagcaccaccatcaccgccaggcggcgatgcatctgtggaatgagatggacagcttctcctccagcttcagaaactgggtcaccgctcacaaatcgtacgtcgaggccctcaacgcgtggctccagaagtgcgtcctgcagccgccccaggaccggcgcaggcgcaaacgcaaggtctccttccctcctcggcaggccgtctcccctcccatattcatcctctgcggggactggctcgccaggacagaacctctccctgctgacgagctatgcagatccctcaaagacgtgatgcagctcctccgcgactcgttcgagcaccgcgacgagcagaacaggcccagaagcggcgagtcgcaggagtgcgggatgctggagaacagtatcgagcaggaggcggcggctaagagtgggagttgtgcagcatcagctgaagggctgcagtcgagactgacggcggttcttgaccgcctgacaaagttctcggaggcatcattgaagtgctacgaggagctcaagcagaactacgagatggcctgtgctgattataggagagttggaccaaatgctcagcttgcttaggattgatgttggttgtggtgtgtgacttcttgctatctctgttctggatgacaaattctctagtgttttggtatatattttgtgaacaatcaggtgatagcacaatctttggccgaatattactgatgatttagtgctatcagttatgtatgctccactgtgggcagatttaagcttcgtc

SEQ ID NO: 33379 - DNA, 1835 bp, Zea mays
  Clone ID: UC-ZMFLMO17103E02_FLI
gcgcggtgctctccccagctcaggtcggccgagcgctcagccgtccctcctctatctaccctctgcgcgcttcatctccctggccagagcttccctgcacgcgcgcctgctcccatgccgcgcgcccctcccctgctcactcctcttcttctcccacgcgcataggctcctccatttgcgcatctccctacgtccggccgagttctccacaccgtgctccactgctcggccaaccactgcccaagtccggccagccgaagtgctccatctcccagccaagctccgtgcacgcgcattctccctgcgcccagccgctcctctacttccctctctactcgccgtggagcttcctctgccggcgctctcttcctctcatttatctgtggctcgccggcgtcgagtccctgctcatcttcctccacgtgacgcgcgcccacccgagcagctccctggcgcgcgcccagatctttttcctccctgtgcccctctctctggctgctctctgcgccggatctccttctctggtgctcaccgactccttggctcaccccctcatctcgccgctcaccgagctccttgcgcgccatggccgccttgcttgctccctggccggcgtttggcttcaggctcgcccacgatgcccggcgtcctgcctgctctgctcgccgcgcccatgtcgagctcccctgcgcgctggtcgccgagtcctctccctgcttttcccctggtcgtcgcatcgctgtgcgcagcggaagcgtggtgggttttggtcgcgggcatggtcgtgcgacgcgggatctgggcatgccgttgtggactccccattgatgcgcctcctgtcctaactggaccatcctagcctgcgcacgtcatcgaatcgtcggattccatcccccatggcgcttccatttcctcgccattccacgtcgccagcttcgttccagttcactggccatctttctctccacgtcgtagttctgttaagggaaacgatgttgcttgagtagtggttaggatgtgtgtggagatgagcttgaagatgggactgtggatagggaagacagtgaagttccgtatgtcactcatcagatgttcgacgaaaaccccgaaccaaaaaaaatcatcggcgttcttgcaaatttgaaccgggtatagttcgggagaagtctaaggatgttaattggtaaagaagcgaggcccgtgtgcatcgctcatcaagtgctcggtcgaagacatcaatcgaaggtcgtcatcattcgtgtgatgatcgagtcaaattgcaatatggtgagttgattcgctatttctattattagttcgatgattggattagctagatttattactcgtgatgattctcgtgtttagcaggtgtgctgtgtgatgagctctatattcttactattttaggtacgataattaatcgtgtgatgcggaagacgacccaagtcgaccccaagatgatgtaacggctggattaatttcaaggtaatgcggatgatgatcctgaagatggatgacccgaacaagtgtcagaccaaaagctaatcgtcaagtgatcgacgtctaacaacactaacgtagtgttatccaggttacgagtcactttgattgtgattggtgttaagcgctggtgggcacgaccttcttataagtctaagtacttcttctatacttcttattgaggactgtcactgagccagcatatatttcaaacttataaataatttataacagttcaaagtttattctttgaaccacttttgtaaccactccgataaatataatgtaaatttgttgtaacttgtaaaatttggtaataagatttccgctgc

SEQ ID NO: 33380 - DNA, 1017 bp, Zea mays
  Clone ID: UC-ZMFLMO17103E09_FLI
cgtcgaaagacggagagaggaaaagggacaagggcaaggcaagagagaggcgtcgtcgtttgatctgctgccggagtgcgaagaggaagaggagcgccggagttgtaaagatgttcctggtggactggttctatggggtgctggcatcgcttgggctgtggcagaaggaggctaagatcctcttccttggcctcgacaacgccggcaagaccaccctccttcacatgctgaaggacgagcggctcgtacagcaccagccgacgcagtaccccacgtcagaagagttgagcatcggcaggatcaagttcaaggcgttcgaccttgggggccaccagatcgcccgccgcgtctggaaggactactacgccaaggttgatgctgttgtgtacttggtggatgctgttgacaaggaacgttttgccgagtcgaagaaggagcttgatgcgcttcttgcagatgactcccttgcaaacgttcctttcctcatactgggcaacaagattgacatcccatacgcggcttcagaggaggagctgaggtactacctcggcctgagcaacttcacaaccgggaagggcaacgtgaacttggccgactccaatgtccggcccctggagatcttcatgtgcagtgtggtgcgcaagatgggctatggcgaaggcttcaaatggatgtctcagtacatcaagtgagtcgctgctgtcctcttttgtccatggcgctgctgctttcgcaggagggttgaaatcaagtctgtcgtgacatggcagctgcatggaaaggtttatggtagctagtgataggcaaagcttgtaagtcggtgttaatcctagatatgtgatgtggggtctactttctcttctgattgtttcttggggtggtctaaacggttcaaaaaaaaatgcgacttcttcgggtcagctagaagttatgtaatcacgttacatgaagcagcacattgttcgccagctgctttggtggtggacttctgtcggtaatggtgagcttgcggtttct

SEQ ID NO: 33381 - DNA, 249 bp, Zea mays
  Clone ID: UC-ZMFLMO17103E10_FLI
ctcatgagtcatgactgtgggggcagggcagtactgcactgcaacagctagctggtgtgttttgtgtatatatctggcgagctaggttgttaaagcaagcattagctattttaccagtacaataatgcatgcttgctactactactagtaatgcagtctagctctgtgtaccattgcctgcacggctgcacggcccctgttggagtactctataataaatgtacccctagtaaaatctgttttcagttt

SEQ ID NO: 33382 - DNA, 2937 bp, Zea mays
  Clone ID: UC-ZMFLMO17103F03_FLI
gtggaaaggccaatacctcgtagctctgactggcattaattaagaacagaaacctacaagattctatcaagagcctgtttggaccccatgaattaaaaccaatagctagaaagtgctttctcacttcaccattggattatttttcaattcctcagaaccaaacagggcgagataaatagaattacaaaccaggaaacagctattcatcatcgccaacaatccttctctttatatcatcgataacacccgccaattctttccggttttcctgaaaaagcaggtatcggtacacaaaccatccagagtagctgagcccgactagctccaatatgcctgggagcaatgggacagagtcgagagatctcactacgaccaaggatatccagacagcgaggattgctccagcaccatacaaggcaagagaggacttgttctccattgcatcccacttatcttttagttcagaaaggagctcgtcatcctcgccagaattattctgttttgaaaatcgtgtagctgttaattggagttgacaaatcttcatggaatcagctccttgtgtttatatccctgccttgacagtatggttgccgaccacggcgactcaaccgcaccagcgaggtccaaggccacatcctaccacacaccaccactactcattgtgtcatgttcctagttccaatcatccggttcccccaaccggtgacaatctggtatcagtcagctctgatttgatcagcatggactcccgaatctcttcgctgcaggacatggtacagaccatgtcaaaatctctggaagttgtttccaaatcagtggacaccatgaacacatcgctgaccaatgtcataggccgccagcgggacagcgataaccagcttcaagccttgaatctagcagtcacgcgattggaaaagacctctccatcctctggtctgcccgacaacaccagccataacaattgtaatgggcatagaggtggtggcggcggaggtggcagaggaggccgcaatgatggtgatggtggcggtggcagaggtggcggctaggggcatgatcatcaagatcaggaggaacatgctccaccacgctacctcaaactggattacccgaaattcgatggctcagaggatcctcttccatggttgaatcgctgagatcaattctttcatggacagggcagaccggaggagaagaaagtttggctcgcatcttaccacatgaccggcacagctcaattgtggtattatcgcctcaagatgatagcaggtgaaccatctttgcaacacttcgtccagcttgtcttgcatcgttttggtcctaccctgaccaagacaccactaagcgaactgaagctgctgtactgtacttttttcgaaaaacgcaggagaactgcgtctcattatattaaggagaaaagggtctaagaaggagctgctgcaccgtactggaagcatggatgaataccagggtaaattcttaacactcacttgccgcgatatagagctcacgtaatcacagcgaatccaacttttcatcactggtcttggcgagcccctgaagacagatgtggcggttcaacatccgacaaacctggaggacacagtgactctagcaggcgtctatgaacgccggcaagcggtggcaggaggcgcgggaagaccacagatatgggctccgctggcagcaacatcactggcacaagctccgttgctgtcctcactcaccatcggtgggtcgccaatgactcatgccctctaagatgcaacatcaaagaccccaaggactctacttcaactgtgatgagaagtatgcacctggacatcattgcaaaaattgtttgttctggaagtggtgcctgatcaagatatccctccagtgggtgaagtgttggccttgacagtggatgacatgccagcaatatcattgcatgctcttatagggcatagctgtgcatggcattcaaacaatgaaggtgcatgttcacattatgggttgccgcctcacagcattgctggactcaggatcaacccacagtttcatcaatcacaaagtgggccaggagttgcaactgccattgcagcaatgctctagactgtgcgttgcattccagcaacagtgtcttctgcaatctgcatatagacattggaggtgaagcatttacagtggactgttttgctctggacctgggaggctacgacatgattttgggtgttcagtggctgggcacattgggccctatcttgttggatttccatcatcaaacattatatttttggcgggaaggctgccaagtcatctgaactgggtcacaaggggtgctagaacccatggatttcgcactgatgtcggtgaagacaggacctcataagcaatttactacaggagtttgagtgtctgtttgctgaaccttcgggtttaccaccacaacgggccatttgtcaccaaattcggttgaaaacagcaactgaagcggtggcagtttgaacatactccctccgttcttttttatttgtcgcattttagttcaaaaatgaactagcgggtgacaaatattcgagaacggaggtagtatcaatgacatgacaggctgtgcggcgggggaaaggtgcggcgacgcgggaggttgtcaggccgcagggcaaaggagcgcggaggagaacaccgaggcggcggaaggacaccggccgcaccgccgccgcagcggctaccatctcggcgccggtgcggtcagacacccaagcaggcgcacgggatcaagcttgctaaccctaggagaggaggggaagggagaggagtgcacgagatgagatcaaccttgggttagagccttagaggtctcgcgtctcggtgggtgtactggagaggagtgcacgtggtgcgagcagccctgtgacagcggcgggagcgtcgccacccgccggcgagccggctccg

SEQ ID NO: 33383 - DNA, 845 bp, Zea mays
  Clone ID: UC-ZMFLMO17103G11_FLI
gataagcagcagctcatcacctgaaggagagcagcccggaggagggggagcaagcagcagccgtcggtggaagatgtcgtacctgctgccgcatctgcactcggggtgggcggtggaccaggccatcctcgccgaggaggagcgcctcgtcatcatccgcttcggccatgactgggacgagacctgcatgcagatggatgaagtgctagcagcagtagctgagaccataaagaactttgcggtcatctaccttgttgacatcacagaggtccctgatttcaacaccatgtatgagctgtacgacccttcgacagtgatgttcttcttccggaacaagcacatcatgattgatctcgggactggaaacaacaacaagatcaactgggccctgaaggacaagcaagagttcatcgacattgtggagaccgtatacaggggcgcccggaaaggccgtggtctggtgattgctccaaaggactactccaccaagtaccgttactaagaaggcaggcattccccttatgcaatctattggggatgtttacacggacagttagtccgacaggtgatccctaactgtatcttggcataccctagtaattcaagttgctggctggagtgatgcttatccatgtcttggcatgccatagtgaacatgtaaacctgtgatttgaggtgattattcgagtgtaaagaaaccaggattgcgttcgcctatgactatgtgtctagttgtctacttaataagaaacagttattggtttggaatatcggaactgagacaatggtttcctttcggtatttctattatcaactaccctgctttgctacgttttttatatatt

SEQ ID NO: 33384 - DNA, 561 bp, Zea mays
  Clone ID: UC-ZMFLMO17103H06_FLI
atcagtacataatatgatgatcccacagctggagattagacagagatctttcgaagatgctagctgcaggctccagctgctatgatagggacaatgccaaggggacaaataaaatgcagcacgaaggaaaggaggaacagtactgcgtacaccccatgtgcccgggtcgatgcctcctttatcattgtgctctgccttgtagctaggcactgtgaggctctgattgcaatcttgttgccaaagctgtatggatcatactaagagcaattccattgcacccaagggacagcaaaatcttgaggtacgaggagaaatcatgtcctgcttgtgcgtgtgactatttgagtgctctgctgggcgctggaagggaaccacgccccgttgtctcttttgtttggtacagtgctttacgaaggtgccatcggggtgactacttgcatttgcttttcagcagcgtcggtgtgttgtgttgtgtgtacctcttctctttgggaaactgagatgttggtttggcctggaaacttcggaatatcatatacagggacgaaaataatcatcact

SEQ ID NO: 33385 - DNA, 824 bp, Zea mays
  Clone ID: UC-ZMFLMO17103H10_FLI
ccgacttcatctctatcgtgcacacgctggcagctccggcggcggtcgctcgcctacctggccacggccgcggcggcgcccgctcgctcacaaggttttggtgctggcgcggcggcgtccgctcgcccgcccgcctggccgtggtgccggtgccggtgccggcgtggcggcggttgcgcctgctcgtgtatagtggatgtgcagcctccctgccttggtgctttcatgcaacttcttcttctctctcttctattactgatcgaagcagcgtccgcgcaaggcttgaaggtggctgtgctcgcacgcgcttgttcgacggcgacgcccaccctcacgtgctgggctgcggtggtgcttgcccgtgcgcgatgtggtcgcggtggcgcacgtccgcgcgctctcagccgtgtggcagcggctggtgctgcacgctcgctcgcccacggagtggtggcagcagcgtccgacatgcgcgcttgcctgcgaggcggcgacagggtccatgttctcctgtgatgaggcaacagcggggacaaggcccacacattcgctcgtacatgctcgcagcgacgacctacgttccatcgagcggtggctactagcacgcgcaacacatggtgacttgtgcgaggttctcacaagctcatgagcatggctggtcttaccgccatgtaaggatgacaacatgtccctattcctttctatctaaaaacaattcctttgataggatggatgtcgctttttatttcttgattctgtttgttttgcatctcattcggcttcaagccagcgattaaatctgctaaagagatgttttttttctc

SEQ ID NO: 33386 - DNA, 292 bp, Zea mays
  Clone ID: UC-ZMFLMO17104A02_FLI
aagttttttttcttccttccatggttagcctttctgtacaaaggtgaactctatgtcgggtgtttgttggcatccaagccttattttgcgaggtacatcaagttgacaaaatgttcggagggatagggtgaaaacgctgcaagcgccatattttgtggagtgtgaaaacagagcctgtacagcatattcaccacccatttttgttgccattacaattgtagtaacttgtaattactactatgacaaaagtagacactgttgtagaacttacagccagcaggtcttttccatt

SEQ ID NO: 33387 - DNA, 1791 bp, Zea mays
  Clone ID: UC-ZMFLMO17104B04_FLI
gtgttgtttctagtgaccatttgaggagctgcttgattatagccaactgtgctgcacgtgaaggatcaaggatgttcgctgaggctgacccatacgaggatgagcacataatgcttgaacttgtgtgccgccacttcatttcatcattactggacgagggggcatttgaggtgtttctgagtgcactttcttggtcggggagggcattgcagcggactccagaaatcagctttcagggggcttttgtgctggttcaaaggacctacctctctttgccggctgttgtacaagcacatcttttactgctcatgtcaagatgcacgagtggtcaaaatcttaactcgcatatgctagcgtttggatatgccatgaatctttatgtcagatatttaccggcattgtgtgttttcaacataacccgcagtgcaatacccccactgaattatttgggcaagaaaagatcttttagttgtatcaaagatagcactgatcagaaactcagaagtcagatctatcgtctgctttcgttttgtgaattgcactgtggtgatgatcttcccgtcaatgagagtgatattggttgcataattgaaatgaaccagcatatgtttcttgaaaagttcaggcaagaatgtattgtgtttgtgaagggtatattgtctagtatcctgtgctgtgcaaagcaaaaggaggtgagtgaacctgatactgaggtatcagatgagattatttgccttgctgcagcaactagggtaatgggctcctcaattctatacatcctgcacaataaaaattatgaagcaaactgcaaggaatacaatgttatatgtgaaattatcagtttgcttgggcaatatggaacagatgagcttcatagatatgacctcctggctattattggggagtcagtggaaagtgaaagtgcttcaatgctaatgttggctcattttgctagcttatcaacttgttgtttaagaagaaggcttggctttctgtggaaaggttgtattatcatgatgatgatcgccacaaatcttattgctgaagagcaaagttggggtacatttcatccccctatggatgtctccaaatattctccagttttctgcaataccgaaaaggggattgtagaggtttctgctcgaactaaagagataatattacggtataaaagcatacataaatctcataataaaggcaggcgcttttatgttgatggaatcagtttgggcactcctgaggaatgcaattccagagttggaaaggctgccggtcaaaggttttttgagtgtcatcctgaatattcacgaaagtcgtgggctgatatactggattatgttgaatgtgaagaaggaaaagattattcaaatgccttgaagcaactccaaaagtttaagaagtttaaatatagaaaatggttcaacaagagacaatctaaacggcaatgtatcatggatacttttggactcaagtcaaggagctagtgtggtgagagcatctcaatcaccaggtcgggttcgaagcagcatctccattttttagagagaaaggtttgccccgatttctccccctaggactgtgggagcctcgggcactagatcagtcgcctctaaagtcaagaagctagtgtggcgaatctagttttttagagagaaacgtcgtcgcgattcaccaaggaagcatgctgtttggctggagtggatcgaggccacttgccttatgcgtgaatcttgattcctgacttatgcatgaatcttgatttgtggcctaatgttagattttaattctagc

SEQ ID NO: 33388 - DNA, 1003 bp, Zea mays
  Clone ID: UC-ZMFLMO17104D03_FLI
ggtcaaggacaaggcggcgctggtcaccggcgggggatccggcatctgctttgagatcgccgcccagctcgcgcgccacggcgcgcaggtcgccatcatgggccgccgccgggaggtcctcgacaaggccgtcgccgcgctccggtcccagggcctccgggctgttggtttcgatggagatgtccgcaaccaggaggacgcggccagagtgcttgctgcaacagttgcacattttggcaagctcgacattcttgtgaacggtgcagctggcaacttccttgcttccccggaggatttgacgcccaagggattcagaactgttcttgagatcgacactttgggtacatacacaatgtgctatgaagccctcaagtatctgaaaaagggtgggccaggaaaaggcccgtccactggtggactaatcattaacataagtgcaacactgcattacagtgcttcttggtaccaaatccatgtctctgctgctaaggctggggttgatagcatcacaagatcactggctctggagtggggaacagattatgacattagagtcaacgggattgcacctggaccaattcaagacaccccggggctgaggaagcttgcacctgaagaaatgagcaaggggcttcgagaaatgatgccattgttcaaatttggggagaagcgggacatagcaatggctgcgctctaccttgcttctgatgcaggcaaatatgtaaatgggacaacactggtggtcgatggaggtctttggttaagtcaccctcgccatattcccaaggaggaagttagggagctgtcgaaggtggttgagaagaaggttagggcctctggtgttggtgtaacatctagcaaattgtgatttgcatttgtgtgatctgtagcatcgatcaatatgttattacagaactttattgtctgtgtggctcttgcaatctaattagcgagtttgtttagttgagtaacttggcatatttacagtacatttctttcttct

SEQ ID NO: 33389 - DNA, 1164 bp, Zea mays
  Clone ID: UC-ZMFLMO17104E05_FLI
gggcgcggctcgcgcaggttgtcgtcgccgctgtcaagaagcggcggctgccggcggcggacgtcaaccccgcgttgctgtacgaggacgacgagctcgacgcgcccatctccatgtacggcaagcttgtgcacacggatcagctcagcttctttgaccgcgcggcgatcgtcaccgacggcgacctggtcacgctgacggacgcggactccggcaagccgtcgacggcccccgtcccggacctgtggcgcctgagcaccgtgcaccgcgtggaggagctcaagtcggtgatccgcatgggtcctatctgggcggcgggcatcctggtgatcacggggtcgtcgacgcagaacaccttctctctgcagcaggcgagcaccatggaccgccgcctcgcgccgggcctctccacgttcgagatccccgcggggtccatgaccgtcttcgggctgctggccatgctcttcaccctcttcgtctacgaccgcgcgctcatccgcgtggcgcgccgcttcacggggctggaccgcggcatctccttcctgcaccgcatgggcgtcggcttcgccatcagcgtgctcgccaccctggtcgctggattcgtggagcggcaccgcagggacgcggcggcggcggccggcgccacggacgccggcacgtccccgctgtcggcctacaggctggtgccgcagtacgcactgcacggcgtggccgaggcgttcacctccgtggggcacctcgagttcatgtacgaccaggcgcccgagagcatgcgcagcacggcgacggcgctcttctggctgtccatctcgctgggaagctacgcgagcacgctgctggtggacgctgtgcaccgctggagcgcggggcccggcggcgccaactggctgccggacaacatcaatcacggcaagctggattacttttactgggtcgtcacggtactgcaggtcatgaaccttgtgtactacgccatttgcgccaagcggttcacgttcaagccagtgcagctccacaagaaagaggaggaagaaggcggcaaggcacttgtggagttgcaagagaaggtttaatttgagcagcatgcactttcatcagtgctaggaagatcctcagaaaaactcccaaggtattactatataaatctatgtgagcatctgtatt

SEQ ID NO: 33390 - DNA, 1041 bp, Zea mays
  Clone ID: UC-ZMFLMO17104G04_FLI
ctggacaattgggaggcgttgacgggcttctaaagcgctgctggattgctggatctcctttctgccccgcgactcgatgatatctctttgtattggtaattattggatgaaatttcgataattattagatcggagagatgttggtcgcggcggtccgtgcctaactgaaggcaaggtaaggtccgagacaaaagaggggaaaaggatacatgaaaaagaagtgagatgtgacatcttgaaggcctttgccatgttgggtgcgctcgcatggcaggcatcgtaataaagatgttggttttgtgtgctgggtgggagatcgcacagggaattgttttttcatccctgggttctcccgcccattgtgtccccgtgccctgcttcgtgttgtttgtcttctcgtcctacgcttcatcaccggtgttgctgcaaattgaacggagcttctcatctcacggcgtgctgcaaattgaacggggctacatcgcaacgcaacacacaaggtacaaaccggatctaaacattttcaatttacagcaaagttagcaagttactgaaatcaccatcaaccgttcaaaacttcgcgcgccacaaacttctacgccttttctacgccatgcatatgcagttcattcacccaacgcttatcccgtaaggcgttcacccaaccgttcaaagcacatgcgaaaggcgttcattcactccgtaaaaacgtatctagatgcattatgggagatttttagtttcctttgttatatttgagaagttatatattgtatataccgagagatgcacctgtgtattgtttgttgtagcttcgaatgcgagacgtatggttgtagtcattttattgtagttagtttatatgatacattgttgtcaccgcatgaagattaactgctgtgccatatgaagacctcctgcctcatcacggtgtttgtatataagatcaactgcagtgcctacacggtggacggagtatttgtatgatgtgaaggtcactattcagcatcgtcagtatgaattggctatggccttcaaagc

SEQ ID NO: 33391 - DNA, 1627 bp, Zea mays
  Clone ID: UC-ZMFLMO17105A02_FLI
cgctccactcacaaactcccctcgctcccccccccccccctttccaatcggcgatggatctgctgctgcggcggcggctgctggccgtggtggccacggcggcggtgctggccgtgtgcgccttcacggcggcggaggggttcgacatcctgcagatcctggggaagcacgacgagttctcgcagttctgcaagctgctcaacgagacgcacctggccggcgacatcaaccgcgaccgcacaatcaccgtgctggccgtggccaacggcgacatgggccacctcgccgccggccactactcgctcggcaccatccgccacatcctcgagctgcacgtcgtcgccgactactacgacgacaagaagctcaagcagctgtcgcacgccgccaccgccgcgtccaccttgttccagcgatccggatttgcccccggcatggcaggatacgtgaacataacgcagcaccgcggcggcaaggtgtcgttcatcgtggacgacgcggcggacagcgtcaagcccgtcacctacgtgaagcagatcgagagccaccgctacgactactcggtgctccaggtcagcggcgtcctgtcctccccggaggccgaggcacccgtcgccccgccggcgcccgtcaacctcaccgacatcctctccaagaagtactgcaagagcttcgcgggcctcctcgccgccgaccccaaggtcttcgacaccctcaacggcaccaaggacaccgcgctcaccgtcttctgccccgtcgacgcggcggtggccgccttcatgcccaagttcaagaacctcacggccaaggccaagacggccatcctgctctaccacgccgtgccggactactactccatgcagttcctcaagtccaacaagggcaaggtcaccacgctcgccaccaccagcgtcgccaagaaggactacacctacgaagcggagagcaaggacgacaccgtcacgctcgacaccaccgtcgtcacctccaccatccaggccaccgtcagggacgacgacccgctcgccgtctacgcttgctccaagttcctgcagcctaaggagctgttcaaggccaagaccgctgatctcgcgcctgcgccggctccgcaagggcccaagaagaagagcaagaagaagcccaccggcacctcggcggcctccgcgccctcggacgatgaatctgcagatggcccgtctgccgacgacgactcgtccgatgatgccgcggacaaagctgccgccgcgccgtcgtacctgtccgctcgatgggtgaccgccgcagtgacgaccgccgtcgcgctggcgctggcggcctaaggtgtgcgctcatatgctatgttttttttataacttattggaccccctatcttcttttcttttgtccaagtcgtgtcccttccttgttggtgaacaaaataagaagggctatttttgtttttttatatttattaccgcattccattaaaaaaaattggaggtgtgtgtgagtgatgtaagtcttgattttgttcattgggttgtggtgatcattttgtaatgatagtggccaatggaattggagagtgggttaagttttcacatatgatactatatataaggcatcatatggagtttagaggtgcagc

SEQ ID NO: 33392 - DNA, 2348 bp, Zea mays
  Clone ID: UC-ZMFLMO17105F02_FLI
ggccggcctgacggcgccgggaactccctacggcgggtgggagggccctggcatccagctccggggacacttcgttgggcattacctgagtgctactgcaaagatgtgggctagcacacacaatgacactcttaatgcaaaaatgtcatctgtcgtcgatgccctctacgattgccagaagaagatgggcacagggtacctgtcggccttcccatcggacttcttcgattgccttgaggccatcaagtctgtctgggctccttactacacaatccacaagattatgcaaggtcttcttgatcagtacacagttgctgggaattccatggctcttgacatggtgataaagatggctaattatttcagtgaccgggtgaagaatgtcatacagaattatagcattgagaggcactgggaatctctcaatgaggagactggtgggatgaatgatgttctctatcagctctacacgataacgcacgatatgaagcatttgacactagctcatctcttcgataagccatgctttcttgggttgctggcagttcaggctgacagtatttccggttttcattcaaacacacacattccagttgtcattggtgcgcaaatgaggtatgaagttactggagatcctctttacaagcaaattgcgtcattctttatggatacaataaattcttctcatagctacgcaactggtggcacatctgctggtgaattctggaccgatccaaagcgtttagctgggactctgagtactgagaatgaggaatcttgtaccacctacaatatgcttaaggtttctcgcaacctattcagatggacaaaggaaatagcatatgcagattactatgaaagggcattgataaatggtgttttaagcattcaacgggggacagatcctggtgttatgatttacatgctaccccaggcccctggacactcaaaggctgtgagttatcatggttggggaacaaagtacgattcattctggtgttgttatgggacaggtatagaatccttttcaaaacttggtgattctatttactttgaggagaaaggagatccacctgcactcaatatcattcagtacataccaagcacttacaactggaaagcagctgggcttactgttactcagcaaatcaaaaccctcagctcttctgaccagtatcttcaaatttcattctccatttctgcaaacacaagaggtcagactgccaatataaattttagaattccgtcatggacatttgctgatggtgcaggagcaactttaaatgacaaagatttggggtctatatctccaggatctttcctatcaatcaccaaacagtggaactccgatgatcacttagcgctacactttccaatcaggttaaggacggaagcaattaaagatgacagactggaatatgcatcccttcaagcaatcctgtttgggccatttgttcttgctggcctatccactggtgactgggatgcaaaagctggcaacggcagtgctatttcagattggatcaccgctgtccctccagcacacaactcacagctggtaaccttcacacaagtatccaacggaaaggcatttgtcctctcaagtgcaaatggcaccctgacgatgcaagagtgacctgaagtcgacggcaccgacgccgccatccacgcgacattcagggctcaccctcaggaggactcaacagagctgcatgacatctacagcacaaccttgacgggaacttccattctgctcgaaccattcgacttgccgggaaccgtgatcaccaacaacctcactctatctgcgcagaagagctccgattccctcttcaacatcgtgcccgggctcgatggaaaccctaactcggtctccctcgagctcgggaccaaaccaggatgcttcttggtgacgggcacgaactactccgcagggacgaggattgaagtcaactgcaagagttcccttgagagcattggcgggatactcgagcaggcggcgagcttttcgcgaactgacccattgaggcagtatcacccgatcagcttcgtcgcgaaggggatggccaggaacttcctcctcgagccattgtacagtttgagggacgaattctacacggtttacttcaacgtcagggcctgagtcctgacgcttacacttgcagtagaagtaatacagaataaataatgtgcgcgcgacctttttcacacttgcagtagaagtaatacagaacagccaatgaagaagcaattgggttgtttgaactgtatcacacgcaggagtattcactttgtgtgaaaccacttgttatgcaataccaagcgagtcataccccgttccttcgatc

SEQ ID NO: 33393 - DNA, 834 bp, Zea mays
  Clone ID: UC-ZMFLMO17105H02_FLI
cccttttctatgatgcagcttgacatcgttcattgtcattgcattttgtacttttctgaagatcatgaaaacaatgaagtgttcatggttcctcagttctgttcttgatttatatgtatcttctatagaaaactggttcagagctggtgtttatggcctccctctgaaatcaaatctctctctctctctatctctctctctctctatatatatatatatatcttctatagaaaactggttcagagctggtgtttatgcattttggttgaacagatgaagagaatactatcatgaatgcatctccaatacattttgttaagctatctctggcacaaaagaatgataacatgatttcttcatggaaatgtctaggtggtggagagtagtttacttaagataagttgaattatggcttacaactcgttagagttctagaatatgatttggtagattgaaatttgtggctgctgtctccccagtctgctaaattttgctcttcggctcaatttcactttcatattatctttttcatgtcctatttgcatggtctgatctacacatagaacactttcatatttctgttgttgttgttgttgcagggagacaagggatggaactcttgagcactaaacacaagttggtcgaaggaaaatcatgatgagcaaagtcattgttgtgttaacgttttgggcatgccaagaactatttttttggttatgagtttgtcaaacatatgttgagtttgtcgctcatttcttaagagctatttctgtgatcgaagaaatttgtttattttagtggcatgaataaaaaaaccaagcaaatccatggtag

SEQ ID NO: 33394 - DNA, 1516 bp, Zea mays
  Clone ID: UC-ZMFLMO17107D04_FLI
cctgaacctgcgtccacagcaccaccacaacccacccctatgccacaacaacctccatttaacgcagcagcaccacagcctattcttgaacaagggaaaagtgttccttctgtcagtggtggtgactgggcatcttttgattcttttggccaacaacaaacactacaaacaagcagcagtgtaaatcctcttgagtctgcacttgcacagctgtcattctctgaagcaccctctgcaccaaatgtgtcagcttatcctgtttctcttgatcccactttgaaagcaaatgatggaggacattcatctgtgctagaccagtcacattccttgtttgatgcgccctttggaatctcaggcaaccaggcctcaacagtaatgtccggccaaggatcatcagttcaacaatctcctctagctgccccaacagctggacctccatctcaagctactgcaaatccacaaggaaccagtggtattcaaggagcagcctcttctactgacagtaaattctgtagcaggaaagaacttccagcggatatctttactgcactatatccaccatcaactcaaatgatgcctggctggcagagagctccccattttggaatgggatacgccatgcaatatccacctggagtgggattgcaatcgtatcttcacggagcatttcctcagcctacatatcagcaacctgtatattcacaacatgcatattcccacccccaacctgtgaaagcttcaaacccttttgatcttgggaatgagtcagctcatattcaagctcacatgcccccatctgggccacctggagcatcagcaggttcagctccccaaaccttaattggtaactctagttttggtgttcctccacagcagcctcaccagctctatcagtcagaagcgcatctaagccattttatgatgcagcaagttccgaacagcatgcccatgcctgaacaacaacctaatagcatgcttgcaacgcaacaaggtttgggttccttcaacatgggttttgatcagcaagcttctctcggatacccccaggcaaacaccccaccttcctacggctccgttggtggtggtagtaatccatttggctgaaagaagtgtggaaatacctgatcgttcatcactagacgaagggtctgcagcactcagggggacagacatgcatcgaagccctggagagatcgtgtttcatacaacaaggtggtgtatcttgtcggccgtagtctgttgtacaacttgtttccaaaggcttaatgatcgaatataactctgttttggagggcctaagctgatttcagcttcattccatgtacattgtgtctggcgttctgcttggattgcatagtatgtatattgtgtttcttcgttgttgtcatggacagtgtcagctcctgttttagtacaagttgtttctagtgcaattgattattcgatttaatgtggatgattagtacactatagatcagatgtagaatcgtgatcgatcaattttgtggtttctttt

SEQ ID NO: 33395 - DNA, 1685 bp, Zea mays
  Clone ID: UC-ZMFLMO17107E01_FLI
ctcactgtccggctgtccctgtccctgtccctgcgcatcaatcaatcccacggtcttcctgccgcttcctcggctgcccccatcctccgaatcctgcctcgcctcgatctccccgttcctcgtgttccgacggagggtggcgggcgactaatggggacgggggcggggagcgcgcgggctctggccgtggcgttcgccgtctcgcttctcgcctgctctggcgccgtcgctgtcgccagggcgcaggacaccgagcggatcgaaggaagtgctggtgatgtgctcgaagacgatcccgttgggaggctcaaggtgtatgtctacgagttgccgaccaagtacaacaagaagatggtggctaaagactctaggtgtctcagccacatgtttgccgcggagatcttcatgcaccgcttcctactgtctagcgcgatccggactttaaatccagaagtagccgattggttctatactccggtatacaccacgtgtgatctcacaccgtggggtcatcccttgcccttcaagtcaccacggataatgcggagcgcgattcagttcatttccaaccggtggccatactggaacaggacagagggagcagaccacttctttgtcgtgccacatgactttggcgcatgcttccactaccaggaagagaaggccatcgagcggggcgtccttccgttgcttcgccgtgctacactggtccagacttttgggcagaaggatcatgtctgcctgaaggaaggctccatcaccatcccgccatatgctcctcctcagaagatgaaaacccacctcgttcccccagggacccctaggtcgatcttcgtgtatttccgcggtttattctatgacactgcaaatgatcctgagggtggttactatgcaaggggcgcccgtgcatcagtctgggagaacttcaagaacaacccgctcttcgacatctcaacggaccacccacccacgtactacgaggacatgcagcgtgccgtcttctgcctgtgcccgctgggctgggccccgtggagcccccgtctggtggaggcggtggtgttcggctgcatcccggtgatcatcgccgacgacatcgtccttcccttcgcggacgcgatcccgtgggaggagatcggtgtcttcgtggccgaggacgacgtcccgaggctggacaccatcctgacgtccataccgatggaggtgatcctccggaagcagaggctgctcgcgaatccgtccatgaagcaggccatgctgttcccgcagcccgcccaggctggggacgccttccaccagatcctgaacgggctggcgcggaagctgccgcacggtgaggacgtgttcctcaagcccgggcagaaggtgctcaactggaccgagggcccccgcggcgacctgaagccatggtaggtgtactggaaaaaaatgccatggcaccgtcagcgtgtccgctgttcttgtgtacgctacacagcacaaccagatgggaagctgatcgacgacgaggacgatgagtactcccatgtcactgatgtaaatgtaaagcgtcttccagcccaccaggcactgtgcttcttcaggcgacgtgtctggtttgcttgtgttgtgtctgttctgaactttactttagcgttaacctattaacgatcggagatcatgtaatttatggctgttgtattctccct

SEQ ID NO: 33396 - DNA, 1282 bp, Zea mays
  Clone ID: UC-ZMFLMO17108C05_FLI
ggcagcaattgaagcttcaaagaaggattctgaaggactggcaaatatagcagagcaaggagaccagcatcaagagggagtgaatttgggggaacattcttctgataaagcagtcatgagaaccacagatggaatagttgagaggcaagtactagcttcaggaaaggctggaacatctaggcaaccaatagatgaagagagcttccaagaggagactgaagatgtagaagaacaaccgctagttagacgtcgttctcggcgtgccccctctgagaacaccgagctagcacaaatgccgcacccaggagctagccctgttctgaacaatcaccagtctagtggaggtgatttcccatctgagtggggtggcatttcttctgaggaacatgatgaagctgttatgcttgaggctgcaatgttcggcggagtttttggaagaccaatgcatcctttctccatgccttctcacagaagctctacttattatccccaaataactcattcttcatcaccagcattagctgaacagcggttattaagagagcagcaggacgatgagtaccttgcgtcactacaagctgatcaagaaaaagagttgaaggccttacaggatgctgagctccatcgcctagaagaaacaactacaagagaagttgctcttaagaaacagaagcaagagcaggaggaaaggcgtaaaaagcaatttgaggaagaggagctagagtccagtctcgcttccaagcaagcatcattaccatcagaaccgcctccagacgcagagggtgccgtgacagttgtagtccgcatgcctgatggcagtcgacaggggcgttgctttctcaaaactgataaacttaagttcctatttgatttcttagacattgggaggatttgcaagccagggacctacagattggtgaggacatacccgaggcgcacgtttacgagcagtgagggggacgtatcgttcagtgatcttggcttaacaagcaagcaggaagccctatttctagaacagatcacagagtagaggataagtgtttaggcagcatggttatagacaccacagctggagccggagaattttttttacattttatacttgcagcttttgctagtaaaaactcggtctgtgaaaatggttgggttggtcgaagaaaggcgtcacgttacctatacaatgtggacagctacgcatggccgttcattcgcacgagtctcagagtggctctgtacatactgtcggttctgtgaatcaaagcaatgttgcgtatatataagc

SEQ ID NO: 33397 - DNA, 1727 bp, Zea mays
  Clone ID: UC-ZMFLMO17108C10_FLI
gcgggtgcagtgtgcagcagcaggactgccgactcgccattgcatcggcccagctcgccctgggctctcgccaccagtggcctctggtcatgagtcagcagctgcgtgtggccatggaggacgccgtcgccggcgagggaggcagaggggagtacaccaaggacggctccgtcgacctccacggcaaccccgtcctccgctccaagcgcggcggctggaccgcctgcaccttcatcgtcgtgtacgagctcttcgagcgaatggcgtactacggcgtggcggcgaacctggtggtgtacctgacggagcggctgcaccagggcaccgtccaggccgccaacaacgtcaccaactggtcgggcaccgtcttcctcacgccgctcctcggggccttcgtcgccgacgcctaccttggccgctactggaccttcgtcgccggctctgccgtctacctaatgggaatgctgctgctgacgctggcggtctccgtgccggcactgaagccgcctccctgcgaccccggcgccggcgccacctgcccgcgcgcgtcggcgctgcagctgggcgtctacttcggggggctgtacaccatcgcgctgggacacggtggcacgaagcccaacatctcgaccatcggcgccgaccagttcgacgaattccacccggcagagcggctgcggaagctctccttcttcaactggtggatgttcaccgtgttcacgggcatcctcttctccaccaccgtgctggtgtacctccaggacaacgtgagctggtcgtgggggtacggcgtgcccacgctggcgctcgcggcctcggtcgccgtcttcctcgccggcacgccgctgtaccggcacaagctgccgctgctcgccaccatgttcgtgccgtgcgcggtgatggcgcaggtgggcacgctgttcgtgaagcagggcgtgacgctggaccgccgcgtcgggcgcggctcgttccgggtgcctcccgccagcctcggcgcggtggtgacgctgacgatgctcgtctgcgtggcggtctacgaccgggccctcgtccccgccgtccgaaggcgcaccgagaacccgcgcgggatcacgctgctgcagcgcatcggcgccgggctggtcctccaggtggcgacgatggcggcgacggcggcggtggagagccggaggctgagcttcgcgagcaggagccacggcgccacggcaggcggcgagctgccgctgaccatcttcgtcctgctcccgcagttcgtgctgatgggcgccgccgacgcgttcctggtggtggggcagatagagttcttctacgaccaggcacccgagagcatgaagagcctcggcacggccatgtccctgacggcgtacggcgtcggcagcatgttgagcagcgccatcctcgccgccgtggagcgggtgacggcccggcgcgggacgccgtgggtgaccgacgacctcaacgcgtcgcacctcgactggtactacgcgttcctcgccgtgctggctgcggccaacctgggcgccttcgtggcgctgagccgcgggtactcgtacagggcggaggccatcggcgtcacggcgagagtgcactcggagccggtggtggcgccgtaacaagtgcttccacatgcacggtttttagctcgtagtacgtagtacgtacgtgattgtgaccatcaactgaactcaccacgcatgcagctagcggagcaagtacgttcttcagac

SEQ ID NO: 33398 - DNA, 953 bp, Zea mays
  Clone ID: UC-ZMFLMO17108D04_FLI
ccaaaacccactcccactcctccgacgtacaccccgacccccaagcctccgacacctaagccgaccccgccgacgtacactccaagccccaaacctccgacgcccaagccgaccccaccgacgtacaccccttcccccaagcctccgacacctaagccgaccccgcctacgtacactccaagccctaagccaccggctaccaagcctcccacgcccaagccgaccccgccaacgtacaccccttcgccaaagcctccgacacccaagccgaccccgccgacgtacaccccttctcccaagcctccgacgcccaagccgaccccgccgacgtacactccaagccccaagcctcccacacacccgacgcccaagccgaccccaccgacgtacaccccttccccaaagcctccgacgcccaagccgaccccaccgacgtacaccccttccccaaagcctccgacacccaagccgaccccaccgacgtacactcccacaccgaagccgccggccaccaagccgcccacctacactccgacgccgccggtgtctcacacccccagcccgccgccaccatactactagaaagcgatgcctaccataccacactgctgtcagtctctggagcatttaggtggtctggatcaatggaagggttgtgtcctagccagccggcaaagatgagctgctgatggtaatgatgatgataagaggccactgctaccctactacgtaccctcctctttgtgtgctgccatccgtccccgttagacgatcgaggagagaataacgcagagctctctgctcccggcctgtcttctgccgtcccggccgtttaatttactagtgtgttcgtcctatatgtttagcagcagcaggtgtattgtgcgggtatgtaatggtattgcaactatattgggtgtaaaaccataataaatgtgggcaaatatgcaagg

SEQ ID NO: 33399 - DNA, 853 bp, Zea mays
  Clone ID: UC-ZMFLMO17108F12_FLI
gcgatccgaagctcaatcaattcactcgaacctcttccccaaattttcgattagattctcgttgacaagaagactagaaccgaacctgaccatgtcgctgatccgccgcagcaacgtgttcgatcccttctccctcgacctctgggacccctttgagggcttccccttcggctccggcaacagcagcagtctcttccactcgttcccgcggaccagctcggagaccgcggccttcgctggcgcgcggatcgactggaaggagactccagaggcgcacgtgttcaaggccgacgtaccggggctgaagaaggaggaggtcaaggtggaggtcgaggacggcaacgtccttcagatcagcggcgagcgcaacaaggagcaggaggagaagacggacacctggcaccgcgtggagcggagcagcgggaggttcctgcgcaggttccgactgcccgagaacgccaagacggagcagatcacggccgccatggagaacggcgtgcttacagtcactgtgccgaaggaggacgccaagaagcctgaagtgaagtccattcagatctccggctagacctcggtctgcggtcgtcgtacctgcgtggtttgaggaacggcagttcgcctcggtcgttccgtgaaataaaattgggttacaagaattatggtgtttgtcaatatggtcgtaatgtcgtaggatggtgccatggtggaatgtggtcacaaactttgcgtatgttgggtctactggtggtgtctgaatctatgtatggatgtcatgagtttgtctactagagtcccagttcctgtggtgttcgtatgatgtatatcatgaggtaacgctatctaaaatttcttc

SEQ ID NO: 33400 - DNA, 916 bp, Zea mays
  Clone ID: UC-ZMFLMO17108G03_FLI
ccggtgaggtgagcagaccactcctccactagtcccctgtccggctgtcccctccttcgtgtcggagcctgcgcctcggcttgtccccaccaacccgcagctcgctcccaccaaacccacacccgaacaatggcgtcggcgtccaaggaggaggtgatcgggaagctcaacatccgcgtggtgcggggcaacaacctggccatcgccgacccgctcacccacaccagcgacccctacgtcgtcctccagtacggcgctcagaaggtgaagactagtgtccagaagaagaaccccaatccagtgtggaacgaagtactgcagctctcagtaacaaatcctacgaagccagtgcaccttgaagtttttgatgaagacaagttcacagcagacgacagcatgggtgttgctgagatcaacattactgacatctacgatgctgcgaagctggacctgaagcacgcctctgatgggaccaggatcaagacgatctaccctgtcggagtaaactaccttggcggcgagagccatgttcagtggaaggatggcaaggtggtccaggacttgattctgaagctgaggaaggtcgagagtggcctgattgtggtgcagctggagtgggttcatgttcctggcgtgaagctgtgaaggccctgtctgaatgagggctgatggagctgcagttgctgtgtccctggtttgagtgtttcgttgtaaacgatatcctgaacgtggtaatatgcggtgtatgagtgaggtttgagtgtgatgctttgtttggggtacttcctggtgacatgatgtgggtatgactaccaaaggttgtggcgcaccaataagaaacgccctgtcagcatgttgtgagatgtaaactaagactttagaacttaaatatacaggtgattgggcgttagttgct

SEQ ID NO: 33401 - DNA, 1219 bp, Zea mays
  Clone ID: UC-ZMFLMO17108G04_FLI
ccgccgcatcgccgccgccggaagcgcctccctcgatccagatccaggagatatgcctcgcaatgatgatcgctatgggaatacacgcttgtatgttggaagattgtctccccgcacccgttctcgtgacctagaataccttttcagcaaatatgggagaattcgagaagtggagttgaagcgtgactatgcattcattgaattcagtgacccccgtgatgctgatgatgcacagtacaacctagatggcagggacgtcgatggaagccgcattattgttgaatttgctaaaggggttcctcgtggttctggtggttcacgtgattacaacggaagaggacctccaccaggaacaggccgttgttttaactgtggagttgatggtcactgggcaagagactgtcaggctggtgactggaagaacaaatgctaccgttgtggcgaaaggggccatatagaaagaaattgccagaacagtccaaggaacctcaggcgtgagagaagctattcacggtctccatccccacgccgaggacggggccgcagccggagctacagcagaagccggagctatagcctatccagatccccgtctggatctcctaggggtggacgccgagaccgtgatgagaggagatcaaggagtcttagctacagcaggagcgcaagccctaggcgttctgtgtcacctgtaaaggaaaaggagcgcagccgcacacctgatggcagtaggagccccagcccaagggacaaggtgagcccaccaccaaaggataatggtgcccacaatggctcggaccgtgaagacagccctgggggcagggagatgagcaagaggagtcggagcccgtctgatggctaccgtagccctgtgggcaatgggcgcagcccgagccgtagcccaagccccaaggtcaacaatggtgatgacccaagccccaagggcaacaatggtgacgacccaagccccaagggcaacaatggtgatgacgacgagcaccgcggttcaccaagaggaagtcagtccccctgaactgaaaaactccccgtgcaatttggggagcagtgtgcctgatttgagaaaacaaactgtattttgccatttctcagacttgtgatctttttgagcaagaaaactcggtgtaagaatttgttgccctcgggtgtaagacagatttgtggtatttgagcttttcatcctgccaaaagctgaatattc

SEQ ID NO: 33402 - DNA, 1572 bp, Zea mays
  Clone ID: UC-ZMFLMO17108G10_FLI
tgatgaggaaacagaggatttagtagaagcagtgcagaaggaaattggcaggattgaagagacacaagcatggtcttcatctcattcatggtctactccagttgaaaacatgcagattgctgagatttcagcagctggccgtgttgagataccaacagatggtgctagtgaatgggaaattgatgtaaaactgctcaagtttgggaataaagtagcatcaggatcatatggtgatctttaccggggtacatattgcagtcaagatgttgctattaaagtgctgaaacctgagagaataaatgcagacatgcagcgtgaatttgcccaggaagtatatatcatgaggaaggtacgtcacaagaatgttgtgcaatttattggtgcttccactaaacccccaaatctatatatagtgacagaatttatgtccggtggaagtgtgtatgattacctccataaacataaaggtgttttcaaacttcctactttagttggagttgctatggatgtgtcaaaaggcatgagctacttacaccagaataatattattcatcgtgatttgaaaactgcgaaccttctgatggatgaaaatgggactgttaaagttgctgattttggtgtcgcacgtgttaaagctcaatctggagtcatgactgcagaaactggtacttaccgttggatggccccagaggtcatagagcataaaccctatgatcacaaggctgatgtttttagttttggaattttgatgtgggagctactcacagggaagattccttatgagtatctgactccactacaagcagctgttggcgtggtgcagaagggattacggcctacaattccgaaacatacttatgcaatgctttctgagcttcttcagaaatgttggcagcaagaccccgctcaaagaccagacttttccgaaatattagaaactcttcagagaatagcagaggaagtcggagacgagcacgaggggaagcacaaggacagaacactgggtggtttcttttcagctctgagggggcggagccattgagacacggttgaagacttgaaatgtacatggcctcggtccatcctggaaagacctgaactacaaccagctcctgttccccgcacatagcgacagtacacagaaatacagacatgctgcagccggagttgactaagtggcaattttttagcggcagccatcgcttttcgcctatctgcttgttactcctgagttccatcacaatgagaggaagcttgggaactgtgcatcataaccagtctgatttctctaacagagtctaatcttgctgtagatgaaaataataagccagatccaggccgtggcatgattcttttaaggttccatcttttagcatattttcttctacgtgccgtcattcttttctggacatgctccacccctctgttgtggaacaacgcggcaagcttgagttagctgagcaaggcacctgcatctgcatgggatctgctcggaacaaagttgggttatcttgtgctaagcttttgttccccagtttccgtgactacaaatgatatcaatttattttaaag

SEQ ID NO: 33403 - DNA, 1818 bp, Zea mays
  Clone ID: UC-ZMFLMO17108G12_FLI
caaactcatcttccccggtaggccttatccggattcagcttgcacctctccagtgagctagtcaccgccagtccacgccatggcttgtcgcgccactctcctgccgctcttcctcttcctcttcctcctcgtggcgcccgcgcctgcgctcgccacatccggcaccatcgtcttcaccacgctgggccggagccgctacgcctttgacgtcttcgcgctcccgatcgccccgctctccgccgcctccgcggagctgcgcctcacggacggcacctccgtcaactacaacggcaacttcgcgccctcctcctccggaccgccctccctcctcttcgtctccgagcgcaacggctcgctcaacctctacctcactcccgtccccacatccgcctccgcccgacgccgcgacgcgctggaggaggaggacgtcacggcgccgcccacgccgctgctcccgtgggaccccatcgcgctcaaggaccggccttcgctcacccccgacggcgcccacctggtgtacgtctccacggcggagcccgcgggggcgccgcgccggagctgggcggccgtgtactccacgagcctggcccccggcggcgccacgcgccgcctcaccccgcggggagtcgccgacttcagccccgccgtgtcgccgtccggggtctggaccgccgccgcgtcacccggcccgcgcggctgggccggcgaggtggaggacctccgcaccgacatctacgtcttccggacctccgacgggtcgcgccgggcgctggccgtcccggacggcgggtggccgacctgggccgacgacaccaccgtcttcttccaccgccgcgacgccgacggctggtacggcgtgtaccgcgccaggctcaccttcacggacgacgacgtcgcgtccgtcgtcgaccggatcaccccgccgggtttccacgcgttcacccccgccgcgtcgcccggcgcgccggggctcgtggccgtggccaccaggcgcccgggttccgactaccgccacatcgaggtcatcgacttgtccggcggcggcggcggcgccaacaacaggagcgcctactacgaggtgacccggcccgtggccccgcgcgcgcaccacttcaacccgttcatctcgccggacggcgagcgcgtcgggtaccaccggtgccggggcagcgggaacggggactcgccgctgctgctggagagcatcaagggccccgcgccggacacgttctcgctcttcaggatcgacgggtcgttcccctccttctcgcacgacggcaagaggatcgccttcgtcgggctgccggggctgtacgtggtcaactccgacggctccggtggccgccgccgggtcttctcgggcaacgcgttcccgacgacatgggactggaagaggaaaggggtcatctacaccagcgtcggcccagacttcgcgagcgagagcaccgaggtggacgtggtcgccgtgtcgctcggcgacggcgacggcgacgaccccagcgtctccatcaagaagctcaccgtgggcggcgagaacaacgcgttcccgtccccttcgcccgacggcaagtgggtggtgttccggtccgggcggtccgggcacaagaacctctacatcatggacgcggaggacggcgaggccggcggcatccggcgcctcaccgagggtccttggtccgacaccatgtgcaactggtcccccgacggcgagtggatcgcgttcgcctcggaccggcacaacccgggcggcggcagcttcgccatctacatggtgcacccgaacggcaccgggctgcggagggtggtgcacagcgccga

SEQ ID NO: 33404 - DNA, 2641 bp, Zea mays
  Clone ID: UC-ZMFLMO17109A07_FLI
ggcagcgcagaggagagcaaccactcgcccgccgctcgcccaccacgatctccctcccctccgcacgccgcacggggcgttgcagacccagccaaaggcaagccgcgaaccggagcacgccggccggtcgcgggcgtcgtcgtcgccgcctcccgcgccgccgccctgctgctcgctcccgcattggatcgcgctgcggttggcgactcggtgtggtctgctgctggtcactgcgcggctgcgcctagccggcccacgcggagacggcatcaagtttctaacaatttgaagtaccgcgaaatgggcgcaagagataacggggaggggagagatgagaagagggggactggatcagattatgtacctgctagagactccttttcatcacaaggtgagtctcgggttccaaagaggcttggtaaaaaggagtcaaaagataatagcccccgaacgaccaaaagcagcgccagccgtcaagctcaaaacaagctgcaacataaaggattaaacaatgtacagaacaagcctcagaaacaaaagaaaacagttagtgctgctaaggctgttgatgttagaaaaccagatattacaagaattccttcccgccctccatcagaattgtctgaggaaacagacgatataatcagtgatgctggaactgttgatgatagaggcaccgaggaggccaaggagatcaatgtgttagatgaagctccacgctgtgatcagagtactggtactgatgatgaaattcctgatattgaagacaaggtagttgatcatggaaaatcagttgtagatcaaggcaatgaggaattagtgctgaaaatcgacaagttggaacaggaacttcgtgaagttgctgctcttgaagtttccctgtactctgtagtgcccgagcatggaagttcagcacataagttgcacaccccagctcggcgtctgtctagattatatatccatgcatccaagtcttggtctgaagataagagagcttcggtagcaaaaaacattgcttctggtcttgttcttgttgcaaagtccagtagcaatgatgcttcgaggctgacattctggctgtccaacacagttgtcctcagggagataattgtacaaacttttggcatctcacatcaatttactccatccatgacgaatatgagcatgaatggtggtgccaaaaaacttgatgggaaatctatgacaatgctgtggagaaacaactacaatggcacgcaagccaaatttgctgcgaggctgatgccagatgattggcaggaaacaagtacacttttggctgcattagagaagattgagtcttggatattttctcgcattgttgagacagtatggtggcaggcactaactcctcacatgcaaaaacgggcagaaggatcatcaactccaaaggctggtagagtgctaggtcctgctttgggtgatcagcagcagggaaccttttctgttaacctgtggaaggctgcgtttcatgacgcattcagcagaatgtgccccctcagtgctggcggacatgagtgtggctgtttaccagtattagcaaaactggtgatggagcagtgtgtagcccgtttggatgttgccatgttcaatgccatccttcgtgaatcagcaagtgagataccaacagaccctatatctgacccaattgttgacccaaaagtcctaccaattccagctggtgatctaagctttgggtcaggcgcgcagctgaagaactctattggaaactggtccagatggctgacagataagcttggcatagatcacgatgattctgaggacataggagatgttgaagacgaaagaagagccgcagctgaaacgaaatcatttcaacttctcaatgagctaagtgatctcctgatgctcccaaaggacatgctccttgaaaaatctatcaggaaagaggtttgtccctcaattggccttcagttagtgattaggatcctgtgcaacttcaccccagatgagttttgccctgatccggttccaagcacggtcttagaagagctgaattccgagagcttgctggagcgtcacaccaacaaagacgcgaccagtgtgtttccgtgcaccgctgcccctatagtgtaccacacaccttcaacgttggacgcggcagagagagcggcagacataggaggtggcgcgaagctggacaggaaagcctcaatggtgcagaggagagggtacaccagtgacgacgaccttgacgacctggattctcccctcgcatccctaatcgacaggagcgccccaccttctccgtcgaacggtttcgcacacttcagtgctcggagaggagtttccatggagaatacaagatacacgctcctaagagaagtatgggggctggagcaacggtgatggatgatgatgagcctgtaaaacctaaaatctcttctacagccacccaaatgagagcacaagaaggcctatttgtgtggggtcttcagcaatctctacagtaaaaaatgcaacacttccttgtactgtacattcccacgatcctatgtatcttagctcttttgtagtatatagcagcaaaagagggtgtcggcaaagatacagatacagtactgagttaaattctattctataatgatatgacattctcttc

SEQ ID NO: 33405 - DNA, 1446 bp, Zea mays
  Clone ID: UC-ZMFLMO17109A11_FLI
cgctgctgctgctctgcgccgcctcgctccgctgctcggccaccgcgcgcgggaggctctgggccggtggggtctccatcgcggcggcggggagtggcggcgaggaggagtgcgacctgttcgacggggactgggtctgggctggcggcggcggcgggtacccgctctacgactcccgggactgcccgttcctcgacgtcggcttccgatgcgccgagaacggccgccccgaggcgtcctacaccaagtggcgctggcagccgtcgcgctgccatcttcccagatttgatgccaaaagcatgctggagaagctacgaaacaaaagagtggtttttgttggtgattcaattggaaggaaccaatgggagtctctactttagactacaattgcacggtggaatactacagatccccttttatagtccttcaaggccgtgcaccagcaggagcacctgagattgtccggtacagtattcgagtggatgcaatggattggatgtccgaccgcggtaactggaaggatgctgatgtactgatcttcaacactgggcactggtggaacaatgagaaaacaatcagggggggtgcctactttcaagtaggcgatgaggtcaaaatgggcatgagtgttgctgaggcttacagaagatcgatagagacattgtccgattggcttcgcaaagaagtcaacacgagcaagacccatgtcatctaccgcacatatgctcctgtgcatttcagagatggtgactggaagactggtgggagctgccacttggaaactcttccagacgcgatgccagtgaagtccctggacgaatgggccgacttgctccaacccgtggacgaatttctagggagcgatcttggatccgagctggctggtgtagacctgcttcgcgtgacgggaatgacggcccagagaaaagacggccacctctcggtctacctgagcccctcaggacccgtgccccgctacagacaggactgcagccactggtgtcttcctggagtccccgatgcctggaacgagcttctctacgccctcgtcatgaggaggcataagaagatggccggcactaggacaccggacgctgaagagggagatgtcttcagcagtggatcatcatcgtgacaaaacgagcttcgtagccatccatccatcctggctaggcgatgacagctgctgtttcacataggatgccggaatggcgagacacgtttatggaccatgggtgctgtttgcaagaagctgagctagacgtcagtggtagtatagctttgtgttttgtgtgtggtgatggcaacttgtatggctaatggggaggtatttggaattggcagtgtaactagctagggtcgctacagcgaatgatgtacatatgtattcttttagcactcgttcggtgattcatattccatgtaggttttgatgggattgaaaag

SEQ ID NO: 33406 - DNA, 1106 bp, Zea mays
  Clone ID: UC-ZMFLMO17109B02_FLI
aacaagctgccccgcagcaacgaacacgaaccttggcagaacgaagctgaagtagttcgttgtgaacccagtatggcaaacgcgccgaggatcctggccctcggcctgctgctagcgctcctgtgcgctgccgccggcccggccgccgcgcagaactgcggctgccagcctaacttctgctgcagcaagttcggctactgcggcacgaccgacgactactgcggcgacgggtgccagtcgggcccgtgccgctcgggcggcggcggcggcggcggcggaggcggaggcagtggcggtgcgaacgtggctaacgtggtcagcgacgcgttcttcaacggcatcaagaaccaggccgggagcgggtgcgagggcaagaacttctacacccggagcgcgttcctgagcgccgtcaacgcgtacccgggcttcgcccatggcgggacggaggtggagggcaagcgcgagatcgccgccttcttcgcgcacgtcacgcacgagaccggacatttctgctacatcagcgagatcaacaagagcaacgcctactgcgacgcgagcaacaggcagtggccgtgcgcggcggggcagaagtactacgggcgcggcccgctgcagatctcgtggaactacaactacgggcccgccgggagggacatcggcttcaacgggctcgccgaccccaacagggtggcgcaggacgccgtgatcgcgttcaagacggcgctctggttctggatgaacaacgtgcaccgcctgatgccgcagggcttcggcgccaccatcagggccatcaacggcgccctcgagtgcaacgggaacaaccccgcccagatgaacgcgcgcgtcggctactacaagcagtactgccagcagctccgcgtcgacccagggcccaacctcacttgctaggccagcagctcctgctagctcgtccacaataaatgctcggcgtcgcaccctcgcgaaaccaagagtttactactgactagtacgagctagctagcatgcagtaataataatcatcgtaataataataataaaacgacggggctgagccactttgttcgacctgaatgaataatgaagcagctgtatgttccctcggt

SEQ ID NO: 33407 - DNA, 2707 bp, Zea mays
  Clone ID: UC-ZMFLMO17109D01_FLI
ctcgcgtgcgctctctgtctctcggggcgacgactaggcggctgctcgccggccgccgacgccgacgcccgccgccagattcccaggtatctatcttcgggaccttgaccggcgacgagcacccaacaggtactgattttgctgaagcaacagaataatgtattagccctcatgtgttaacacctacataaactttgagtatcctagtttcaagtgaaatcatggcacgaaaaggaaatcaaagtaagagtggccccaatcatgcttcacctaagtggaaaaatacaactgatggtgatgcactaagtacaccagaaagaggtgctgcagatagtgaaaatccgagttcacatgttcaaggcagatcaaagggtcctgaaggaagcagtgagaagaaaggaagaggcagcaaaaggaacagcacaaacaacggcatatcatcctctggaaaaaaacaacaaatggacaccggttgtgatataagcagttcagaagaaaaggagattccggtaagaggtactaaaaatagaagaggtagccagaaaccctctaggcgcggttttggtagaagttttttgattgagcaaacaacatcgtctggattggcaggaaatgttttggagaagaccaggtgcattgcttgcatggctgcatccattattagagcttccatgatatatctagttgaagaaggcaaaagatttatcgacaaaagaatgccaacaatcaacacttatatggcttttgtcaacaaagggcatgcatatgtcttaagcaaaattgcatacgtttatcccatagttcgagcttggatgcttaatgctggaagggtgatgctgctcttgtttacagtttggttagactgcaatgtaaggggctttgattctttgctacgattggggacaaactctctcctagcagtactttggtgcagcacgctgtcaacttttgcaatgattgggataaaaaagatgctcatattcatggcgattgcagcttctgcgtttgccttcataggtctaggttttgctatcctgcttatatcagtgcttgcagtggtaatcttatgggtttatggaagtttttggacgaccacttgtgtaatgattcttggaggtgttctctttttcttgaaacgcgaaagaataactcttcttgttgcctgtttatattcgatgtattgcgcgagatgctatgttggatggctcggattgcttttgggcctcaacttatctttcttttctagtgatattctagtgcagttcctaagggacaatgcagacaataaaaaattcaatggttcttcaaggtactcagagcgaagctcaggtagacaaggcaatatctttgaagaatttcagccatcagcagatagcacctcccaagccagatatgctcgagcttcagatcgagatcctggtgatccttcaacaagtggacctgagaaagagctgacctctgaagatgaagtggctcgtttactgaactgcactgaccactattcagcattaggtttccgtcgatatgagaacatagatgtatcatctcttaagagagaatacaagaaaaaggctatgttagtccatcctgataagaatatgggcaatgataaagctgctgatgcatttaaaaagcttcaaaatgcatatgagattcttcttgattcactgaaacgcaagacatatgatgatgagttgaggagggaagacctcttgaactacttcaggcagagtgtttctcaaaagaatggaagaaacagtactttccaacatgggttcagcccttcagaaggtgttgatgaaggtccttatggtctttccagaagaatagcttgtaaaaagtgcagcgactttcatctttggatttatactggaagagctaaatcacaagctagatggtgtcaggactgcaaggagttccatcaagctaaagatggcgatggatgggttgaacagtcctttcaacctgttctatttggcatgctgcagaagcctgatttacctcatgcatatgtttgcgcagaaagctacatatttgatgtcactgagtggttcaactgtcagggaatgagatgcccggcgaacactcacaaggcaaccttccatgtcaatgccaacatggcaaagcagagcagtggcaaggcgagtacctcaacgcagagggctggtaaggccccaagtggtgtaaacatggatggaggaggactcaacgaggaagagttcttcgagtggttccagaatgcagtcaactctggaatgtttgaaactacattcggggcacaaggcgacccgacttctcctggtaacggaagcaatgccaagagtagcggtagcagcagcaacaacagcagcaggaaaaagaagaaaggaaagaaacagtggtaatcaaagcaaagcaggctggggtctggtgatcactactcggggcagagaaaaaaaagaaacaaacagaataagcgttttgggtatgtaaatacaactcggaaaaatcggtccctggcttaaatggttcctaacgagaggccactgtaaatcctggttcatcatggggtgctgacggctgttaaatggccattataaatcctggttcattatgttgtcggatcttaatatatcgtcctggcccccggtaacttgctagcaaaaaaaagttataaagcaagttactatgaaacaagaatttgcaagattaaagatagttttttttt

SEQ ID NO: 33408 - DNA, 1387 bp, Zea mays
  Clone ID: UC-ZMFLMO17109D11_FLI
gttggggtgcttccgaacttgtataatttggctgcaggacagttcaacccccttgttattcagccacaagccatgacacaacaggctacccggcatgctcgccgtgtctatgtgggtggacttcctccaacagctaatgagcagaccgttgccatattctttaatggagttatggctgctattggaggaaacacagctggtccaggtgatgctgttcttaatgtctatataaaccatgacaagaaatttgcttttgtggagatgagatctgtggaggaagcaagcaatgcaatggctttagatggcataatgtttgagggagcaccagtcaaggttagaagaccaacggactataatccttccctagcagctgctcttggcccgagccagccaaatccaaatctcaatcttgctgctgttggcttaacacctggctctgctggaggattagaaggtccagaccggatctttgtaggtggtctaccatattatttcactgaggctcaagtgcgggagttgctcgagtccttcggacctctgcgtggattcgatcttgtgaaggatagagaaactggtaactcaaagggatatgccttctgtgtttaccaggatcttaatgtcaccgacattgcctgtgctgcccttaatggcatcaagatgggggacaagactcttactgttaggagggcaaaccaaggagcttcacagcctaggccagagcaagaaagcatcctgctgcaggcacagcagcaggtgcaaatgcagaaactcgtataccaagtcggaggtgccttgccgacaaaagttgtctgcctgacacaggtagtgacagcagatgaactgagagacgatgaggaatacaatgacattgtggaggacatgagggaagaaggacgcaaatatgtcccacataatgccattgcagagtgttttatagtccgaccctatgcaatattggcaatcgggctttaacccacagaagacactattcttttgagtttgattaatcattatatcattagcctcttgcctatatatctctactcactaacacttggacaggtaacttggtgaaagttgtaattccacgacctgaccccagcgatgccccagttgctggtgttggaaaggtgtttttggaatatgcagatgtcgagggctcgaccaaagcaaagacggggatgcatgggcggaaatttggcgggaaccaggtggtggccgtgttctatcccgaggacaagttcgctgctgagcagtatgactgaaagttgtagaacctgttctagagttgcaacacacaatgtgtttttttaaaatctttgagggtaccggtttctcttgaatttgaatcttatccagttataagtttggtgcaggaccagtcgat

SEQ ID NO: 33409 - DNA, 1363 bp, Zea mays
  Clone ID: UC-ZMFLMO17109E06_FLI
cagatcttgaagcagctccagcagctgtagcacgactcttttcaattgactggtacatgaataggattaatggtaagcaggaggtcatgatcggatattcagattctggcaaagatgcagggcgtctctctgcagcatggcaaatgtataaagcacaagaagagctcatcaaggtggcaaagcattatggagtgaagctgacaatgtttcatggaagaggtggaacagttggcagaggtggtggtccaacccatctggccatattatctcagccaccagacacgatacatggatcgcttcgtgtaacagttcaaggtgaagttattgagcactcctttggagaggagcacttgtgctttagaactttacaacgctacactgcagctactcttgagcatggcatgcatcctccaatttcccccaagccagaatggcgtgctctgatggatgaaatggctgttgtagcaactaaagaatatcgatcaattgtctttcaagagccacgcttcgttgaatacttcagatcggctacgcctgagactgagtatggcaggatgaatattggcagccgtccatcaaagaggaagcctagtgggggaatagaatcgctccgcgcaatcccatggatctttgcttggacacaaacaaggttccatctgcctgtttggcttggatttggcgcggcgatcaagcacatcatgcagaaggacatcaggaacatccatatactgaaagagatgtacaatgagtggccattcttcagggtcacccttgatctgctcgagatggttttcgccaagggagacccgggaatcgcggctgtgtatgacaaattgcttgtggctgatgatttgcaatccttcggcgagcaactgaggaagaactatgaggagacaaaggaactactcctccaggttgccggtcacaaggacgtccttgaaggtgatccttacctgaagcagcggctgcggctgcgcgagtcctacatcaccaccctgaacgtgtgccaggcctacacgctgaagcggatacgtgacccgagcttccaggtgagcccgcagccgccactgtccaaggagttcaccgacgagagtcagccggcggagctggtgcagctgaacgagcagagcgagtacgccccgggcctggaggacacgctgatcctgaccatgaagggcatcgctgccggcatgcagaacaccggctaggccaagatacatagcccctgtttgtttcagctttttggagcttctggccatcaaaagctgctgcggactgccaaacgctcagcttttcagtcagattctataaaattcgtttgggtaaaaaccattcaaaatcaacataaacacataatcggttg

SEQ ID NO: 33410 - DNA, 3833 bp, Zea mays
  Clone ID: UC-ZMFLMO17109F11_FLI
gctgatctcactcacgctcaccccagccggccagccccgtccccatccggctagaggttcacatcacctgcgtgacgataaacatcctcttccaaatcgtagtctagcccgtgcccaaaaccctagcgaccgccggagagctcgtccgaatcgaggccaccgaggggaaattagatcgcggcggacgatggagagccctgcgaaagaggaggccgggggagagctggcaatggagatcgagtcgtcggtcacggcggaggactggcgccgcgcgctttctcgcgtcgtgccgtccgtcgtcgtcctccgcaccactgcgccgcgcgcctttgacaccgaggtcgcgggcgccagctacgccacgggtttcgtcgttgacaagtcccgcggcataatcctcactaaccgccatgtcgtcaagccaggacctgtggtcgcggaggccatgttcgtgaacagggaagagatccctgtgtacccactgtacagagatcctgtacatgattttggtttttttcgctatgatccaggtgccattaagtttcttaagtatgatgagattccgctggcacctgaagcagcatcagtcgggctagaaatccgggttgtcggaaatgacagcggggaaaaggtttcaattttggcaggaacacttgctcgacttgatagagaagcaccatactacaagaaggatggatataatgatttcaatacgttctatatgcaggctgcatctggtactaaaggtggctcaagtggttctcctgttgttgattgtcaaggaagggctgttgccctgaatgctggaagcaaatcttccagtgcctctgccttcttccttccattagaacgtgttgtcagagcattggatttgatacgtgacagttgggatgcatttggtaccaagacagaatctgtttatattccacgtggtacacttcaggcaacctttcaacacaaaggatttgaagaaactcgacgtcttggcctccggaatgaaacggagcagatggtgcgtgtagtttctccagaaggcgagactggaatgctggttgtcgattcagtggtacctgaaggccctgcacataaacatttagaacctggtgatgttctagtacgcatcaatgaggaggttgtaactcagtttcttagattggagactttacttgatgatagtgttggcaaggaaattgatttgcagatagagaggggtggagttcctttaactgtaaacctgcaggttgaggatttgcactctataactccaaatcattttttggaagttagtggtgctgtcatccatccactgtcatatcagcaggctagaaacttccgattcaaatgtggtctcgtatatgttgctgaagcagggtacatgctctctcgggcatctgttccacgccatgccattattaaaaagcttgcaggagaggatattgcacatttagatgaccttattgcagttctttcaaaattgtctaggggaacacgagtgcctctagaatatgtcaaatacactgaccgtcacaggaacaaatctgtactggtgacaatagatcaacatgaatggtatgcgtcacctcagttatatactcgaaatgatgcaactggcttgtggactggaaaaccagctataccaccagaatctccgtttttagctctagctcatcatgctagtcatgtggacacaaactcaaacgctgtttcatctttatccgaatctagtcctatggatctcaagtgccagtatgattctgagaacctggcagacggatgcatcaaaatgcaaactgatgatgagattgttgtggatggatctcattctaacgaagattctgttattgagaaaaaaaggcgacgtgtggtcgaggagatagctgccgacggaactttaccatcttatggagatctagaggatgtaaaaggtggttctttgaggcatccttctaatgcagatggatctgaacttgctcgaacaatatcaagcaatgcatcattggcagaacaagtaattgaaccagcccttgtgatgtttgaggtgcatgtgccgcccgtttgcatgcttgatggagttcactctcaacatttttttggaacaggggttataatatatcattctgaacacctgggtctggttgcagttgataggaatacagtggctgtatctatctctgatataatgctttcttttgctgcatatcccattgaaatacctggggaggttgttttcctccatcctgttcacaactttgtcctggtcgcttatgatccttctgcactaggagctggagcatctgttgtccgggctgctaagcttctatcagaacctgctttgcgacgaggagattctgtctatctagttgggcttagtcgaagcttacaagcaacatcaaggaaatcaatcataactaatccttgcacagctgtcaatattgggtcagctgattgtccacgataccgtgccataaatatggaggtcattgagctcgatactgattttggtagcacattttcgggcatattaactgatgagcaaggaagagttcaagcattatgggctagcttttctacccagctgaaatatggttgcagcagctcagaggaccatcagtttgttagaggcataccaatatatgcaataagccaagtacttgagaagattatcactggaactgaaggaccttttcggcttatcaacggaataaagagggcaatgccatttgtcagacttttggaggtggaactttatccaactttgctatccaaggcaagaagttacggattgagtgataactgggtgcaggcccttgcgaagaaggatcctgtgcgtagacaagtcctacgggtgaaaggttgtttggctggatcgaaagcagaaaatcttctggagcagggagatatgattcttgctatcaacaaggagccaattacatgcttccttgacattgagaagacttgccaagagttggaccaatccattgggtcagatggagtgcttaacatgacaatattccgtcagggaaaagaaattgaccttgttgtcggaactgatgtaagagatggcaatggtacaacccgtatggttaattggtgtggttgcattatccaggatcctcactcagcagtgcgtgcacttggctttttgccagaagaaggtcatggtgtttatgttgctagatggtgtcatggaagtccggtacatagatatggcctctatgctctccagtggatcatcgaaattaatgggcaaccaacaactgatctggaaacttttataaaggtggtgaagggtctcgaagatggtgaatttgttagggtgaggacggtccatttaaatggaaagcctcgggtacttactctgaaacaggaccttcactactggccgacctgggagctcagctttgaaccagaaactgctacatggcggaggaaaataataaaagcattgcaatcagccagggcgtgatattttcatgttttgctgcgaccttttcatgctttcagaggagcatagaggtatggaagttagaggttcgtgcctttgtttggtaagctaaatcgtgcattatatatgcaggattaagcaaccctgcactttgtagggttagttgtgtgcattagcataggggtgcttgaaagatatataaaaggtacattaaaggtatatggattcattgtctgtggtctctggacaatttgaccacaggatttgccatttgtatatcgtctattcctatattttggtagaaaaagaaataaaccgttagcctttctagcggccatttcactactctgcattaagaatgtgtgttagctatcaagttaacagctcc

SEQ ID NO: 33411 - DNA, 1392 bp, Zea mays
  Clone ID: UC-ZMFLMO17109G06_FLI
ggcgatggggaaggcgtccaagggctcacggaaggggaagaaggcgtggcgcgccaacatcggcaccgacgacattgacgattttttcgagaagcagacgcgcgatgcccacgcgggcaccgccgccatcccttctcttccttcggactcgctcttctttgtcgacaagcccgccacctccgcatctacttccgccgccggcgcctcggacacaaccaccaaagatattcctgtcaaaaggaagatcgagaagaagagggagaaggttctttatcatgagagtgtactgaagcggaatccgtttgtgcagccaatcccatcttctgtgccgggcaagaaggataagaagataaagaagaagaaattgcaggagacacagggagagaaaagtgttcctatggaaaatgattctgtagttaagaactttgacatctgggctgtggatggtaaaggtgattccaaggccaaaaagagatctactatatcagttattcctgctgttgaagttgagcctgcaggatgttcatttaatcccccattcgaagcgcatcaagattctcttgctcaagctgtagcagatgaaaaacgcaaagagtacatgaaagagctggggccaacacctgtaccactcatagttcctggtgaagctatagccgaagaagataaattttttcttgatgctggtgaaggagatgaagatgaagatgctgcagaaaatggagatcaggatgctgatacttccattggacaaaggaagaacacaacaaaaagagttacaagagtagaaatgaacagaagagctcgccggaaggagaggttaagagcagaagcgaaagcaaagaaaatggaaaatattttgaaagaaattgacagcttgccaaatataatggatgagatagctaaagaggacaaggaaaaggagaagaggcacaaacgtcgaactgtggttaaagaggagagacgtaaatcaggcccacctcgtctgggcagacacaaatttgagccagctcctgttcaagttctattgacagaagagattagtggctcacttagaaagctaaaggggtgttgtaatcttgcaagggatcgctacaagagcattgagaaacgtggaatacttgcaccaagcaagagaataagcaaacgtcggtagagaaggcaagttccaatctgagggatgatatggtgaagctggattgaagaggatttactagatttgagaagaccctttggatgttcactgtcggaatgttcccctctttcagtgtcttgcgaaagtacctaacgattggtcctgtcgttgtgggctcgttgttgacgctagtttcataggatctgggatgcactcatatacctgggctggtcttgatgcatgatggcgtatcgcttggt

SEQ ID NO: 33412 - DNA, 1211 bp, Zea mays
  Clone ID: UC-ZMFLMO17109G10_FLI
tgaaattttgttaggcacactatttgacaattcttatccacttacagaatgttgactagctttcagaacaccttaacaaaaaagatcttttctaaatttgcctttcaatggccaaaatcccatttttatgcaaatgagaaatgaacagcctacaaactatttttgttgtgcatctccactgttttgggcttccaatcttttcttgagtatttttttactttcaattaccccctcttatagtttcatcattaaaaagtattgttttttactttcaattactccctcttataatttcatcgtgttacacaatgttgatgtcgatatagatatacacccagaccatctaaatgcgagttcttatcaaagcaaacttaggttcctttttttgatacaaagtcgtctggtttctcttaaacctatctagtattttgtttcctactaatgtcaataccgacctgcaagcctctcctacctcactcttttcgggatcactatttcacatactttaaaccacatatgaaattatgttatacattaggcacactatttgacgattcttatccacttacttacaggatgttgactagctttcagaccaccttgacaaaaaaatctggcatccccacctaagaagtatgtttaaaaaaaagaggagagcaaatgcaacccgagcaacaagttgcttccttttttacactatgtaccatagtcctttctaagttctaacattgcagaacacatacatgatcaaaactagcaggcttcaaaaacatcaaaaagattttacaggccctgaaagcgatgtccggtagatcaacgtcattctcatcaaggcgcgacataattttacacctcttctctacacacaacttctaatcaatataatttgtgcattgttcttcactctcctttataacctttgcgcaaaaatagaatagctcacaaactcttcaacgacaactgatctgtccttttttctgtacagataattgctttgcgtatctacaacgaccatcactacttttgaagcgcaaacgcttttatgtacatataaccaaaccgatgaaacttctctagcttagtatttgtttatgcgatcctcagctctgctttctgtacctatgacgatcatcgtcacttttgcaaagcaaatgcttttgtgtacatattaccaagttgatgaaaccttgccagtttagcgtctgtttatt

SEQ ID NO: 33413 - DNA, 689 bp, Zea mays
  Clone ID: UC-ZMFLMO17109H04_FLI
gcagatctttgtgaagacattgactggcaagaccatcaccttggaggtggagtcgtctgacacaatcgataatgtcaaagccaagatccaggacaaggagggcattccaccggaccagcagcgcctgatctttgctggcaagcagctggaggatggccgtaccctcgccgactacaacatccagaaggagagcaccctccacctggtgctccgcttgcgaggtggtatgcagatctttgtgaagaccttgactggcaagaccataaccctggaggttgagagctccgacaccatcgacaacgtgaaggcgaagatccaggacaaagagggcatccccccagaccagcagcgtctgatcttcgccggcaagcagctggaggatggccgcaccctagcagactacaacatccagaaggagagcactctccacctggtgctccgcctccgcggtggtcagtaagccatggttcatttaagctgctgctgtacctgggtatctgcgtcgtctggtgccctctggtgtacctctatatggatgtcgtcgtctaataaacatctgtggtttgtgtgtcatgaatcgtggttgtggcttcgttggtttaatggacctgttgtgtcctctgtgttgtacccaaaactcttctgcagcagtatggcttgaatccttatgaagtttgatatttgaactt

SEQ ID NO: 33414 - DNA, 1140 bp, Zea mays
  Clone ID: UC-ZMFLMO17112F07_FLI
tttggttccagccacgtctgggtggaccactgctcgctctccaactgcgccgacggcctcatcgacgctatcatgggatccacggccatcactctgtccaacaactacttcacccaccacaacgaggtgatgctccttggccacagtgactcctatgtgaaggacaaggcgatgcaggtgacaatagccttcaaccatttcggcgaaggcctcattcagagaatgccaaggtgccggcacggctacttccacgttgtgaacaacgactacacccactgggagatgtacgccattgggggcagcgcggagccaaccatcaacagccagggcaatcgctaccttgctccgacgaacccgttcgccaaggaggtgaccaagagggtggagactgcccagaccgtgtggaagagctggaactggaggtcagagggcgacctgctgctgaacggcgcctacttcaccccgtccggcgcgggcgcctcggccagctactcgcgcgcgtccagcctcggcgccaagtcgtcgtccatggtcggcaccatcacctcggacgccggtgcactgtcgtgccgcaagggcgcggcctgctagcgcggatcgcactccctctccagcaacaggaaaagaaacaggacaacaacaggaaactaagccacatcaacaccaccaccaccatggttacagtttcttcttccctttctctcttttttttgggggtcgcttttgacaagggttatattatatatgatggtcctccttgatattttcaccatttgctcaacctcccccctgctcccgacatggaaagctacctggagcagcaggcgtgaagcgttgctgattggtcgctcggtctctctattagtcgtctgatctgagtgtggcgtgttgttccctctgcctacaagcaagtggtgtatgttgagggcagggggtgcgtgcgtgttgtgtgtgatacttactcacttggttgttgtgttgagaaaacaaaggggtcagattgttagtagtggtagtactacatgttactacgcctggacagactgggatggaatggatgtacaagacatggaggaatacccatgttcttaactcttcttcttcttcagtgcaaaaagctaaaacgttacagtctagctg

SEQ ID NO: 33415 - DNA, 619 bp, Zea mays
  Clone ID: UC-ZMFLMO17112H02_FLI
ccgccgctccagccttccatccatccatcccgtagctgctctctattccgccagcgatcgagagaccaagaggagcaggagcgatggcgaggagctcgttcaagctggagcaccccttcgaaaggaggcaagctgaggctaaccgcatcagggagaagtaccccgatagaattcctgtcattgttgagaaggccgagaggagtgacatcccagacatcgacaagaaaaagtaccttgtccccgccgacctcacagtgggacagtttgtgtacgtggtgcggaagcgcatcaagctcagcgccgagaaggcgatcttcatcttcgtgaagaacaccctcccaccaacagctgccctgatgtctgccatctacgaggagaacaaggacgaggacgggttcctctacatgacctacagcggcgagaacacctttgggctgctatgagtggcgccacgccgccgtggatcgacgtcggacaatgcccctcctcctgtaaatacttaaaaaaaataggcgtctcaagaatccgtgtacataataatctggcatgtcttgcatcaaaagcaactcgttgcgtccactgtctgttgaaactattgaagcgtactaaacatttaagc

SEQ ID NO: 33416 - DNA, 2374 bp, Zea mays
  Clone ID: UC-ZMFLMO17113A09_FLI
attccccttcccatcccatcccttccgcatcgtccccgaacgacgcagacggacgcaaggcacggcgccgacatctcccccgaggcccgagggcccagacatgaaggccctgggcgcgcacgccgccgacctgctccgaggcccgcacctactccgcgccgccatcttcgctttcgccgttgcgctcgccttcttcgttggctaccactggcccaacgcctccccgcgccttgtcttcttctcgtccgacgcctcctcgtcgtctcccaggccgtcctcccgctctccttccgtcgtgctctcccctaactctaacgtctccttcgacccatccctgatccctatccccagcaccccgcctgcttcttctactcccaatgcctggtccccgccctcactaccaccgccgacatcggcgccgccgcctcccctcccccctcctccaccaccagcgcgcctcggcatcgtcggcgaggacggcgctatgcaggacgacttcgacatcggcaacgtcggcgccaacgacactgatctggccaccgacgagaccgcgccgcaggagcctagagacgtgggcgccagcggtggaccacctagggtgcggattgagaggttcccggtctgccccgagagcatgagggagtacataccctgcctcgacaacgaggatgatatcaagcggctgccctcgacggagcgcggggagcggtttgagcggcactgccctgccaaggacaagggtctcagctgcctcgtgccggcgcccaacgggtacaaggcgcccatcccctggcctcggagcagagacgaggtctggtttagcaacgtgcctcacacaagattgattgatgacaaaggaggacagaattggatcaccaaggtcaaagataaattcagatttcctggaggcggaactcaattcattcatggagcaaatcaatacctagaccagatctcccagatggtaccaaatgttgcatttggatctcatactagagttgtcctggatgttggctgtggagtagcaagttttggtgcatatttactttcacgtgatgtcctgacattgtccatagctccaaaagatgttcatgaaaatcagattcagtttgctcttgaacgtggtgtgcctgcaatggcagcagcatttgcaacgcgccggttgttatatccaagccaagcgtttgatataatacattgctcacgctgccgaataaattggacccgtgatgatggtatcctgctcctggaggttaatagattgcttagagctggaggctactttgcttgggcagcccaacctgtttataagcatgaagaggcccaacaagaggcatggaaagagatggagaacctcactgcccgactttgctgggagtttgtgaagaaagagggatacatcgctatgtggaggaaacccttaaataactcttgctacattaaccgaggtcctgaaggaaaacctccactttgtgatgctgatgataacccggatgatgtctggtatgttggtctgaaagcatgtattagtcggcttccagagaatggcgaagcaccaactcctgttcaatggcctgcacgcttaatggagccaccaaagaggcttcaaggcgtcgaaatggatgcctactcatcaaagaatgagcttttcaaagcagaaacaaaattttgggacgacataattgacggttatatccgtatctttaagtggaggaagttcaaagtccggaatgtaatggacatgagggctggatttggagggtttgcagctgctttgatccgccagaaactggattggtgggtgatgaatgttgttcctattagtgagccaaatacactacctgtaatttttgatcgggggcttcttggagtagctcatgactggtgtgaaccctttgatacataccctaggacgtacgatctacttcatgcatctggtcttttctcaaaggagcagaacaggtgtaatatctctagcatcttgctggagatggaccggatactcagaccaggtggtaaagcatatattcgtgaccggaaagaagttatacaggagatcaaagaaataacgaatgccatggggtggcgtggtactatacgtgacactgccgaaggcgcgtacgccagtaggaaggttttgatgtgcgacaagcctatggcgcgttaggcgatcaggtgaagacaagcaggggtaattttaggtacttttgcaactgaaaagagctgctgtcgggactgacatttgtgctgtagatagggtaggtcaaggactaatttgtaactatttgattgatcatccatttgtaaaatgatgatctgtgtagtttctgacatgtgccaatttcttttgttgaaacattgtcatggaaaccct

SEQ ID NO: 33417 - DNA, 1528 bp, Zea mays
  Clone ID: UC-ZMFLMO17113A10_FLI
tcgaaaccctaacctcggccttctcgatgtcggccgccacaaccgccccaacccctgcggtggccaccccgatggcgccgcctccgtcgtacccggcctcctccacgatctccgcctccgtggccgcgtcggtcgaggaagaggacgacctctatggccgcctcaagtcgctccagcgccacatggagttcgtcgagatccaggaggagtacgttaaagacgaacagaagaacctcaagcgcgaactcctccgtgcgcaggaggaggtcaagcggatccagtccgtaccgctcgtcatcggccagtttatggagatggtcgacggcaacaacggcatcgtgggttctactacgggcagcaactactatgtgcggatcctcagcaccatcaaccgcgagctgctcaagccgtcagcatctgtcgcgttgcatcgtcactccaacgctttagtcgacgtgctgccgcccgaggccgactccagcatctccttgctgggatcgtcggagaagcccaacgtcacctacaacgatattggaggatgcgacatccaaaagcaagaaatacgggaggcggttgagttacccttgactcatcatgagttgtacaagcagattggtattgatcctccaagaggggtgcttctgtatggtcctccgggtactggcaagaccatgcttgccaaagcagtcgcacatcataccaccgctgcttttatcagagtcgttggttcggagtttgtacagaagtacttgggcgagggccctagaatggtgcgtgatgtgttccgtttggctaaggagaatgctccagcaatcattttcattgatgaggttgatgctatagccactgctcgctttgatgctcagactggtgctgaccgagaagttcaacgcattcttatggagctactcaatcagatggatgggtttgatcaaacagtgaatgtgaaggttataatggcaactaatcgggcagacactctagatcctgctctgttgcgtcctggtagacttgacaggaaaattgagttccctttgccagaccggcgtcagaagaggcttgttttccaagtctgcactgccaaaatgaacctgagtgacgaggttgatttggaagactatgtttccagaccggataagatcagtgctgctgatattgctgctatctgtcaagaagctggcatgcatgctgtccgcaaaaaccgatatgtcatcctccccaaggactttgagaagggctaccgaaccaacgtgaaaaagcctgagacggacttcgatttctacaaatgaggcaacctgagtgttgagctcgtttcttgtttatcaattgaatatgttttagcataaagatgagtttcaggatagttgccaatatcaaatgtcgaagttgatggctgtaatgcttgagtcaatctttttacttgaaggtacagcggtgttatggaagttatgattatgtagggtggattaaccttttaccgacacggtggggcttggatttggcattaagccaatcttaccaatcaatc

SEQ ID NO: 33418 - DNA, 1547 bp, Zea mays
  Clone ID: UC-ZMFLMO17113B09_FLI
attaggcataacaccatacaaataagacttttggtttattctgatgactttaaatccttgactttcttctgtcaaatcatttattaacagtgaacttgtgttccacttgtacgcttacctagaaatacaacgcttggctcttaacaaacaatggtttcattttcttatccattcatgttttaatattcttccctgtgtgctagtgcttcttttgacttttgttcatggtccaccttttatgtgcatatacatttcaggctcaggttttagtgggatatgatgaagctaaaaagtggacgacgaccgttctataaggatgttaagcctgtagactgccgttcaggctcaagtcttccacatttggctgctcaagcaaagtttgcagccatgaacatgcagactgaagatgtcaagcctcgtcgaccagttcaagtcagacgaagtagatggattcttggtgatgtaaccgaggtgttggatcataattcgtggaggcttgggaagattacagaagttctgaagaatgactattttgtcatcaggctagtgggttgcatccaaccaagagaattccacatatcttgcttgaggattccacatgattgcaagcagttgactgttggaggcagggaccatcaagcctatgaagaggttgatcactatgctaagaggaaagcagccaatatctgtgcttccaccggtgctagagctgtcaagagaaaactagaagcaagcaggatcccacctaatggtttagtcagaagaacaggcaaggaacagaaagtatctacatatgaatttcgccagttaaccaagaacgagttgcctccgaaggtgtctgctaggaatgccatcgacggagatcattttcataggcctttaagtagcagatacaacgatctgcctgagaaacctctgcgcaccagagaagaggacgagtgctcggtggctagctgcagcgcgaattactcagagcacagtaccagtgatgatgaccatcaatcagtcggaaccggcagttgtttccctgatgatgttatgtctgcatgtgagtatgggcaggagactgaggacgcctatggctctggtttgtttcagaacgtccatgagctggagctgcgagcatatcgatcaaccgtcagagctctccatgctgcaggacctctgacgtgggagcaagagtcgctcctgacgaacctgcgcctctcgctcaacatctcgaacgaggagcacttgcttcagttgaggcatctcctagctctttgaaaattttcaaaaatcaatatgttttttgaacacctgtggattacctccaactcgcagagatctccgcaggcttgtagcgtgcgtaagcgtaacttgagggtgttgtatatagaggaagagtccagagaaattcacctgtagctgttgtacttcgccagaactttgttgctaggagtacatgagtcttgcatttttttagtgtttttacaatttcgaggaaatgtaaagcttcgaaatattagtcatgctgataatcaaggtgggatatcagttccttaaat

SEQ ID NO: 33419 - DNA, 456 bp, Zea mays
  Clone ID: UC-ZMFLMO17113B10_FLI
gggaaaaagcatgcttctctggaagatattcaaaagaatatccgggagctggagatcgatgatatccggaagaaagaattggcatgtgcccttcatgctcaattcaaagattggttatatgcctcagggaatatccgccagctatactgtttgcaaggcgaatgagcataagatggggttcttgtgtaagcgcgagatgcagcagtacgcgtctgcaagtgcaatccaattccgggcgcctccgaaatctgaaagtgacttccaagctgagttggtgtcgcctgccctgatgcacttggtatttcagctgtagcgtttgtggaggcaagtaactgtaacgtttttgtttgttccaattagtttttaccacttttcccattcagttggccgcaaggtttctgtaaatctttcggtactgttggtttcatatttagaaaattcacaaagcggccactc

SEQ ID NO: 33420 - DNA, 2441 bp, Zea mays
  Clone ID: UC-ZMFLMO17113D05_FLI
aatcaagaccagaatatgtattgcgccgagtctgataaacctgcaagagctcgcacttcaaatttgaatgaagaacttggtcaagtccatactatactgtctgacaaaacagggacattaacatgcaattcaatggagttcttgaaatgttccattgctggtgttgcttatggaagtaggcctacagaagttgaaacgtgttatggagaaatagttgaaactaatggcagttttgggcgcaaggacactactgaattcaagagatcagtcaagggatttaatttcactgatagtcatttgatgaatggaagatgggccaaagaatgttctagggatgctatagaaatgtttttccgagtcttagctgtttgccatactgcgattcctgtggcagatggaaattctgctggtatgccttatgaagctgagtctcctgatgaagcagctcttgttacagctgcaagagagtttggctttgaattttatcataggacacaaacaactatatcagtgcatgagtacgatcctgtcgttggtggaaaggttgatagaacatataaactactcaacatcttagaattcagcagtgctcgtaagcgtatgtctgttattgtgaggacagaagagggtcggctatttctgttctgcaaaggagctgacagtgtaatattcgaaaggctctccaaggataatggaacagctcatctgaccaaaacaaagtgtcacattgatgagtattctgaggcaggtctccggaccctggcacttgcatattgtgaacttactgaagaacaatatgttgtatggaatcaggattactcgtctgccaagaattctgtacatactgatcatgttgcagctgttgagaaggtgtcagaagacattgagaaggatttggttcttttgggtgctactgctgtagaggatagattgcaaaatggggtccctgagtgtatttataaacttgcacaagctggaattaagatctggattttaactggagacaagttggagacagctgtaaacataggttacgcttgtaacctactgaggaaagagatggaggaaatttttatcacactggagaactcaagtacaagtgcttcagaggggtccagtggagaaggaaacaaaattgccacatttgaggaaattgatagaaaattaaaagatgctagaggaaagatttcccaaaaaggaacttcaacttcatttgctcttatcattgacggcaatgctctgacacatgctctcacgggcagccttaagaactcatttctggatctagcagtcaactgtgcatctattttatgttgtcgggtttcaccaaaacaaaaggcactggtcaccagattggttaaaattaggacaagtaaaactactttagctattggtgatggagcaaatgatgttggtatgctacaagaggctgacattggggttggaataagtggtgctgaaggaatgcaggctgttatggcgagtgactttgcaatagcacagtttcgttttttagagcgattacttcttgtgcatggtcattggtgttatcgtcggattgcagctatgatatgctattttttcttcaagaacatcacatttggctttacgcttttctggtttgaggctcatgctatgttctcagcacaacctgcgtacaatgattggttcatatctttctataatgttgccttcacatctcttcctgtcatcgccctcggtgtttttgacaaggatgtctcttcccatgtttgtcttgaggtcccttcattacatcaagatggcgttaataatgtattcttcagttggtcccgaatactcagttggatgttaaatgggatgtgctgttcaataattatttactttggttccctcaacgctattctggttcaggctgtccgacaggatggtcgcgttgctgggtttgatatccttggggtgaccatgtacacttgtgtagtgtggactgtgaactgccagcttgctctctacatcagctacttcacctggatacaacattttgtcatctggggcagcatactgatttggtacactttccttgtcatatatggtctattttccccagcaatatcaaccactgcatatcatgtttttgtggaagcttgtgcacctagccctttgtactggctatccactctaatgattgtggtgacagccttgatcccattctttgtctacaaaatatcgagaacactctattatccacagtatcatgatcaagttcagagggctaactcaaagaattggtagtgcctgttgtataagatgctactgaatgaggggatgtacagtcagtaatttggtttaacataccacatgctttgctttgtagatcatgatgcagaggtagtgtatataaacaaagttggctgtttaacagatcttgtatttacggtctatgcccacaaagttacagtttc

SEQ ID NO: 33421 - DNA, 1246 bp, Zea mays
  Clone ID: UC-ZMFLMO17113D07_FLI
gtgcggtgcagtgcaggtgcgggatctctgaatcgctcacgcccagcttcctctgtcatctccctcctcggacctcgccacctcacgcggaaggaggggaagaggaagcgcggagactggaaatcgggccccaaatccgcttcggtctctcgatcggcgaggcatgatttatacaaccggctaggatggcctcaaaagctataaaaagaaggcctatcagcgctgagactgataaaacagggggaaaacaaatggatacagcactgtcagatcctgtaacagaacctcttctaggaaacactcctcaggaagagaaatccaagacatatgagcctattacacggtcaggtttctgggatgggacggcacaggagtgtcttcgttggacacatcttttagcagcttttgttgctcaatctgcaagaaacatagtaaatgttctttctgaatttggatattttttagcaagactctttggttgctcttctgcttccaaaagttcacaaaatggacagacacttccagttaatctcagtccattacaggaagaaaggttaagattgttgagacaaaggatagatgtgccatatgactgctcctctgtcaagcatcaggatgccctgaaagaactttggaggttggcttaccctaacagacaacttcctcctctgaagtcagatctctggaaggagatgggctggcagaactccgatccatccacagattttagagcagctgggttcatgtccttggagaatctaatatattttgccagaaattacccagattcctttcacaggctactgcataaagcagatggaaaaatgagaacaaaagctggtgttcactttgttcaactactcgatgatgacggtgtggctttcgataaccttttctgtgtagcatttcaggtgcttgattctcaatggcttgcaaggcgagcgagttatatggaattcaatgaggttctgaagtctacacggggtcagttagagcaagagcttactatcggaggtatttctcgcattcaagacatgccatcattcagaatgctgagaaggtagcgctgtttgtacttcacaggaaaagagatacattttagatttcaatatattgtttaaatttgttgtccgttcttttcactggattttgaagacgtgactttgtgtatgttattgagtatattgtttgtactgtcgcagcttaaagctacagatcataatatatgatatgatatcttgaaaag

SEQ ID NO: 33422 - DNA, 1576 bp, Zea mays
  Clone ID: UC-ZMFLMO17113D12_FLI
aaggatattatgaagaatcacctcaaatgattgttgaggctttggtgattgcggcacatttctgtcagataaaacaaatctttccaaactgatccgagcatgccagggcaaatgaagcagcactgcaggccctatgcacccttgaagtggagcaccaagttcacagaatgtttttagcgtgataatcgcgtggtgctgtgagatctcagaaccattgcccagaagcacaagaagtttattgtcaattcctgattcaatcattgtctcaacagccttcagctttccaacctttgtcagagatgcaagtgttgtaaacacaatttcatgccactgctcattttctgcagtcaagagatctgcaattcgaaccatgggaattcttgacaaaatttcatccgcaattgtggcatcaacatgctcagatatcttggtcagaacagaagagaggttggctagagttgaagtatcttcacaggcaccaagaagatcaattaatttatctatggaacctgctatttcaagagagtgagcaagatttatgtagtctgatggggaaaatataactgtaattgcggcagtgactgcaaaaataagatctagtgaccctatagaaattatctctgctattcgagggccaagtattttgctgaacccaattctatttgtctcaagttcagacagggatctgcatgccatgagagcttgagttgtgtttaccaataaaatctcgatgtccatgaattctagcagagaaaagaatgatcccatcttctgttcggctggccgtttcatacactctttgccaaaaacaaaaagccaaggagctactaatgccacattatatgaaatggaatcagataaaagagcacgagtggcatcatttgttttgttctccaggtaaagtgagaccatgtcatgcatatgatacaacggctggtcctccagtttgataataagtgatccttcgactagttttgaaaccacgagagagaacagtccgcactgctcaagcgctgaccaaatggattccagacaagcctcaggaacaggttcttcccaagagatagctgcaagagccatgaaaaaaattcttgaattttctggcattgcttctaagctgaactcaaaagatccaaatatggtcaacgtagtctccacatctttctcattgacgtatgaaactggaccaggtgcacatgtggcatatgttgagaggttggatatagctttctcccatttttccactctagtttccttcctcagagccttgcccatgacagcaactgtaaggggatggtgaccacatcgatccaacaagacttctgcgacaggctgtgaagtatagagaagttaaacattcaaaaaccatggtgtttggaatttttagttattctattttttcatgatgtatcttcttctaaaatatcttactttgcaagtttggcactactaattgaaaataaatatgtatataaaaaatactgaacatatttgtaaagctaaacacgatgctagttaagataatatgttgttaatagaataagattaatcttgaaatggagatatgtacaagtag

SEQ ID NO: 33423 - DNA, 1431 bp, Zea mays
  Clone ID: UC-ZMFLMO17113E12_FLI
gctcctcaacatctccatctcggcgcgggaccaggtggcgtcggccccgggcgtgctggacgcgctgacggccgcgctgcgctcgggcgacgccgcgcaccacgccgcggccgtggtccacagcctcctctgcggcggggagccgcaccgcgcggcggtgtgcgagcggcgcccgctcctggccgcgctggtggcgctcctccgcgcgccgccgcacaggccgggcgccacgcgcgccaccaaggacgccctcagggcgctgttcggcgccgcgctctacccgcccgcccgcgccgcgctcgtgtcgctcggcgccgtgcaggcgctcttcgcgctcgtgctcacggacgcgcgcgccggcgtcgtggaggacgccaccgccgtggtcgcgcaggtggccgggtgcgccgagagcctcgaggccttccgctgggtctccggggtgcgcatcctcctcgacctcgtcgagtctgggggcgctgccacgcccagggcgcgggagaacgccgctgccgcgctgctcaacctcgtcgtggccggcggggaggccgccgcggcagatgtggtcgcagtcggcggcgccgaggagaccgtgcggttgctcgccgaggacagcgccgccagcccccgggggaaggccaaggcggaggcgctgctgcgcgcgctcgaggacgccgccgtcaggaggcgcgagcaccgcctagctgatttcctcgacgggctcgtgcagtccgatccttacatctcgtcgccggcgtcggcgtccacgcacggctagtcaaaggctgatgattctggtttgagtttggtttgacgaccgacaacttcctcttctttcttcgttcttcttcttcttccttgtatataaaaaacaacatcttttatgtagtgtagcttggctagaaaatactaatcgtatttgttgattgatgcaaattcttcctgtgctgcgtgtcgtcaactttgtgtaaaattcgcccaaactctggctacattcaggacttcagatgagagcaaccgatcgattaaattctgcatcacatcatggccactagcatctccgttctctgactgcccatctctgcatcacaccatggccactagcaaatcacagggtaaaaagagagatagagaagagaatgtatggtcgcaattcaaattgcaaatactctatatttagtttaaggggtcgtcgagactgcttcaccccatattgttttaagctccactttatgttttttagttaaacaacattacgtaattctggtctatgaaaattacaaaaccatgagctcaagaggcgttctctataaactctaaactttttttatgaagctgctctgaaccttcttcttttttttaaatggagcagttccaaacaactcataattaattattagattgaatagcaccgagaattttgcaggtgct

SEQ ID NO: 33424 - DNA, 1446 bp, Zea mays
  Clone ID: UC-ZMFLMO17113G11_FLI
cctaagatcgggagcagtccacatacgaataggaataatgaggtgtctagtgatctccctttagtagggaagcataataaagggtgccattgcaagaagtcaggatgcctcaagaagtactgtgagtgcttccaagctaatatactatgctctgaaaactgcaagtgtatggattgcaagaattttgaaggaagtgaagagagaagaaatcttttccaaggggatcataaaaatgcaattaacattcagcaggcgacaaatgcagctgtaaatggtgctattggaaccacaggattcccttctccctccacgtcaaggaagaggaaacatattgatccttcacttgaccattcaaacaaggaacatgcagcgcacaggaattgtcacatacctcagaaaaatgcagtgcctgatggttcaattccaataagccagtctgcacatcctccaactctgggcccctttaaagttacctacaggccccttttagcagacattgtccaagcagaggacgtaaaggagctatgcaagcttttagtggtggtatcaggagaagccgccaaaacatatgctgaccggaaagcgaaggaagagagggttggcaagaaggaagatgaaagggcagaacaaaaggaagatgacagggcaggttccctagcattgacaaaccatgacagagaaggaaataatcaagatccagataaaaaagcatcaatcgatgaccattcaagcagaggaactcatacgggcaaagctaatcaagaagaatccagacctaactgcgctgatgatcagaagtccaatagacctatgtctcctggaacactagcactgatgtgtgacgaacaagcgttcgagaaaatgtgtgacgaacaagatacagtgtttacggcttctcaaaatgctgttcctcagcagacagttactgtcaaccaaaaccaatctgcactgtacgcagaacaagaaagaattgtgctgacagaattccgtgattgcctccgcaaacttgtgacatacggaagaatgaaagaggaaaggtacgccatggaaatcaaatctgaaacatctggccatcctggacaggtaaatggtgtttctcaagtaccatattcaaaagtagaggtgcctgttgtaaaaacagacccacagagttccagcagccatcctgttgctggaaaacctgttactggccttttggacaaaaactgaagcctgggcgttccaggtttgtattcggggtgttgcaatgatcaagggaatcatgttttcaccctcctaatttgttgatcagatacatgtatcagtcttgatagataatctagattttagggaattccaatttattctcattggtcagagtaagtgtgatgctggaatgtggatagttagtttagtcataaatgccaaccttgtcgtattttctacattgtagtttctcccttttct

SEQ ID NO: 33425 - DNA, 3017 bp, Zea mays
  Clone ID: UC-ZMFLMO17113H05_FLI
cccccctctctctctcgctctcggcgacgactgggcgaccgccgccgccgctgccgctgcgccgcccttgtccaggtgcccaggtcttcgccggcgccttcgccaggtcttcgaaggtaacgagcaccaaccgggtatgtgcaccccttctcctcccttcatgctgcgcgaaaccgagcgcccgaaccctaacttggatctgatccagttgcaagcgcgggcctcatgtattatgcctactatcttccaattttctgcaaaacattactgggtttacacgtgcatgcccttttctgggtccgcccgtgtctgaaccataacctaagctgtttggatctgatttagttacaagtttatacgtgtattggcaccaattcggatctccgaactcttttcgccaaaaattactgggtgaacatgtgtacactgtgcaccctatctttcagtgttcattggtttttgtgtttccttctcacttgtgttgctactatgggtactgggtatagaaggtttcgctcagtttccttcgcttccatttgaaatggtctgtttctaaaacccccgcagaatgtgtgaaaattttgagttgtaagagcaactccagtagttctctaaaagacttcctaaatcaataatttaggtagttaacatcaaaactattctccaacagttctctaaatgaactttctaaatttaacaacttgtcatctaacctcattttctctctacatttggcaaccatttaacaactccctaaacaaaaatgttgactgcattatatagtttttgtgacttattttttatgtggataaatacaaaacaaaattacaacctatatttaaagaactattggagaactcaaatttttttactctaaaagccatttagcaacttcttaaatctgtgatttagagagctaaaatttacataactattggagttgctctaattggttcgtgcgctcaaaacaaactgcaagtattagtgtctgtttgttcagagaggtatatactgtgtactagcgttgaccagtctgctagttgaatgatctatcccgttggacaccttactagtgtttagacaggcagcatatcttgtatcctataaaggaagcgagattgtgctgatcattagtaaaaatggaagcgatgtgtttatttatgttctttattttggattttgaggttggaggggacggtgtgtgtgaacgcaagcatgtgatgttatatattcttttggtggaattcctgaactgacgtttttttattactgctgtccagattcagggaatataagtaaaatgaggccagttttttgtgggaaccttgactatgatgttcgcatctcagaggttgagcgcctttttgggaagtatggaagggtggaacgagtggatctaaagacagggatatcatggagcatatgtgctcttcctggttgatggactggctctacctttactgcctctgcctgtgccccatctcatgccttgtccatctccaggagttcacaagtccaccgtggcatctgttcacatggaaacgaccacctcgtgactgatgtcttacttttacgatcaacattgcatcctcctcccccgcctcatcaccatttcctcgccaatccaaccatgccaatctcatggccggctggagagtggagagaagtggaggttgcaccaccaattctttgatgtgccacgaatgtttggattgttgtactctactactctgacatcatttagttcaacataaacaaggtctgttcctgtttattatagtgtatcggactgtagatttgtgaggtgatcttagaaaagattaaaggagagactgcatcatggtttatcttgttgccttttctgtttatgttattggaccatactgtaatttcaagtcacttattctaccttgttcaacatgaagggtttgcatttgtctacatggaagatgaacgcgatgctgaagatgctatcagtagacttgatggaattgattttggcagaaaaggaaggaggatcagggttgagtggacaaaggaggatcgcactgttggccgaaaaagcagctcaaggaggtctccaaccaatacaaaaccgaccaaaaccttgtttgtgatcaactttgacccgatcaacacaagaatccgagatctggagaggcacttcgataaatatggcagggtcgcaaatgtaagaatcaaaaagaactttgcctttatccagtttgaggtacaggaggatgctacaagagcattggagggtactaatggaagccatttcatggacagggtgatctctgttgagtatgcacttcgtgatgacgatgaaaaaggtgaaagagggaacgggtacagcccagacaggagaggtcgtgaaagatccccaggtagaaggcgttctcctagtccctacggtagaggacgggagagaggtagcccagattacgggagaagcaaggagagggggagcccagactatggcaggggaggacgcagccctgataatggcaggggagtaagcccagctggtggtggcagaggcgatcatgccaggggtggagggcgcagtcctgactatgatcgccagcgccgggaagctagtcctccaggttatgacaggtcccccagccgctcacctgggagggaggccagagagtagaagcagcgttccattccatgcctgtgttcaagcatcagatgaatgtgcaagttggtaatgttagccggcaggaaacttgtctactatgcgcgttagctcgtgtttgactttccacccatttcagtatgaagcgacctcagaatgtaactcgtgtagtagtattttttagtggtagctttcagtactggtttgaacctgttgttggctttattttctgagtaaaatgcaccactcgaactttactcattgtgtcacttgggttctgaactcagaaaaccaggtaaacggatcatgaaactttgttggcccatgtaaaaccattcaaagtcagttatataaaccggaagccacttttgtc

SEQ ID NO: 33426 - DNA, 774 bp, Zea mays
  Clone ID: UC-ZMFLMO17114F11_FLI
tctggttgccttctctgagaacggattgatgataagatggtggtccttaggtagtgcctggtgggagaggctgagcagaagccttactcctattcaatgcacaaagcttatctatgttcctccatgggaaggattttcacctaactctgctcgcttgagtataatttctagcattttagatgataaacctggaaggtcagagaaggaactaggcgaggcggataatctgaagttattgcttcataatcttgacctttcataccgtcttcactggattggtggaaagactatcaaacttacgaggcatggccaggatttgggtacatttcagttgtgatgggcttacccatgaatattgagttgctttgtagtgttgaaagacagctaattcgatggctggcaagtctaacaagaatcaccagtacattcatatgtcatgtgaggtaccttgatgtttctttgactgttaaaagcattgtctggtacagttcataaattggatccctatgtatggtaaataaaaaaactgaatgcaatttgattccatgttacaagactgctattcacatgcagcccaggtaagtttcatctgtttccatgttacagttacagaactgcattcacatgcagcgcccaggatggggctcatctgtcacacctttgagctacagagttcaggatgcttttagtttagttgtggttcgcttgatatcatcacaatcatatacatattttgtggatgattggctatacttcatactttggagtttttgc

SEQ ID NO: 33427 - DNA, 2236 bp, Zea mays
  Clone ID: UC-ZMFLMO17115A07_FLI
ctccggtcctccctccccccctcgtctgccctcgagatcccacaccgccgcgcgtgccacgttgtcttcgtcctctgcgcgccttcggtcaccccgccgcctgtactgtacatacatgcggtagtacggcgcaggaacaagaaggatttgccagcatgagcggggagctgcaggtgcatgcatctatcgttgggttcttggcttggttggggggtgaactgagtctggatgcgccgaacgggatgttgggggaggcgagagtgagagcacggtcgctcgcttgaggtgcggcgccgtctgccgtgcggtgtcgtagcggtctagtagaggaagctaggaagaggatgatgggagctctgcagctgcagagcaatggcgacggcgctgctgaggggctcttaccggacccgggctacgtcgaggttgatcctaccgggaggtatggcaggtacaacgagattctcggcaaggggtcctcaaagactgtgtaccgggccttcgacgagcaccggggcatggaggtggcgtggaaccaggtgcagctgcacgacttcctgcgcggcccggcggagctggagcgcctctacggcgagatccacctgctcaagtccctccgccaccgcgccgtcatgcggctccacgcgtcctgggccgacgccgccgcgccccgcctcgccgtcaacttcgtcaccgagctcttcacctccggcacgctgcgccagtaccgcctccggcacccgcgggccggcgccgccgcggtccggcactggtgccggcagatcctcgacggcctcgcctacctccacgcgcgcggcgtcatccaccgcgacctcaagtgcgacaacatcttcgtcaacggcagccagggccaggtcaagatcggcgacttcggcctcgccaccgtggcccgccgccgcggctcgccgcacgcggcgcgctgcgtcgtgggcacgccggagttcatggcgcccgaggtgtacgcggagggctacgacgagcgcgccgacgtctactcgttcggcatgtgcgtcctcgagatggtcacgctcgagtacccctacagcgagtgcgtgcaccccgtgcacatctacaagaaagtcacctccgggataaagccggcggctctgtacaaggtgaaagatcccgcggtgaggaggttcatcgacaggtgcctggcgccggcgtcgcggcggccgagcgcggccgagctgctcagcgacccgttcctgcagctggaagacggctgcggcctcggctacggagacgacgcggactacagcgccatgtacaactacctgcaccagcccgcgtgcctggaccaccaccaccatgccggcagcattggctccacggcgagcaacggggtggtgtccaatggcggcggcggcggcggcagatgggacgacgactccgaggacgaggacgacgatggcagcatgttccaaggcatcgaccagctgttcaacgagcacgaagacgacgagctgcacgtcgctggtgtcgacatcaccatcaagggcaagaggatggaggacggacgcatcttcctccggctgcgtatcgccgacaaagatggcacagggagggtccggaacatctacttccccttcgacgcggacgcggacacggctctgagcgtggccaccgagatggtggcggagctggacatcaccgaccacgaggtgacccacatcgccgagatgatcgacggcgaggtgggcgcgctgctgccgcactggaggccgggtcctggcatggacgacggcggcggcggcggcggcggcgccggtccggacacgtcgggcgctaccgaccgctgcaagaactgccggtccagcgcgtcctccgccgggtcgctggacgactacatgtcggcggcgcggcgcggctgccggtgcgcggagctgcacggccggttcgaggagatcacgttccaggccgacgaagagcaggtgcggttccagggctctgggtgcagctccgacgacggaggcgggcaggctgagcagtgcgccggggacggaggcagtaaggcttgaggacatccatggcaatggcactactgtaactggacgttcagaccagccttgacctggttcctcgcaggagcaactcctgtgttaaaaatctgaaaatgccatcagtgcagccgcacagctgcttgtaagtgaacttttttgtagctctggttgagcatacgatcgttaagacggccagacgggtatagtttgaagtt

SEQ ID NO: 33428 - DNA, 1053 bp, Zea mays
  Clone ID: UC-ZMFLMO17115E07_FLI
acgccacgcccgagagcgcccgcgaaaatgacgccgccggcgagcacatcaggcaaacgcgccgtcgcgatagacgagccgctgctgccggagtcctcggcgggtgggcggcacggcggcggggcgtcggtctcgggcgccgtgttcaacgtgtcgacgagcatcgtcggcgccggcatcatgtcgatcccggcagcgatgcgggtgctcggggtggtccccgcggcgctcctcatcgccgccgtcgccgcgctcgccgacgtctccgtggagttcatgctgcggtacacggggcgggggtggggcggcggcggcaaggacgaggcggccacgtcgtacgcggggaccatgggcgacgccttcggccgcgccggcgccgcattgctcaacgtcttcgtcgccctcaccaccacgggcacgctcgtcgtctacctcatcatcatcggggacgtgatgtctgggagcgtcggcggaggcgacgagcacgccggggtgctgcaggagctgttcggcgcgcggtggtggacggggagggagttcgtgctgctcgtcaccgccgtcttcgttctgctgccgctcgtgctccgccgccgtgtcgggaggaaagcgaagtgatggacggagtccttaggaacttcggcccatcaactctcaatgtggcttacttccaagagctcatggtagtgctctgttcacaaggggagaaacacaggtaagcatggcttctgtttatggaggttgtttagcacttcaagatggtggggttcctataaagtttcctgttgctggaattgaaatgggcctggtccttgatacacaagaatttggtggagatggtagcccacttatactctctgatattactggagctgaagatggttctggtgacatggatttgaaggtgtgacatgtattttgttctgaatttggtacttggaactgcattagcatggtcagtatatgttgttctgttcaaagctcagttttcttatctgtaagcccttgttgcagattgctggtaatgaaagtggcatatctgcatttcagatggac

SEQ ID NO: 33429 - DNA, 1711 bp, Zea mays
  Clone ID: UC-ZMFLMO17115F03_FLI
gtaaaaccaaaagcaagcactgcatcaggtccatctctagatgggagcacaaaagctttgggttggcaactgctgggctcatctttagaggggagtgcaaaagcttcaggctggaaaccgccagctttatcgattgaagggattgctaatgcctcaggttcgcaagcattgtatcctacgcaagggagcacaaaatcttcaggttgtcagcgatcaagttcatccccagatgggaatagaaaagccccaggttggcaacagtcaagtacatcaccggtggggagtggaaaagctcatggctggcaacgatcaggttcttttacccagggtggtacaaaagctgcaggttggcaaccctctggttcttctacagatcggagtgcaaaagttgatggctggcaacgaacaagttcatctccggagggaaacagaaaagcttcaggctggcattcatcaggtcgtgagagctcaaagatcacatatggtgccagtgaaaaccgtaaatcattttctagccaccaagcgacgacaccaacagggagacactctttggcaaggaggcagggaagcagcgacaagggtgctgctggttgggaagagactctaggaaacacttgggaagcatcaaagagacaacagagaaacagcgacaagaatgcaggctgcggagaggctctcggaagcaacaggacctggcacccatcgtctggtaaccccagtcggagcagccaggggaatcatcaacatgacaggcattctcacggcagtgattcgcggcggggtagctcaaactaccctcggaggtccgaccatcgtcatgaccatggtagtggtggttcgtcaagaccctcgtcaagagggcagccccagaggggagtttgtaaatactacgagaatggccactgctggaagggctccaaatgccagtacctgcaccggtgactgccgtggccgtgggaagcggaacgccctattgcctggtcgccctcacatttttgtatagcagcatatggtctcatcgtagtcagtgaaaggaggaaccgtatcggcgggaccactagttcgtagtagtacatatccttaagagcaggagcatgactaaagattctccgctttggtgcaggaatgcgccccttttgttcagttaaacggagctgtgggcatttgcaaacatggattttctccgtaagccagggtgttgtgcaatcgtacggaatgactactgaagagctgcacgttccattgagaatgacactacggaagaggcgcatgcaaattgtccgaatgcctacagaagagcggctatcggctggcggtagacatgtgaatggagtgctgtccccaaagtgacgcggctaatgggacgaaacctacctcaaacccatccaaacccattgcaaataacttatttttttaacccgacctaatctaataatttaactgaataacccacccggacctatagccagtgggttaaacccattatctaaatccatagaagattcatgtttattaaggccttgttcggttagctctcaatccatgtagattgagtaagattaggtgggtttaaatcccaattaagtcaaagttcttctaaattttttccaatctcattcaatccatgtataatgggaataaccgaacaagccctaaagtggattcgctaccatattctgactttaatttttttacaaaattaattgatttc

SEQ ID NO: 33430 - DNA, 1620 bp, Zea mays
  Clone ID: UC-ZMFLMO17115F08_FLI
atgaaggttgcggacttgcggttcaaattcgctaggctacccacagtttgttgttctggctcagatcaattatctgcttgttctgtggcggacctagaaatcttagagagcttgggcaattatagtactcatactataaacatatagcttcgcctaatttttaaccatgtttaaacacgtttacaagttcattagcactaatggaggagtctgggcaagagcccaggctcgcctgcacttggcagcgtaacatgaatacatgatcatgtagagttcttacaaactctagcaactagtaaattccttcctctgtatttggtactctttagttgctaaattttctggacgcacacgcaacctgtaactctccaatcttaggctgtacctacatccagggaatgtgtggtctgtttctgtgcatgtcttaccattagcttgttcttattcaccacttgcctgtctcatgtagatattttggtttctttatacagatgtacatgtacccattcatcttagaatctgcaggtttgccggactgctcgtagtaatctgtaggctggattgatggaacttgatgaaggttgcgtttcaaatttgctaggccacccacaatttgtagtttgttgttctgactcagatcaattctctgcttgaagcagtggcgggcccagaaatcttgggcaaatatagtactcacactataagtttatatagctttgcccaagcttgcctgcgcttgggtccactcttggcttgtagcagtgtaacatgaatacatgatcatgtagagtttatacaaactctagcaactagtaaattccttcctctgtatttggtacacttaattgctaaattttctggacgcacacacaacctgtaactctccagtgtccatttatttatcttcaatcttagtaggtttaggctgtacctacatccagggaatgggtggtctgtttctgtgcatgtcttaccattagcttgttcttattcaccacttgcctgtctcatgtagatcttttggtttctttatacagatgtacatatacccttttatcttagaatgacagaattctcattatacatttgtacatatgttttatatcgcagaaaggaggcaagctgaggctaaccgcatcagggagaaataccctgacagaatccctgtcattgttgagaaggccgagaggagtgacatcccagacattgacaagaaaaagtcagccatttcacgagtaccttgttcctgccgacctcacagtcggacagtttgtgtatgtggtacggaagcggatcaagctcagcgctgagaaggcaatcttcatcttcgtaaagaacaccctcccaccaacagctgctctgatgtccgccatctacgaggagaacaaggacgaggacggcttcctctacatgacgtacagcggcgagaacaccttcgggctgttctgagtgggagccgctatggatccacattgggcaatgcctcctgtaaatactaaacatgcatcacaagaatctgtgtccatagcataatctggtctgtctgtcattacgcaacttgacgtgcaatgctaaacacatttaagtaataatatatactactctgctttgggatgcttc

SEQ ID NO: 33431 - DNA, 1471 bp, Zea mays
  Clone ID: UC-ZMFLMO17116D09_FLI
tcgtgttccagtgcgtagaaccattccgccgccacaggtatagaatgcatttgatcatcctagatcatgatcgcccacgctagaatgattaaaaaatggattagaaaaatcacagataacctaacgattgttaagttattatagagtgggtgacgaatattattgctctacacacaagatgtgaatccaagatccatgtgcaacttatatgttttcttataaaaatattaaaattgtttttaattaatactctatccattcttttttatttggcgacgaacggtccaaattagtcaaataaaaatttggaggtagtgtattattaatataccaggatttattcggtaccataaagttactaaattttggtatagattcaactaaacttaaatttatttgacgaaaaacaagaattgcacttttgtttggtatagatttgactaaactctttgattctggcccgctgccgccgtctccccatcacactaccattgccatctcgccctgaggttgcgaccccctcggccgcgaccccgcctcagtgcctcaccccgggccgcatctcctgcgctcgcgctacgaggacgggcgagccgcccgtgccgcaggctatacacccaagagcaaatgaagaacaagtgggttgtatcataccaagtggaagaataaggccaagaatagcattgatacctacaaaattagcatcgtcaaggtgctgaatcaggttttgggcattgtcatctcatctcctcaacaccatgtccatcatgaagctgtcacaggaggccgcctgctacaagaatcccaccacttcctgcgcttcgctctccccagggaccacctagacttaatggtttcaggaggagagtggagatcatcccgatgatgatgcgaggtggaaggctcacgggtttgacctctcaggttctgaggtgcttcagcacggagatatttgtcagcagattatcattctatacgacagaggaagaattcaaagatattttttcaccatttggcaccgtagaggaagctcgacttatgagagaccaccaaactggaaggatgaagggatttggttttgtcaaatattcatcgcaagcagaggcagagaaagctgtcaaggcaatggatggcaggattctacgtggaagattgatctttgtggagatggcaaaaggacacgaaagcaagtaggacaccctccccacgagaggatttcactgaacatgaaacatgagagcgccatcagcttatgccagatggcaaatatcccaaattctcaattgatgttgcaacttatatacaaagcacaagttaattttagctagcttatctttgataacactgctaccttgccatctgaaaggttgccgtgtattggtatccgttgacctgtgtaagaaatgttggcagctctgtgccctacgaactagcctggttgattaaccaagatctgttcaaaattaaagcc

SEQ ID NO: 33432 - DNA, 1582 bp, Zea mays
  Clone ID: UC-ZMFLMO17116E07_FLI
ttttcaacactgtgtcatgaagcattaatgcatgctaggacaatggggtacaaagttgtcttcacagatcactcactttatggttttgctgatgctggaagcattcacatgaataaggtgctgcagtttactcttgcagatattgatcaggcaatatgtgtctcacatacaagcaaagagaacactgtcttgaggtctgggatatctccagagaaggttttcatggttcctaatgcagttgacactgcaatgtttactccctctcccaagcgcttaaactgtgatgaaatagttattgttgtggtcagtagattagtataccgaaaaggcgccgaccttcttgttgaagtcattccagaagtgtgtcggctatttccaaaggttcgctttattgttggtggtgatggtccaaaacgtgtgcgccttgaagaaatgagggagaagttctcccttcaggatagagttgagatgttaggagctgtacctcatgctcaggtgcgatcggttctgatatctggacatatatttttgaacagttcactcacagaggcattttgcatagccattctagaagcagctagctgtggactgttgacagtgagcactagagtcggtggtgtccctgaggttcttccagatgacatgatagtacttgcagaaccagctcctggagatatggtaagagctgtcaagaaagccatcgacatgctacctggaatagacccccagattatgcatcttcggatgaaagaactttatagttgggacgatgttgccaaaagaactgagattgtttatgatcgtgcaatggaatctccaacaacaaatttactagatcgccttcctcggtatcttacttgtggatcttgggctggaaaactgttttgcctagttatgatcatcaattacctactatggcgccttttagaatttctacagcctgctgtaggtattgaagaagtcccagatatagggccactacatgctcatttaggttcaaggaatgatgaggctcaagagaagtgaaacttaaatctttgacagttttgaaatggttggggacttgaggtggcagtcatggtatcttctgcttgtcagcattcgttctgatccacatgcagtatatgcctttatgatatggcccccgcacagcattttctcttgaagcttcccgtctccgtagtcgcagctgaaagagagtggaacgccttgatttgtaggatttcttgtcatgctggttaaagctatggtccgagtctctgtcattgccagcttcttttttttttcttcctctgcgtaatgcgtagtgagtggatggcctgcgttttaggcacgtcatcaaaccaattatctgctggaacgttggtactctcttgccaccatattgcaactagaagtcttgattggcatgttgccacacaaattcctactatgtttgatgtcttgtatcatgtcggagcaccaattcctgctgtgtttgtgatgtaataatgccaattccaaccagcgacgtgagaccaatctgcatggatccagtcgataatactttttgaatataaaataagtgcaatctcttttcggc

SEQ ID NO: 33433 - DNA, 1416 bp, Zea mays
  Clone ID: UC-ZMFLMO17116F06_FLI
agagagagaatatcagaggtatagtgaaaaggagaaagaaagagatagagatcataaccgcagaagggagatcctgaagcaggaagatgagagcgatgacgaggataataggaaaaggaaacgaaggagtattagctcacttgaagataggaagaggaggaggcaacgtgaaaaggaggaagatttggcagataaaataagggaggaggaggaaattgcagaagcaaggaggctggctgtagagttgcaacggcaagcagatgaagcagctgcggcggcggctgcagccgccgaagagtctgcatcacttatggagattgatggtgatgacgaaaaggaaacagatgcacaaaacaagtcggctgttgtggaagctgataacatctcgagctttgctaatggtgttggtgctggtcgacttagtaagggaaataatggtgaggaaacatgtatgacacctggtcaaaccgcagatactaagcaaaacaacaatgttccagcaaagaaactgggttttggtttgattggcttgggcaaaaggacatctgttccatcagtttttgctgtagaggatgacgaaaataatgttgataaaagcataagacctctagtacctatcgattactccactgaagaattacaagctgtacatgctaattcttctactggggcaaatgtcacagcagctgccgagtttgccaagcgcatctcagtttctaattcaaaggaagagaaggctgaagctgagaaggataggaataggagatccagtgaagctcgtcctaatgatgagcgaagagagaagctacatgatcgcgagaaggataagcccaagtcagagaacaagaagattctggatgcaaagcaactaattgatatgatcccaaggacaaaggaagagctttttgcctatgatataaactgggcgatatatgacaagcatgagttgcaagagagaatgaggccttggatttcaaaaaagataattgaatttcttggcgaggaggaatcaactttggtggactatattgtttcctgcaccaaagaccatgttcaggctgaaaagatgctagatcttctacagtcgattttcgatgttgaggccgagatgtttgtcctcaagatgtggaggatgcttatatttgagatcaagaaagtcgaatctggactatcaggaagagcaaagtcatgaagcgaagcctgttaccctgtatgacctctgatctgcattactcatcaactgtgaccacacttgtaaggtcatactgcactacaagtatcaaaaaccatttttagtgacagagttgatggatctttttacttgtttcttgtacaaatgcatacgagagttaatgagatactgtgcgtaatatttttattttgatagattgcataactgtgtttggcacagttcac

SEQ ID NO: 33434 - DNA, 2372 bp, Zea mays
  Clone ID: UC-ZMFLMO17116G09_FLI
cttttctccgagcgttcattcaggaagctgcccggcgacgcgccgctcccccgcctcttccttgccgccgccgccgccgccgccgcagacgcgcggcacggggcggtgcccgtgcaaggcgatcggggccgtaacgctcgactgcccctccacctcctcatcctcaccccagcggtgagtagaacaaggggcggtggtcttcactgacatcgcccaccatgctgcgccggtgcatgcgggatctgcgctcgccgcggtctctcgcgagggtctccagaccgatctccgtcgagagtccaacattccttaaatccagaagcaactctacaaaggcatctccaaagagttcacagaatgctgccccaggtcctcaaggacaaccttctcagtcgggaagtaatgtttcaaagattgttcttggaactcttgtggttggtgcagcagctatgggtgcacatcaacttggttatatagatcttcaatttagggacaagaaatttccttttagcttaaagaaggaagatgtcgtaaaggtgtatgaagatctgaagattccttctgagcagaaggttgaccagacacaaaacgtgtcaggacagaacgccgagattgttcaagagaacaataatgaggctcatactccaaagggcgttctaaatgacgggatgggggcactagaggttccaatcaatgaggatcagcttgttcctgcagaagaaaagaaatcacaaaccctagcccatgagacacatccagttccagatgaacatggatctgatactaaaatgccatctgaagattctctagctgttgagatagagacagttcccatcgatgctaatgaatctagcgaagttcctcatgaacagcaaactgataggatagacagcacaattcctcctacacagtcaaccccaacaacagttagtacttatgatcaccccacagatccagatgcaccaaaggatctctcaggagctggtgctgttgagcagaaatctcttgctgagacatattttctgcaagatgaacctgatgtttcgaaagatgcaaccattaaggaaaaaagaagtgatgaagttattcgtgaaaaaacttctaaagatggtaagattgtacttgatatcattgaggctattcatgccgccgaaaagaagcaggcagatgtagatgcatacatgtattcagaagagagaagaaagttgaaggagaagtatgaaaaggagctgaaagacaccagggccagggaactgatgtatgcagaggaggcagcaattctggataaggagctaaagaaagagaaactgaagaatgctgctgcattaaaggaactgcaagaaaaagctgaacaaaaattgcaggatgagctgcagaggaaggatgaagaaacaagccaacaaattgagaaggcccaagagatagctaaagctgaacttgctgcagctgttgcaaaagagaaagcatcccagattgaacagattgctgaagcaaaccttaatattgatgcgctgtgtatggcattctatgcacgatctgaagaaactaggcagagtcattcagttcataagcttgctctgggcactcttgctttggaacacgctttatccagtggatcaccaatccgatcagaagtggagctattgcgtaaatctgttgaaggcatcgacaaagattcactgttagaactggctctttcatcactcccagaagatgttttagattatggatcagataccatgatggggttgaagcaaaagtttaactccttgaaggaaactatcagacacttcagccttctaccagcaggcggtggtggaatcctggcacatactgttgctcgagttgcttcttcaatcaagattaaaggcgataactctggagatggcattgagtctcttatcaacaaagtagaaaggttgattgtggatggagacttgattacagcggccgatgccttggagcaagggttacatggaactgaagcagaggagatagctaccgagtgggtgaagcaagccaggaaacgagcgatcgccgaacagacccttgctctccttcaggcgtgtgcttcttcgaccacgttctcatgattttggccagactttttttttttcttccttttgtttgcttggatttgccggtttcagtactctgtgaaaaagcttgtttttcccagaccatgttgaaaatgcgtggatggtgaacgagaaaaatcagatacaatactatagcagccagccagccactgggtctcaaagtgggggccctgcctaagtttttcatcgtgtaaacaaagctaataagttttgccctgtagctacttgctgttcgtgacattttagtgtccagttaaagcaatgtttttttaatgc

SEQ ID NO: 33435 - DNA, 1899 bp, Zea mays
  Clone ID: UC-ZMFLMO17116H06_FLI
cacgatgtccggtatctgcatgctgtgtaccaagcaatgttcctactccatgagatctgcaagaggttcgatgcggttgatgctcaattcgaccagcacttcgccaggctgccgcagccgcaagctgaggaggtggacgaaccatactgtgacgcggtgaggccattgcctcctcttccccttgtcgaggaaccgtaccgcgacgtggtgagcccagtgctgcatcctcccgtcgtctacgagccacaccgcgactggcgcgagcagccacgcgggaacgaggccctcgacgtcgtctgtgagctgtaccgcgaccggcacgagcagacgcacgggtacgaggcccccgatgcgccgtcgttctcgttaggcagcgatgacgacatcgacgtcatggaggagctccacatcccgatgagaggaggccgcccgaagaagcaagtgcatgagtccgcggccaccgttctccctgggcttcaacgacgaagacagcgatggtgacatactcactgccgaccaacactacgagcaagttctgtcctaggtggcgtccggagccccttctccgcgtcatgtgcgtcgagcaggtggaggacatgcgcgacccggaggacgaggtctaggcatcgtcggcctcgtcgacatggcaggggtcagcaagactgcgctgctcaagaagttcaacaatgacctcctcattaactctcatgacatcaacgtcaccatcgagggcgacaggctcggtgtgtcatgggaaaagtggacgccaaaggagcacgtcggtgtgatgaacttcgtgttgttgctagacgacgtttgggaaccactgctagatgattaccggcctccaggaatgcaatctctgaagttcaggaaatttcctctaggaaatatgtcaccaaagatagaagagacaaaaattcagtacactctgaaggtcattagaggaagcccaactgcagttcaagaactttttgtccaacttggtgtcaatgtggatacgagtgactgggagcttaaacctttgggatgtctttcggttactgtggcaacacaagacaagtttgaccacttcccagtcacagtcgctgattggggtgttcaagcgatagtaagcaggctgctttctggttacttccatgatgaggacatatcgattattgccgaagaagatgatgggacactagctagtagcgatggtgcaactttgcttcaatatgttgttgaggctgtcaacggctgcctggttgacgctccaaactatgggcggagattccctgagaaaaagctcggtgctcatgatgttattccagccatacggaaatgcatctctactggaggcctgaaaggaagattttaggtgcttgatcctgtcattgacacccttgggttcgtgataggggaccaatatgctattgctctagccttgattgaagatagagaagttatgcttggtgttcttgagtgcccaaattatccaatgaaggagtggctcaattatcatcaacaatactacatgttaatgtctaaggtcgctcctcctctatcgagaacctggcataaaggttgtgtgatgtatgaacagaaaggaggtgaccaagcttggatgcagcccctggttcatgacttagcaggacttgctcatagtgtaggattcaagcaacagtggcctccacctaaggagtttgagtgcttggactgtacatggcctccgacaacttggcgattatggtcagcggcttgagggcaagccgcatttcaagcggtggggaatgttaggagtggctgccatgtggggccattggcaggggacaagtgggtttctgcagctataaaaggacaattgtataggctaagaggatatcaattaccaattatcagaatacaaacactattatc

SEQ ID NO: 33436 - DNA, 1272 bp, Zea mays
  Clone ID: UC-ZMFLMO17117A01_FLI
gatatttgggaactttggtgaagtggtgaatgtggagctatcaatggaccgaatggttaaccttcctcgtggctatggatatattgaattcaagaagagagctgatgctgagaaggctctactttacatggatggtggtcaaattgatggaaatgttgttaagttgaggttcactcttcaaccacgccaaagggctgtatcacctatgaaagctccaccccctcctccaaaacgagatgttgctcagattgaaaaaggtcttagcagtgctgaaaaggatgcccagcagcgtcctagggaatcatctccacgaaggaagccagcttcaccaccgcggaaacgatctccaaatcgaagggctgaatcgcccaggcgtccacctgacccatcacctaggcgtcgtcctgattctccgcctattcgtcgccgaccagatccttctcctgtcaggcgtggtggcacacctcctcgcaggagaccactgtctccagttagaaggcgttctccttcaccacctaggaggcataggtcaccgatgcgtccttcacctaggaggggacgtggcagtccttcaccacgcaggcgctcccctgggcctcttaggcggcgctcgccacctccaaggcgtttgaggagcccaccaagaaggccaccacctccacgtcgctatagtcgatctcctcctcgccgaccccttcgctccagatcgatttctccaagaaggggacgagggcctctcttgaggcgtggtaggtcaggctcatcatattctcgatcacctactccaccgccaagaaaggggccaagaagggtatcaaggagtcgcagccctagaaggcctcccagaggaagaagcatctctagtgacagccgaagcagcagttctccttcccctagacgtggcaggtagaaggaacccgttgcattgtgtatccggcaggtaaagccttttatcccctgactcagatcaagtgttggtttgaggagaagataaaagaaccctacggcaatgcttccagtggatctgcttaacatgcctggtgggctcactggcttgtgatttgtacccgagacagaattatctgccatgtgacatctggctcatgtacttgattgtaccccaagtatgttgaacttgtttccgcacaggagtctggatcttttttttttgcattaaaccattgtgctacttggtctaaagcgttactgggtctttcgtttcaggagtctggatcttttttttttgcattaaatcattgtgctacttggtct

SEQ ID NO: 33437 - DNA, 1759 bp, Zea mays
  Clone ID: UC-ZMFLMO17117E02_FLI
gcgatcgcccacgcttccgtccatccagactccagagagataaaatctaattcctggacctggagtgcagaccgatcgccgccgccgccgcgttgtttcttgtgtgcgcagctgtggtgatggtgcggtaaaagaaggctgctccatcgctccaacaaaaaaaaggtcgagatcgcacgcggcaggcgacaagcagtttccaaagagaagggaagcctagaggaagggagctagagatgggggagggcagagcaggagacggcctcatcaagctgttcgggaagaccatccccgtgccggagacggccgccgtcggcgaggctgccaaggacatccaacaaagcggcggcagcggcagcggcacgactgatccgaaagggcaagagaacaacgttcaggactccacaggctcgcctccgcagcaggaggtcgcggacaccgaagactcgtcggcagacaaacagcagggcgaggcgggcaacccaaaggagaagctcaagaagcccgacaagatcctgccgtgcccgcggtgcaacagcatggacaccaagttctgctactacaacaactacaacatcaaccagccgcggcacttctgcaagaactgccagaggtactggactgccggcggtgccatgcgcaacgtgcccgtgggcgcaggccggcgcaagagcaagagcgcgtcggccacttcccacttcctccagagggtcagggccggtctgcccgtcgacccgctcgtctgcgcggcagccaagactaacggcacggtgctcagcttcggctctgccatgtccagcttagacctcacggagcagatgaaacagctcaaggagaagctcgtcccgatagcgggggacgagcgctcagttgggtctcgcactcaaggaccttctgccaaggcagaagacccggaccggaaggagaatgttacagcagataaatccgcgagagttgttcagcatccatgcatgacgaacggggtggccatgtggccatttagctgtgcgccaccagtaccggcctctgcctgttacggcccaggcagcatcgcaatcccgttctacccggcagctgctgctgctgctgcctactggggttgcatggttccaggagcttggagtggcgcatggccgcctcactccggccagtccgagacgggctcgtccatcacctccgcctctccagcagcatccaccaagtccaacatctgcttcacgccaggaaagcaccctagagaccgcgacgaggaaggaggcgccaaaggaaatggcaaggtgtgggtgcccaagacgatccggatcgacgacgtggacgaggtggccaggagctctatcctgtcgctaatcgggatcggcggcgacaaggcaggcaaagatggcggcagaggctgcaagctcgcaagggtttttgagcagaacgaagaggcggcaaggacggcaactcctcactcggcagccatcaacggcttgccgttcttgcaggggaacccagctgcgctctcgcggtcactgaccttccaggaggggtcttgagcctcgctcgattcacagctgagaattttgtacattagagggttgtatgtaatctaatctaggtggggaggtggggctcatagctgccagcggacattgaaactatacaatagatagatatttgtagatagccaatatatatgggtcgggggaggaaaaaaaggataatgagagcaagtccccttatttgtatatattataatggattggaatatttggttgcc

SEQ ID NO: 33438 - DNA, 1291 bp, Zea mays
  Clone ID: UC-ZMFLMO17117E09_FLI
gatgagtcacctcgctcttagggctgatgagcggtcgtttgaggactggtggaggaaggccagcaacagtacaaggataagagaaaagggatcaactgtgtcattattttgggggcttggtgcctctggctgcatagaaatagagcgttttttatgggaatcatccattcagagggtgcagcaacatttcagtgacgagttctcctgttggctcttggtgcgcgccaggagtttgggtcagcttggtctccctagttccatgaggttggctcgggtgggtgagtggtgcgactcgtcctctcatgaggctcgtcaccttgagcaacatgccgatcctgcagcagctgcacctggaggaggagctcctgcgccgcacatcggacaactggtgtgtcatcaacgatggcatggcccctgctaccattctcacgggactgcattagagtctcggagcttgtcgacatacagccggtcctctgggaccaagtgccgattgtgaggaggttcagtggaggtggcacgtcattgttgattggggaacggtggttgtgactttcatttgcaacaagaatgccgttgccgggctgcagatttatggcaaaaattttgacagattggtgaatttcatctgcgtgagaatgactatgcatttagtcactcgaaagtttggcggaaatgctcaatcaataacaaaaaatcgttggcttcatcacatgtcgttcttgtgggattatgatgtaaaaaatatggattatctcaaaatcccaaagcgtgcacctgaatatcgactggcaagaaaccacacagatttcttgtgccgcatgaaggagtacataccttcgcggccagttttcaccgatggggtcactgcggccctgggagaacacttctcagttcagcccgtggatctacaagcagctctttccggtgatgaaggattcgtgccttctacaaagctgctgtcacaacaagacctagaaaaaaaattgtttcgtccaaagaaccccttaaaaatatagaaagttgaagcgtgaccatgcttgtcgtttttgttgtgaaatgtgagcagttttgtcgagctgtgaattcattcaaacattatggtcaacccagtacgtacatatgaatgcccaccaccatatttagtaacaaatggttatgttttggattgtaagtctaccgttccaagcttgggttacacgttatttacctatgggctctagaccaagtgctaaaactatgagactggctaaagggttatggactctaaattatagagaagattctcgtc

SEQ ID NO: 33439 - DNA, 406 bp, Zea mays
  Clone ID: UC-ZMFLMO17117F04_FLI
ggagggagaaggcagctcatcggcagcagtgtggagcgtcgagaacgatgacagcgaagacatggcacccagggaggagatcgtccttgaccagctgacattcgttaagtttgtgaattttagtgggacatggtgccagctgcagttgctcagcttcttcctggataagtcccctgtcctccagcagctggtgctggtcacgccggaaggggaggaagctctgggagacgaccgactaaaggtcatctatgagcgggtggccgcattggagaaggcgtcgagcgaggcaagcattaccatgtgccggcccaaggaagacgataccccgaaccatccacacacgaggtacttccacgaggagtatgaaactatgtaactatgctatataagcatgcatcgatcaggc

SEQ ID NO: 33440 - DNA, 1204 bp, Zea mays
  Clone ID: UC-ZMFLMO17117G09_FLI
ggaaaatatatgagatacaacatatggctagaaaccattttagtctcataggagaatacgggatttaaaaaaaccaacatttcatacggggcctaaatgaagtaatggtatttcggcccataaatcccaagaacgctgggcgaaagaaaaatgaagcaggtcgaggtccagggtggaggtgcagcaggcctaaatctgatggacacaggccggttcagaaaagagaggagtcctgttgggactctgggagggcctagctagtcgctggtcgacgggccgagccttttgtcccaccctacggaaaacagccacgtctggacaggcgtagcgtaggtgcctgctgccatcaaccactaccgcgtccaggtccattccaaaagacagcctgtcgtcgagttcatcggagacaggcaggcctaaaaggctagtaagggcctgggactaaccagaccaggtcgtccaacacgctaggcagcccatcaagttggttctcctccacgccgacgccgctatgattttttcccttgcaaaacccatgctcgctaatgatggaaccgagaaaagaaccacagcgttctgactgagacacctgggcaatgagttgagatgattttttccagacagaaacctgctgcgcccacttgaactcgtaggatggtggctacggtctctacctgtcaacctcgacccaatcgggttccttaacgtacaccaccttctcccgggctgttgtaaactgtactaactactaatataggcaggctgtagccatgaatgacaaggatagctgcctggagtacgtcctccaccagattagagactactcctgcagtcctgctataggtcagtgcagctagcggacaacgcaattaattgcgacaacgagaacgtaacaccaaccgataatattgcatggccgcccccggacccccttttcgtcgtatgggagcaacttttttttttctgttgttgttgtcgtgcaacgcactgtggctccggctgtacgtgacagggatgttgttttttttttttttgtgtgtgtgtgtggatggatggagggggcgtgggtgctgctgcaatcacgcaatggtgtgtcccatgcatacacgaccgggacgggacagacaaactttcaccagctaccaagcgcgttttcagatggcggtctccattttcaagcgggagcagcactgatcaacacagc

SEQ ID NO: 33441 - DNA, 2191 bp, Zea mays
  Clone ID: UC-ZMFLMO17117H12_FLI
gacgtccagaccattctcctctccgaattcaataattcctccgccgcaccacgcttcctcctcctctgctccgcctcttcatccagcgagcgtcctccgattgctgacggatccctcctcgccgccgccgcgggccgaccgtggggagaggaggggaggcgggagtgatggaggccgccgaccacgggaagctctttgtcggcggcatctcgtgggagacgagcgaggaccgcctccgcgagtacttcggccgcttcggcgaggtcaccgaggccgtcatcatgcgggaccgcagcacggggcgtgcccgcgggttcggcttcgtggtcttcgccgatgccgctgtcgccgagcgcgtcactacggaaaaacatatgatcgacggacgaatggtggaagcaaagaaggctgttcccagggacgaccacagtattgtgaccaagagcaacgccagcagcatagggtcacctggaccgggacgcaccaggaagatctttgttggaggcctgccctcgaacgtcacggaggctgacttcagaaggtactttgagcagtttggcgtcatcaccgatgtggttgtgatgtacgaccacaacacgcagaggccgaggggctttggattcatcaccttcgattcagaagacgccgtggacaaagccctgcacaagagcttccatgagctcaatggtaaaatggttgaggtcaagagggctgttccaaaggagcagtcgcctggacctgccgcacgctcacctgtgggagtggggcagaactatgctatgaacagggttcatagcttcctcaatggcttcaaccagggttacaatccgaaccccataggaggttacggcatcagggtggatggaaggtatggcttgatttcaggtgcacgaaatgggttctcttcttttggaccagggtatgggatgggcatgaatgttgaaggtgggttgggcggaacatttggtgcaagctctggtttcatcagcaactccaacgggaggcaaatgggttcgtacttcaatgcaagttcgaacagattgggtagccctattgggtaccttggccttaatgatgttccgggatcaatgttgagttccatgtctaggaatgtttggggtaatgggagtctaaactacccgagcaatcctacaaatatgagtgcttttgcttcacctaggaatgggggccaagtcagtcttcccagtgacaattggggaggtcttccttctgctcatgggatggacaacatttcaagccttgggtcagggaaccttggtcgtggaactggagataataactttggtttgccttctggtagctatggcaggaacaactcaactggtacaattggtgagcctttttctgcagcaggcaatacatatgaagtaaacaatcgagatacatatgggagcagctctatttatggtggcacagcctggaggttcgcatcatctgaggttgacatgccttcttttgttcatgatattggaaatgttgatccgactattaaatgatacatgtcagcaagtcacatgggcaactaccctgttaacaacaatcagccaagcagaggcatcagttcctagggggcggcgagtattacacttgggggtagtagaaggaagaaacacccattcagccaggcaatcccggcgcacacggctgtgaatcggtcggtgatttgtcaggttaatacacaggttagtttttgtgtagctaacccagcggcgtggtttgcgaacaccgacatgctagaggtggaagctgctaggctagctagaggaaaggagcgcggatggatatacagaaacatttcgtgaaggttttgttttgtttcttgttttttgttttgtttttggcggggggtggtggtcatgttctagttttggttcgtacgcgcgtggtgaggccttttggagttttgaatgagatgtagtagtaattgttgcggcacatattttagaagtgaagccatgttccaacagaagctggaaagagatgtctgctgtatacgggtgagcatgtataccaaccaaagggatgctgtattatacattagcctgtgtgtgtgtgtgcgtgtttttttttggtttgatccggtttttagccatttgtcttttttttcactctggagattttgctgacttgctctgaattattatgcatgcagtggtgtttattttgttct

SEQ ID NO: 33442 - DNA, 645 bp, Zea mays
  Clone ID: UC-ZMFLMO17118A01_FLI
agccttgtaatagcattcttatcaatcacaagactacatacgtagctgcatggttaattccatctcctaccctacccatcgtcatcacaaggtgagcagagccactctacgtcacgggggccggtcaaccaacaaggcaacggccgcagcactttcctagcgttccggcacttgtcccacgccgtcctctttcccgcgctccggcgcacgcgccgcggcgacgacagctgcgacagcggcgtcatagctgtcgccagacgccgccgcgaactccgccaaggcgccggtgaccgctgccatgccagcacacagcacgcgcccagccatgccctccatcccggcagccgcgcccgagcacaccgacccgacgccggcgacgaagaagtccagaccgtccatcacccgcgcctcagtggccgcgtcgaccgcgcgcccccactccatgcacgccaggaacgccggcggcagcgcgtggctacttggccgcgccgcggtgctgatgccgaggcaccgtcgcgcccacgcggccagcgcgcgcgcgtaggcgcgctgcgcgaacagccgggcgcgtgggtcgcccaaggaattccagggcggttccgcagtggttcctcaggtttcttcaatttcggggccatgcgttcg

SEQ ID NO: 33443 - DNA, 1831 bp, Zea mays
  Clone ID: UC-ZMFLMO17118B06_FLI
ccgccgccgccgtcctccgtctggtgccgaggtcttcgttggacccttcgcccgcgactagcgtccgccaggtgccaggctgaaggcgatggcgacggagaggaggcgcgcgtcagtcgtggtactgggcgacatcggccgcagcccgcggatgcaataccactccctctcgctcgctaaccaggccagtatggaagtggacattgttgcaaatggaggaagtgatcctcacttgtcactgagagagaatccatcaattcacatccacgagatgaaaacagtgcagttaactggaatttcaaagatatctggtgctctgtcacttctacttaaagctgctgtccagttcattttgctggtttggtttctttgttttaagattcctcgccctgatgtcttttttgttcagaatccaccctctgttccaacactggctgctgtaaaactggcaagctggctgagaggtgctaaatttattgttgattggcataactttggatatacattgctggggttgtcgcatggcagaagtcacattattgtcaaaatctatttctggtttgagaagtactttgggcagatggctgatggtgccttttgtgttacaaaagcaatgcagcatgagcttgctcaaaattggggaatcagggcgacagttctttatgatcaatctcctgatttttttcaccctgcttcattgatggagaaacatgggttgtttagcaggctagggaattccatgtgtagtgctatgggcaatgctgattgcatatcagtggaggaagtaggggaagacatgaacactactgcctttaccagtaagattgatggccaagttttcttgaagcctaacaggccagcacttgttgtgagcagcacaagctggacgccagatgaagatttcagcatacttttggaagcagcactaatgtacgacagacgcgtcgctgcagctttaggtgaagatgattcaatggatgaggggcaactttggattgatatcaagaacgggaagcagtttgtctacccaagattactgttcattattacaggtaaaggacctgataggaagaaatatgaggatcaaataaaaaggttgaagttgagacgtgttgccttgcggacaatgtggcttgcatcagaggactaccctttattgctcgggtcagctgatctaggagtgtcgttgcatacatcttcgtcagggctggacctaccaatgaaggtggttgatatgtttggatgcggattgcctgtttgtgctgcttcattctcctgcattgaggagcttgtaaaagtaaacaaaaatggtcttcttttctcaacatcttcggagcttgctgatgaacttatgatgctctttaaggggtttccagaagaatgcaatgccttgaaatccctcaaagaaggtgccatgaagtcagcatcatcttcgaaatggtcaacagaatgggaaaccaatgcactacctttggtggaccaggtcattggatgagatgtgtgcttacatacatcagatagaattgttatattccagagaactagagatcggtgtactagagagaccagatgtacattaaagggtgcggtttgctttcaccagaaatcaattgctagttgctgccagtgccatgtgcaccacttatgcaaaactagagcaagtttgtagctacgaagctctttcctttttagactgggaaacatactccgctgaacacatgtctaagttgtttcaggatgtatactactgtaggccagcactttgtttgataatatggtctgtattggaatacctctaatctgttacgtgacaaggaaaacatagaaaacc

SEQ ID NO: 33444 - DNA, 1022 bp, Zea mays
  Clone ID: UC-ZMFLMO17118B08_FLI
gctacctagcaacgcgcagtaagcagcgtgggcaaagctacgagcgcccggctagcttcgccatgaacatgggtggggtgtccccgtcgacagtccggtgcaagcactgcagcacgcagctcaccgtgtgccccggcgagcgcgccatccagtgcacgcaatgctgcggcgtgacgcgtatccggcggcggcgggtccagcggccggcggcggcgccgcccaccacgggcttcccgcgcgcccgcggcaagaagcgggccctcctgatcggcatcacgtacgccggcacgcgccggggctgcggccagctgaggggggccctcaacgacgtcaagtgcatgaggcaactcctctgccagcgcttcgccttccccagcgactgcatcatcatgctcactgatgaccagaaggacccgttcaggctgcccaccaaggacaacatccggttggggatgcagtggctggtggaggggagcagcgagggcgactccctcgtgttccacttctccggcctgggcgcgcaggtcgccgacgacgacggcgacgagctggacgggtacgacgaggccatctgcccgatggactcgttccagaagggccccatcctggacgacgagatcaacgagactatggtccgcccgctggtccacggtgtcaagctgcacgccgtcgtcgacgcctgccacagcgccaccgtcctcgacctcccgttctgctgcaacatgtccagaagcgggagctggcagtggaaggacgagagccccccgtccggcgcctacaggggcacgagcggcggcaaggcgatgctcatcagcggctacagtgacggcaaagccaagtccagcgtggccagtgcgcagaaaccggaggcctgcgcgaccatgggggccatgacgcacagcttcatcacggcggtggaacgcgagccgcagggtgtcacctacggccgcctgctcacctccatgaaggccatcatgaccaactccggcggctgcgccgtgcagggtcctattggcgccggc

SEQ ID NO: 33445 - DNA, 715 bp, Zea mays
  Clone ID: UC-ZMFLMO17118C01_FLI
aagaagtggaaacgacctcatcgttgattgcggtgttccggtactcgctgttctaaattttttgctacagtaaggtacccctccctccttgattgtaggtaattcacacatgagtttatgttttaggttgttttttcctggaatactctatgtcgactaaacaatttaggttctttcgagttacattacatcgatgtaatcttcacacaaagtctcaacaatatttggttgctcacttacaccccaccctagattaacatgttctgaattttctttgttcactgctgcaattgacacatgctaaatggcaatttctttataatgatccaattgagtttgtaattgcacatgtttttgccaagtttcatcaagtactgctccaacagaacaagcaatcatggaatattgagctaaggcactggagtctcaagaaaaggtctaggaatcctaagaatggatggataacgatgcttaaatatggatgacatcatttatgtcttgataaccatctacaggccggtgatagtgttttttgacgttcattcatggggctcacctttctaatgtgtaagaaagaaaactacgttgatcttaatctgagttgtgtgttgatggtcgatgtagtaaagaaggggcacttagacattgttgttcatggatttatgtactgccaacaaaccctatcttctgattcttataggtggtgcctggttct

SEQ ID NO: 33446 - DNA, 472 bp, Zea mays
  Clone ID: UC-ZMFLMO17118D07_FLI
accttcatggtctgtaacagctgttgatgctgcatgcagccatctcttaaggtacaacacaatgcgcaatgtccttttcatggcaatgacagagttccaaaagcttactgaagaaccagactggactttcatcagagcacaagaggacaaaatggcctttttgttcggtgtggatgatcactggggcccactatctcacttagaagagatatcaaagcacgcaccaagggtcaccctgtcggttgaaacagaaggtcacacacatggttactgctgtacagaggctggatctgtctgggttgcagactacatcgcaaatttgattaaaaaccaaatgctcctttggaacaactgaggttcatttggcagatgtatcataagactcttttctccgaaagaagtgaatagctggagtgtggtggaacttattgaggttccggttttgataatctagtccacatttttttggctt

SEQ ID NO: 33447 - DNA, 1585 bp, Zea mays
  Clone ID: UC-ZMFLMO17118D08_FLI
tccaaacctagactagactcctcaccgaggcgacgacgcaagcagctcagcgcgccgccgctgccccgtcccgtcccgtcccgcgccacgccggcgcctcccaccccgtgcgcgccggatcctcgttccacgcgccgcggcgccgcccctggaccggtcgagaggagcggagatccatccatccggccgtcggtcggtgtcgtcgtctgtcgttggctgtaatgaaaagctgggcctgctagagccaggagttttcgttgcaaatctgcgtctccgctatgggttcaggcaacttgatcgtgaagaaggtggtaaagcacagctcttttgatctggacattcagctcgataagagttggatggaggacgttacctgcccgatctgccttgattaccctcacaatgcagtcctactgagatgcacatcttatgagaaaggctgcaggccgtttgtttgtgatacagaccagacccgttccaactgtcttgagagatttaaatctgcatatgaactgccttccaatgcgaaagtttcatcttttgccatgcctcctctcgatagcatcattcatattgtgccatcgaacgcaaacaaccgccccagctgccctctgtgtaggggtgatgttattggatggattgttattggtgaggctcggcagcatcttaatcagaagaaaaggtgctgtgaagaggattgctgctcgtttgtcggtaacttcaatgagcttcagaagcacacgcaacaaaagcacccggattcacgcccttcagagattgatcctgctagacaagttgattgggagaatttccagcaatcttctgatattgtagatgtcctgagcacaatacatgcacaagttcccaatgggatagttctgggagactatgtgattgagtatggagatgatgacaatggtgaggactatgaagttttccgcggtgtcaggactcactggtggtcatgtatattctgcaaggcgttttcgagatcttcaagaagtcgtagaagagcaagggaaagaaggggcagtggaaggaggattgggaaccaagctaatcttgaaaattttaacatcgaggttccagcacaatctgttgaattaagggaaattagatttgatgaaattgatgatgaatacatagtcacaggggccattcctagtatggcaacacctggaagaatggctagtttccattacagggacacaagatacggacgttgatgcatagaatctgcagtaaaaaagaaaagaaaagaaaagaaaggaaatagctgttacgcgatgtaccgatcatcataaccatcgtacccgccccgcccatttgaattccttttccgcctttcctcggtaggtgctgccgccgcagttcaaacttatctgtgcataaaaaaaaagtagtagcaacagaagcccgccctggtcgttcgaaacaggcctcatcaccctagtttctattttgtatatatttagcacccatccatataggatgttggtgacagtttattttttccttttaattttttggaatgcgtcttggatttggatgtagcgcacgcagctttacataaaaacctggaaac

SEQ ID NO: 33448 - DNA, 739 bp, Zea mays
  Clone ID: UC-ZMFLMO17118F04_FLI
gcttccgcaacctggagagcaagggggtggcgttccccaagagccagccgatgcggctctactccagcctgtggaacgcggacgactgggcgacgcagggcgggcgcgtcaagacggactggtcccacgcccccttctccgcctcctaccgcgggttcaaggccgacgcttgcgtcgccgtcgcgggcggccggacccgctgcggcgccaccgtcggcaccgagggcaccggcgcccccgcctccgccgccggcgccggggactggtacaaccaggagctggacctcaccctgcagcagcggatgcgctgggtgcagcgcaagtacatgatctacaactactgcaccgaccccaagcgctaccagcagggcctccccgccgagtgctccatgcagtagcgcccggttattcctcgcccgtccaacaatggcgcgcgcgcgcgtgtgtgtgcatgtggtccgctctactgctaccgctacgacgatcggtgtcgatcaccggatcaaggcaagacgaaaggcatcgaaacatggtagataaataaaggacttgacgatttgtaacgcagtagctggtgcgtgcgtggtgtggtggtaagaaattcttctgctgcctgtgttcttgtagcctcctcgtcctcgcccaccctgttggtacgtgtacggtgtacgtagtctgccgccgcgcgctgttcgtgttcgtcgtgtctcgtgtctgtattatactcgtcctccccttc

SEQ ID NO: 33449 - DNA, 1799 bp, Zea mays
  Clone ID: UC-ZMFLMO17118F06_FLI
ctccgcttcaagatgcagatctttgtgaaaaccctgactggcaagactatcaccctcgaggtggagtcgtctgacaccattgacaacgttaaggccaagatccaggacaaggagggcatccccccagaccagcagcggctcatctttgctggcaaacagcttgaggacgggcgcacgcttgctgactacaacatccagaaggagagcaccctccaccttgtgctccgtctcaggggaggcatgcagatctttgtgaaaaccctgaccggcaagactatcaccctcgaggtggagtcctctgacaccattgacaacgtcaaggccaagatccaggacaaggagggcatccctccagaccagcagcggctcatctttgctgggaagcagcttgaggacgggcgcacgcttgccgactacaacatccagaaggagagcaccctccacttggtgctgcgcctcaggggaggcatgcagatcttcgtgaagaccctgaccggcaagactatcaccctcgaggtggagtcttcagacaccatcgacaacgtcaaggccaagatccaggacaaggagggcattcccccagaccagcagcggctcatctttgctggaaagcagcttgaggacgggcgcacgcttgccgactacaacatccagaaggagagcaccctccacttggtgctgcgcctcaggggaggcatgcagatcttcgtgaagaccctgaccggcaagactatcaccctcgaggtggagtcttcagacaccatcgacaatgtcaaggccaagatccaggacaaggagggcatcccaccggaccagcagcgtttgatcttcgctggcaagcagctggaggatggccgcacccttgcggattacaacatccagaaggagagcaccctccacctggtgctccgtctcaggggtggtatgcagatctttgtgaagacactcactggcaagacaatcacccttgaggtggagtcttcggataccattgacaatgtcaaggccaagatccaggacaaggagggcatcccacccgaccagcagcgcctcatcttcgccggcaagcagctggaggatggccgcaccctggcggattacaacatccagaaggagagcactctccacctggtgctccgcctcaggggtggcatgcagatttttgtgaagacattgactggcaagaccatcaccttggaggtggagagctctgacaccattgacaatgtgaaggccaagatccaggacaaggagggcattcccccagaccagcagcgtctgatctttgcgggcaagcagctggaggatggccgcactctcgcggactacaacatccagaaggagagcacccttcaccttgttctccgcctcagaggtggtatgcagatctttgtaaagaccctgactggaaaaaccataaccctggaggttgagagctcggacaccatcgacaatgtgaaggcgaagatccaggacaaggagggcatccccccggaccagcagcgtctgatcttcgccggcaaacagctggaggatggccgcaccctagcagactacaacatccaaaaggagagcaccctccaccttgtgctccgtctccgtggtggtcagtaagtcatgggtcgtttaagctgccgatgtgcctgcgtcgtctggtgccctctctccatatggaggttgtcaaagtatctgctgttcgtgtcatgagtcgtgtcagtgttggtttaataatggaccggttgtgttgtgtgtgcgtactacccagaactatgacaaatcatgaataagtttgatgtttg

SEQ ID NO: 33450 - DNA, 1524 bp, Zea mays
  Clone ID: UC-ZMFLMO17118G01_FLI
cttggcatctacaagcagagggcaatccttgtgctcactctagtcagccttgtggttgcgattatctggtcatacactggacagatccttctactctttggtcaggatccagagattgcagctggggcagggagctatatccggtggatgattcctgcgctatttgtgtatggtccactacagtgccatgtccggtttctgcaaacgcagaacatagtcctcccagtgatgctgagctcaggtgccacagcactgaaccatctgctggtgtgctggctgctggtgtacaagattggtatgggcaacaagggtgctgccttggccaatgccatctcatactttaccaatgtatcaatcctggcaatttacgtcaggcttgcaccagcctgtagaaacacctggagagggttctcaaaggaggcttttcatgacataaccagcttcttgaggcttggtattccatctgcgctgatggtttgcttggagtggtggtcatttgagctcctggtacttctttctggacttctccccaatccaaagcttgagacatcggttttgtccatttccttaaacacaggctctttagcgtttatgatcccttttgggcttagcgcagccataagcacccgtgtttcaaatgaacttggtgctgggcgaccccatgctgcccatctggctacccgtgtggtcatggtgctggccatcgtggttggcgtattaatcggactagctatgattttggtgcgcaatatctgggggtatgcatacagtaatgagaaggaggtggtcaaatacatctccaaaatgatgccgatcctagccgtgtcattcttgttcgattgcgtgcagtgtgttctttcaggtgttgctaggggctgtggatggcaaaagattggggcttgtgttaatcttggtgcatactaccttataggaattccagctgccttctgtttcgcctttatgtaccatctaggtggaatgggactttggttgggaataatctgcgcactcgtcatacagatgctattgcttctcacaattaccttgtgcagcaactgggagaaagaagctttgaaggcaaaggacagagtatttagtacatccgtaccagctgacatgatgacatgatatttctgaagatatttttttgaaggaaatgcccatgaaactttgccaaggaacatactaagaattggttgttcagattcaaggcctttctccatgccatcagaatgatgcttgggtctagtaatagctcctgagcagtctgttttttacttttggtcaatactcaatacatggaagatgtttggtttgaagaaccacgccatcctagatgaggtggtatattataagttgatataacggctccatactagttattgaggaatgagacgatgattatctcatgtaataataatgcttttccccctctagttattgatgtaagacaattgaggcaaatgaacaaaatgtcacatttgattaaataagttgcattgtctatttatgcagttgtttggg

SEQ ID NO: 33451 - DNA, 893 bp, Zea mays
  Clone ID: UC-ZMFLMO17118G04_FLI
gaagttagcaatctagtaatgggaatggaatactccagcccactacaatggcgtagcagggggaaagtagtaattgctgggagtgaatcaatagggctgtgggatgtgaattcacttaacccacaacccttgttgtctgttgcttctggtaagaaagtgtactgccttcacgtgaataacactgatgctgaggtgggcggcggagtgcgtcaaagggttagttcatctgaggtggaaggaaatgatggtgttttcagcacacaggaaagtgtcaatgtatttgattttcgtgtacctgctggcattgggcttaaaatagcaagacatggcggcacagcaaactcaatcttttcacgtggggactcggtatttattggtagcacagaaggaaggctgcaaataaaaggagggtcaagatcacgagttcagcaatactcgttgagaaaggggaaacttgtcgccacctatgagttacccgaattcaacgctcatatccatcactctgcgataacccaagtatggggcgactcaaaccttgtcttggctgcatgtggtatggggctgttcgcctttgacacgtttaaggaagacacgcagccaacctacagctttgaccgtggaaacaccattgcagcgagagaagctattggccctgatgatctgtactgtcctacatttgactactcatcatcaagggttcttctcgtctcaagagaccgcccggcacattggaggtacttgtaggctgtagctagctatttcttgtttattttgtgtgcaacatgccatgtaatatatgcactttgtttatgcttcacatgtggtgtcatctgccgtgtcaaccatctcgcgctttcactgtaatattatctagtttttacccctgcaattat

SEQ ID NO: 33452 - DNA, 1865 bp, Zea mays
  Clone ID: UC-ZMFLMO17118H03_FLI
tcttgacatacctgtacaggttaacaaattgcaaaggcaactccaagaagagattgatttgcacatggcgttgacagatgccattacatataatgcggcgctgatacttaaggcatctatgaagcttcctgacaaggcacacgagctattgattagcatatcctctctggaaaccgctatcacaaagcttgaagaggatctacatcacctgcactaccagttatgtgatgcgaggaatgaaaggctacttgcagaaaataagccagaatgcttgctacctacagcgtcagattgccaaccttctacagcttgcgattgtacaagggaagagcctgaacaaacattaagatattcgagattcaaagattatcaccaagtggaggacggtttgtcaactgaacctgaagatcaacaagatgacgaaaaagacgccgaagatggagaacatgtatctctaaatatgctgatgcaagaggcatgctctatggaaaatgaaggcaaagaagatcagaagatagatgcattaacatttagtcagcccaatttcaagaaaagcgacatgagtggaaatttgtggaataatccaaaccagctctctgaagagatggtgcgctcgatgaaagatatcttccttcatttatctgcatctcccaagatatcacgagaggagccttttgctaattcatcttcatcagcagaacgtctatctggttcaacattgactactttgtcagattcatctataatcgcctcagtgctgcggagtccttcgattgactggaacaacggcgatggtattattgatgatgttagaaactttgacccgtacaacgttaaaggcaaggaagcacggagagacgttgggagctattgttcagtagctgaagtgtcttggatgtatattggcaatgaacaacttgaatatgcatccggagctcttaaaaagttcaggtttcttgtggagcaactatcaaaggttgacccttcttgtatgaactgtgatgaacagatagcattttgggttaacttgtacaatgcattaataatgcatgtaagcttatttggcatacggtgtccctgaaaatgacattaagctgttcgcgctaatgcaaaaggcctgttacacgatcggcgggcagcctgtcagtgcagccgaaatagagtttgtgattctgaagatgaagacaccggtgcaccggccacagctctccttgatgctggcccttcacaagtttaaaacgtcagagaacctcaggagatattcaatcgatggcactgagcctcgcgtcctcttcgcgctctgctgtgggatgttctcttctcctgcggtaaggatcttctctgctgaaaacgttcgagctgagcttcaggagtccatgagagactacatccgagcgtcagttggcataaacgacaagggagagctcgtagtccccaagctactgcagagctacgccaagggcatcgtggaggactccctgctcgccgactggatctgccgccatctgacactagaccaagtcgccgcgatccaggacacgtcgtcgtcgtcgtcgcataagcagcggcttcttggagtgcgcagcttcagcgtcatcccgttcgactcgaggttccggtacctgttcttgtccaacaacaccaggtgccagaattgaaacaagagtacaagactgcattgctatgcgcagacagccacaggagtgggtgcttgacaagttgacacttttttcgagagctgaaaatattagcttttgctgtacattctgtaaatttttccgttgactaggattcttctttgtacgtaacattcagctaactttttgtacatcaagcgaacccagaatacaagtgtagattcggtg

SEQ ID NO: 33453 - DNA, 1159 bp, Zea mays
  Clone ID: UC-ZMFLMO17118H08_FLI
gttggagcacaatcacgtgggcctgctcctcatctccagcaactcaggatgccagcaccgtttgcaatggttcacagagatggacagcatccacccagtatcatgaatcccggggttataccgtcgagacagtctgtccatggtaattttgaaagctctgcttctggcaatgcactggcaggtatctcatttgcatccatggcaccaagttcaggtcaccaggcgatgtcgtccacatcagactcacatccagttttcccagcatcctcgcttctaccaggttcaggtccagggtcgatggcaaactttgtgcggtcaagtaccagaatccctgttgtcatggcgagcgaacaagcaccacgcctgaatccatatgttcaccacatcggaggtggtccactgaacgctgcaccagcaggaattcagaaagctagagctcatataggacacactcctcaggctgcctcagatcagagtcaggacgtgctgcatcgcctactactacagttgcccgaagtcatggcgccaagcttagctcagccaaccgcatcaagctcacacccggctcccatggcagcccggcagcaagcagggctactgaatccagctcctgacaacgtggcatgtccactgaacgcagtggctggagttgggcgccccggagcccgcataggcagccagtcgtaccaggtatcggcttcgttgctcgagtgggaggcgacgctcagggttggcctgattcgtggacaccaaggcacgtaccccttgggacagggatgttctgacctggctggaggaccccccggcacatccgctgcccagggatgcggctccggcgccagcagagaggtggtgtgcctatctgatgacgaggagtagcatagcgtagagagtagtagtttttttttttgggctgggctggtctgtgcaacgtagatgtgcatgggttggataggcaacagtagagcggcacgatatcgtcgcccccttttagcagcagcggcatccttggaagcaggagatgtctggctctgatgagggtagtatgtcgtatttttggggggtgggggactggtggcgtggcgtggcggcagcagcatattagtgaatagtgatagcatatgaaccctaattctgatatatagtcttgtggtttcat

SEQ ID NO: 33454 - DNA, 1616 bp, Zea mays
  Clone ID: UC-ZMFLMO17122A02_FLI
gaaccttggaacaaccatgatccattctggctcacaaggttattatggaatgcaaaattcccatgcagcatacacaagccagcaatctcttactgggagttggaatgccacgtcaagtcagtttggggttgcaataagtcctttgacacctacccagcctgccatgcaaagcctttcaggacaaaatattgtggctgcagaaaatatgggtcatttaactactggaatggctcctgcaactgcaaatgcagaaatggttaattcagatttgacttcccagaaccaaatgttgtcttctttaccgcaaacggatgacagattagctgatggaattgaatccaaatcaggagaagatgtttcacatggaagagtgaggtcttcggctgaagctatgggaccacaggatgcacagcttggaccagtgcaactaaacgctcagcaacttgaaaacacaagaaaccatatgtcatcaattgatctctccaagtcaatgatgccatcacagatgatgtcagcaccatctgctgcatcagtacagccttcattgacaaccactgctcgcagtgataatcaaagcagtgggtgggctgtacctgcacaaatggcgaacacacctggccagtctcagataactggaaatctaacctggggaaatacacctcagggtgacgcaagcttaggttggggaatggtgggacagagcaatatgaatatgccttgggtagcatcagctcaaggtgcttcaggctacaacatgggtgtagccatgccgacgcagccaaatgcagttccaaacatgggctggttaccaaatccaggaaacaccagcatgaacatgatctgggctgcaactcaaggccaggggactccaaatgcggctcctatgatgggaggtcagatgcaaggagtcccaatggccccttggggtggtgttgcagcaggaagtgcaaattcttatcctgcctggggaaaccaacaagctggaaacatgaaccaaaatgttggctggagtgctcctgtgcagggaaatccaggtcaggcaaataacaacatgaactggaacgcaccaaatggtaatcctaattggaataatcaacagagagagaatgggggcaggcactctggacaccgcggtgcttttagtggtggtgactcaggcggaaggtcatggaagtcacgctctggtggcgatggggggtcaaggggacatagcagattctcccattcaacaaacacagagggatatccatccaggactgatcggcattacgataggcagaattcaggcaacgagaggcgatatgagaatcacaatgagagaaatggtcgacagtttgataggcagccttcggataatgaaaggaaccatgataggcctgatggcagacatggtggcagggatgacgataggcaggctgataggtccgagtcaagagagctgcgttagaactggtttctgtttcttacattcgtttccttgtatgtgcagtagcaaactagcatagtagcttccgtgcatgttttgaactttatgctctgtagcgatctgcatacatgtgcagatcaccgtgtataacatttgtagtttaatgctgtgtgcatcctagttccgaatt

SEQ ID NO: 33455 - DNA, 1815 bp, Zea mays
  Clone ID: UC-ZMFLMO17122A03_FLI
ctccaccatcgtgcctcagcatcagcactcgaatgccacgagactgacctctccctcgtcgccgcagccgcgatgcccgcaccgaccgccgagccggcgctcccggcggccttcctctgcgtcccgtccccgctcctctccacgccgctccccggcgctgcactctccgcctcccccgcgccctcctcccaccatgcctccttcctcccgcgcccgcgcggcgggccccgagcgctctccgtcgccatctccgtcccgggccccactttctccgtggcgtcgcggctccatcagatgtggggcgagttcgcgcggttcgtgcggctgcacgggaaccaaatagcgccgctcgggttcgcgtccatgggcctgggtttcggcggcggtggcggggataacgtcggcggtgggggaggagggggtggaggggatgtggatggggtaggcgaggtagaggaggccgcggcgcgggccgaggcgccaaagaaggtgctgatccttatgagcgacacgggcggcggtcaccgcgcgtctgccgaggccatcaaggctgccttcacccaggagttcggcgacgactaccaggtatttgtcactgatctgtggactgaccacactccatggccattcaatcaactgcctaggagctatagttttttggtgaaacatggacccttgtggaagatgacatactatggtactgcaccgcgtgtagtccatcagcctcattttgctgcaacatccacattcatagcaagagaagtggcaaaaggtctaatgaagtaccaaccagatgtaattatcagtgtacaccctttaatgcaacatgtccccctccgaattctaagatcgaaaggtctcttggataagatcccattcgcaactgttatcacggatctcagcacttgtcacccaacatggttccataagcttgtcactagatgttactgtccatcaactgaggtggaaaagagagcactaaaagctggactgaagcccgcacagattaaagtctatggcctccctgtccggccctcttttgtcaaacctgttcgaccgaaggatgagctgcgaagagagttaggcatggatgaagatctgcctgctgttctattaatgggtgggggtgaagggatgggtcctattgaggccactgctaaagcacttggtgattctctgtatgatgaaaacctaggggaacccactggtcaaatacttgtaatttgtgggcgtaataagaagctggtcaatcgattgcaatcaataaattggaaagttccagttcaggtgaaaggctttgttacaaagatggaagaatgtatgggtgcttgtgattgtatcattacaaaggcaggacctggtacaattgcagaggcaatgatccgtggcttaccaattattctaaatgattatattgctggacaggaagctggcaatgtcccctacgttgttgaaaatggatgtgggaagttctcgaaatctccaaaacagattgcgaagatagttgccgactggtttggcccaaggtcagacgaattcagggtaatgtcccagaatgccctcaagctagcacgacctgatgctgtgttcaaaatcgtccacgatctgcacgagctcgtcagggaaaaatgttttgtgccccaatatgcatgtgcaacataaaaggccgtatcctctattttgtgtttgcttaattttttttaaccccatgcggcactagctatagctgattgtgaggattgcgaatattgattgatttgaaacgtttccgtaagaggaatgaaaatgtattgaatgctctagtttaattttccg

SEQ ID NO: 33456 - DNA, 2229 bp, Zea mays
  Clone ID: UC-ZMFLMO17122A04_FLI
tgccgaggagccaagggtgccgaatcagttggcgagccacaatgtaacaaatggtcagtgttctatattggggcctccctctgccacatcatcaatggttgctcctgttctaagaactgatagcacaactcagctgctctctacaagaaataacacagttgactcaaataatttaggttctgttcatctacaaggaaacagtgagctaaagaagcctcgtttagcaaaagtgccgggaagtatgatgctatctaatgctgaaagatccgcaggtgggattcttggttccggtgctcatcgagaagtgattcaaaattcagacccttcacatagggatgctaaaataaaggaccaaactggcttcagacagggtgcttctagcagtaatcggacaatccgttgccaaagatgtaatgaatatggccattctacacatttttgcgaagttgaaaaacttcgtttgtcttcaggaaaacctttgagtgagcgaaacttgaaggatgcatctgccaaaagaaataagacatccgaagttagtacattggcttctagtgaaaaaactccttccagagaaccagagcatgtcgtaaagtgtgctattaatcagaatctgataaatgggcctaatgatggtatacctgccccatccagccatgtaaagaagcactcattatcacctcgagctaatgtgtccatccctgggagcggagtagattgtagcaagcctaagttcaaaaataatgatccatctctatctggcacagcaggaatctttgttcataatggtcgcattatgccaaatgatcatagggatgaacctgctcaagggttttcagctggtgatgaaccaacgtcttcaactgtccctgagctgggctggatatggcaaggtggttttgagctgcagaggactggaagttcaccggagctgtgtgatggtttccaagcccatttatcatgttctgcttcacagttagtgctggacgcagttaagaaattcccttctaaagtccagcttgaggaagttcctcggaagaattcatggccaacacagtttcagaaaaacggtccaacttatgacaacataggtctttttttctttgctagagatgttcaaagctatgaaaatcactacagtaaattagttgagaatatgctgaagaatgatttagttctcagaggaagtgttggtactgttgagttgcttatattcccttccaatatcctatcaaagaacttccaaaggtggaatatgttgtactttctatggggtctattcagagttagcaaaaaagattcctctaacctcccatcttatctatccacaagtagagtagaacaaaattttaatgatgatctccaggccatggattggatgccatctacccattcattctcacagaacaggagtgatttagccgaactggaccctggtttgttaaagtcaactaattttgaaccgagtttggaagccagtcgtgaggtgtgtttggatggagagaactctttgaatcaacttgtacgcagaagagctctagataatcacctagattcagatgcaaaagcatgttcaacgattagcaatggtgccatgggttcctctgccatgtctatgcaaagaaaacatcagaaacctgattatccagaacatcaagataaaacgagggacacttttggtggtaatgttagtgaaagagatttcgatgtgaacacggtgccagttacttgttctgtctccttaactcaccttcaggaagaacctggtaagctgagcacagccatcgacctcatggatatagaccatggggttagcgcaggtgcactggatcgttcacatgcatcaggtggtgcaggtaaaagaagttttgagacggccgaagtagctgatgaagtacccgagcataagaaaactaagctggataataatgcctgtacgaatgatggcaatagcgataaactaatgcctggaagctcaagcagtgatggcaagcgcgtgtttccacttgatctaaatgcagtgggggatgaggacatcgtaaatattccagccttcaggtgatgaagagttcgctgttccattacaaaccaaccgtggtggtttggttcagaatgagagatctgcattgtaaatcgcatgtgcagtttttggcctaatgttttcagacaacacttacagatgtgatgttcccctctttggcagtgaataattctgctccagaatatgcttac

SEQ ID NO: 33457 - DNA, 1465 bp, Zea mays
  Clone ID: UC-ZMFLMO17122A05_FLI
cgcgttcgtgtacgtttatattatttttttataagggagcaagagggctcggcggcagcggcagcggcgacggcgaccgcgacggcagtggcagtggcagtggcaggctgtcagccgtccctatcttgtgtgtcaagcgcgaactccctatctcgtgtgtcaagcgcgttcgcgtgcgttctaggcacaggcagccgaggcgagccccttccgctcagtggccgccgccggaccgtggacgcagctagcccatcagcccatggcagggacggacgtcgcaggctccgcacgcggctccgatgccgcgctcgggaagacgggcgaaccacccgccgcggcgcgctctggcgcagccaagaaggtggctctcgctctgctagcctccttctcggcgctgctgtacagccagattcagccgccgccgtctaagatccccggcatgccgggcgggcctccggtcacggcgcccagaacaaggctcaaggacggccggcacttggcgtacctggaatctggcgtcccaaaggagaaggccaagtacaagatcatattcgttcacggcttcgactgctgtagatacgacgtgctgaatgtctcccaggggctgttggaagagctgggaatctacctgctgtccttcgaccggcccgggtacgccgagagcgacgcccacccagcccggacagagaagagcatcgcccttgacatcgcggagcttgcggacaatctccagctcggccccaagttccatctcatcggcttctccatgggcggcgagatcatgtggagctgcctcaagtacatcccgcacaggctcgccggcgtggcgattcttgccccggtgggcaactactggtggtccggcttcccgccggacgtgttcaaggaggcgtggcgcgtgcagtttccgcaagaccagcgcgcggtctgggtcgctcaccacctgccgtggctgacgcactggtggaacacccagaagctgttccgcggatccagcgtcaaggacggcgaccctgccatgctatccaaggaggacaggcttgtagctgacaagttcgagaagcgaacctacgagaagcaggtaagacagcagggagagcacgactcgctccaccgcgacatgatggtcggtttcgggaagtgggactggagcccgctggagatggagaacccgttcgccggcgcccaagacgaggtgaaggtgcacctgtggcacggcgtcgaggacctctacgtgccggttcaactgtcgcggtacatcagcgagaggctcccatgggtcatctaccatgagctcccgacggccggccacctcttcccggtcgccgacggcatgcccgacgctatcgtcaggtcgcttctgctcggagatgagtgatcagtatttaggatgcgcggatccaggacttgtgcactttttgcagcttcatcagtaataaaaatacactcggaggtcgagatctgt

SEQ ID NO: 33458 - DNA, 1406 bp, Zea mays
  Clone ID: UC-ZMFLMO17122A11_FLI
caagcagcaacagcctgcagccggcagtcctcgcctccgcctcctccaccctgaccgtcaacagaggaagacgaggatgtcgggatccaaggtgtacaccctcgaggaggtggctaagcacaacaccaaggacgactgctggctcgtcatcggcggcaaggttacatctttttcttcttctctctctatctggctgtggaattcggaaggatccatccctccccttgccttgctgggtgggaactgggatcttcccatcttcccttgatcagaattatcattaagattcgttagatgcctcctggaatcgagatcgagattgagaagcaacgggggaggtaggcggtgggtggtgacctaacaaatcattgaggcgagagggtggctcctactgtgtgtgctttgccttcatatggttttactagtatcagctgtcactgacgttgctagttttgcttccaagaataagcattccatatattccctatgcctatgggacttaatcacccttgcaatgataacactgctgtgcgtgcacacacacacacacaatgtggcactttcatgaccatcattcactaacacaccaagcaaccatgatttgtcttcactttgtggttatcattataggttgggttccctgctgctcagatgtttcatcctcactcttttttttaaaaaaaaagacatctctctactctcaacataatgtcgataggaagaaacatatatatcttttactgaccatatactggccttactctctcctgggtacctggtgaaggtttcttcggtagcaaagcttcatatgatgaacaaagtgaacccttttctgtctgtttgtaggtgtacaatgtgaccaagtttctggaggatcaccctggaggcgatgatgttctgctgtcttccactggtaataaagctacatactcctcatatcaggtctttgaagttggtgaatgaaggtgtcatttcaaattttctgttgatacaaaatgcagccaaggatgctaccgatgatttcgaagatgtggggcacagcagcactgcccgtgcaatgatggacgagtacttagtgggtgagattgatgcagccacgatacccaccaaggtgaagtacacgccccccaagcagccgcactacaaccaggacaagacccaggagttcgtcatcaagatcctccagtttttggtccccctcgcaatactgggtctggccgtcgctgtaaggatgtacaccaagtcggaatctgcctagtctcttgtcatcaacgcttcaaacatcattcacaaactgaataagttagtgttgaaatgctgcaaagatcattaattctgaaacttgagtctttgctgtcgtgtgagacgtacgtctattagtataaaatcacttctatttttccttc

SEQ ID NO: 33459 - DNA, 836 bp, Zea mays
  Clone ID: UC-ZMFLMO17122B03_FLI
tcatgatcttctctctcgcgcgccccgacgtgctcccctccgccgacctcggcgtgcgcaagggcgtgcagatgctctacgccctcgaggacgtgcctcgtccgtcgcagatggacaagctgtgcgagcggtggcgcccctatcgctcagttggggcttggtacatgtggcggctcattgaatccaaggtgccccagccggcgccagccatccctgttggatcacttgctttcccttcgccggacggccagagtatgctacagcagcaagaacaacagcaacagcagactgtcatccaaatgatcgacccccttcagatgctcccagggatggggtgaattcggtatcacttctactcattagttactccgtcttagatcaatcaatggttactctgtgcatctgatagtcagctccacacgttgttgttctggaatggaaccgcaggagggtagaattggatatgaaatgaggtttgggcccaacttattaagttgtcaatttggtttgtgttgtttatctgtgtcaagaatctgtgaagatcatggttggctgttgtttacattgtaaaatccacctagcggtattttagaaccttctggaattgttccatgcttgtagttcacctgtgataaaatgattaagaccatgcttaacacaagaatccctctgttgttaagttagcaatgtaattattccatgcttaacacaagacccatctaaccaaaattgagctcctattgtttgctcaggacttttggttttagaaactaaaataacatcacctatggaaagacataagttctgattactacgtccagacttttcaagcttgc

SEQ ID NO: 33460 - DNA, 2689 bp, Zea mays
  Clone ID: UC-ZMFLMO17122B10_FLI
gctccgcgcagcaccagccgccatccccgcccgccatctgcgcgcgtctggcgtctccctcgcccccgctctcctctctgctgtccacgccctctgctcgcgtgtcttccagccacccacgagcagagccttcgcccccggatcccacgcccgcgagcagagctgctgtccatgccgtcggatccgctcctccctcggaaggagaatctccaaatcttgccaccatccccgcctaccatctgcgcgcgttggccgtctaccggctacgcgcatgtgactgtcgttggatcccaggtctcgcccaattccaagcgcccccgcttcgagcgtcgcccccaacaagacgtccggatctacgctagccctagctcgcgaggtcgacgccgatggatccaaggacaccagcgtcgcccctctccgagctcccccaatggccgccgcggggatgttctgctggtccacaccaagtgcgccgtccacaccaagctcctcgccaacgacttcctcctcttttccatggccgcgagctccgctagacaccgctgtcttcgaccctgctgcgccaacaagtgttcgaagaagatggaaatcgagcgccagatggccacggccaagctattcgcggaggaacagctcgccgaggatgtcgccctcaagagaggcatcttcgtgggggctggttgttttgctgagaaaaaaataccgatcatggagatacatggagccaaatgttatctgatataccagcttccatcgcttgggtttttcttgttggctacctgtaatgaatcagtggttagcaccttctgttggtttatccaaggtttttagttaagtgcagaaactacacttattttttcgctcaaacaagcatttataagctaccagctcctggcttccgcttcaaccatgcacatatctctgtccgcagaatttgactactcggttggcccaacaattgccggaggaaggatatcaatattatcaaaaaggcatttataagctaccagctcctggcttcagcttcaaccatgcacatatctctgtccgcagaatttgactactcggttgggccaacaattgttagtgcactctcaagaatagttgcttattctaaatttcggcacacatgattctgtagatggctagaccatttggctttagcttgggaagcagttatccaccccgtcaacatcagtagagtgctaattcagttcaaaatgctgggctggaaactattggactaagaccggcaaattctccaagtctgtcaactaattcaggggtttatgagcaattcatgcagaagtaccattagccacagactcaaaattcacttaggttgcaggcatcttcagatcctcaacagtacaaggaccagagccaaaaatccgttcaaggaacacaggctgtgctggatccatatagcttacttggattgttgagtttaataggaatgaaagagcctggaccaacaactcttgctttagggattgatttgacctcattggggttgaatttgaactcccaagataatctttacaagacatttggctctccgtggtcaagtgagccagctgtaggagaacctgattatcagatcccagcttgtttctctacaaagccaccaccagcactgcaaaagtttcaccctttgacactattctacatcttttacagcatgcctaaagatgccactcagttatatgctgctaatgaactatacaataaagggtggttttaccacaaagactaccgtgtctggctaacaagagcgcctaattccgcacctcttgtgaaaactccacttcactcaaaacatctagcactaatgtgaaggccattttttgagcctgctggactggaccccgttgtgttcttccgatgatcaatcagtcaatcacaaattcaaaccatacaaatcaactcaatatccagcagctcaatatccagcgtgcttttggaagtctgttcaaggggtggagtgaggagaagatatattttgctcccacatacaagtactcttgcaattcagattcttatgctggagagactgccacatcaaagaaaaagaggagaaccccagcctggtgtgaaagaatactatggcatggagatggtattgcacagttgtcctacttccgggggggatctcaattctctgaccatcgtcgtgtttgtcggacatttactgttgaggttaaaaggctagatggccgatcaatgcggcgcccatcaaacaccaacattagaatcgatgctgaagagttgttaccgacaagagacaagcataactaaggtgatctagatggatgaaattgtcgacaaggccattagcatcatgcaggttacctcaaagcatctcatgtatatacgcaaggagaagctgcacccagggaaggcattgagtgcaatagaggtgaaggaactgcgcgaagcccttgaagcgattgctgaaggtttggaccaagattcactcttgtgccagagtttggcgtagtactcgattacaaactgtgtactatgttaatgtaatgacatagtttgtatgatacagatcgtagtgatgttgtttgaagctgtttgtatgaactgtttcctactatcttgtatgaattatgatgtctgatgtagtttgtatgaactatgtcatattatgttgaatgaagctattgcatgcccttattct

SEQ ID NO: 33461 - DNA, 885 bp, Zea mays
  Clone ID: UC-ZMFLMO17122C07_FLI
agcggcgcagctgcacggcgggtgcggcgcctggggcgttctcttcacggggctcttcgcgaggcgaaagtacgtggaggagatctacggcgccgggaggccctacgggctgttcatgggcggcggcgggaagctcctcgccgcgcagatcatccagatcctggtgatcgccgggtgggtgagctgcactatgggcccgctcttctacgcgctcaagaagctgggcctgctgcgcatctcggccgacgacgagatgtccggcatggacctgacccggcacggcggcttcgcctacgtctaccacgacgaggaccctggcgacaaggccggggttggtgggttcatgctcaagtccgcgcagaaccgtgtcgagccggcggcggcggtggcggcggcgaccagcagccaggtgtaaaaaaaaatcaggagcaaattgaaaccgagctgaagttacgtgcttgcctttttcagtgtgttgtcgcgtatcacgttcgaggtggatcgtatctgtctgccggtacgcagtgtttggcaaaatacttggctacttgggagtcgcaagaaattgtgtaaattatagaagaggatggcgacgaagcacgcatgtgttacgtagttggggtttgtgtgcacatggtggtgggcaggggctaggaggagagggtttatctttgggttattttcgtagtggaatgaatcttatgatcggatatccatcggaaggtgtggcgggctgctggtcaagataggtggcttctatatatgactatgagggttgaaacaagtggacgattctgtcctgtggtcactgctcatcatccaatctagcggctttgacggtcgtgcctttttagtatcaataatattattccaagtttaaaatat

SEQ ID NO: 33462 - DNA, 570 bp, Zea mays
  Clone ID: UC-ZMFLMO17122C08_FLI
caagaagctgccaagaagagggagatgagatactcagacctcaagaagatcgaccgtggcgtgaggaggcatttccacgacgatataaccgtcgtcgtggtgttcctcgactcggatgccatgagcaaagctagctggagcaagagcccctcggtttctctccgagggggcggcgtcacccttcccgccaagtccctcgcacccttctcggctccggcacagttgaacggcacccactgaagctgctactgctcttgaaaagaagggcacagtgcagatctgctagagatgatgagagaagcagcaatcaagtgtagctgttgctcgtacacctgctgtgctgttgctgtttgcaaagctgccgtcttgactccgcctggtaattagtgtactgatagcgaggtatagtaattaggttatttgttagcgacgcaaatcctttctttttttttcttctccctctgttcttatctcttttctcttcatcatggaggaaacaggtggctgtaaatttgtccagaacatgttttccctaatagcccatcatatcccgctctttttcttgttgat

SEQ ID NO: 33463 - DNA, 1206 bp, Zea mays
  Clone ID: UC-ZMFLMO17122E04_FLI
cacaccgcgcagcaacgagaggggcaaacaagcttgctactgtgatttctcgtccgagcagcggcggaggagagagagagagcatggccgaccacaaggaggagcctgtgccggagtctgtgatggacaagatcaccgagaagttccacggcggggactcgtcgtcgtcgtcgtctgactcggacgacgagaagaaggggtcctcgttggcgtcggcggcggaagccatgaaggccaagatctaccgccttttcggccgggagaggcccgtccactccgtcctcggcggcggcaagcctgccgatcttatcctatggaggaacaggaagatctctggcggggtacttgctggtgccacggccatctggctcctattcgaggtcatggagtaccatctcctcaccttggtgtgccactgtctcatcctctcgctggccatcctcttcctgtggtccaatgcctccactttcatcaacaagtccccaccgaacattcctgaggtcaaaatccctgaggatgtggctgttaatgttgccctgtcactgagatatgagatcaacaggggctttgctaccttaagggagattgggcatggccgtgatctgaagaaattcctaattgttattgcaggtctctggcttctttcagttctcgggagctgctgcaacttcctgacactgttctatattgtctttgtggcactgtacactgtaccagttctgtatgagaaatatgaggacaaggttgatgcttttggtgagaaggctatgactgaactgaagaagtattatgccattttcgatgagaagtgcctatcgaagattccaaagggcccccttaaggataagaagcactagattggtagtaaggtatttgctatgaatcaacatctacattatgtcactagctgtcacctctttctctgaaggatggtgcttggtcctggtctctagttgatagtatataatctgtatgggcaactttggtgtgactgacagtctgctgaaaactgttgatcttgtttttggtttcagctttcaccatagttgcctggaagcttgaaatatattatgcgctctatcaatgtcatgtgaactttgtcatgtacctttaatattgatttggcgcctttcgcaagtgctaggttagtgaatgaagtgtgcacatttctgttcaaggtaatgatagtatttgatctagtttgat

SEQ ID NO: 33464 - DNA, 1748 bp, Zea mays
  Clone ID: UC-ZMFLMO17122E05_FLI
ctcgtggtgaagaaaggcgggagctggagagcaacgagacaagcacggcggtgtgccgtgtgcgtgcgcacaggcactagagtgagacagctctagaagagagcaagccgccgccgccgccgcatcatcgtcagaagcggccactcctacctctgatcctgatacaaaatccaggccagagggcaggagcctccaaaagagatccactcccccggatggcttcttgcctctgcttccgcagacgccgccgcccaatcattgcctcctctgtccccttcttcctcctcctcgtctccttcctcgcctcggcctcggcctcttccacgacgacgacgaagctgctaggcagcggcaataatgccacgcggcgggtggcgttcagctcggaggagctgcgcgggttgcggagcatcacggcccggcttgcgcggctcagggacgcgtccgtcaagacgatccagagccccgacggcgacgtcatcgactgcgtgccggcgcacctgcagccggcgttcgagcaccccaagctgaggagccagaagccagaggtaggaggagcccgaagagaggccgaggagcagcgctggccgcttctccgacgctggccaggacgaggacgacgacccgttgccgcaggtgtggcggcgctccggcgagtcctgcccggaggggaccataccagtgcggcgaaccacggaggacgacgtgctcagggccaccgcctcttccgccacccggttcgggatgaaggcccgcggtgcggggctcgggttcgcgcggcgcgactccaccggtggcggccacgagcacgcggtggggtacgtgaccggcgggcagttctacggcgccaaggcgagcctgaacgtgtggccggcgcaggtggcgtcgccggcggagttcagcctctcgcagatctgggtcatctccggcgccttcggcaacgacctcaacaccatcgaggccggctggcaggtcagccctcagttgtacggcgacaacagccccaggttcttcacctactggacagacgacgcgtaccaggagacgggctgctacaacctccactgctcgggcttcgtgcagaccagcagccgcgtggccatcggcgccgccatctcgcccgtctcctcctacgccggccgccagttcgacgtcacgcttctcatctggaaggacccgcgccggggccactggtggctgcagctcggctccggcgcgctcgtcggctactggccctccgcgctcttcacgcacctcggctcgcgcgccgacatggtgcagttcgggggcgaggtcgtcaacgcgcgccccgccggcgcgccgcacacgcccacgcagatgggctccggccgcttccccgccgagggatacgcgcgcgccgcatacttccgcaacgtgcagctcgtcgactgggacaacaacctcgtcccggccgccgggctccgcctgctcgccgaccggccgggatgctatgacatcgccggcggcagcggcggcgcgtggggcacctacttctattacggcgggcccggcaggaacgcacggtgcccgtagctttatagtattagctaggaactgaatcgagtgcatgggatgggtgttgtacgtgtgtttcgtacgtgcgcactcaagcacacattagcagaggctgatttctatatattactccaaatgagtctgcgttcactttttttgatctctccatgtgaatatgatgccgttgtgatcatctaactatttgctcattt

SEQ ID NO: 33465 - DNA, 345 bp, Zea mays
  Clone ID: UC-ZMFLMO17122E07_FLI
cggggagcttgtgacgctcgcgttctatgtctttactgggtacaagttccggcctgaggtgcataacccatactttgccattgacgatgaggaagaggaggctgcagctgagacgctaaagttgaatgatgaattcgagctatgaggggttaggaattggaatcgactccatggcagttttaatattggtgttgtatgccccccagcacaggacaagtggcataaactggtatctagtccgtatccttttgtttctccttttgagttggctacacttggtcttactgtaattgggtatggacaagaatcctgtgtgtgttcagcaatacagcttggctttgcctt

SEQ ID NO: 33466 - DNA, 970 bp, Zea mays
  Clone ID: UC-ZMFLMO17122F06_FLI
gccatggacagctggtacgcgtggctgtcgcggacggggctggcgccgtcgctggcgcacgagtacgggcgcctcttcagccggaacaagctggagccccgggacgcgccgcacttcgaccacgacctgctcaagagcatgggcatcgccgtcgccaagcaccgcctcgagatcctcaagctggccaggaagcaggacgccggcgcctcgtcgtccgcggcctcgcggctcgggcgcagggccaccaggtgcctgtcccggtgcgcgcgccggctggcaggaggcggcgcgtggagggccgcgtcgtcgtcggtcaccgtcgtcccgaggatctgcggcggcgaagacgccgtccgcgtcggagcagtgcagcggaagggcactggtagcggcaccaccaagaagatggtgctcatgatcaccgacggcggcgtcgccggaggagggtacggctacggcctcagaggccgtggcggcgcgaggctgtcgtcggcgtcgtcgcagaaggcgagtctgatgtttcatgacgggtaccaagacgaggaggaggagatgggagacgacgaggacgaggacggcggcgccggtgacggcgacatcaagtgggactccatgtttcaggacctcaaacccacgtgaggatgaagttctccgatctccagactccggctgctggagtttgatgttgctgcgtgagtgagtcggtcgtcatggctttgcttgtgggcttctggtgtgagcgaattttaacaactctcctcatgctgtctgtcgttctcccttccctgagaagagaacgtaatgtcgaaaatgtgtattttcctccactggttttgcggtgttaaagcttgagcaagaaccataggtgcctgatcactgcaattgcaagaccatatttaaatgttgtcggggttttttttacttagttagtacagctagatcaacgtgcaaaatagattatgaccgaagg

SEQ ID NO: 33467 - DNA, 1202 bp, Zea mays
  Clone ID: UC-ZMFLMO17122F08_FLI
ggcgtccccgtcccgagtcaccatcgaccctagcaaaaccgcacgcaccctgccagcggccccccaactcccaacccaacccctactccagctagctcgcggcggcggccagcggccatggcgttccggctgagcaacaacctgatcggggtcctcaacttcgtcaccttcctgctctccgtcccgatcctgggcgcgggcatctggctgggccaccgcgccgacggcaccgagtgcgagcgctacctctcggcgcccgtcatcgcgctgggggccttcctcctcgccgtctccctggcgggcctcgtcggcgcctgctgccgcgtcacctggctgctctgggcctacctcctcgccatgttcgtcctcatcctcgtcctcttctgcttcaccgtcttcgccttcgtcgtcaccaacaggggcgccggcgaggccgtctccggccgcggatacaaggagtaccgcctcggggactactccaactggctgcagaagcgcgtcgagaacaccaggaactgggaccggatcaggagctgcctccaggactccaaggtctgcaagagcctgcaggacaagaacgagaccgtcgcccagttcatgagttccagcctctcccccatcgagtctggctgctgcaagccccccaccagctgcggctacacctacgtcggcggcacggactggacgccggtgaccaccaactcgacggacccggactgcaagacctggagcaacgacgcctcggcgctctgctacaactgccagtcgtgcaaggccggcgtggtggccacgttccagcggaactggaagcgcgtcgccatcgtctgcatcgtcttcctcgtcttcatcatcatcgtctactccgtcggctgctgcgccttcaggaacaaccgcagagacaacgcctaccgcggcgggtggaagggcgggtacgcttgatccaccatcgcgtcgtttaggagcggagccatgcacgcgcgctcggtgctctgctgtctgctccctgcccgccactgtcgtcgtacgtacatgtttagtaggctcgatgttagctctgtacaggtgatggagatcgttgttgcggattcttatcgtcttcctggttacattattgttatgatctgatcagcggtaggttttgtatacgctgctcattgattcgtccgcctgctattttcgtatatcgatgcacttgttttacc

SEQ ID NO: 33468 - DNA, 1641 bp, Zea mays
  Clone ID: UC-ZMFLMO17122G11_FLI
ccggctcgcggatgccgtcaagctcaaggatgagatgctcacctctggattcgtcgggccggatcccaaggtctacagccttctcatggctgggttcgtgggtgctggggatggagccaaagccgtggagctgtaccaagaactcaaggacaaggttgggggcgaaccaattctggatggcattgtgtacgggactctcatgaaggcgtacttccttatgggaacgggggaaaaggttatggagtgttacaaagaggtgctgtgtgttgaatcggcggtgaggtttggggccgagagctacaatgaggtggttgatgcgcttgggcagaatgggaggttggaggatgcacttaagctgttcgacagaatgcttgaggaacatgacccaccactgcggattgcagttgatctgagaagcttcagggtgatggttgatgcctactgtgctgctgggagatttgaagatgcagttgcaatgttcagaagaatgggggaatggaagctggtgcctgatgtggcatcctataataatttgattcggcacctgcagattaaccagctgatagataaggcggaggtgctctacaatgagatgtgtgagagtggtgttggtgcggataaggagacatatttactgctcatggaagcatgcttcagtgttgatcgcatcgatgatggtatctcttactttgacaaaatggacgaattggagctgaagcctgatgcaactgcatatcataaacttattgatggcctggtgggtttcagtatggtcgacaaggctcaggaatacttcaatcagatgaaggagaagggagttaacccaagcatctcaagctacgagacattgctgaaggcatatattgctgctgaccggttggatgatgcagtcaatgttgcaaaaggtattcttttgaatgagaaggttctgttcagctatggaatgagggagcttttagaaggagcattacgtggagacgggagggaaaatgacatcgccaagttatatgaggatgtggagagggaaaaggctgaagcggaagcccgggctgcagaagagaaggcgagggcagaggctcttgccagggaagagagggagaggaggagagcagagattgctgctaaggatgaagccgcagctaaagccagtgccgctgccattgaagctatcctagcccataaaaggaagacagagaatgaaggaggagcgcctgctcctgatgcaaacaccctggatggtggctttctcagtaagctaggctttaaaacagccggcgaaggggcacttcaaggcaatccaacagaaagtggagacgatggagaaggggcacttcatggcaatccaacagaaagtggagacgatggagagggggcacttcaaggcaatccaacggaaagaaatggaggcaatgtgtagggatatctgtgatgaccacacaaaattatgtccacaatttgctcatcacattcaagtcataagctatagtttgtcagtttatatatcaatataatgagcacgattagtgatttccgcaatgccaaaaattagcttgcttctggctgagcattgtgttactgcagtggatgcatacaaacataattttgatgtgtaaccaataccattggaaaccattttccatc

SEQ ID NO: 33469 - DNA, 3364 bp, Zea mays
  Clone ID: UC-ZMFLMO17122H04_FLI
cgaagtattgccatgcatggctgcgaaacatgacatgtgggaatccagattgtctctatttgcatgatgtaggcagtcaggaggatagttttactaaagatgagatcatctcagcatatacaaggactagagtccctcagatggcatctggtgtttcgcaaagacgcacaggcactgtgttgcctcctccaggagatgatttctcttacagtgcggtggtttcagccaagcatacatttaagaatggaacacttaataccaccagtcagcccagactttcacctccaaacagtagttctgggaggtccacgcttccatcagctgcctcatgggggcagcgtgatttgaatgccaggacaacagctactggagcgacatcgtcacaatctcatacaaaaccaaaatcagaatcacaaagtaatccattttcaagttcttcagtattttcctgtacaaaaacaccctcttcatggaatgatgatacaagtacagcagcaaaaatatctgaaggacagcaactgtcagaaaaagagtctagaaccttgcagccgtataagcctggtatttcaaaggaaacacaagctttatcatcactggagtcatcactggacatagacttctcaacaataccttcagcttggaatgacgatgacattgtagtaccagatgtgatgccaaaaggaagtgatgaaaatcaagttgcaaataaaaatggtgagctaacccatccagcatccaagtcactggttttatctaagaaagacataaaaatgaacattaccagcaaaactccttcagattttgtatcaagtccagcaatatctaaatcagatgtaagtactagtgatggtgaccactcactcaccaatattactcctaaatgccttgcttcaaatgctgtagaatgccaatctagtcatactgctgtggagaaaatgttggaggatattggatccaaggacactgacatggagaagctatctgctcagatatcttcagtaacattaggtggcaacgacgagattcagagtatggcaggaaatcaacaaccagatgtaatgccatgcacatctgttgatgtgctcatggatcagaattttggcagagacctagctcatcccaatcctgacgagctcttattgccttctgaaaataaggatagtattgtttcttgtcaatatagttctgataagcgtcttgattggagtttggagatgcaaaattgtagcgttactcctttaaatgatagaatggactctgcactgctcactgacaaaattcatagtagacagctggatggttcagagcaatcatcatattcatcatttgttgaatttcctagtacagtggatacctcattgtggaatgatacagaaaataacgctgcattgacgattgacaatataacttcttcacagatgcagccagggttttcttcaactgataacacttatgccttgctaaatggaggtcaagatgggctaggtactgtatatacacatgataatgtttctgtatatacacatggcaatgtttctggacatcctggaatgggaagtcatcaccatagagcaatgggttcattaagaaacaatagtataggaagttttgacaagaccataagcgtaaataagtatgaaagaagaataatttctgatacgttgtcagagtttaatccatgggatgattcatattcgactgctaacaattttgctaggatgcttagggaatctaaaaataatgatgtccattgcattgcgccttcatggaaatcaggaaccgggatcaaagagtccagattttcatttgctagacaggataaccaaggaaacttgtttgattcatctctcagaaactgtggtactggtactgagcagaatttcagtttgctaccccagaattctcgaggaaatatttaccagaatggccttgcattccaatctctagagaatgaattttcaaacaataactctcctggtgtattagatatggcaactactggtacatcgatgtctaaaatatctgcccccccaggattttcggcaccaacaagagtaccccctcctggattttctactgcatttccatcccaggatagtttgaaccccactcctgtgtttccttctggaattttgtgccatggcgggtctatcccccctcctagattctcttcattttcttctggaatttcaactcaggaagtgtctaagcctcctactagaccgccttctccattttcttctagattttcatcacaggacggtcttgacccctcttctagattccctttttcttctggattttcatcacatgatgggtctaatcagtcgtatggctcaacgaacccagaaaatcttctccggggtactgttcagggtggcaacagtaatcattatcaatctcagtttggaaggcactcaagtgacatggagtttgatgatcctgctatattagccatgggcaaagggctgatgcctggaattggcgattcagggctggagatgaaaaatactcctgcttttcaagcacagttgcaaccagcaagtagtgatccaagatttcagttacatgtacagccaaatgtgcagtctcgtcaaaacatgagattcacagaccctatgcaagatggtttgaaccatatgaacgataattacctggcatccagatttttagctcagaaccagggtcctctatctccttatgtgcagattccgcaacaacccagaaactcgcaggttataaatggtcactgggacgggtggagtgatttgagacaagggaataacgctcctatgtcagacatgtccaggatattatatccaagtgaagtgaacaagttgcatatgctgggttcaaatgatgtccataacagagcctttggaatgtgatcgtctcctgggataatgtgcgactttgagctgacatgttcaacttggggcgttttgtgcaagtaactggttgcacaacacatagtatacctgaggtggttaatggtgttgtgctcatgagctggcacacgactatttattgctgttggagttgaccaaaatgaaccttagttttggtccatccatttggaattaccaggttcattctcgtctatgatttgtgaagcttgaatgaaaagaaagattacgtgcctgagaagaacaaggcagctgaagttgaaatagatagagatatgtctattatgggatgtggtgtgacttgcgagcgaaagagatgaagaagattaggtgggcttggcttgatggcagcttgttttttcttgtgtcttgtacatgatgatattggtcggtggttgtatatgacttgtgatcgacggtggctgcattaacctgtagtggttgcccttgctccttcc

SEQ ID NO: 33470 - DNA, 2122 bp, Zea mays
  Clone ID: UC-ZMFLMO17122H07_FLI
atttattaattaagggagagttctggacaatactactgtccttcaatgagtgacattttggttttgtcttaagtaaaagcattttatgtttgaccaagtttatatagaagattatcaatatttatagcaccaaatagatttactatgaaaatatatttcatgatgaatctaatgattttatgactggcgtcatggtgccagggccagcgtggctgaacgtcaagccaccgtggcgggtgctgcacaaggcttcggtttgctccggtttcttgagattagttgttggcttttgttaggggatttggttgttgcatcttaggtcaagtctgttaggctttggggtacaagtacgtggagtattcatttgaaaagaattaagcaaggctgcagtgccttccatctccgtcccttgctcgcaagcacggctccaccacatgatcgggggttcaagcttgatcaccgatcaccaactgctacctcctgcgctatctgctataccctggctcctatcaaatgatatttatttggcatacattttagtcaaatttaggttgcttgacttaggacaaaaccaaaatgacactcttgcgggccacaggtactatcttctagttgctacctttttttttgatctgtgcacctgttgtttgtgggtgggtgggttagagcatctcctagagtacccaataatttcttccccaaaccattgagttttccaagctgccaaaaagtattgggaggatcaaagaagggtttctcgaatagtttccaaaaaccactcctggaaaataaaaaaaattgactcatggggaactttcttggcgatgcgtggatttttttttgtgggagattgcgcgtgcatccaggccgtggccatgattttccagaggttaatcatgattttaccactgaagagaagtagtatattccttaaagcatattagtattagaaaaaaactagtacatatctatccttgtgccttgatggctcccttttgccatctccacatctcttcgttccatttccccatgtccagttctcgcatctcttctgtgtatatgactatatgagcccatcagccgccggtgtgaggaatggcacggccgcagggttgcgccaaagggaaggatgcatggtgccacgtctgggacggcttttgggaggacgaagctccgctatgcgatgcggccaggtggagcggatccggcatggtgaggagtgggagcatggccgggtggaacagctttgtagcttgcacgatggtgccacatgattgggagctgtgattaggagttgttgtagatgtgttttttccaatcttgcgaaaaattctagataggggtgttttgggaactcttggagatgctcatcctgatatgaaaaggctgtcaaataattggtgttttgttttgtgtatctcatttcttagaaggatggcaactaccgtgttgatgctcatagtaccccaaccatgttgaattccctcatgtacaagctttgctattacagattcgtcgaaactgatggtaagggctttgatagagtgagaagatatgaaatagggaagaaacattttaaacttacgcattttgaggaggttttcacaactcaccattggctggttcggatttacaaactgaaacctcagaagaacagagtcagagggaaacttaaatttaaatctagttcaaaaacaagttttatgcgtaaaactggtggaaagaagaacccatggaaatagagaccacaaaggcagggtgctggagtcactagtcagcacagttactatcctgagaaaaccatgaattcatcaaaaggagttagattaaaagcatatcattggtgtgttctttgttattgtcatggagcagattataggggtgcttcatgtttttttttgacatttgatctccttaatggcattataggggtctgatgaaagttgtggtaggttctcgagtgaggctttatccccattttaaacaaaatggactttgtttataggaacctgactgagcgcctggccgtttggaaacatctttaaaggttgtttggtttgaagaatatggtagcctatcttttcttttaggctaccttttggaatgaaagattttttttcct

SEQ ID NO: 33471 - DNA, 1111 bp, Zea mays
  Clone ID: UC-ZMFLMO17122H09_FLI
gtcaccgccggccagttcgccatcctcttcaagaccacggcgtacagcgggccgatcaacttcaccaacggaggggacatcgctgtgtcttcggtggttcaggtggtcggcctcgtcctctgcctgcacgccgctgccaagatctcccaccgagctcagaacatcgctgcgctggctagccggtggcacgcgctggcgacgtgctctaccgactccacctacgtgaccaccccgaacagttccgggaacctcgcgcctttccccgcgcacctgttcctgagagactactcggggagtgacctggagtccctggacagcgcgtcggttcagggcagctcccacggcacggcccagctggcttcctacatgtcctcgtaccacaagagggagtcgctagtgctgtacctgctggccaacccaggcggcatcacgatatttggctggatcgtcgaccgggcgttcctgaacaccatcctgatgctcgagctgacccttgtgctcttcgtgcttagcaagaccgttgtgatcccggccaagacactggtgcacagttacatcggctacccatgattacgaccgttgcgaatctgctggcattgaagcgttcaggttcaggttcagttaggcgatgggatttgatgacaggcaggttgccggggtttgcacgctacggtgaatgaaactggtaggaatggtgggtctccctcaagcgcagatcatatgcgctggcaatccaagcatgccgcaggttgaaggcagactgagggctagggtcgtgacgtgtacagtttttttggggaaaaaaatctctacagccggttgcacaaagcggtcctgcaggttgcaaagcaggttgcttcagatttacacttctgcaccaatcaatgatcagcgattgtttttctctgcagccagttgaagagaatttctcccggtacatatactactaatactataaaccaatatatgtattattgtacgtatacacgcacgcaatgtaaatacactcctatactataaaccaatatatgatgtaaaaaatattttttctaccctttttaagtcctagaacggtcatttaaatttaaatatatagtattaagttacccgt

SEQ ID NO: 33472 - DNA, 1309 bp, Zea mays
  Clone ID: UC-ZMFLMO17123F01_FLI
gttgttatcggactgggaagcagcggcggtacaaagtgtgggagagaaaggagaagagacttgatgtcctcgcagtttgtccaatagatctcctcgccgcctcacccgtctcctcctccgcagcttccccgcgatcccgaccatggagggcgacggtaccaaccttgatgcggcgatagagtcgctcctgaatgtcgagaagcagatgaggctggccggagatgtcgccggcactcggaaggccgtcatcgacatcgtcgagctctgctacaaggccggcgcgtggaagacgctaaacgaccagatcgttctcctatctaagaggagaggccagcttaagcaggctattactgctatggttcagaaagcaatggagtacattgatttgacaccaggcattgacacaagcatcgagctaataaaaacactgagcagtgtctctgctggcaaaatctatgttgagatagagagagcaagattgatcaaaaggcttgcaaaaattaaagaggagcagggacaaatttacgaggctgctgatttgatgcaagaagttgctgttgaaacatttggctctatggcaaagacggagaaaattgctttcattcttgagcaggtccggctatgcctggatcggcaagattttgtcagagcacaaattttatccaggaaaatcagtactagagtatttgacgcagatccatcaaaggaaaaaaagaaaccaaaggaaggtgacagtattgttcaggatgctcctgcagatattccttcccttctagaattgaagcgcgtctactacgaactgatgattcgttattactctcacaacaatgattacttggaaatctgccgttgttacaaggctatttatgatattccagcaataaaagaggatccaacaaagtggataccgattcttaggaagatctgttggtacttggtgctagcacctcatgatcctatgcaatcaagccttctcaatgctacactagaggataaaaacctttcagaaatcccaaatttcaggttattactgaagcagctggtcaccatggaggtgatacagtggacaagtctgtgggaattcttcaaggaggaatatgagaaggagaaggatcttcttgggggagctttgggtgccaaagcttcagaagatttgaggctgaggattatcgaacatgtattggttactttgtgtttggtctagttattttgctctatgcttgtccattgaatctgatctcttgctctcttcagaatatcttggttgtatccaagtactatgcaagggttaccctcgagaggcttgctg

SEQ ID NO: 33473 - DNA, 1680 bp, Zea mays
  Clone ID: UC-ZMFLMO17123G05_FLI
gcctgaaccagcagcagctcatggaccagctgcccaagtccatctgcaagagcatctgcgagcacctcttcgtgccggtcgtcaaggacgtctacctcttcaggggggtctcaagagaaatgctcctgtccctggtcaccaagatgaaaccggagtacatcccgcccaaggaggacgtgatagtgcagaacgaggccccggacgacgtgtacgtcgtcgtctccggcgaggtggaggtcatactgttcgacggcatctacgagcaggtgcaggccacgctgggggcgcgggacatcttcggcgaggtgagcgcgctgagcgaccgggcgcaggccttcacgttccggacgaggactctcagccagctgctgcggctgaagcaggctacgctcaaggaggccatgcagagcaggcccgaagacagcgtcgtcgtcatcaagaacttcctcaagcatcaggtcgagatgcatggcatgaaggtcgaggacttgctgggagacaacaccggcgagcacgacgacgacgcgaatgtgctgacggtcgccgcgatgggaaacagcggcttactcgaggacctcctcagggcaggcaaggacgccgacgtcggtgacgccaagggcagaacagcattgcacatcgcggcgtccaaggggtacgaggactgcgtgctggtgctactcaagcacgcgtgcaatgtgaacatcagggacgcgcagggcaacacggcgatgtggaacgccatcgcggcggggcaccacaagaccttcaacctcctgtaccaattcgggcgcgcgtcgaacccgcgcgccggcggagacgtgatgtgcctcgcggcgcgccgcggccacctcggcgcgctccaggagctcctcaagctcggcctggacgtggactcggaggaccacgacggcgccaccgcgctgcgcgtcgcgatggccgagggccacgcggacgcggccaggttcctgatcttgaacggggccagcgtggacaaggcgagcctcgacgacgacgacggctcaggttcaggctccggctctggcgccgcgcggctagcaatgtcgcccaccgagctgcgcgagctgctgcagaagcgggagctcggccactcgataacgatccacgactcgccagcggtggtcccgaacggcggctcgtcggggcacagccgtccaggcagattacagagcacaagttcggacagccagcgctggcctcgggtgagcgtatacaagggccaccctttcctcagaaaccgcacctctgaagctggcaagctgatcaacctaccaggcaccatggaagaattcaaagtcatcgtcggtgagaaactgaaagttgacgcggagaaggcgttgatcgtgagcgacgaaggagcggagatcgactcgatcgacgtgatccgggacaacgacaagctgttcatggtcaccgaagaagatctgaggcggctggcatcaatggactggctgtcgtgcgagtgatttggttcctcccaagataattggaggctaaatatagaatacagtacaagagtattgtgcttctactatgtctaggattgatagattgatgacaactactgagtggcatgagctctatccagcgactaatttgcatgcaatgtgtaccatgagatcggaccactgtccgttattaatgcagggtcattcttcttgt

SEQ ID NO: 33474 - DNA, 1558 bp, Zea mays
  Clone ID: UC-ZMFLMO17123G06_FLI
tgcagatctttgtgaaaaccctgaccggcaagactatcaccctcgaggtggagtcctctgacaccattgacaacgtcaaggccaagatccaggacaaggagggcatccctccagaccagcagcggctcatctttgctgggaagcagcttgaggacgggcgcacgcttgccgactacaacatccagaaggagagcaccctccacttggtgctgcgcctcaggggaggcatgcagatcttcgtgaagaccctgaccggcaagactatcaccctcgaggtggagtcttcagacaccatcgacaacgtcaaggccaagatccaggacaaggagggcattcccccagaccagcagcggctcatctttgctggaaagcagcttgaggacgggcgcacgcttgccgactacaacatccagaaggagagcaccctccacttggtgctgcgcctcaggggaggcatgcagatcttcgtgaagaccctgaccggcaagactatcaccctcgaggtggagtcttcagacaccatcgacaatgtcaaggccaagatccaggacaaggagggcatcccaccggaccagcagcgtttgatcttcgctggcaagcagctggaggatggccgcacccttgcggattacaacatccagaaggagagcaccctccacctggtgctccgtctcaggggtggtatgcagatctttgtgaagacactcactggcaagacaatcacccttgaggtggagtcttcggataccattgacaatgtcaaggccaagatccaggacaaggagggcatcccacccgaccagcagcgcctcatcttcgccggcaagcagctggaggatggccgcaccctggcggattacaacatccagaaggagagcactctccacctggtgctccgcctcaggggtggcatgcagatttttgtgaagacattgactggcaagaccatcaccttggaggtggagagctctgacaccattgacaatgtgaaggccaagatccaggacaaggagggcattcccccagaccagcagcgtctgatctttgcgggcaagcagctggaggatggccgcactctcgcggactacaacatccagaaggagagcacccttcaccttgttctccgcctcagaggtggtatgcagatctttgtaaagaccctgactggaaaaaccataaccctggaggttgagagctcggacaccatcgacaatgtgaaggcgaagatccaggacaaggagggcatccccccggaccagcagcgtctgatcttcgccggcaaacagctggaggatggccgcaccctagcagactacaacatccaaaaggagagcaccctccaccttgtgctccgtctccgtggtggtcagtaagtcatgggtcgtttaagctgccgatgtgcctgcgtcgtctggtgccctctctccatatggaggttgtcaaagtatctgctgttcgtgtcatgagtcgtgtcagtgttggtttaataatggaccggttgtgttgtgtgtgcgtactacccagaactatgacaaatcatgaataagtttgatgtttg

SEQ ID NO: 33475 - DNA, 1167 bp, Zea mays
  Clone ID: UC-ZMFLMO17123H02_FLI
ctttgcgcagaatacgagaagtggagttgaagcgtgactatgcatttattgagttcagtgatcatcgcgatgctgatgaggctcgataccagctagatggcagggatgttgatgggagtcgtattgttgttgagtttgctaaaggggtcccacgtggttcaggtggctcacgtgaatatatggggagaggccctccaccaggtacaggtcgttgtttcaactgtggagttgatggtcactgggcaagagactgtaaagctggtgactggaaaaacaaatgctaccgttgtggagaaaggggccatatagaaagaaattgccagaacagtcctaggagtctcaggcgagagagaagttactcacggtccccatctccccgccgtggacggggccgcagtcgaagctatagcaggagcaggagccggagtcggagctatagtcgatcaagatccctgtctagatctcctaggggaggtcgtcgtgaccgtgacgataggagatcaaggagtcctagctatagcaggagccccatgcgatctgcctcgccaccagtaaaggaaaaggagcgcagccccgcacctgatggaagcaggagcccaaggagtcgcagcccccaggatcaggtgatgagcccaccaccaaaggataatggcgaaggcaatggctcagaccgtggcggcagccccagagggagggagaacagcaggagctgcagccgcagccgcagtccatctggtagtaaccgcagccctgcggccaatggacgtagccggagtcctggaggtgagcggagcccgagtcctggaggtgagcggagcccgagtcctagaggtgagcggagcccgagtcctagggctgaccgtagcccaagccccaatggcaatggtaacaatgatgctgctgctgatgtcgatgctgatgctgctgcccgcagtggctcccccactggaagcaagtcaccctgagcgctggcggtcccagattgtggtggtgcttctcaatgcaatgggcaatcgtattgctattttttgctaccatatcgaagacacaatagctacatcattttcttctctgaaacaaggactttattttgcttgctttgagatatgactcttaccctctcatggataatatatatatgatatgatgccactggtgcttgcttgc

SEQ ID NO: 33476 - DNA, 2177 bp, Zea mays
  Clone ID: UC-ZMFLMO17125B12_FLI
gaaataataacaggaaaagacgggcagttgaaacacaagaaaagccaaggaggctttctggcagaactgtggaaacagttaattcattaccattggttgatggagcagtagctcaagtacgagagtggtcttttggtaatgttccaaagaaggacgcttctcgttttgtacgagcggtcaaaaaatttgggaatgcaacccagattggattaattgtggatgatgttggtggtgtacttgcgaaggtaccgcatgaagcgcagatagaactatttgatttgctggttgatggttgtcaggaagcagttaaggagaatacagacattaagggcacagttttggattttttcggcgtagctgtaaaggcctatgaattgctagctcgtgttgaagagcttcagttcttggcaaagcgaattgcacgttacaaagatccaatcaagcagtaccgcatccagctaccttataaaaagcctcagtggtcagcaagctgtggatggactgaaactgatgacgctagattgatggttggaattcattggtatggctacgggaattgggagaaaataaggttggatccaaagcttggcctgacaacaaaaattgcaccagcaacacttggagaaagggagacatttttaccacgtgctcccaacttggataaccgcgctagtgctctcctgcaaaaggagtatgctaagtttagcggtaagagcttaaaagtcaaaggaaacacccgccagacagtcaataacgacagtaatagtggagttcgatcaatgaggggccggcaaaaggatgtaccagaaaaagatgataataagccgaacaaagatgacattcagaagcgtagggtaatagtggaagctgaagcaagagaagaaggtgaaatttctgaatcggaggcagagaccaggtatcgtcaggacaaagaggagaagtggcttgaatggtgctctgaagttttagatgaggagcaggaaactttgaagcgcctggataggctgcagaatacaagtgtaaacctcccaaaggaaaaggttctttcaaggattcgcaagtatctcctgataattggggacaaaattggagaagttgtccggcaacacagtgaatcttataggcaatcccgcatggtcatgaggttatggaattatgttgccaccttttcaaacatgtctggggagcaactgcatgatctctatttgaaacttagtcaagaccaactggaaggtggagttggcccatctcatggtggcaatttcacatccattcctcccaataagggaggtaactcaaatcaacttcatccttcgagaaaccaaaggccaactaggtctctccagtacaattctgagtctttccataatgagagctctggaagttctgaagcctggaagcgtcgacggagagctgacacagataatcaatttgacacccagcctttgtgtcaacctccaattatgacaaatggaaataggttgcaggaatctagtagttctgcaggtattcttggttggggtccagttgaaattagacggtatggtaatgagaggccaaaacgtgctgttcatcctagtcatttccctactgggcatggacctttgctgtagctgaaggaagtagatgatgcgaacaaccttgtccattttggcataaccgttcccagtgaatttcagcttccatatagttataaatggtggatctccgtaggaattgaaattctttttccaaaacaaaaaggaataaagagcaacctcacctggatcacagttttgaattatatgccttaaaaggtaatgccaggactctagaggcgacttatggaattgttaacagctacactgaatatccttctgacaccatcacagcaacacatacatggtggcttgtgaactgccaagaggatcaatcgaggaagttctgcctgttcagttttgtgatctctcaacaatgatctatagttaaatctcaatacataaattatgctttacattgtaatatattgaaatatggttccgttatgctccctccctctcgatgtgttttgtgccgtttttctaccgtgttgatgtaatagatgaaagaaatgcatgttctcattttgaggcaacaaaaagttgcagccgggagcataatagtgaaatgcgatggaattatcggatacttatcgattc

SEQ ID NO: 33477 - DNA, 1426 bp, Zea mays
  Clone ID: UC-ZMFLMO17125C04_FLI
ctttctactgaagtcgtcctcttcttcccgtcgcttcgccgtgccgcacctgcgaggagaggagacttcgccgcgaagctgaccatgatctcgccggagaggagctcgtcacagagccagcggtcggcggcggcgggggcgccgttcctgtcgatctccgtcacggatcccgtaaagatgggtaccggcgtgcagtcctacatctcctaccgcgtcatcaccaagaccaacctccctgaatttgagggaccagagaaaattgttattcggcgctatagtgattttgaatggttgcatgatcggcttgctgagaggtacaaaggcatttttataccccctcttccggagaagaatgctgttgagaaattccggtttagcaaggagttcattgaattgcggcgtcaagctctggatttattcgttaacaggatagcttcacaccctgaactcaagcaaagtgatgtcttgaggacatttttgcaagcagatgaagagataatggatagggcaagatcttatgagactggtatttttaagaaaccggcagatttcatacagatgtttaaggatgtgcagtcaaaagtcagtgatgttgttctgggaaaagaaaagcctgtggaggaatctactcctgaatatgagaagcttaaaaattacatatttgagctagaaaatcatttagcagaggcccaaaaacaagcataccgtcttgtgaaaagacacagagaacttggtcaatctttggcggactttggaaaggcgattaagcatttaggtgcttgtgaaggagatttgatggaaaaggtgttttctgaagttggttcgaagtcagagatgttgtcaataaagctgcaaagagaggcagacaaccttctctttaactttgaagaacccttgaaagattatgtgcgtgctgtacaatctataaaagccactatgcttgatcgagccaatgctttcaggcagcacttcgatttggatcaggagaggaagtataaagagcttaatcttgaaaaattgaagttcatgaaccctgaaaagtatgccgaagcagaatctgagtttcgagagttgaaagcagacagtgaggaggctactaagaagtttgaacacatagttagactaatgaatgaagagcttgctcgtttccaggagcaaaagacagctgatattggactcgcattccatgaatttgccaagggtcaggctaagctagctaaagacattgcggatgcatggcgcagcgtcctcccaaagctcgaagcttgttccacatcataaatgtgatttgtgtttcctcatgatgtttgggaatgggatagggggttggcagctggtgagtttaggctgttttttcccagcctgttttgacactgattactgtatacttgaactgcggtttggaaatgctccagctgttaggttc

SEQ ID NO: 33478 - DNA, 947 bp, Zea mays
  Clone ID: UC-ZMFLMO17125C10_FLI
gagatctcgatccgcacacctcacgcctctcttcctctcgccccaaggacaacgaaaacatcaaacaagagaaccaaaggaaacagagcaagagcatcgctctcgaagcaaaacgcgcaccacgccgtcgccggccggccacttcgcacgtacgtaggacgcgcacgcaccggtgcatatatggggctcctgaaccagctgtgggacgacacggtggccgggccgcgcccggactccggcctcggcaagctccgcaagtacgcctccttctccccctcgtcgtcgtcgtcggcggcggtggcggcggcggcggcggcgggctccgcgccgcctccgggcgccgtgacgcggagcttgaccatgctgcggcggccggcggcgctgtccgtcgtcacgtcgccccgcagcgagtccagctccgcgccgtcgtccccgtcgcccgcaagcggcgctccggattcgcccttcggcgcagctgcagcgacgacgcccaggggagagggctggacgaagaagctgcgcgggaaagccaggatgggcggcggcggcggtgacgacgcccccggcacgccgaggagccccaccgtgtacgactgggtggtgatcagttcgctggacctctgaagcccaagccaagacgagaactgcacaaggaaacccaccaccaccatcaacacagctagcgaactgaaggagggagggggcagaggggccatggccatgtaatgtaacgaccaatctctttcagagcttctggtgacgtgtccagttactatatacatacatacgttaacggtgtactatgtgtcttgttgtaaatgtcacccctgcgaggtgttgccgattttgtaagctactacgtactactacgctcggcatgtcaccgtgtgcaagtgcaacacaagtttgtaaaaatgactagctagtagtagcaatgctgttgctgt

SEQ ID NO: 33479 - DNA, 2866 bp, Zea mays
  Clone ID: UC-ZMFLMO17125D10_FLI
cagacgtccctgcacatggcggtttttaggtgagtcctctcctccctccctccccacgcgttcccatcccctcccctctatgctcggccgaccagcggccatggtgcctgcacggcggcctggcgtggtcgaccagccccccctcgccgatcttggtcctacggctcacccccctgctcacccccatgcctcgatgaaatcccctagcccaggcgcgcccctggctaccttctccaacggcgcgaccgctcgttcccttccgtgagccaaccatcgctggacgtcggtcttcttcctcggcgagcagccttctctgcccctgccgaacagttcctctcctcccggcgaagcccctcgcgtgtgcctccccatccctcatggccatggatgccctcccctgcagcgcagctgcaggcccctgcacaccgcgtggatagccggcggtgccgagcccctgcgtttctgctccggcgagcccgcctgggtcggctcggcagtagccagttcacccctgctccctgtccctgtgcgcggccggtggcctgctgtcgtcgcggcccgcagcgcacagcgtgcccggcgccctggcgtgcaggccccacgcgcttggccccagcctcgcccccgccccagccccatggtcgctcctcacggcctacgagctcgcccctggccacaggcagcagggcgcccgcgcatagcccaagcagcccttgctgaccgtcccctccagcgcgtggtgctcctgccagccggcgggcgtagcaagcccccgtccctccgagcgtgaagatcaggccgaactagccccggcagtccccatggcaacctatgttcctgtgttcgtgggcatatgcagagaggaggaataaatgccacgctcgatcccacctctttccaattctccgtggctaagttttgtgtggcctagtgtgtgacttgtttgcaaccaataggaatccgccacatcactttaaatccgtgaatcgctaattacatgttagctcttgcgttataaatatgttttgttttgttccggttgcgttagaattgtaacgacgttgcccacaacttttagttgattaattaattgttggtttgttcgagggttattaaaataacaatttgattagaacgagtctataattttaacttgtgcttttataaatataaatgttaattagcttgattattactagcttaaatacttttcattaattatttgtttgttgttcgcgtgatttgcgcgtcatcgtgctgttcgcgcgtgtagtcgcgttggctcgcgcgtatcgtgcgctatcacgcgtgttggttcgcatgtcgtccgcgcgctgtttcgcacagtatcgcgtgtcgtcgtgcgtcattcgcgtgagtcgcgcgttgttcacgcgcgccgttcgcacgtgttgctctcatcgtcgtcacgtctgtttcgcgcgtgtcacgcgtgctgtttcgcgtatcgttcgcgcgtatcgcgcgtgctatttcgcgtatcgttcgcgcgtgtcgcgcgtgctgtctcgcatgtcgatcgcgtgggtcgcgcgatgtctgctcatgataataaattgtttttgcttataatcattcatgttaataacattaatttatccggtcacatattctaattaatttatttaatggttgctcgactaatgcttattagattagtattaaatatatatttgttaacttacgcctttataagtaaacattaacatggttaatattaacttaaatatttttttatttatttgatacttgcttgtttagtttgaacacgacatctgattagtttttgcctgcctgtcgcttgggctgttcagcatgcggtgacaatgctgtttcgcgtgtcattcgcgtgctgcgtgtacgtcgtcattcgttcgtgccacgcgtatggttcgcgttttgtcgcatgctgttcgcgcgcgttgtcacgcgtcagttgcacatggtcacgtgttgtcgtgcgcgctgtccgtgtgctccttcacgtgtgtcgcgcacgttgttcacgcgtgttgtgcgcggcgtcgcgctgttcacgcggagttcgtgtatgtcgcacgtgctgtttcgcgtgccgcgcgctgtccgcgctcgatattaaaccgtttgattataatcactgatgtcaattaattaactactaggtgagtgcccatgcgttgcgacagaggtttaatattttatgaaatatataaacggaacgacaaatatcactatgatatgtaaatccgtgtgttaaacattatcaatacgagacattattttaaagagtcaatttagaattttgtaatgatagacaaatgtgtcgacaaccatacactaatctaatccttttagcgatatacagaacggaggaaaattcgatcgagcatctatacaagaaaacatttgtctctcccgtgctcatgcgtgcatgaccgtggtgcccccgcgaacgcggcgcagggaaaaaacgtgaattgtactatgctcgtagcagcgcatgaaaacacagcgcagagagttttggcatcctcggtagctccgggtcctagaaatcgacatggtagaggctgtatcgcgagtagtagcccgccagcagctcaaacacgtccaggaacgaccagacgaagtaccccttcacgttggctccgttcctgcaggaagcacacacaggatggatcatgtgttctacctgccttcagttaattttatatctcgtagtacctgagtacagcgagtgcgctgcccatgtaggcactcaagtactcggctctctcgtgttttgcttaaaaggtcttttttcagaattaatttgtttatagtattgtgcccctgcgttgcgacagcgcacaaattatttgat

SEQ ID NO: 33480 - DNA, 943 bp, Zea mays
  Clone ID: UC-ZMFLMO17125D12_FLI
gtggcggcagcgccaccaccagctccacccgatgctcgtactcaagaaatgatcaatgaaaagcttaagaaagctgaagagcttggggaacaaggcatggttgatgaagctcagaaagctttggaagaggcagaagctctgaaaaagctggcgcgacgtccggagccaccttcagacccttctaaatatactgccgctgatgtttggattaccgatcaaaagttgcgcctctgtgatatatgtggagcatttctgagtgtatatgacaatgatcgacgtcttgctgaccattttggagggaaactgcatctaggctacatgctgattcgtgacaaacagaaagaacttcaggagcagagaaacaaaaggaggacaggcaaaactgaagatgataggcgatctagagagcagagcaaggatcgaaacggcccgccgtccagggatagagattcagaaaggagagacagggttgagtctcgagatggaagaagagattatgatagggaacgcgataggcgtcacgatagggaccgtcgccatgaccgcgaccgggatagggattatgaccgctcccgcggatatgactcaaggagaagagagcgttcacgctccagggagcgcagcaggcgccatgagagatactaaatgttactccatggctgacagattttggattgctggcgtctgttctggtttgtgttgtgctttgtgtcttatcttccgaagtttcctgttcctgctcgagaaatccgaaagccaatctgcgttctgcatcatgtcatgtcctagtgtcgtactgtttagttatatgccgagaacatctctttcatcaaatgaatatttggaaacaccaacgcacttgacgctaaatgggaatgaagtgtggagtatttaaacgcctctgaaatcaaatgaaagttgtacttgtacgaatctcttccac

SEQ ID NO: 33481 - DNA, 1914 bp, Zea mays
  Clone ID: UC-ZMFLMO17125G07_FLI
ggccaataccaaatgggagcattaacatgaattctgttagaaatacaggtgatgcgagtcccaggatagcaggtcttattggatatgatcgaatgccaaacccatttactccgcccaatggcagcatactatatagagttggtgggcatgatgttcctgcagctatggagaacactagtgcttttggtcctaggtctaatccaactgctgctcagtatgttcagccttttattgctcctgaatcaatccagcatcaacctggagttcccttgagggaggtttatcctgaaagagcataccctgaacccatgccgtcatcatatgctgatggcaaagtagctgtttctgcattgcccctcaccgaccaattattcaggttggatataaacacaatgaagaaacttgaaggacaagatgatgggaactctactcgaaatgtgaatgaaacaactcttttgcatgctgtggatgaaccaagtaccttaccccaccatgttggatctgtacatgaagtcgatcctaagcaggagaagctaaccgaaaaagaaagcaggcaaaagcaacatgaagctggggctacagcactgcaggaatgtgaggatatttcagaggatatgttgaatttccttcctgaattaattgcctctgttaaaaaggtaacactggaagatgctgctgagacacaaatagcccaatcagatgctaatgctgctgtttcacctgttcctgatgatgacgataatggaaagaagctggatgaggcaacagctggtaatacaaatgcaaatcaggaccttgatttgcaaggaagccttgatcggcagaagagtttcaagattgagtctacaactgctgaagctgaagctttgtcgaaaggactacagactataaaaaatgatgatttagaggaaattagagagctgggttcaggtacttatggggcggtctatcatggtaaatggaggggatgcgatgttgctattaaaagaataaaagcaagttgctttgctggaagaccatctgaaagagagcgtttgatcacggatttctggaaagaagctctgatcctaagctcacttcatcatccaaatgtggttgcattttatggtgtagttcgtgatggtccagatggaagcttagcaactgttactgagtttatggttaatgggtctctcaaacagttcctgaggaaaaaagacaggacaatagatcgccggaagagagtaatattagccatggatgctgcatttggcatggaatatttgcacgggaagaatatagtccattttgacctgaagtgtgagaatctactggtgaacatgagggatccacagcgaccaatctgcaagatcggtgatctcgggctatcaaaggttaaacagcatactttggtatctggtggtgttagaggaaccttaccgtggatggcaccagagcttctgagtgggaaaaacaatatggtgtcagagaagattgacgtctattcgtttggaattgtcatgtgggagctgcttactggggaagagccatactctgatatgcgtgctgctgaaattattggggccattgtaaacgattccttacgccctcaaatcccttcatggtgtgatcctgagtggaagggattgatggaaagctgttggtccagtgatccagcggagagaccgtccttcactgatatatctcaaaggttgaggaaaatggccgctgcaatgaatgtgaagtgaaggttcggaagccatatttgtcttgattttccttagtcctggagtaacccggctgtcatttgccttgtgtcgaaaataagtatgctataaagcgttctgtcttgatgggaactgttgggctgtaattgtaaataagttttgacttgcttcatcttgctgtgcaaagtagtaattaataggcccgatc

SEQ ID NO: 33482 - DNA, 1807 bp, Zea mays
  Clone ID: UC-ZMFLMO17126A04_FLI
ggggttccggattcccccgccgccgccgcaagaccggagccctaattccaagcggtaaacgatgaggccgcacgcggtgggtatgggtggcggtggcgtggggaggcggaaggcggtggccgccgccgccgcggctagccgggagtggatggtggtgccggcgtcgggcccggcgcgggtggaggaagcagggaagcacgcggtgatggcgcgtacggggcttcccgcgcgcgatctcagggtgctcgacccgttactctcgtacccgtccacgatcctgggccgcgagcgcgccatcgtggtcaacttggagcgcgtcaaagctctgatcacagccgcggaggtgctgcttcctaacaccaaggatcccgccttcgcgcgcttcgttcgcgacctccagacccgcgtcctcgcatcttcgtctgaccaggcagctgaactcactgacatggaaggtgaatcacctattgttgcttcaccatttcctgtaccaagttcatccaaagggcatgaaatggagatgactaagaagactgctgctgttgtgcctgaaatgactagcagcagcagtatgcccaatttagctgttgcaaaagatggaaataccaaggttttgcctttcgaatttcgagctcttgaagtgtgccttgaatcagcctgcagatctttggaagaggaagtatgtgcttgcatctggaattgtttgtctggttatatgttgtttatctggccgcaattgaattcatacctctaacatcagacttctactctggagctagaggcatatccagcattagatgagctgacatcaaagatcagcacattaaaccttgaacgagttaggcaaatcaagagtcgtctggttgcgatatctggtcgagtacagaaggtgagggatgagcttgagcatttactggatgatgaaatggatatggctgaaatgtacttgacagagaagcttactcaacaagaaatcagtgaggcttcatctagagctgaggttgatgatgcatctcttacagaagacgatagggatgaagattatagaagtgaaccagatggaagcaatggtagtgttataggttataagcccaatattgaagagctagagatgcttctagaggcttactttgtgcaaattgatggcacacttaacaagctatcacatctgagggagtacgtcgatgacacagaagattatatcaatataatgttggacgacaagcagaatcagctgctgcagatgggagttatgctgtcaactgctactgtcgtcatcactgctggagtggctgtagttggtctttttggtatgaatattggcatatcactttacgcagacccaacaaccgaggaggaaactcgagcagcaaataggaaattttgggaaactactttcgggaccgttgctggctgcgtgattttgtacatcatagccatgggttggggaaagagaagtggattactgcaatgatgcggaagcatgactgcatgagtgttctgtacccagtgaatactgggttcacaaaaatctccaaaatgagagattcagcttgttcgctgcggcttgctgcggctgcaatccggctgcggctgcggcttctacagtatttttctctctatggattgcagctgcagcagtccaaacagctgcaacagtgtcggcttgtagccaaccgaacacgcccattgtattggcatgctgctcgatcatactgctgccagaaaatacgcctcgttccactatgctggaaaagaaacatcttgtgtaccgctagtagctgctaatgcgtgaagtatattttac

SEQ ID NO: 33483 - DNA, 983 bp, Zea mays
  Clone ID: UC-ZMFLMO17126A12_FLI
gtttttagctgggaaaatcgcatgaaggttgtaacaggcactgcaaaagcgcttgcttaccttcatgaagctattgagccaaaagttgtacatcgagatataaaatcaagcaacatattgattgatgatgaatttaatggcaaagtatctgactttggattggctaaacttttgggatcagacaaaagccacattactactagagtgatgggaacatttggatatgttgcacctgaatatgctaatactggaatgttaaatgaaaagagtgacgtttacagttttggcgttctcttgttagaaactgtgacaggaaggaatcctgttgactacagccgatcttccaatgaggtcaatcttgttgaatggcttaaaacaatggtggccaatcggagggcagaggaagtggctgatccaagcttagaggctagacccagtatccgggctctcaagcgggctcttttggtggcactgaggtgtgttgatcctgactctgaaaagagacctaagatgggccaggttgttaggatgcttgagtcagaagaagtaccataccgggaggatcggagaaatcgtagaagtcgcactggaagcatggatattgagtccattgcagagggttccaactctgcggagtttggaaagaaggtagaaaggactggaagctctatatctgacagatctcaaccatgaggcctggaaatctaagctatatcaggaactgtctcagaaacgatgttaatcaccaaggtgattgctgtcctgataggggatgctggtaggtgacagaggcaaggcaggcccaggtattactgcctaagtattaggctttagttttcaggtgcagtagaagcattcttggatgaggaacctcctggtctcctcttatttgtataggtatatgttggtgcctgaggaattcctcttggtttgggtgtttaacatttgttcggttcttttatttcttgcattgttgccttctt

SEQ ID NO: 33484 - DNA, 908 bp, Zea mays
  Clone ID: UC-ZMFLMO17126B07_FLI
agagaatggagtatgaagcacccctccttcgaaggttcaactcagtatcaacagcctctcctatgccgcatggtgtcctttttcgagcaattttcgaccgatatttgaaactgtcagcactatgtaccctcaggtacatcactttgccgttgaagaatcttctgctacaccaagtttgttttcaagatacggagttcgtggtttcccagccattcttcttgtaaatgagactacaatggttcgatatcggggttcaaaagatcttagctctctcgtcgaattctataaagaaactacaggtctggatccagttgcatacattgatgttgttgtccagcaagagagcacagcaagcttgaggtcagttgcaccatgggatcgttctccgcttgagatggccaaagacgagccgccgtatctgttggtcgcagttgtcttcatcatcctgaaggccgcagcgcgcttggtacctgctgccatgtctcatctgagggccttcttagccgtccgtgtccagaacctgaacctagggatccgcaggggatcaaaccaggtcctggaacgagccttgaacgtccttgacgtgaggaggctgtgcagcgagctgggactgagcaacagggcaacagatctgaggaagggtgcaagcaatgctcgagcctgggcttcctcgtttgcttccgtctcactgggtgaaccgtcatcttcgagacaagcttagccattgttttttttttggagatgtcgcttgttagggtagctagctgctcacatggtgcaaagaccatctaaggtttgcttcccatatatcctgtttgtttctgtgcagtcaggaggagaggggaaaccttacatgcctgtaaattttgactacatcatgtgctgatgtgctgttgtatattaggaat

SEQ ID NO: 33485 - DNA, 2609 bp, Zea mays
  Clone ID: UC-ZMFLMO17126B11_FLI
gcaaaaacatgacaaccaggctactaatggaaggttgaaggaagacgaagcacgtaaatacttccagcaactgattaatgttgttgattactgccaaagtaggggagtgtatcacagagacttgaaggactctatactgcataatgttgatggacagactgtttgtattctaaatgggtgtctgagttactcatcaaattctaagattggttccaaacattctggtttgtattcttactatacctattttgaagtaaatgttcacagtgtttttattgctggagtaatacagtttgtccttttttatgaacgagggcatatgattgtcttttaataatggtccgacaaccaactacacttgtatttcctacgcttgagcccttgcgatctgcacggtgtgatgctgcctatcacgatagtgctcattatctgtcactttaccctgttaaggcataaacacttgctatcaggttacttggtcggagggttgaatcaaacacaaggcatctaaagcagaacttgtaaattcagaactgaaatatggaccatttcatgatcttccacagttctcctacgtacctgtgattgtgcactttgagaacaacaaccctttttcagttgcaaaggaagtgtattacagaacactacaacattgctcatggtggtgccagattcaaggatggattttcaagttttgtttaaaatttataagtaaccaaacttctaactggatccttttcattattgtgtctctgatttcctttttctaggtaaaacacaatttttcttttgaatcccatgctcatgcttcacaattttcattttaattattatgcctctgtttttttcagttcagaaacccatagaagttaaggttgtactttccgttagtaggttcagtccttgctatttatttgaatttttttcagttcagaaacccatagagtatacccaattctctctatatttttatcctaaatttagaaagcaatattattggggggcacttccattcaaaatcgatgactgtctttttgacccattattatagaggactatacaatctcttatttaattcacctgaccatcaatttgtctatgtagcttaattatcggttcttctatattattgtatcctcgacgacattgctctgcatgtatgtattatccttctattgggtgtatgtgatcaagattagagcagctgagcaattgccaatttgaaggccatgttgaagacaccagcatcaattattttgattatctattgttttctgtgtatggtttgtgggtggtttatttgtcttccatttatacctgatgagcattaacgtggtaggtccaacattgactccaattcttatctcatcgatgctgcaaccacaattcagtagagatacttgaaagttgatattcaaaaatattatttctgggtacacttttagttatttaatttaatagtttattgactaacattctatttgccaagactaacattctaaagggggtgttgcagaagcttgttctgttgtaaaaagagtaggctcgaaacttgatcctgtagatggagcttgtttacctttagatatcatatgccttcaccttgagaaggctgcaatggatagattaagttcaggagaagaattagttggtgatgatgatgttgcaagagctcttcttggtgtctgtaaaggtcttcctggacctgtacttgctgtgtatgatcagctgttatcggacggtgcaatcataccctcactaaatctgaagttgcgcctgctgcgatcagttctagcaatcctccgtgagtgggggatatctgtcattgcacataggctaggcaccacaagtgctggtgcttcattctttcttgatggaacattctcattgaaccaaacaggggctgcgaatcaagattgaggaaactgatgaagcaaggaaaaaattctctaatgctaaggcaatttcgtcatctcagttttttggtactcaaaacaggagaaagaggctcagctatcccttcataaatccgcgatgggttactgggtttactctttaatcaccatgtcattgatattcaaactgaatctattgttgaagggcatccatttcatctgtttgaataatccattttcagaagtttgcttccttcttatatttcatctgttttgaacagggttcttcatccatttcaagctctgatctttttggccgtaccaatgtggacgattctaacctggatctaagcgatgcagatctcatcaacagaatatctttccaggcgtcacaggatctgtcttcactcaaggacatagctggagagactggaaagaagctgacatctttcgcctccaatttcatcagcgacctggatagaatcctttgagcaggcgaggccatgccagcaaagcatttttcctaccttgcaccagaatttcccttctagcttggattgggtcgcggactcgccggtgcatcaccgacagttgaaagtagttcttgcacagctacagctctgtagaggattcctattacgcgtttgtattttgatatttgttgtgagaattgaaggtatttttattcgtgaatacttcacaacggtgaagcgt

SEQ ID NO: 33486 - DNA, 942 bp, Zea mays
  Clone ID: UC-ZMFLMO17126C11_FLI
gcacagaccgacaacgcctaggcaagcagcaagcgtacacgtaaacgtacacctacctcggcgagcaaaaggcaaaacgctgatcggagcaaccaacgaagcccgcagccatgccgacggccacggccacggcggctcctcgccacgccgcgctcttcctgctgctgctgctcggcctccacgccacgttcgccgccgccgcgcgcgcgggcgtcgccgtggacgccgagctcacgtccaccaagccgtccccggtcccgaagaagcccagcgtgaagccgcccggccccggcgccgcgagcccgaccttcccgggcttcggcatccccgggatgggcgggttcggcatccccgggatgggcgccggcgggtggggcggcggctacggcgggcccgccggcgggtacgcccgcggcggcgtggtggcgcccaccgtgacgtgctccgagaaggggccctgctacaggaagaaggtcacctgccccaagaagtgcttctcctcgtacagcggcgccggcaagggatacggcggcggcggcggcggcggcagctgcaccgtcgactgcaaggtcaagtgcacggcctactgttgattcgactcgtccgctcttagcggtttgacagctagtggctggcggtggcggcctgctagctgctgttggtgtgatggcgcgtgtgcgtgtcggtgagctgagtaccgcgggtggttaacttgtgttatcatccccaatagtatactagcgtacttctggttctggggactatttatatgtagaccacgatatgcgtaggggcggtttatttctaagataagaatataagatgctctgcttatggtgtttattagtattataatcatctaagttgcgttcctgctttggttaagtgataagacgtgcttgtgaaatccagtatgcataaataaagagctatattgtaagt

SEQ ID NO: 33487 - DNA, 1337 bp, Zea mays
  Clone ID: UC-ZMFLMO17126C12_FLI
ctggtcaagaacgaatacagctggaacaaagaggccaatgtgatatacctggagacgccggctggtgttggctactcctactctgctgatgctgcttactaccagggcgtggatgacaagatgacagccatggacaacatggtgttcctgcaaaggtggctccaaaagttcccacagtacaggggcagagacctctacatcgctggagagagctacgcagggcactacatcccgcagctcgcggaggccatggtggagttcaacaagaaggacaggatcttcaacctcagaggcgtcgccctgggcaacccggtgctggagttcgcgacggacttcaacgcccgagccgagtacttctggtcgcacggcctcatctccgacgccacctaccgcgtgttcacctccgcctgcaactactcccggtacgtcaccgagtactacggcggctcgctgtcgccgctgtgcgcccgggtgatgaaccaggtgacgcgcgagaccagccgcttcgtcgacaagtacgacgtcacgctcgacgtctgcctctcgtcggtgctctctcagtccaagatcctctcgccgcacgagcaggtcgggcagcggatcgacgtgtgcgtggaggacgagacggtgaggtacctcaaccgccgggacgtgcaggcggcgctgcacgcgaggctcgtcggcgtcgacaagtgggcggtctgcagcagcgttctcgagtacgagctgctcaacctgcagatcccgaccatcagcgtcgtcggatcgctcgtgaaatccggcatccgagtgctagtttacagcggcgaccaggactcggtgatccctctgacgggcagccggacgctggtgcagaacctggcgcgcgacatgggcctcaagaccaccaccccgtaccgggtgtggttcgaagggcagcaggtcggaggatggacgcaggtgtacggaggcggcgcgctgtccttcgccaccatcaggggcgcctcccacgaggcgcccttctcgcagcccggacgctcgctcgttctcttcagggcgttcctgcagggccagcctctgcctgaaaccttctcgtgatcagggtgcccgatgcagcttcttctgcaggtggggttgggccggggttttgcactgtagtaatatgtaagaaggtgtttggtgtgtctgcctcctgctagctgatgatactagtggtttggtttggcgccgcggtaggaccgtaggagcgagcgagcggccggcgctgttcgaggtctgtgctccgtgtttctacagcgtccgtccatggctcggcaattgcctaaagaagcggaaaggatttgtctctggtttcgtat

SEQ ID NO: 33488 - DNA, 1014 bp, Zea mays
  Clone ID: UC-ZMFLMO17126D07_FLI
gttgttgaggtggtactcacctgatacatgactgacggccttttagtttcagaagccaaaagttgaaactaagaatccagcggttgagttgccttttgaaaggctgtcttttgaggaaataaactaaaaaactgaaaagcatgttgatatgagcttttctggcttttggtgtgctaaaaagctaaaattttttacagaagtcaatagccaaaaagccaacagccggaagtcaaaagctagcttcgagccaaaatcccaaaactgcagttcaaacaaacaggccctgaagggaatgactctaacgagggctgcccacctgatggaagctcaattgcacatctcgatcgggaattacttccaatcttcggtcacaggctcacagcgtgatgcttattgtttgtatcctcgtcacgagactccatgctgctggatacgatgacctaccgcgcatgatgctggctcgtagttcctggagcttggcaacaaggagaaccaggcgcctgcatggcgcgaagatgagcgtcattggaatgagccagatccctaatgcaagtatcagcatagttgccttgtctgtgagtagagctctaaatatctgcggttttggcttccttcaccggacagctatctggatagtgttctccccagggttgcttgcatatataagcttcattggaagacctagccatgccttgcgtgcaattggttatcttgttatcagcacacttgtccaatgccttacctttggcatttcgtaaaattaagcactgcagattttaaaatagaaggctagagtgtagggcaacggtgtggtagtactttgcacagtgtgcgtgatgtgccactggaataaaacaagcctgtttagtgatgatgcgcgatgcaagttgtcattttagcctacgtcaggatcgcgtgctgctggtttctcaccctattaggtttggtttatgtactctagtgttcaccccaattttttttgcatgtattaagctggattagagtgttcaccct

SEQ ID NO: 33489 - DNA, 1445 bp, Zea mays
  Clone ID: UC-ZMFLMO17126E03_FLI
aacaagaggctggccagccatcccgcgcgagccacttcctctctcctccccatcggatccagcgccacgcggatccgcaaggcaatccatggcctctacccaggcggaagcggaggcgggggcaccggccccgcccgaggcggcggaggcgaaggagaagggcaagcagggcggggtgctggggagggtgtggcgggcgctcttcggtggccgcgaggacttcgagaagcggctgcagtacctgtccaaggaggaggcagccgtgcacgcgcggatgcgccggcggacgcagttctcgcgccgcgccgtgcggaacctcatcgtactctccgtcctcgccgaggtgttagctgttgtttatgccatcatgacgacaagaaatgaggatctaacttggcaaatgagggcaatacgagtgctacctatgttcattcttcctgctgtatcctctgtcatatattcaacagttgttaacttcacaaggatgtttgagcagaaagaccagaagacccttgaaaaattgagggctgagagaaaagccaagattgatgagcttaaagagagaacaaattattatctaacccaacagcttattcagaaatatgatcttgatccagccgcaaaggctgcagcagcttcagttttggcatctaagcttggggaggagactggcttaaaagttcatgttggagaagaaccaaagctggatgctgcagtggccagaagcaatgatgttgagatagtaccttcagatggtttgagaaacaggaagcaacccaatgcaagaggaagcaggactgggagccccacttctcataccccagcacagggaactgaaactaatctacctcctgctagtgctggcctggaaactgcaccagctccagtggtggtagagcatcatcaaggttcaggggctagtgatggtggtggatggattgcaaagattgctgccttacttgtgggggaggacccatcacagtcgtatgctttgatatgtgggagctgccatatgcataacggcttgtcccgaaaggaagattacccacatgttacttactactgcccacattgtcatgcattaaacacatcaaagcagtccatggggcaatactcaggctccaactcaggccggtcgacccctgttgttctggctgatggattatctacttccaactcagtacaagagactgaattgagtaacctgacgacattgcaggagctacccgaggaaggaaagacagacaagcaacaagtggaggcaagttgatggttcttatgacttgtattgttgatgtgtgtggaactagtttatctttagacttatatatcgtcatgtgttcaactggtggagccacagatttagcactgttgtaaattggaaatagtgagtgatatgatcgtcggaagcatagcacgcaaaaacaagaaatgggacatggtgt

SEQ ID NO: 33490 - DNA, 1881 bp, Zea mays
  Clone ID: UC-ZMFLMO17126E05_FLI
accgtttgaaaatgtcaatggacaaactgaagagttgccatcagagctcctctgctcgatcaagagaccaaaattttcagttgcagaacttctagaagacctacaggtcacaccaacacaccagagctaaacattggaagccaaagttcctttcttccgagaagaaaacaatagctattctaggagacaggagtattgacagtgaggaccccttggagcatgtaattgacggaacatctagcgaggaggaagatgctactcaaaaccacttgagtttggtgaacaaagatgagaaccagcaaactatggctgacctatttcaagaagtttttaatccaacaaacatggatggtgccatgaaatcaatgacatcaacaggagctggtaactatggaagaatgcaacagattatgcagatggaaaaatattggcatgtggaattcttgagacagtatagcagagagcacagttattcaggtggtgctgttggtagcagttggtataacttatatgctttttgctttggattaggcagttgtctgtttgtatgcaactatacatggatttgagagatagtgacagttcaaattcgtaggtgatttaaagggaactactgttcagattatgtcaaggtcattggaaggaaagctaacagtctgcagctgcatgttccaggaaaagggcaatgtctgtgatctatgtctccatcttccaaaaactcctatctactcatgtggcagtaatcttcttaaattgagtattattttgcttctcatgctgctgagttgaacaaacattttggaaaaagaaaaaacaataatgtttcaagatgattgcctgtcagtttcttatccagaacagcgttctctttagaaaagtaatgactgaattgcccaattatgcaacaacaacaacataaccttttattcccaagcaagttggggtaggatagagttgaaacccaacaagatgtcaccaaaaagagaaagcgagagaaacaggaggggaaaaagcttttgagagcactaaaagggaaaaagcctaatcacggttcgggcacgtggatagcttttttctaagcacttctatccaaacataactctattgggatatttcattccttcaagtccattttgattgtctcctcttatgtcaagtttggccatcctctacctctcttcacattattgtcccgtcttatgatgcccattgggatattctattccttcaagtcccttttgaattgctcaattatgcaatgctacaaaattaaatttgaaagttattatgctgcatgtagatgataagacaaaaggtatcctttgttgtagacaatagaccaacttctaattaactggctcttatgtggacatgttttacgggcattctgcaacagttacgttttcatggaacttatgtttcatgcaggatgccactataagtaatgcctcagcagacggcaccatggatgaaagcagaactaggaggactattatcttcagtccaaagatatgtaacaatgtagatcttctggttggaaacataattcatatcttcccaccatggaaggaagttaaaatacaagaagagcatgtgattatttgcacctacttctcgcaccaccaccggacttgatactcggagatatttctgtgctagctgcaaagcttgaggcagaccgccagcataaccgttgctgacagtttaatgttgatgtactcgcagtgtctattctgtttgttttgtaatcacaagtgtactggctgcaaagctataggcagaccgcaagcataaccgttcctgatagcctaatgctgatgtacttgcagtctctcttctgttttacaatcacaagttcccgaggcctagtccggattctct

SEQ ID NO: 33491 - DNA, 1092 bp, Zea mays
  Clone ID: UC-ZMFLMO17126E08_FLI
ctctagtctctatgctacagcaatctggccttgttactttattttatgaaagcatattgtacctgggaattgtttgtacatccctttgttgctgggtcatatgggtcagaaccattcgcaatgggacatacatgattaatcaaacatgaatttcatggatagtcctcagaagttatgaaagctgtttttttgtactgggatactctcttgcttattttcagttaatttcatgttaagctttcttgattcaactcagtgcatgtgatgtttcacttgttttgcgtaaccttggaacatgtggggaacattttgaatgtgtgctgaaaaggctatgtctatttttattagtatgttaagaacgtgattttatattgattttcatgtgtcaacaaggtcaataagatttctcatagccttagcgtgctgggatttttgaatggttatgtgctattatgttagcattgcgaagttcactgactattgactgtgtgtaacatctataggcacgttcaagcttaccttgcagtttacagaagattacccaaacaagccaccaactgttcggttcgtctctaggatgtttcatccaaacatatatgctgatggaagcatctgcttggatatcctacagaaccagtggagtcctatatatgatgttgctgcaatcttgacttctattcagtccctgctgtgtgatccaaacccgaactcccctgcaaactcagaagccgcaagactgttcagcgagaacaagcgggagtacaaccgcaaagtccgcgagattgtggagcagagctggacagccgactagtgcaggaggatgctcatcgtgcccgaaagggcacaataaggaaccatgaaaaaacatccttgtgtttgtggttcgccagacctgtcgaaacattgaagaactctagttcaagtctgtcgttgtcatggttttagtctgatccagagcaccggttgctcatggtggtggctgtcgtaatgtagcggctgttgttgacctatatcttctcaagatttaaaatgatcctgcttgtgtacaaaaactatagcgtgggaatggttgttcgatggaccgatggaacc

SEQ ID NO: 33492 - DNA, 2759 bp, Zea mays
  Clone ID: UC-ZMFLMO17126E10_FLI
ctgaatttcatctcccagcccctctgctcgctgccctcccctatccccttgctggcagcatggtgctcgttccttcctgctctgagctgcataggacatctccatctctccatagatggcagccagctgcgccctcacctcctcccatgctcccctgcagcagcgccctaatcaccagcacattggaccgtttcctgtgagctccagtctcatcacttaacctcgctctaattgtttttggttgaagcggtgattccccatctcctctctgttgtttcactaattcttagtataaatagatccttgttaaaatattgctgttgtggctgctttgtatgtatgtgtatatgaggaagagcaagctccgacatgacggctgcttggtgttcgatgatatacccgaaccggagatctttgctatgttggcgaatactgagtcatattgtgatgtgttaagctaagtcacttctcttgctgcttagtgatgattggattggatagataattattgcaatgattcttttatctgaagtataggaatgttacagtgctgctctccaaatttttgttgtttcaagtgctattgtgtgacgatgcttagagaaggatgtcctttctctaatttacttgtgatggttgtgcttgtatgagatgaagtagtacggcatggttaaattagtagtgtcaagaatatgcttattattcctagcattttgccaaggagagttattactggtacttgtgtgaactcctaatttatggtaaccttcataccttgtcttaataagtatcaagcacatggtgattgtagaagttaactaggagctaaattgaattcttgctgtttgggactgcatgaccagttttagttatgcagctagttcaatgatgtaaactatgttttttgtagaaatgttatatagaaaagttatagataacttttttatcttgcttgtgctaaaatttcatgaccataggactagaagtttaggagttatgatttttccaagtccagtttcagaatctgtccagattctgtacagatttcgaaaatgaccttgtttgcccaagttaaactgagaatcagttcttagtaattataggagaattgtattactttgcttaatctttccaacaaattttggatcaccctttttggtgatctagaagtcaggttatggctgtttgaaatgtgatgtctgaatctgtccaaatctggacagcaatgtttatttgtattaactgacttcgatacacattgaatcaccctgagatgtttacaaataaattgtagacaattctattagctttctaaaaagtgtaggatcacctgatttggatttctgaaactccggttatggatttttgaagtgagtagtcaaattctgtccaaatctggacagaaattgcgtttagtactgtttgatatttctatatgtcgaatctcactgtgatgataataccaaaattttagaggactttataagctttccaaaaagtcttagtttactatttttggatgaatatcgtgtgagttatgaataaaacaactgactgctgtattgctgtccaaaatcagcaagcattaaaatgatttgcttggaatttcttgtgtaggtaactagatttggttagtccttggcttgatcaatgaagtatggtagttgcatatgtttgttcttttctttcttaatgcttgccttagactttagcattttaagaaggaagtaaatactttggtgagtgtatttgagttagcgaccatttagacctttaagttaagatgagtgcaatttcattgaaccctatgttaattggtaatgaaatatccgttagttctaagtatgttttgatgttttgtttagtcgatatacgttgatagttaatctagaggaatgtttgagaaagctagatgagtgacttttaaccatactaagttttagatgtgttcaataattgtgagcttgaattgttacttgactctcgatcctatgttctagttaaggaaaatacatagcttgtgtagggttcaatattctttgatgtttgtgttagatttggttaagccagacaaacgtaattgtgatacgtagtgatatgtcaacatatagtaattgtttttaagtattgcggtacatcaatgttatattctaaatatattaggacttgtatgttgctaatgttacttgatgattgatttaggtccgattgactagaacgtcatgtttgatgtagaattagttgtgatgttttgctttaagtctgtatcctccttagtatagcttatctatcttgtgttatatatgctcctactcactcatatgcattatgcatgtcatttaggtacgttaattgatcacgtgatgtggaagacaaagtttggattgatctcaagataatgctgatggacgaagctaaaatgggtgaatcaaacaagtgccagaatgggagatgctcgtcaagcaaacatcatctaacaacactgacttagtgttatcccaggttgaaattttgttctgttgtggatggtgctaagtgccggtgggctcggccttcttatataagtatatcccatctttagcttctttattgaggattgtcacttaagctagcatgtattttaaaaactataaatattttatacattttaaattataattcttttgaatcactttcttttgtaatcactccgataattgtataatgtaaactgattgtaacatgtaatcattttgaaataaagaatttatttccgctgc

SEQ ID NO: 33493 - DNA, 1315 bp, Zea mays
  Clone ID: UC-ZMFLMO17126E11_FLI
cggccaagccccagtgggcgtgggggcgccgcatggaagccatggacgtcaagtacaagcccgtcatgttccccaacggcgccggcctcaagaaggcgaagccggcggcggccgtggcgctggccggggagccgctgtaccgcgagtgcctcaagaaccacgccgcgagcctgggcgggcacgccgtcgacggctgcggcgagttcatgccctcgccgggggccaaccccgccgacccgacgtcgctcaagtgcgcggcgtgcgggtgccaccgcaacttccaccgccggacgctggagggttcccctccgccgcccgcgcccgcgccgctggcgctcccgcctccgccgagcgtgatgcacggccagccgcaccgcgcccgggaggagacgcccgaggaccgccacccgggggtcgtcgacgccgacgactccgattccgactcggaaggctcggagtacgacgaggagcggtcggtgtccccgccgccgccgccgcaccacctgctgccggcgccggtggcgcagcagcccccgccaccgtcctacttcccgacggcgccgcacatggtgctctcgctcggttccggcgtgcccgggcccgcggtggcggtatccccggcgcagaggctggccccgacccagctgacgccgtccagcgcgccgccccacgccgggggcgcgatgcccatgcccaggaagcggttccgcaccaagttcaccgccgagcagaagcagcggatgcaggagctgtcggagcggctcgggtggcggctgcagaagcgcgacgaggccatcgtcgacgagtggtgccgcgacatcggcgtcggcaagggcgtcttcaaggtctggatgcacaacaacaagcacaacttcctgggcgggcacagcgcccgccgcagcgcctcctcgcccgcccccgccgccgcgtcgctccaaaccccagccgccggcgccggctccggcgctgctgcagcaccgtcattcaacccgtccaggatcacccctccccctcctgtcctcacctcgtccccgacggccgccaccggcttcaacatcaacggcgccgcctcctcggcgcccaccgtcgccaccgactacaccacggacaacgccaacggagcttcgtcgccgcactccgcttgaactagagaagggagaagagaggagggggaagggaagggagagcggagagggagagaaacatgtagcttaatttcagtgatcactcgttttttttgtttagatctcttcccatctactaagaaattaaccccaagaaaaagcatgccgctgtgcgccatgcctagaaatcc

SEQ ID NO: 33494 - DNA, 652 bp, Zea mays
  Clone ID: UC-ZMFLMO17126F10_FLI
agaaaaggtgcattgtgggtctctttgtctgctgcccttgtttccaccttgtgtaaatatttttcctgtcttcaaaagttggcatcagttttgcagttttcttatgccactgctaacaacttctcttccagtctatttgacttggcgtgtcagttgtttatactatcagcttttgcgtttcatgtttgcaggaacaggttagggccttcattgaaggtactggtgacagcgacgtgcttgtgctgaatgtccaggacccgttccagaggctgcttctgcacggtgtttgtgagttctataacgtaacctcaatgaccacaagcagtgtaagggacgggaagccatggaagagcaccaccatcaagaagaggcatgtcaccggtcttcctccgagaatcacattagttagcttcctgaggatgaggaagaattagtcgtcccagtaacatgtggatgtgagggtcctacactaattcgcctggatgtgtactaaaaagacaaatttgttgctttaggtcgcatctagcatgtaatcaaatgtaaaatatccatgtcaaatgtaaaatacattgcaagaccttgttccagatgaagaaactcaaaagtgtaagcccctacttctatcactgagtctatgaaagaggcttaagcc

SEQ ID NO: 33495 - DNA, 1372 bp, Zea mays
  Clone ID: UC-ZMFLMO17126H05_FLI
tcgatctgttgtgtacggactggcgccgccacttagtcaccacccaccaaacttcacggcttcggcctttgcccttcgcattcgtatcgtatataccttgggcacgctgctgcagcggtgggtgctcggctatcttcaagagacaagagtggagggcgccgaagagcagcgcaggggggagatgaacagcggcgtggacacgcaggcgcgggcgttcgcggacgaggtgcgcggtagtttggagacgaaggactggatgctggacctcggccacccgctcctgaaccgcgtcgccgagagcttcgccaaggccgcggggatcggcgcagtgcaggcggtcgccagggaatcgtacttcatggcgactgaaggcgagggaggatctgtgtccggcgcaaggaaacgctcgttcccggagctcaatgggacgaacagtagcagcatcaagtcggcagaggccatggtacgccacctggctacaaaaccagcccaccagatcttgtaaattgttgtttgtgatttttgttcttcgtcattcccgtcacaggtgaaaagcgtgagcaaagagtcgttacagtggggtaacactttccgtgcagcatgagtacccgaaacaatgagcatttttactacccgctggcagctggccgccgcttgatctgactctgatctggggcgtcatgcatcgtgcagggctcgcggctggggtgcactccggcctcacctacggcctcgcgggggtgcgcgggacgcacgactggaggaacagcgccgtggctggcgccatcacgggcgccgcggtcgcgctcacgtcggagcacgcgtcgcacgagcaggtcgtgcagtgcgccatcaccggcgccgcgctctccacggccgccaacgtgctctccggcatattctgagccgccggccgtgccgtgccgcttgatttccgaggattggcttatagttctgtcacccaatcattcgggtaccgtcgctcttacgcttcagtacgataacttgggagcgttgcattcatgctttcacttgcattgtcattacaacttatgccctactttactgttagccgtataacggttttactataatttacacgctgcttagtcatatctcctggtgggccgcgtaatcaccggggcattctattaactttcaacatgatgatggggaaattatctgtgacatacccttataaacttttaacatgatgggcaaattatctgtgacatactgacaaaagagtggctttagctcttgtactatctgcggcatactacgtcgataaattttttttctattttagggaaaaaatctattttaggaggaatattgcggacagccaaattgaaaatttcaaattttaatt

SEQ ID NO: 33496 - DNA, 2172 bp, Zea mays
  Clone ID: UC-ZMFLMO17127A11_FLI
ccccaagcaaccctagctctcccatcccctcacgccaggaaacatgttcttcctccaggagcccccgatctgcaccgccgacggcgtcatctgcgccgccacgacatccctccgcctgcccaggaggcccggcaccgctcgattaccgcacggcgacaccacgctacccttcgcgaccacctcgccgctgccatcgccaaatcgtgctccaagacggtacgaagagctcgcgagacacaagagggatcacgacgcaagagagaagaagaggaatggaagatgcggaagcggcgaagaaaagtagcgccttttaaaaaggaggcccacacggataagcaatgtcgagagatgtctttaccagataagcaatggcacgatacatgaagactggaggtatgcaatgactgagttgcaatctctcgtgacagaaagtcgctcgacatagatgtcatttggagcaatgggttttcctatcctcctcaatattttgaaagaagaccgtgaggatgtagagtttgtgagaggtgccctggagacctttatgagtgcattgactcatattgagacgtcacaagggtcaaatactccgcttcaaccagcgttagtgaattctaatacgctatctcgagaaactgagaatatttctcttattttaattttactgtgaatcctgcaacaaggatgtccccatcgtccacgtcgacatgcacaactatagccttgatgagaagatcaggatgacgctcgaggcgcacattgtcgagaagaccgacgaggtccatgaggtttcttttacttttcttcacaagctgaatccttctgcaagaccatggacagaacatttgctattgatttgtattcgtcctatataaaacagaaactatcagaattttctctatcaaatagttctaaatgtcttgtagcactaattatagaaccaggtaaaaaagtttcactctttgagcttcttgggaatattttcattttttcctctttagcctttagtatgtaactatgcgcactatcatttgatgctaatagctgaaaaaaactcagtacttttccatgccatttactggttcaacctcttaacccatatttgtgtagtaatatacaaggtgcaggtggaatcctcatgatggatcctcttttccagcgagtacttgtgagtgagtgtagaagtcgaaaaatacctgtcatatttgatgagatatttttaggattctgacatcgtggtgtggatatcatatttgacaatacctttttagaggataaataggtattttctttgtattttatgaccttaataacttctctttcagtctacttctgagttacttggttgtttacctgttatcgcttgctatgcaaaactgatgactgaggtaattgtaccattatctgcaaccttagcaacagaggaagtttttgaatccttcgaaagtgactctaagtttatggcgctcttacatgaccattcatacactgtttatggtatgggctataccgcaacactaaacgctatggattgatatcaggatcctattcaaaccttgatgccggccacatgaaactcaaggagggtgcagggccacaccacacttatggactacttcagtttgtgtgtcaaatctgttttccacaaagaaattatttaaacaaaaggatcgcatcacagagaaggatgggacagtgatgagactttcaggtggtgggcataactgctttcaagatagtgatgaggcaagattaacattcaaacggaagttctggaagaaggttgtggagatagatgatctatgtggaaatgatggtgcatggtggggtattaaaggttacatgcgagacaatttcaaccatagcaataaggtcacatcgcaaaaagagcatttttagaacagtaggctcgtgaaatctttgttggatatgtattgggagcttcgtcctgttaccagttcatccttaacacaccaaacaaggtatgacccaacacgtgcagttgacccaatcattgaagatggtcactacaccttgttttgaagcctagcgagattggacgcctcagtgttcaattgttacacgcagatggtatttgtgcagatattaggtttaatgttgagcacaaacaatatttaaagattttctgtgttgagcttgttttgcttttggccc

SEQ ID NO: 33497 - DNA, 1522 bp, Zea mays
  Clone ID: UC-ZMFLMO17127A12_FLI
cagctgccacagagacatcagagagcggtcctccttgtgagtctgagctgaagaggaggaggaggaggaggagaagcagcagcgcagccggaggagggagagcgaagatgcgccgcgtcgcgctgttgctcgtcgccgccgtgtgcgcgctggcggcgccggctgccgcggtcgtcactgacggtcttctcccgaacggcaacttcgaggatggcccgcccaagtcggcgctggtgaacggcacggtggtgtcgggcgcgaacgccatcccgcgttgggagacgtcgggcttcgtggagtacatcgagtcggggcacaagcagggggacatgctgctggtggtgccgcagggcgcgcacgcggtgcgtctgggcaacgaggcgtccatccggcagcgcctggccgtggcgcgcggcgcctactacgccgtcacgttcagcgcggcgcggacgtgcgcgcaggcggagcggctgaacgtgtcggtgagccccgagtggggcgtgctcccgatgcagaccatctacggcagcaacggctgggactcgtacgcctgggcattcaaggcgaagatggacgcggtgacgctggtcatccacaacccgggcgtggaggaggaccccgcctgcggcccgctcatcgacggcgtcgccatccgtgcgctgtacccgcccgcgctcgccaggcgggcggggggaaacctgctcaagaacggcgggttcgaggagggcccctacttcctgcccggcgcgtcctggggcgtgctcgtcccgcccaacatcgaggacgaccactcgccgctccccgcctggatgatcgtctcgtccaaggccgtcaagtacgtggacgccgcgcacttcgccgtgccccagggcgcgcgcgccgtcgagctggtgggcggccgggagagcgcgctcgtgcaggaggtgcgcaccgtgcctgggtggacctaccgcctcgccttcgccgtgggggactcgggcgacggctgcgcgggctccatggccgccgaggcctacgcggcgcgcgccacggtcaaggtgccctaccagtccaggggcaccggaggctacaagcgcgccgtgctggacttcacggccatcgccaaccgcacccgcgtcgtcttccagagcaccttctaccacatgaagcccgacggcacgctctgcggcccgctcgtcgacgacgcctcgctcgtcggcctgcgcaagaagaagcccgcgcgccgcctcatgcagctcctgtaagcggtgcttccacgtgcactacgcccggacggaccgcgcaagcgatggtgtaatacggctggtatgtgttttttggtttggtgtgtgcgtgcgtggtatacgcgtgccgtgcgcgccctgtggctgtggctgcagtggcgtcgcgttgggtgttttcttgttgtgacgaagaaaaaagggtatgggttggggtggtccgctggccggcgcaccggggttttaatcaacttatattaacctgatgaaggtgaaggtgaaggtgacacgggattaatggc

SEQ ID NO: 33498 - DNA, 850 bp, Zea mays
  Clone ID: UC-ZMFLMO17127B03_FLI
caaccgccactgcccgtgatgcgctcaaacccccggctgagtccaacgccgccaccgtggtctctgcagagtcgcctccccttgcaccgcagtccggagaccgggacggccccgccgtcacagccggcggtcgagcggaagggtgacgagacctgacgaggctccgtaggtggcaggccccgtcttcctctacgtcctccctccgtctcgagaaccagatgtccgagctccgcaggcggcaagccccttcttcctccacgccctcccctcaccggcgcgggggagcaccgcctcagcccggccctgctctccgccctccgcttccgcccgccgcgcctccccgggtgcgtcgtggatctggagacctgcaccaccacggcatgcgacgactaccccaaccaccgtggatccacgctgtctccggcgccgtcgacccgacaacacctcgtctctctctatgtgtttcgtggggtcactgtgctgaaaatcaggaagaccccaatggttgtgtcaaatccgaaagaagttttagactctagagtatgaactgaacccacttgaactggagtttccaagaggagaggaggtcacaaagcttctttacttgattggaacttggtttctcttattaatatgatcatcttcttctttgctattcgatttgctgttccaaggaaaggtatgccataagcctatgatgactaatgttttgtgcatgcttcaagtttcaactatatatctactactctataaggacccaatgtgggcatccacattgcttcatcgtgcctccgccattttccaacgcccgccattcacggctatggaaagcaccattccaaaatccttc

SEQ ID NO: 33499 - DNA, 1727 bp, Zea mays
  Clone ID: UC-ZMFLMO17127B07_FLI
caggtaccttgctgagttcaagtctggtgcagagaggaaggatgctgcggagagcaccatgaatgcctacaaagctgctcaggacattgctcttgcagatctggctccaacccaccccatcaggcttggccttgctctcaacttctcagtgttctactacgagatcctgaactcccctgatcgcgcctgcaaccttgcaaaacaggtttgcttcttctccttctatccccactttgtgatttgctttcattttgagaccctttgtgatttgttttaattttgagacatgatgtctcctggattgtgtgtagcttctgggcaacggattgagtgtgcataaacagctcctgtctccatcagcttatgtagggttttggttgattaaattaaaaaaagatggtgcaagggaaatagttcacttgcctcccatctgcatgcctattcactgaaacaatttttttcttacattagacaccgtgtaagtgatggatctaattactctgggtgctaacaaaatgcttcttttgctaccacccacggaggctgttgtttttttcactcaatctgtgatgtcttcttgcatacatgtcctactacatattgaacattgataagctacaacctaatggttacaagtcacctatactgcgtttggatgctggtattgaggcccagattttggaattggaattggtaaagccgaatttcagcgtttggatgctcacggaattcggaactggaaatccatcccaattcccctggtattcaactacacctgcaccccctccccttcaataccaagccccccacctcggtattgctcagaattcaattacacccgcatccaaacaacaacattggtattgcagatcaattccatttccctcagatttggtattcctagatcaattcaattccaccacgtgaatgcctacatccaaacgaagcactagagaattctcgatttcccttgtatgatggttgcactgtctaacttgtctgcaatccatgaagttggacatgacggtcttcatacagtacttgagatgacagatgcattccctatgcaacgaagtactcttgacgttccccatcaatttaagcatcttgggctttatattggatgcagttggcttgaagtaaatttaatctttgttgcaggccttcgatgaggcgatctctgagctagacagcctgggagaggagtcatacaaggacagcactctgatcatgcagctcctgcgcgacaacttgaccctatggacttccgacaccaacgaggatggcggcgacgagatcaaggatgctgctgccccgaaagaatctgcggagggtcagtaagatggattcagtctcacgacctgctgctgctgatgttgaggagtaaccagaaccagaaccgccgtcctcgattctgatagattatcttctagtataccttgtgttgttgctgttgtcgtcgtcgcgccggtgtatgcgatgaagctgccattgctgctgttttaattaagcattctagatgttataccgcatgctttgtttcggtttctaatgtcgataaatggtggccggatgctggttttcgtgctccgagccggccaccaggaagaagacctgcctgcccttgtgggtgcagcgttgttagaatgacctacggtgtatttgacttcgacaggcctgctgcctagtggactgatattctgttatgcgcaaagctatttggcttg

SEQ ID NO: 33500 - DNA, 380 bp, Zea mays
  Clone ID: UC-ZMFLMO17127B08_FLI
ggaggctcctgtgtctaattgtgtgcagcaagtcaaagagtctcgattgagcctagcatgagcaataggggccactcaggctagccaaggagactgcctacgaaccaacacaaaggtccacaattctgatcctttgtaaacaaaggacataggcaagtcatccttggctatcagaggcaggcccttattgacatgtaaggcttctgctctgcttgtcacctctagctagcttggtagcttctgtgactggtctgttgtgctccttccatggaacatctatttatacatgtatctcgtagagagaaccgtatcattttttccttttttttgttgttgttccaggacatcttattctctaattggatagcagcatatattct

SEQ ID NO: 33501 - DNA, 1215 bp, Zea mays
  Clone ID: UC-ZMFLMO17127B10_FLI
cacaagactatgacgatttagttgacttgtatcctgaggaacaaccacaaagggtcgaagtaaacacttatgcaccctctgctagaccgaaccataagaggtcaaagaatttcagtgacgtggaagacgagcttttggtgtctgcatggcttaacataagtttggatccaattattggttataatcaaactcgcagttcatattggactagaatttatgactactttcatgccaataagaccttctcctcaacccgtagccagaactctattatgcaccgttggaccagcatacaagaaggtgtaaacaggtttactggatgccttgctcaggttgagagaagaaggcaaagtggtgctacaatgcaagacaagcttacacaggcgtgtgctttatataagtctgaagataagcaacataaagcttttccatatatgcattgttggaataagttgcggacacagcgtaaatgggagatgaaacttgaagaattggctgttggcaagtcatctaataagaagcaaaagatgaactcaaatgaaacctcacctccacatttaccaagtgccaccgaaacaagcgagcctacaactccaaatgagactgtcacaacaagaccacctggaaagaagaaggccaaagcagcagcatttcaagctgaaaagaaaggctacacagaaactttaaacaaattatttgaaaagaagaaagaaacagatgaatttaaagaaatgaaaaaagacgagaggtttagattagcattagcagttgaacaagagagggctgcgaatgagaaattaaatatgcagttaaggagtaaagagctagaattgaggcagcaagaagttgaacaacataagaagagggaagaagagaggattatgacactagaccttagtgtcatgcctgctgatcagaagcaatattacatgagactacgatctaagatattgtctgaaaatgcctaatgttacatggtacattaggtgttgattagtctttagctaaactgtttgctttttatcactatagatttaggtttctttcttttggtgctatgtaattggataatacacaactagctttgcttattttttagctaaaatgtttgctgtttttatcactgcgattttaggtttctttcttttggcaatatgtaattggatactgcacaactagcttgtcatatataattcaaacatcaggtgtttgttt

SEQ ID NO: 33502 - DNA, 1321 bp, Zea mays
  Clone ID: UC-ZMFLMO17127C09_FLI
ctcctccttcccttccttctctctcccaccctcctcactagctctatctagctgagtgaactgaacagcccactggctcgtcttagctaagctcagctgtaaagctaaggttcggagtagctagcgtggtggccggagagtgtagcgagcggcgttcagctcaccgggggctgctgggtgagtgagggagccagcgtcgtgagagcgctccaagatgattacggggacggacttctaccacgtcatgacggccgtggtgccgctgtacgtggcgatgatcctggcctacgggtcggtgcggtggtggcgcatcttctcgccggaccagtgctccgggatcaaccgcttcgtggcgctcttcgcggtgccgctgctgtccttccacttcatctccaccaacaacccctacaccatgaacctgcgcttcatcgccgccgacacgctgcagaagctcatggtgctggccatgctcaccgcgtggagccacctcagccgccggggcagcctggagtggaccatcacgctcttctccctctccacgctgcccaacacgctcgtcatgggcatccccctgctcaagggcatgtacggcgacttctccggcagcctcatggtgcagatcgtcgtgctccagtgcatcatctggtacacgctcatgctcttcatgttcgagtaccgcggcgcgcggatgctcatcaccgagcagttcccggacaacgccggggccatcgcctccatcgtcgtcgacccggacgtggtctccctcgacggccgcagggacgccatcgagacggaggccgaggtcaaggaggacggcaggatacacgtcaccgtgcgccgctccaacgcctcgcgctccgacatctactcgcgccgctccatgggcttctccagcaccacgccgcgccccagcaacctgaccaacgccgagatctactcgctgcagtcgtcgcgcaacccgaccccgcggggctccagcttcaaccacaacgacttctactccatggtcggccgcagctccaacttcggcgcggccgacgcgttcggcatccgcaccggcgccacgccgcgcccgtccaactacgaggacgacgcgtccaagcccaagtaccctctccccgtggtgaatgcgacgtccggggcgggggcggctcactaccccgcgccgaacccggccgtggccgcggcgcccaagggcgccaggaaggcggcgacgaacgggcaggccaagggcgaggacctccacatgttcgtctggagctccagcgcgtcgcccgtgtcggacgtcttcggcggtggcgccccggactacaacgaggcc

SEQ ID NO: 33503 - DNA, 1366 bp, Zea mays
  Clone ID: UC-ZMFLMO17127C11_FLI
aagagccattactatggccggacaatccttcatggtggtgcaaaataccgtgctactggccgtggttttgttgtgcagcacaagagttttgctgaaaattacaggctgtatgctaggagccacttcataaaggcaatagagcttggaataatattgactgtgtatgctgcacacagtgttattgccaagaatacacttgtttacataattatgaatatatctagctggtttctggtggtatcatggattatggctccatttgcttttaatccgtctggttttgattggttgaaaacagtgtacgattttgatgatttcatgaactggatatggtatcctggtggtctcttttctaagcctgagcagagctgggaagtgtggtggtatgaagagcaagatcatctacggaccactggtctttggggaaagattttggagatactgttagatctcaggtacttctttttccagtatggggttgtataccagctgaagatagcaaacaatagcagaagtattgctgtctatctgctttcctggatatgtgtggctgtgatttttggtctgttcgtgctaatgtcctatgctcgagacaagtatgccgcaaagcagcacctttactaccgggttgttcaaactgctgtcatcactcttgtagtgctagtgctggttttgtttctgaagttcacggaatttcaaatcattgacatcttcactagtcttttggcatttattcctactggttggggcttgatttcgatcgctcaagtaattcggccattcatcgaatccactgtggtctgggacagtattatttctgtggctcgtttgtatgagatactgcttggagtgttcattatggcaccagttgcattgctgtcctggttgccgggatttcaagaaatgcagacaagggtacttttcaatgaaggttttagcaggggcctccagatatcccgtattcttactgggaaaagaacaaatacagtttgaggttctgacccagattgtcgcggcggtgaagcagcggtgctctatctcctatgtacagcttagcaattcagtgtggaagggctttgtgcttactgatatagcttagatccatattgaactcttccagtagcttttatagctatctagtttaggagtccagatttgtgattttggcaatttaggtattcagttcttttgtacattggttgagctagttgtgtgtagctgattctattgcagcaccaccggtgagctctagtgacttatttgttgacctctgctggaagttgcatcttttgtgctagcaactgtgtcgtgactcgtgagtgctattgctctgctgaaggtataaaagttgctggaagggatgttc

SEQ ID NO: 33504 - DNA, 1277 bp, Zea mays
  Clone ID: UC-ZMFLMO17127D03_FLI
tcaggctatattgaccatcatcagagtctttcatcagaagataagggatggggctgtggatggagaaatattcagatgctgagctctcatctattgaagcaaagacaagaagctagagaagtattatttggtggttctggatttgttcctgacatcccttcactccagaggtggcttgagattgcttgggataaaaaatttgatacgattggctccagccactttcacaacaaagtttatggtgccaagaagtggatagggactacagaatgtgctaccctcttccgctcttttggcctccgtgcaaagattgtagattttgatagcacagaatcatccgacctccaaagtaagaacagtagccatgcagcaagtcaagtacgaggacttatggataagttcttaataaagagtaattcccctaaatcatcgtctgaattttgtcaagaggatgctgaaagtatgagaggccaacacgcccttgttgactgggtttggaactattttgcatgtgagcgctctgatagattaaccacacagcgtgccactgtcagcaataaaacaccactctattttcaacatcaaggtcattcaaggacaattgttgggattcaaaaggaaatggttcaccgtggatctcaagaacaatacacccttttgattttagatcctggtcatagaactgcagatctagaaaggtccctaagaagcaaaaatggatggcagcgtctggtgaagagaggtgtccacacgctcaggaagccacagtatcagttatgttatgtggatcctggaattgctagttcagaagagatggagcaactgaagactattgatagtatgcttgtcaggttttaggttcctgggcactcccctggttgaagaaacaagaacatctaatccattgccgaacggtgcgctgtacgaatgacacagcaaggatgggcctgcagaaagatctttgacgctgcctaactgaatctgcttgcagactggatctactgttgtttggaggaccttagaagggtcctgactgctttcgtaactggacctgcccgttgggcttgttcggttatctgaacgactgaacctgtggtgtaggtaaacgaagcagagcttgatgtacagtacagtcgcttgtgttgaagtggagagaataaaagtgtttgtacatataataacatcctgcagttgttaatcttttgttacacatctgatgccgcccgcgcactcagctcagttgactggaatattgactcaaggatcgtattctgcac

SEQ ID NO: 33505 - DNA, 1928 bp, Zea mays
  Clone ID: UC-ZMFLMO17127F03_FLI
caaatgcagtgcacatcatttgtttctgccttgtcttgcattattgtttttgccccccccccccctaacatcgctctggtttgatttcagagaaataattaatgttaccatgaactcctcaagttaaaacttatcctatatatgccatgagaccacaactgcaactcgtacgaataaaattgatatccttttacgttattctagtgttgtttttactcatccctcatattcaaatgaattgaacaaaagtacagaactttattgtttattttctcaacctaacatgcaacatttcatcgttttcgtatccagatgtgtgttgttatctttattggaacaaatggccagacgtatttcatcacggcttcacttgttacaagcatccagaatttcccaaagagcaggggcccaacagtgggcatcctcaaaggatttatgggcctaactagcgccattctgacacaagtttatacagtgatgcacactccagaccatgctgcgcttatcttcatggttgctgttggtccgtcgctggttgccattggcttgatgtttgttattaggcctgttggtggtcacaggcagatacggccatctgacaagaacagcttcatgttcatctacactgtatgcttgctcctcgcctcataccttgtcggtgctatgcttatccaagatttcctgcaaccaagctatgatgtggttgtttttctgactgtgattctgttcgtcctccttatttcaccaatcgcaatccctgtgattgtgtcgttcatgccggaaaaagctcagcatctcatggaagatgctctcttatctgaaccattgacaggagaggcaagcagttcacgacaaaaggaggatcaaccagaggtcattttaagtgaggtagaagaggagaagtctaaggaaactgattcattgccgccatctgaaaggagaaagaggattgcggaattgcaggccaagctagtggaagcagcggcaagaggtggggttagaatcaaaagaaggccacaccgaggggataacttcaccctgatgcaggcattggtgaaggctgatttttggcttatttggctatcacttttgcttgggtcgggatcagggctgacagtgattgataacctgggtcagatgagccaggctattggttataaaaatgcacatatctttgtgtcactggtgagcatatggaactttcttggtcgtgttggaggtggctacttctctgagatcattgtcagggaacgtacatacccaaggcacatagcattggcagttgctcagatcgtgatggctgctgggcatttcctctttgctatggcttggcctggaactatgtacattgcgagcttgctggttggacttggatatggagctcactgggctattgtgccagctgctgtctccgagctttttggtgtaaaacactttggtgcgatgtacaattttctcatactagcgaaccccgcaggatccctcatcttctcagagctaattgtcagcaacctctatgaacatgaagctgagaaacaagctagccaacaccagatgtcagcattgctgtctccacgattgcttcgtgataccggctttcttgcagatgatgcactcaagtgtgaagggcctgcttgcttctttttcagctctctgattatgtcggtgttctgtgctgttgccgctgggttgagcctcctcgtcgttcaaaggaccagacaagtttatcctcgcctctacagttctgtccgcacttgagattctccaattctccatggatgggaagctcaaatcctcgtattctatgtccgtttattcttgcatacatatgcacaaagataagtatgtgaataaattctcaaatcttttcctaagctggtattgtaaaaacagatattcttgaatggactgtcccttgtgacttgcct

SEQ ID NO: 33506 - DNA, 1240 bp, Zea mays
  Clone ID: UC-ZMFLMO17127F04_FLI
cagaccagcagcggctcatctttgctggaaagcagcttgaggacgggcgcacgcttgccgactacaacatccagaaggagagcaccctccacttggtgctgcgcctcaggggaggcatgcagatcttcgtgaagaccctgaccggcaagactatcaccctcgaggtggagtcttcagacaccatcgacaatgtcaaggccaagatccaggacaaggagggcatcccaccggaccagcagcgtttgatcttcgctggcaagcagctggaggatggccgcacccttgcggattacaacatccagaaggagagcaccctccacctggtgctccgtctcaggggtggtatgcagatctttgtgaagacactcactggcaagacaatcacccttgaggtggagtcttcggataccattgacaatgtcaaggccaagatccaggacaaggagggcatcccacccgaccagcagcgcctcatcttcgccggcaagcagctggaggatggccgcaccctggcggattacaacatccagaaggagagcactctccacctggtgctccgcctcaggggtggcatgcagatttttgtgaagacattgactggcaagaccatcaccttggaggtggagagctctgacaccattgacaatgtgaaggccaagatccaggacaaggagggcattcccccagaccagcagcgtctgatctttgcgggcaagcagctggaggatggccgcactctcgcggactacaacatccagaaggagagcacccttcaccttgttctccgcctcagaggtggtatgcagatctttgtaaagaccctgactggaaaaaccataaccctggaggttgagagctcggacaccatcgacaatgtgaaggcgaagatccaggacaaggagggcatccccccggaccagcagcgtctgatcttcgccggcaaacagctggaggatggccgcaccctagcagactacaacatccaaaaggagagcaccctccaccttgtgctccgtctccgtggtggtcagtaagtcatgggtcgtttaagctgccgatgtgcctgcgtcgtctggtgccctctctccatatggaggttgtcaaagtatctgctgttcgtgtcatgagtcgtgtcagtgttggtttaataatggaccggttgtgttgtgtgtgcgtactacccagaactatgacaaatcatgaataagtttgatgtttgaaattaaagcctgtgctcatt

SEQ ID NO: 33507 - DNA, 2603 bp, Zea mays
  Clone ID: UC-ZMFLMO17127G03_FLI
actccccgaggtgatctaaaactcatctttgctagctcaagaagatttggagtgctcaaataacttgagtcctctttgtacatatatcatgagaagctagtgtaatgtagcatcgggtaaataattgatgaaagtagcacaagcatgaccctcgaggtgaaagcattactacatggtggttacatgattacacgacatgtgtggatttggaagcacaaagcactatgttgtgtgcttatgcagttcagtcagtaatgtgtatgctacacatcaaccaggagagagcatcactgacttaggaagaacaaaaatataaagaaagagaccctgtgattgttggaacaaggtccactgacgttcgggaggggtcactaacgtgtgggccccatgtgcgacagggtccacgtgcagtgaaccaactgcacggtgcagtacgtcattgttaggatctttactttaagccactttttggtggcttaggcttctggcctaaatgacttcagctctactgtttttggtttcaaaagtcgttgttgtgtgtgcacgtttggtagggcttttgattaatccgatggagaagcccaacaaaagccctgccaaagagggtcttaacgtggaccgtgcttcttttaatggtttcagttgtgtgtttttgataatttcatattttccgctatcaagagtattaacactttgcccactctacctaatggaactgtctatcagaattttattccttagaacttaaccattaatgattgtttccttgtccttacgcagtgttacttatcaaggctatgcgtaaaactattcaactatttcactaaatgacaggaatacttggagcaatgcagaactggtcagaggattggaaaatgttcaggttcaagctgtatctgcttcaggcgttgtttcagcagcaataggatctgatggttccctatgggtttgggggaggtcaaagcgtggccaacttggacttgggaaggacattgtagaggcagcagtgccatctaaagtgaaagctcttgctagctacgacattgttaaggtgctaattttctcacagaaatttaataaattgattggtgatgacgttaactgaaggaataacgttaggtatcatttggatgggggcattccatggcactgacaaaggatggaaagctatttggttggggctactcggaaaatggaaggttaggagaaatgggccaaagcactagagctctttctgcagaagaatacataggaaaaacggtagacaagtattctagtgtaatgctggaggctgttgaaaagatggttgaagagaaaattcagagtgaagacgatatgcccattatctgggaaccatcccttgttcatgaagtgagtcgtcttgaggtgtctgatgtgtcttgtgggcttgaccattccttgattctctgctgtgagtatttctttctactacaaacggaactccttgcgtgtcatttgtgatggataatgcttttcttattcttttatgctgagcacgtggtaaccagagtcaataaaactatgctgtaatgttgcttcaataatatttgatgtgatcaaacattggaaatatcttgtactgcggatgcaaatagtacatgttttagataatatttggttatttacctgtcattatcacatcttgacaaatcttacttggtcctattacagttcattgtatggacaatttaacatacaatgcaagtagctgtacatttgttaatgttacttataggatcaacatagaaaaagttatgtcatcttaacctcataggaaacagactacaagaaaatgaaaaacggtgagaatctatcattctcaaattagcctttttggttattcttattttcaaatctctatctcccactctcatatggattctgtaattttccagctgatggcattgtactgagcggtggtgacaacacttatggacagctgggtaggaaggccgggccacccgaattgcttcctgttggcatgagctataggccattctccatgtcggcaagtgtcggccactctcttgcactatgctacacaacgactgaaggcaccgctggtgtggaaactggcctcctctcatggggatggaactgcagctcccagctcggacggtccagccaagaggacatccctgcactggtggactctctgagcagggagaggctggtatcggcctcggctggtcgagtccattcggttgctctcacgtcgaaaggtgaagtttggacctggggatcgggcaggaatggcaggctaggcctgggcagctccattgatgaggcggcgccatgtcttgtagataccctggaaggggtagaagtcttgcaagttgcagcagggatggaccataatctcctcctggtcgcggagtaggttggtatgctggttgactggaagatggtactccctttgttcttaattataggacattttgtcttttttagatttataacttttgctacatatttagatatacaccttgtctatatgcataataaaaatggtgtatttagaaaaaaaaggaaaacatcttataatttgaatcgtttggagtatagttgttagttgaacgggt

SEQ ID NO: 33508 - DNA, 1485 bp, Zea mays
  Clone ID: UC-ZMFLMO17127G09_FLI
ccgagccagcggcgatggcggccgagacgagaagcgttgttggaggccggggcttagcgaaggccgttgggaatgttgataccggtggcgaggatgggagggatgcagattccagtggcggtgacgcctcggggaagattttcgtagggggtgtagcttgggagacaactgaagaaacattcacaaagcattttcagaagtatggagctataactgattctgtgatcatgaaggacaagcatactaggatgcctcgcggatttggatttgttacattttccgatccatctgtgcttgacagggttctagaggatgaacatgtcatagatggaagaacagttgaagtcaaaaggactgttccaaaagaggaaatgtcatcgaaagacggtcctaagacaaaaaagatctttgtgggtggtattccaccatctcttaccgaagataaattaaaggagcacttctctcgtatgggaaggtggttgagcatcagattatgcttgaccatagcactggacgctcacgtggctttggatttgtcacatttgaaagcgaggatgctgttgaaagggttatgtcagaggggagaatgcatgatcttggagggaaacaggttgaaattaagaaagctgaaccaaaaaaacctggtgtgggtgattcaagctcaaatggaagacacagtcgtggtggtggtcatcgtgattcataccgtggtagtggtggcaatggcttttctgggaacagcagtggtggtggctatggatacagtggtggctaccgatcaactgctgcagcacattatggcagcacagcatatggtgcctatggcagagggtatggatacggtggtactgctggctatggcttaggttatggctctgcatatggtggctccatgtatggaggtccatatggtgcctacgcggcatatggtggtgcctatggaggtggtgcatatggtgctccaggagggtatggcgcgggaggatatggcagctacggtggggctggaggcatgggtggtggtggcagcgctggtggtcggggctccagcagataccacccttatggaaaatgataatccattcactgcctttgccttcctctaggatctgataataaagctatacattcccaccgagaaaatggaacattccattcaccttgttgaatcagcggcatctgaacatttttttcctggaacaaagattctagtctgtagtcgctgaaccctgaactgcctcatcccacccccaccccctgagctttctgtagaagctgcagctcaaattctcataggcatgagccttagaaggcccttgaaactacaagctttgtggtaacaatatggtgtcatggaacagatgtattttgatgtaacattcgctcactgaccagtgacttcgctatctctgcttatgtatgtagagaagcttagcaaaggattggactgatactattgaattgtgtgggtttctatttgtctcc

SEQ ID NO: 33509 - DNA, 1284 bp, Zea mays
  Clone ID: UC-ZMFLMO17127H02_FLI
gttttctcccttcccctgcgggctggagagcggcggcgaacgagacaaggtcaccggtgacgctcctcacctactccctgccgcctttcgctttccggcccggcctgccgcaagctcgcgcgccgcctacatcgacccctccccgcgccgcaggccgcctcccacagacgcggggcagccacgtcgcccggctcggagggattcggttcggcccgtcgtgctcccctccgcactcttctattggcctggagagcagcggagatccaccagcaatttggattgcttctcctttttcttggatatacttggtctcctcggtgttggctaggcaatccagctttccaaagtgtgatcggacaggtttattttggttctgagatggctgatgaggactcatccgacttcaccttctgcagggttagttctgcagaaaatgacggtcaaccagaatctcctaaagccattcctatggcaagtatgacgctcgaggatgttcgtgttaaaagtgcagatacttcaaagaataatggcatgaaaactgttgactcagaaaaagataggtctggtaacaatgtcagtgtttcaacaaaagacgataacatgaaagcaccagttacacatacaggtagtggagcagaatcaaatgtcccattacaggcaaaacgttcatccaagaaacccgcagcacgggcaaaggttccttttgagaaaggctatagtcaaatggattggctaaaactgacacaaacacatcctgatctagctgggcttaaggggcagtcaaaccgaaggttaatttctttggaagaggttaagcagcacaaagcaggagattgtatttggacagttctcaaaggccgcgtgtacaacattgctccatacatgaaatttcatcctggaggtgttgatatgcttatgaaagccgctgggaaagactgcactgctttgttcaataaataccatgcttgggtaaatgcagagttcctcctggagaagtgccttgtcggattccttgatcccaccgcgtagatatccaggtctcatggcattttatcacacccggactgtttgtagggcaggcacctcagtcgacgaattaaagaatctaaatgtttgtatcacaacgggagtacaacaattaaattctgtttcaaaaagaaaacggaattgttatgacgatgagaaaaaatcagtctaatactggtatgccattacagtgcgaggtgaattacaacacctgatgaaattactgcattgtcaatatgaaaacatgtggttgtttat

SEQ ID NO: 33510 - DNA, 508 bp, Zea mays
  Clone ID: UC-ZMFLMO17127H04_FLI
cccaatactcaaaacactatacaaaattttgatcaagagggagcttacgaccaattccatcctccaggcaatacgtgatgaatcaatgtatgatccacgggaaagaattgagatggcacagaggcagtctctttaccggccatctcttcttggcctgcctaaagctgatgcgaaggcctaagatatggtgtttcatcctacctgatgagagcttgcaggagccaggaggcgcttactggtcttcaagatccttacgtgcctcagatgtgtgttgtgtcatgcgtgtacactaatacactatagagttgggtgatggcatatttagcatgccaggataaactttattgcccgtgtctgaaatacaagctgttgtgattcaaatttatttgtcacttagactggagtaaagatgtgtatgccttttattttatgatggcttcagagtctcaaaattggttgtaagattactccctgcgtcccaaaatataattcgttttagattaatcat

SEQ ID NO: 33511 - DNA, 741 bp, Zea mays
  Clone ID: UC-ZMFLMO17127H06_FLI
agatttttgaaatctggcgtctaccttgtactggagaaacttgaacttcaagtctatcagagattagttaagaaaatccacatcattcagagacagaaggaaccagctaaggcacatcagattaagctagatgttgtcgtaaaagctctgaaatggcttgaaatcgacatggatgtggatgaggtggagtgcatcatggcatgtcttatatacaagaaccttataaaagggtactttgctcacaagagtaaggtccttgtcctcagcaaacaagaccccttccccaagttgaacgggaagcctgtttaaatacaattgtcacggagaaatcctgtaatacaatgattttttttttgtttagtatgcagagatgctttccatattaagtgaaactccaagcctgacaaggacatttagggcctgttcggttataccggaataagccaggattcattctagctcatcaaaaatctatataaggccttgttcgtttgtgccggattggtgggtcggaacgattcctaaccagattgtttctctaaattatataaactttgattagctgaaacgattccgagtgcaatccgacacaaacgaacaaggcctaaattagagaagtaatccggctaggaattaatccgggactccaatcccaaacaaccgaacaaggccttatatttaatcacctctggatgtaatgtaacctgtatcattgttgcctcattgaccttcattttccat

SEQ ID NO: 33512 - DNA, 1715 bp, Zea mays
  Clone ID: UC-ZMFLMO17128A01_FLI
gtgcgcgtgcgcctccaccgccagaaccccgaagaagagcatccccctccttggagattttcagtaaccgttcctgctcgacgccgacggcatgccgaccgagcgcgtcgatgtcgcggtctcctcacggacgctgctgcgggcgtccgacccgcctccggacttccccgcggtgctccaggcgtccaacctcgacctcatactcggttccttccacatctacctcatcgccatgtaccccgccccggccgcgggcttccccgccgtggtagctgccgcgcgggccgccatgcccgctttcctctctcgcttcttccctttcgctggccgcgtcgtcgccaacgccgacaccggcgtgcccgagatcgcgtgcgacaacaccggcgcggagctcgtggtggcgcgcgctggggtgaggctcgcggacgtcgacttcgcggacgccgaccgctcgctgggccgcatcgcggtgccgttccagcaggacctcgcgctgtcgctgcagctggtgcggttcgcgtgcggcgggttcgcgctgtcgtgggggaccaaccacctgctcgtggacggccacggtctgacggcgctgcccagcgcgtgggcggagctgctccgcaccggcggcctctcgtgggagcctcaccacgagcgggcctcgctcttccggccgcgggacccgccgcggtacagcgcgtcgctggacgccgagttcacgcggtacgcgccggcgggcctcccgaactcgctcctgacggccacgctcgtgcgccgcaactacgtggtgtccgccgcggacgtggaccggctccgcgccgcggccagcacccccgcgcgccgcgccacgcggctcgaggcgctgtcggcgcacgtgtggaagctgctcgctgcggccgtgggcgggctcgacgcgcactgccgcatggcgtggctcgtggacggcaggccgcgcctggacgccgccaggtacgacggggccaccgtgcggcgctacctcggcaacgtgttgacgtacgcgtcgcgggaggcggccgtggaggccgtgtcgtcgtccccgctggccgacgtggcggccatggcgggcgcggccatcgcggaggtgttccggtcggagcggtacgaggagctggtggactggatggaggtgcacaagggggtgttccgggagggcggcaagtggacggaggtggtgggcacgggcatggggagccccgcgctggtggtctctacgttcgtgccgttccgcgtggagggggactttgggttcggccggccgcggttggtgtttccgtgggtgcgcccggggcggctgggttccgcggccatgacggtgtcacggagcccgcgggaggacgggtcgtggctcatcaccgccaggatgtggccgcgacttgccgacgccgtggacgcggacccggacgccgtgctcaagccggccaccaccgcgcggctcgggttcggcgcgcccgatccggcagacgtgatgcagcatgctaccagtcgcatgtgagtcatagagtggtttgccgtgcgcgaggcgagccggtgggcctcagccctcagactcagggtggcacgggcggacagaacagcgcccctgtgggcctgcgtatgacatggcggcatggcgctgacgggagtttcatgtgcgcccatcgatctggtacagttttgtacatgttttatcggcatgatccaagaaaatattttggacattc

SEQ ID NO: 33513 - DNA, 1970 bp, Zea mays
  Clone ID: UC-ZMFLMO17132E07_FLI
gccggccaccttcccggaggggctcaaaagcttggacctttccgggaaccggctgagcgggggaatcccgccgggtctggggagctgcgcgacgctccggcgcctgcgcctgtcctccaactggttggctggaaccatcccgccgcggatcggggagctcgcgcggctccgcgttctggacctgtccgggaaccggctcaccggcggcgtgccgccggagctcctccattgcaggggcctcgtcaggatggatctcagcaggaacttgctccacggccggctgccctcgggcctcgcgcagctcaagaacctgaggtttctctccctctccggcaacaatttcagcggcgagataccttccggtttgggccagctggggtcgctggaatttcttaatctgtccaacaattctctatcaagggaggttcctgctgatcttgtggcactgcgaaatcgcactgtcttactgcttggcaacaacaaactatctggggaggaggagataactgctgctgctcccggctcaccagttcatgtagttactgctcattcagttacaggtgaactgtttcctgtttctcctatagcaacagctatccgtaagctgatcgatacaggtccaggcacttctaatggcagcaccacgaccaccagcagcagcaatggtggcgatggtggcttgggaaccaaagagattgctgccatagcttcagcatcagccattgtggtgcttctgttagttgcactcaccctgtgcatctgcacaaggaaatggcgtctgaaaccatcagagcgctcctttgcgagcaaagaagtcaaggttttcgctgatgttgatattggagcccccctgacatatgagaccgtcgttcgcgccactgggaatttcaacgctagcaactgcattggtaacggcggctttggcgcgacatacagagccgaggtggcacctggagttcttgtggcaataaagaggcttgctattgggaagcagcacggcgacaaggagttccaagcagaagtgaggatcctcgggcaatgccgtcatcctcatcttgtcactctgttggggtaccacatcaacgagtccgagatgttcctgatatacaactacctgccaggtggcaacctggaaaggttcatacaagagaggggcaggaggccgatcagctggagaaggcttcacaagatcgccctggatgtcgcccgcgctctcgcctacatgcatgacgaatgcgtgccccgcgtcctgcaccgggatgtcaagccaaacaacatattgctcgacaacgagtgcaacgcctacctttccgatttcggattggcgaggctcctccggaactcggaaacgcatgcgacgacggacgttgccggtactttcggttatgtggctcctgagtacgcaatgacatgccgcgtgtcggacaaggcagacgtgtacagctatggagtggtgctgctggagctgatttcagacaagaaggcgctggacccgtcgttttctccatacggaaacggcttcaacatcgtcagctgggctgtgaggcttatccagagaggcagggtccgcgagttcttcgtcgagggcttgtgggagaaggccccgcatgatgatctggtcgagttcctgaacctggcggtgcggtgcacgcaggagtcgctcgcttctaggcccacaatgaagcatgtccttcgatgcttgagggaactccgtccaccttcgtactaggaagacaaggagcgcccccgggcgcctaaatacttaactaagaagagctgatgggctgacagctaggtcgtctccctgcgacgccaagggggggttgggtagtagctgtggtgaggaggtgccatcaattttgatctcctctagcagcctcctctccaccaggttttactgatgcatcacattctaggtagatggatgcttccttcctccccctctctctctctgtccgtctctcaaaaag

SEQ ID NO: 33514 - DNA, 903 bp, Zea mays
  Clone ID: UC-ZMFLMO17132E11_FLI
caacaacctgtccaagaaccagcagccaaaggacaagacaagagacacaacgaaaggaaaggaaccaagagaaagatcgagaagagaggagccttcgcttttggacttgcaccgtcgtgatctgtcccgcgaccacatgaggatccacccagcatcccccaccgccggcggcaagaaggacctccggcgcctgccgcacgtgtacagcaaggtgctggagctgccgctcccggcggacaccgacgtccaggtgttcgaaggcccagacgccttccacttcgtcgcggcgccggccgccggtgcgcgtgccgccgccaccgtgcgggtgcgcaccgtcaggatccaccccggggtcaccaaggtcgtggtgcaggccggagccgccgaacgggccgctgacgacgacgccgccagcgacagcatggagctcgacaggtggcggtcccggctgcccgagccgacctgtccggccatggcggtggccgggtacgtcgacggccagctcgtcgtcacggtgcccaagggccccggtgccgaggaaggcgccgacgcagggcaaggcgaggttacctggaggtgcggcggcggaggcaagatcactggaagactcgtggttgtacagtaggagcgtctaatctatgtactactactccatagtaatgtcttgccatctttctttctttttttggtaaattaagatgggctagctgttcatcatgttgccttccccttccctgcttcgcatcagagacagtcagacaggcgatgtttcatgagctatgttctcttcctcctgcttctcttctcaagcatgtgagaaccagctactgtggattacctttggttgccctaaaatcagatgtaaatttctagataaacaaactgtgcggtgtttgtgtgccc

SEQ ID NO: 33515 - DNA, 1296 bp, Zea mays
  Clone ID: UC-ZMFLMO17132F03_FLI
cggtcgccagccgagccgagccgagccctgctctctcctccagctccccaaatcacactccgccatggccggcacgtgcgctcacgtcgagttcctccgcgcgcagccggcgtgggcgctggcgctggccgcggtgggcctgctcgtggccgtgcgcgccgccgcccgcttcgcgctctgggtctacgccgcgttcctccgcccgggcaagcccctgcgccgccgctacggcgcctgggccgtcgtgacgggcgccaccgacggcatcggccgcgccgtcgccttccgcctcgccgcgtccgggctcgggctcgtcctcgtcggccgcaaccaggagaagctggccgccgtcgccgccgagatcaaggccaggcaccccaaggtccccgaggtgcggactttcgtgctcgacttcgccggcgaggggctggccgccgccgtcgaggcgctcaaggactccatccggggcctcgacgtcggcgtgctcgtcaacaacgccggcgtgtcctacccgtacgcgcgctacttccacgaggtggacgaggagctgatgcgcaccctcatccgggtcaacgtcgagggcgtcacgcgtgtcacgcacgccgtgctgccggccatggtcgagaggaagcgcggcgccattgtcaacatcggctccggcgccgcctccgtcgtgccttctgatccgctctactccgtctacgccgctaccaaagcgtatgttgaccaattctcaagatgcctctatgttgagtacaagagcaagggtattgatgtgcaatgccaggtgcccttatacgtggcgacaaagatggcatccatcaggaagtcttccttcatggtcccatctgctgacacctatgctcgtgctgccgttcgtcacattggatacgagcctaggtgcacaccatactggccacactctgtcgtgtggttcttgatctccattcttcccgagtcccttatcgacagcgtgcgcctgggcatgtgcattaagatccgcaagaaggggctggccaaggacgccaagaagaaggcgctgtgattgatgtttcagaatgcatgttcagattcgcacatttcctcatcacctgtagtagacacgtgccttgctgtagtcactttattagctaccattacctcctgagtctgttaagaatcgagaatgtcattgttccatccgcggttatgatgatgaaaaatacgattcttcaattcaaaatgtaacactaatacgagtaatgatgcatgaaattaacttgaagaagttgtgcaactcagttgtttttctgaacc

SEQ ID NO: 33516 - DNA, 672 bp, Zea mays
  Clone ID: UC-ZMFLMO17151C09_FLI
gccgtttttcctcgttctcgatcccccctgccgcttccagctccgatcgatctgatccctccccaccaccacgcccatggcggaccaactcaccgacgaccagatcgccgagttcaaggaggccttcagcctcttcgacaaggacggggatggttgcatcacgaccaaggagctgggaactgtcatgcgttcactggggcaaaaccctacagaggctgagctccaggacatgatcaatgaggtcgatgccgatggcaacggcaccatcgattttccagagtttctgaaccttatggctcgcaagatgaaggacactgactctgaggaagagctcaaggaggcctttcgtgtgtttgacaaggatcagaacggcttcatctccgccgccgagctccgccatgtcatgacaaatcttggggagaagctaactgatgaggaggtagacgagatgatccgtgaggctgatgtcgatggtgatggctagattaactacgaggagtttgttaaggtcatgatggccaagtgagccacaaaagcataagctcaaggcggagaggattgtgcactgcatattagtcaagatgcaatgcaactcttatttcatcgaattccagtgaaacattctgctagttgtagtttttgaaaggcaatgcagttgctgctttgttcttc

SEQ ID NO: 33517 - DNA, 1236 bp, Zea mays
  Clone ID: UC-ZMFLMO17154G12_FLI
gcgagctatatggcgtgcaatcgcggcgtgaaggagcaggaggaccccagcgcggcgtctgcagccccagctccggcggctgtggctagggcgagggcggcgcggcctccgaggccaaggagccgcaaggggctcggcgtgcggcacctgctgaagccctgccgattccttgcagctgtccagagggcgaatgccagggtgagggaagcgggggaggcgaccctcgtggcagcgcttgcggcggcccaaaaggagagcgagagggagaacgaggtggtggccgatgtatgcggcgggtggaagagtgaggatggaagtttaaattgtggatactcaagcattagaggcagaagggtaaacatggaagacttctatgacataaaatcttctagagttgatgataagcaaataaatttttttggagtatttgatggtcatggaggtacccatgctgctgggtatttgaaacaacacttgtttgaaaacctcctaaaacatccagcattcattggtgatactaagtctgcaatgagtcagtcctataaaaaaactgacgcagatttcttggatactgaaggcaatattcatgttggggttgggtcgactgcatcaacagcagttttgattggcaaccatctgtatgtggccaatgttggtgattcaagggctgtactatcaaaggcaggcaaagctattgcactctctgatgaccataaaccaaacagaagtgatgagcagaaacggattgaggatgctggaggagttgttgtttggtctggaacatggagagtaggtggtatacttgcaatgtctagggcatttggcaatcgtttgttgaagcagttcgttgttgcagaccctgagattcaggatctagaaatagatggtgatacggagtttcttattttggccagtgatgggctctgggatgtggtgccaaatgagcatgctgttgcatttgtgaaggacgaggatagccctgaggctgcagcccggaagcttacggagatcgccttcaggcgtgggagcaccgacaacatcacatgcattgttgtagaattttgccacgataagatggttgatggttctcccccgtcaaccaataagagttgacttcatcattcgtgttttaattatcccagatttgctaccatgatgctgcgcctctcgaagtatggtctcatcattggttgtctattatgttcgtttatagtcctgccatgctgattttgtttg

SEQ ID NO: 33518 - DNA, 1311 bp, Zea mays
  Clone ID: UC-ZMFLMO17156C09_FLI
ctttgccatttagcaagcttacattacacaagacagagagtccattggaactttcagagtgcccttccaaaggaaaacaaatcaaccaagggtcccttagcgatgatgagtttgatgatgtaaaaaaggagaatgagggcgttggactagatgacttcgaagttctgaagctcgttggccaaggggcatttggcaaagtatatcaggtgagaaagaaaggtacatctgaaatatatgcaatgaaagttatgaggaaggacaagattgtggagaagaatcatgctgagtacatgaaagctgagagagatatacttacaaaggttgaccatccttttgtcgtgcagctgaggtactcctttcagacgaagtaccgactttaccttgtcctggacttcattaatgggggccatctcttcttccagctttaccaccagggtttatttagggaggagcttgcacgcatctacactgctgaaattgtatctgcggtcgcccacctccatgccaacggtattatgcatagagatttgaagcctgagaacatcttactggatgctgatggtcatgtaaggatctgttgatatattctctgcccatcctacatcatcttctgctcatatattggaagtttgaaaaaaaatgccccttcttgacttgtcgacgtgtttaggctatgctgactgactttggggtggcaaaagaatttgatgaaaacactagatcaaattcaatgtgtggtactgttgaatacatggccccagaaattgttcagggccgaggtcatgataaggctgcagactggtggagtgtgggagtccttctttttgaaatgcttacaggaaagccaccgtttgttggtggaaacagagacaagattcagcagaagatagtaaaggagaagataaagctgccaacatatttatctagtgaagttcactcaatgttgaaaggattattgcacaaagaagctggcagaaggctgggaagcggaccaggcggcagtgacgaaatcaagaaccacaagtggttcaagtctgtaaactggaagaggctggaggcccggcagatcgagccaagcttccggccgaatgttgctggcaagacctgcattgcgaactttgacgagtgctggacgaacatgcccgtgcttgattctccggtggccagccctgttgcggccaacagcaactttgtggggttcagttatgtgaggcccgcaccgttcctccagaagccgagtccccttggctaaagaactacttccgtgatctgatatctaccccagagttcaaataactatctttgagtccg

SEQ ID NO: 33519 - DNA, 3312 bp, Zea mays
  Clone ID: UC-ZMFLMO17161E07_FLI
aaaaaaaggggactcgctctcgccaactcccctgctccacagccacaagcccactcggatcccaatccgagccctactcgtcgtcgacgacgcgacggccccgcgtgcgaagccagccagccagccagccagccatcgccgtggaccggggagcccggagggatggaccccgagaagcgcggctacgagctccaaaattttgtggcgcatgatgcggaagttaggtccctgtctattggcaaaaagtctaggcgtgtgttcatcaccggtggcaatgatcgcaaggtcaaactgtgggccattggcaagcaaactccacttctgaccttgtccggccacacaagtgcggtggaggctgtgcagtttgattcagcagaggtgcttgtgcttgctggctcgtcaaatggttccatcaagctctgggacttggaagaagctaaagttgtgcggtctctcactgggcacaggtcaagttgcactgctgttgaattccatccatttggcgagttttttgcatctggttcgtcagatacagacctgaagatatgggacataaagaaaaaaggatacatacacacatataagggtcacagaggagcaattaaaacaatcaggtttacgcctgatggacgatgggttctcactggtggggaagataacattgtgaaggtgtgggatttgacagctggaaagcttctacatgatttcaagttccatagtggacaaatcaactgtattgattttcaccctcaagaatttttgcttgcaacaggctctgctgataggacagtgaaattttgggatcttgaaacttttgaattgataggttcttctggacctgaggtattgcaagtttttttcttaaatcaagctggatctggttatgaaatcgataatttgaagaccacaaactatggcttctcaaattctttagcatgcatgttctataggcatggtaactacagtacattcttgctgtggccttgtattaatatctttgtctttcttataaatcgtaactgtaagaactttctcagaggaatttagctcgcatttccctacagctgattcagttttataagagttatggtctgacatctagcctgagcttcacgtatgtgttgttccctgttttttaaccgttgctctaaaagcacatgaggagaacatccatcttcctcttctgtgatagcttacatgactcctctctccagggtaccggtgtacgttctatggtctttcacccagatggtaaaacccttttctgtggattagaccaaagcttaaaggtattctcttgggaaccagtaaggtgccatgatgttgttgacatgggttggagtaatttggctgaccttagtatttatgaagggaaactcttgggatgctcctaccatgagtgccgtgttggtctatgggctgctgatatatcactcattggaccctatgctcttggtgtattgcccaaagcgaatttttttgctgagcttgtgcagtctatggaagataatcctgtgaaaccagttgatagcactgcaaattctcgtcctgcttcagcaatggcacattcaagaagttcatacaaaatcaaggagtctgggattgctcaaagcagggttcgtggctcacatttgactccagcaagtacagataagaccaagaaagataggagcagcactattccacgaagacctgattcgtctttaaagtcatctgttcagagtactaccctgatgaggcgtatgaagcttgttgatagtccttccaccaacacaaaaaatgtggaacgtaatgttgggcagagagacatttcattagcgtctcgtgcagtgatggctaataattctgcaactgctaagaaaagcaatcttacagaatcagctttagtgaaagatatttacactacatctcaggctgtttcagcacctattgttgtgcccagagacattttagaggacaaaacagtaagcaatgttcgtcgagggactggagagacagctgcagtcccagatgattttcggatccctgttcacagaagaaaaccctcacttagtggcagtgctgctgatagtgatagctcatcaagatcagtgttcactgaacctgatgtttgctcagagggtttgtctagcttaaaattctcctttgggctaactccatatcacaagaaagaagaatttggcgatgtggataatgaaggtattgcacaaatagcagaaaagatggaaagaacagtgtcgctggaccattctcagcagttaaatgatgataaatcctttgaatcaccatgctcaacaacagagactgccaaggtcaaatatgttagaggagttgctgtgccactggggaaaacaaagtctcttgttgagagatgggaaaaaagagagacttctagcactgattattcaccacaaactggttcttgtggtgatcgggcatcgagaaatgacaaccatccattccatctggcggaaccaagtacaacatttgaaaaggacctgtcaactgtagatgaagcgatggctcctgtcaatttagtgcggaaccatgatgaattcctaaatgctgtaaaacttcggctgacaaaactagagatgatgcggcatgtctttgaacaaagtggtattaaaggagcaattgctgcagtggcaaagctacctgacaatgctgttcaagcagatgttgttagtgctctcaaaggaaagcttgatcttttcaacctggaatttttctcaaattttctgcctgttcttgctgggttactgtgtagcaagactgaaaggcatgctatggtctctttggaaatgttgttggatcttataaagatttttggaccagtaattcattcagcattatcagcaaatttaggcgttggagttgacattcaggctgagcagaggttgcaacgttgttcacggtgctttaaccatttgcaaaagatccaacagagtctgaatccattgattctgcggggtggtcaaacagcacaacttgcacaagaactaagtctttcattgcaagatttggtggtgatctaggcaagatgatgtacaatgtatacgacagagtagataccattggttttggcgaaaagtgcccacagttgtgtagcttgtaattttgtcatagctttgcaagtgggttttgcaactgtgttttaacattgggctggcattcagcctggtcccctgttgtaaatgtgagcctagccgtgaatgagtctgtaattagccagccacatctgctgtgtgagcagccctgaacaaaaagactagttgaaaggaaacaaccgcaaaggggatcattttggtt

SEQ ID NO: 33520 - DNA, 1698 bp, Zea mays
  Clone ID: UC-ZMFLMO17161E10_FLI
aggtgatttatttaaccacagccgggaaattcgctcccacggggagtcgaacccaggacctgaggagtgctactcaaaccacctagccaactcggctagaggccctttagcactgcctacttttattttctaagaattttatgtcacttagtttcttggttcttattatcttcctagctatactttacttaaaaatgtgtagtatattggaagcaacaaacatacgagtcatcaagggcatcttcgatgctccaacttgggaggtcttagagatactttgcttacacattggaaagagagcataccaacacttattcatttaggttttcattagccacttcttagaagatacctttgcttatggagggttgggtaccaattgattgttttcagctgttgtatcatgttactctcatcttttgaatcctataaagaaacattaccattttttctcccctttaggaatgacctttcgtcatatgttgtaccctgcttacaagagcaaccgcactccaacacctgacaccgttgttcagggcatgcaatacttgaaggcatccattaaggcaatgtcaataaaagtaattgaggttccaggcgttgaagctgatgatgttattggcaccctggccataaacagtgtttcggctggttacaaggtacggattgtctctcctgataaagacttcttccaaattttatcaccttctttgcgtctgctcaggattgctccacgtggatcagggatggtttcatttggagttgaagacttcgtcaagcgatatggaccattgaaaccctcgcagtttgtggatgttgttgcactttcaggagacaaagctgacaatatacctggagttgaggggattggagatattaatgcagtaaagctgatatctaagtttggttccttggataatctactgaaatccgtggacgaagttgaggatgaacgaattaaacaggctttgatttctcactcggaacaggcaatcctttgcaaaaacctggccacgctgcgttctgatcttcctcattatatggttcctttcaagacagccgaccttgtatttaagaagccacaggatgatggagagaaattcataaaactcttacgagcattggaagcatatgcagaaggttcctcagtaaatccaatcatcagaagagcagcctatctttggaacaaacttaaatcatgatgacactgatgttttcagcgttgaataaaaaggaattttgtcaaggctgagagtttgggttcaaagcttggtgtcgtagtgctcaatactggcggcattgacttctgtggactcggcggccagctacactcacatcgcaacgcaaaatcaaattgttgctggcagaagtgcataaattgaaggtgccgatgcttaagcaaagcagctcagtgtttatacctcggaacttagctctgtagataagaaatgcacaacattgcccatgtattccgccttttttgagaggaaagctcgtggaatctatttgattttttttctctgtactaccaattacaaagggttgtaggtggagctgtggaggccagagcgggcaaccgtgtggcttaacattctaccacgcctagcactctagcaggtttcatgaagtctactacggtggtgaatcagatcgcacaactgttgtgttgtaggagcgagtatgtgctcgttttgtcgc

SEQ ID NO: 33521 - DNA, 1908 bp, Zea mays
  Clone ID: UC-ZMFLMO17169F11_FLI
ctccaccacccgcgccccgccgcccgccccgccgccgcctcctacttcgcctcggccgcctcggatccggaccgagcgccggccatggcgctcgccttcgacgagttcgggcgccccttcatcatcctgcgggagcaggagaagaagacgcgcctgcgggggctcgacgcgcagaaggccaacatcggcgcgggcaaggccgtcgcgcggatcctccgcacctcgctcggccccaagggcgcggacaagatgctccagtcccccgacggcgacgtcatcatcacaaatgatggggcgaccatcctggagcagatggatgttgacaaccagatcgcaaagctgatggtggagctgtcccgtagtcaagactacgaaatcggggatggtaccaccggtgtggtagtcatggcaggggcgctccttgagcaggccgagaagcttttagaacgtggtattcaccccattagggttgctgaaggctatgagatggcgtcaaaggtagcttttgatcacctagaacgaatctccgaaaagtttgagttcagtgcagacaacattgagcccctggttcagacatgcatgacaactctatcctcaaagattgttaaccgttgcaagcgggcattggcagagattgctgtcaaagcagtacttgcggtcgcagatttggagaggaaggatgttaacttggatttaattaaagtagaaggcaaggttggtgggaagctggaggacaccgagcttgtatatggaattattgttgacaaagatatgagccatccacaaatgccaaagagaattgaggatgctaagattgccatcctgacatgcccatttgagccaccgaagcctaagaccaagcataaggttgacattgatactgtcgagaaattccagacactgcgtgagcaagagcagaaatacttcgatgaaatggttcagaagtgcaaagatgctggtgcaaccctggttatttgtcagtggggttttgatgatgaagccaatcatttgttgatgcatagaaagctgccagctgtcagatgggttggtggtgttgaattggaattgattgccattgcaacaggaggacgaattgttccgagattccaagagttgagtcctgaaaagcttgggaaggctggattagtcagagagaaatcattcggaacaacaaaggacaggatgctttacattgagcagtgtgccaattccagagctgtaactatcttcattcgtggtggaaacaaaatgatgattgaggagaccaagcgcagtcttcatgatgctctttgtgtggcaaggaatctgatccggaacaactcaatcgtgtacggcggtggctcagcagagatatcttgctcaattgctgtcgaaactgctgcagatcggcaccctggagttgagcagtacgctatcaggtcattcgctgatgcattagacgctgttccactagccttgcctgaaaacagtggtttgtcaccaattgataccttgaccgcggtaaaagctcagcaagttaaggagagcaacccccactgcggcatagactgcaacgatgtaggcaccaacgacatgaaagagcagaacgtctttgagaccctgattggcaagcagcagcagatcctgctagcaactcaggtggtgaagatgatcctgaagatcgacgacgtcatctcaccgtccgagtactgatgaagcctgaaggaaggaggaaaaaaagagaggaacaggtggctatgctggatgagagtttagtaggcagcattgctgatgtgttgattggtttactccttgttcaggcgtgctccttgtatcttatgagctgcctagcacctttttgtgtgagggattgtttgtattgcacgatattgcatcgaggaatacgtatggacgtgttgtcaagaccct

SEQ ID NO: 33522 - DNA, 1914 bp, Zea mays
  Clone ID: UC-ZMFLMO17128B01_FLI
gagaggctcggccactgcaggcgggccccacctgagcaaagacaggcgaccatttcctttccttcacctcactggctcgctcgctcgcctttctctccgtgcggcgaccacggactgggcaaccgccaccgccctccctttccctgcgctagcgacgactgggcgaacgctgcctcgcttcgtcacctcttcgccggcggcgacgatcacccaccaggttgatgccgattttttggttgacaatttgaagattactaacttctatgatcctgagggcaagaagtaatgatccgcccaggctcaaaggactcgcaaaattatgataacaataatcaaagagtccatcctcaaccaatcgacgataacatgaatcagaacggggactcaatggacactgtgatcgggaggatattcaacaacatatcctctttaaaatccgcctacattcagctgcaggaagcccacaccccatatgaccctgacaagatccaggaagctgataaacttgtcatagaggagcttacgaggctttcagaactcaagcacgcttacagagaaaaacatcctaagccaatagctgcatcccctcaagattcacgcttgctttctgaaatacaagagcagcagaacttgttgaagacctacgaggtcatggtaaagaagttccagtcccagatccagtccagagacactgagataacccatctacagcagcaaattgatgaagctaaacttcggaaatcaaagctagagaagaaactgaaacagaggggcctacttaacagggagtcggaggaatctgacgaagaagagaactacttttccattgaattgacaccaagtttgtttacatctgccgttgataatgcctaccagtcgatacatgacttctcgaagcctttgatcaacatgatgaaggctgcaggttgggatcttgatggggctgctagtgcgatcgagcctggtgtggtttacacaagaagggctcacaagaagtttgcttttgaatcctatatttgccaaagaatgttcagtgggttccaagaagagagcttttctatcaaggattctaacatcagtgtttccaatgaggctttcttccaccaattcctcgcggtgcgagccatggatcctctggatgtcctgagccagaaccctgattcagtattcggaaagttctgcagaagcaagtacctatcgcttgtgcatcaaaaaatggaaggttctttcttcggcaacgtggatcagaggaactacgtcatgagcggcggccatccaaggacacctttctaccaggcattcctaaagctagcaaagtccatatggttgctgcacaggttggcgcactccttcgatccaaaggcaaaggtgtttcaagtgaaaaagggaagtgaattttcggatatccacatggagagcgtcgtgaaggacatcatcctagaagatgtcgcggagaggccgaaagttggcctgatggtgacgcctggtttcctgatcgggaccagtatcatacagtcccgtgtgtacctttcaggtgccaagtgtgctgactgactgactgactgaagatgcagcagctacacaaggagctagatagagggtcatttgcttcttggaatcttgggagagcttcagagctaccagctgcataagtttaaggtggactgtgctgtcctgtatgtaacgcgtgagagacctgttgtttatctgccgtgctgggttggacgccttttgccttttgtggagttttccatgtgccatgcgattctgtctaatggtacgatatgtttctgttcccctatgctgggtttccgtgtgctatactgctatgtaattctgcccaaatgtttgtacatgttatcagtgtgattggagagcctatgtgatgctcgtataggatgcacttttcatccg

SEQ ID NO: 33523 - DNA, 1794 bp, Zea mays
  Clone ID: UC-ZMFLMO17128B08_FLI
gtcaattagacatgcctgaagcaattccagaagatagcaatattgctgggtttggtgctgctactattgatggcccacttcacataccagatgggattcaatcagatgccatgctgccacgtgccaatgatgcatatggcgctacagctgcttttagtttgcaagttcctcctaacaaccaggttaacggtgcatctaatgattttgttattggcactctgtttcaaggattgactggaccttttattggtaatgagaaagaagtggcacttgctgacagagagcgtgctcaagtaaatacactgtatagtgaccattttcaagatgtcccatctgatttgcatagtactgatgcaaacatttctagtcaagatgtgactctagataactctggccaagcttgcgctcacgcaacggacggcatgacaagggagcttactcattttgttcatagtaatgctaatattttcgagagtaatgaggtccctgcttctgagattactggggtggaatataatcaaggtgcctctggttttcctcaaccaacggaggatgaaaatgcggtggggtataatcaagatgtctctggttttcctcgaccaacggaggatgaaaatgcggtagattataatcaagatgcctctggtttttctcgaccaacggaagatgttcaagatgcctctggttttcctcgaccaacggaggatgaaaatgtggtagattataatcaagatgcctctggttttcctcgaccaacagaagatgtaaatgcggtgggatataatcaagatgcctctggttttgctcgaccaacggaagatgtaaatgcggtgggatgtaatcaagatgcctctggttttcctcgatcaatgaaggatgaaaatgcggtggaatataatcaagatggctctggttttcctcgaccagctgaaaatgatgtgtctgctatgggagataattctggcttccatgaaaacaacatgggttctcttacggacctggatatggtgaatgactatgaactgaaggaaagcaatgattttgggagtgcaattaatggtgttgatacagattttctgaactacgacgatgatgacggcggggacttcgacgacgccaacgacgatgagccaaatcccaacgagtttcagtctctcgacaacagtggttggtcttctcgcaccaggggcgtcgcaagatacctcaaggctttattcgacgacgagtctggtctggagaggaagagcgttgctatcgaccatctggtgcgcgggaagacgcggaaggaagcgtcgagaatgttcttcgagaccttggtgctgacgacgaaggactacatcagcgtggaccaaccgaaccccttcgacttggtgagaataaagccaggctcaaagctgctgatgtcggaattctagaccgcccaagccagcttttacccctggcgccatacatacgtcttaccaattgtatccatcacaccgacctaccgcaccccctcctttacccctccaaatccatttttgtttgtttgtttgtttgtttgtttgttgttgttgctgttaagttatcctcctctgtgtagcatctcccgcgcgctagggctcgagtaggatggctgctatgttgtaccgttggctgtatatatgatttagtgacacctgtgaagcctgccatgtaatttgatagcgctggctccctcccctccgatcccctaaagctattgtataattgtatttgcttggctaaagcccgtaggaattgcgtattggtaacaagacgatatgatattatgtc

SEQ ID NO: 33524 - DNA, 969 bp, Zea mays
  Clone ID: UC-ZMFLMO17128D06_FLI
cttggatcctatggaagcatcgcaatgcctgcgtcttcgaaggtttgcagctgagtatgtggaatgttctgcatgctctcgaagatgaacagcatctctggtgtctcgccggagtgcaaggactgcagagtttaggcctgggctccctgagcggttaggtggcatttcctggtctggtctcaccatttctatttgctgtaagagttttgttcttgtaagcacagcccctcacggctcgggctcggtccggaatgagggggtaaaacttgtacgggaggccacttttctggtgcttagtattaaaaaggtaatacttgttctcatgaaagtgacctaacaaaagttataggtacaaatatagactggagtgatgttgttaactcaataccaaaacagcaaagcattgggttttgagaatacttcattcaaggtgatgaagaaattagttttcgccatgtgaagtctttcaatctcagttgtatgctaatttcgttaccatattgttcttacaggtttaagaagaaattgcaaagatgcggtttcaaactaggaaacggagtgaaggatgccccacacctttgagtggatgcgcgcaggaaccaatgcaagctgtagtaaggccttgaagtataaggcaacccaagtctgccatcatctctttctcgttgaactgaagcctgtccatgcctccatggcccagtccagcatcgtcgccaatcagagctgagggcagccgcagagccagcggtagctagtcggctagtccattgactggccggtgcaggggtcacggactcacggttctgcatttcatattttcgtttaggtgtcgtttggatccgtttattttggaggaattagaatctatttaatagagtaggctatttagcttggaatttgacattccaccactttacaatgttaaaaaataagttatctcaaatttatagaatggaattgactttatgt

SEQ ID NO: 33525 - DNA, 1910 bp, Zea mays
  Clone ID: UC-ZMFLMO17128F05_FLI
ctcagtactgaaaaccaagccttccccacgaattctcacagaagcagctccttggaggcagcaggaaagaagtgccaccaatatctgtcgagaagctgaagggaggccaagaattgcatctgtctatgctgatatagagagaagggttgggggcttcgactttttagagtgtaataacaaggacttcagggctctcagaatattgggtgcattgaacgcgagagatgctaagaacaagaatgacagcagtggcagaccaatggctactcacagaacaggatatgacctaaccacctctggaagcttccaggctcctattgtggtcatgaagcctgcaggaaccactgaaaagcatggggtttcacttgcttctgttgcccccatagcaggcctaagaagccttagaaagttgccagctagatattcatctttcactggcacaaatgagaccagcacaaatgagaatattcatcttcggatgtcaagagctcaattgaagtctgaagaaactgtcagcagtgccaactcgccaaggcctacaagctcatcaagtcccagaaatgtgctaaagaatgcagagcctgagaggagatcccgtccacctgtttcaccaaaatctccaagcaagaagtccaatgaagttgtctccccaaaaggaagaacaagatcaaagccttctcaggtgaaaagccaccgtgatgaggtcttacagagtacagggaacagaataagcttagctaagcaggtagatgtcagcattatagactgtccaaagcttccgggtggcaactcaaccttcgttccaccaagcaatgctgctgcaacagcaagtcataaggctccttcaattctggattcagaccaaaacattcattcactggacaacattccaagccctgtctctgtccttgatacgtccttctatcataaaaggatctcagattcattcaaagatggtgagacacattcttcagaggaatgctggaacccaaacagcctgcctgacacaccacagtcaaaagcgagcagtgaagccaaccagattaaaccagaaaatttggaagttctgatccagaagcttgagcaactacaatcaatgaacgaagaagacgcaagtatcaaagaagtcatggcatcagtcactgcaaataaagatcaccagtatatctatgagatactgttggcatctggtcttttacacaaagaacatagtatcacggcattacctgctcaactccaaccatcaaattatccaatcaatccggagctcttcctcattcttgagcaaacaaaaccagacttagtttttgcattccaaactgtcagtggaactaagaaaagttgtaagccttacacggggaagcttcaccgaagacttgtgtttgacctggtaaacgaaacaatagctcaaaagatgatcatctgcagatctggaagccagccagtaaagtttcttcaatcaaggaagttgagtgggtggcaactattcaaggatttgtgcactgaggttgacaggcaaataaaatgcaccggggaggaggagaatggaaacatgatattagatgaggatacagtcaatggaacgaaagattggatgagcttcgacactatgctacatggcatggtttgggagattgaacgatccatcttcaagggtcttatcgacgaggttatcggcggtgagactatagagaagatgcaatttgggcaaaggaaactgcagaggcagctttctttcagtagtataaactgaatacgcgtcgtagtagtcatttccatggagaagcttataacaactagtaaatgtgacagtttctttttttttcttctgaagactaaactgtacaagtataaatgatcctcaacactagtcttgctgcctgactattgcaattcgagagttgtgcgac

SEQ ID NO: 33526 - DNA, 1745 bp, Zea mays
  Clone ID: UC-ZMFLMO17128H03_FLI
cacccctgccttctctcccttctccgtccaggccctagtgcccgcgaatctcgtgcagcaagtgagcgccgccgccagactacgccaagtgtccagttcctcgtcgggtataccctttctcttccttttctgctgtgtggtacctagcaccatcggaaccctaacttgagctatctggctatttgcatccggatctaatctaattaccaagcatgtacatacatactaacttcgattttttggaaaaatattggaacatctgtgtcctttactgggttctccccctatagaaaatttgagtattagactctacatgtcaagaaagtatggcgccaagaagcaaggcagagcggaaagcagtactaggtgctggcgcatggatgttcaatgtcgtcacatctgttggtatcatcatggtcaacaaagccttaatggcgacacatggttttagttttggtaggagcatgctaaatcttcattcctaactgcatgcaatgcttgattcacatgcgccttcttttctgtctaaaagtgaactactattgtgcagaaaaatcagtttgcttgtcttgtgctaatttgttcactactttttgctcctacagctacaacactgactgtacttcatttttgcaatgataaccttgatgacgttagtaatggaaacgtgtcacatgatgaatgtcctcagtcctctgctatataaaaagaagaaaatgagtggagtctgccaagcaaacagtctgctaggcaaaataccaaagaccaaaggagactcgcggaaagaaaagagagagtaaaaaagataaaaagaagaaagaggaagagtcacaattattcaacatacatctctgaacatcctttgctaatgagtagattaaaacattaataaaacatttgcatgtagattatcaacaaaagagaatacactaaccatttgaaataattaattatattcatatgatattcattgctcactcatattttttatcaataataaaagacatcttggttccatagccttgccatttgcttctcgagaggcatctccatattcccttcgcgagcttaagaaaaatataaagttccaacaattatgcaatattttccttcttcaagtcctaatattgtactgactgcaaggtgtaggaaaaaggttacctgaactctttccatgcataaataaaaacatgtcgtatgaataacttacatggaaaaaatataattgtaccatcaaaacatctttggaaggtacacaatagcagtcctagcgacctactctctctacagtcagtcagtcacatataagtgaccttttgcaattgttttaggccaaccatttcaaacataggttgcatattaccttttattcagagtagcaaatgcacttgcatgaagtaaaatatgatggatagaagaatccacttttcctttaatattaggtatatatatatacatgggaaaatggtctgagtatttttgtttctcaatgtagttccataaaaatatatttttgcttactgtctccaatcaccaaaaaatttagggaaagatttagtaccatccacttgatcactataaatatttgtttcatccaacccgccgacaatataatgcctacatacataacagaaaattaaatacccaagcccatagctaactaatggtgcgccaacggtgcaccatactttctagtaatactataaatacaataatgctaagacaatacttcaaatacttgcttt

SEQ ID NO: 33527 - DNA, 1204 bp, Zea mays
  Clone ID: UC-ZMFLMO17128H09_FLI
cagagattcataatgttgctatagcagacaatcatggtcgggtccataatttatctcggtatcaggccaggtggaacaaacctaggcctgaaagtgcgacaattgatgaggaactggcttcgaagttgaattctatggcagctaaggaaaaactgtactgcgaaattgcttcaacggcagaatcgggatgggatttcagctctcgatggatgaggaattctactgacatgacaacattggcaaccacttacataatacctgtggacttgaacacatttctttttaagatggagctggatattggtgccttggctaaagtcgtaggagataatgcgacttcagaattttttttaaatgcttcgaaagcacgtcatattgcaattgactctattttgtggaactctgagatggaacagtggcttgactattggcttcctggtgatgcagactgtcaggaagtacacgaatggaagcctaactcacagaaccgcaacatatttgcttccaacttcgttccgctgtggctaaatgcataccattccgaattcgtacgctttgctgatgaggcaaaatcaaacagagtcatggcgagcctcaaggcatctggattacttcatgccgcagggatagcaacttccctgacaaacacgagccaacaatgggatttcccgaatggatgggccccactgcagcatcttatagctgaggggctgctgcattctggatcagaggccaaaaaactagctgaggacattgctacgaggtgggtgagaacgaactacgccgcttacaaagcaacgggtgcgatgcatgagaagtacgatgttgaggcttgtggagaatctggaggcggtggagaatacaagccccagactggttttggctggtccaatggcgtggtgttgtcattcttggaagaattcgggtggccagagggcaaggaaatagcttgttgagcggcgaagcgctcacgacagggtggatctggtcttgccggagagcaatctggttaggcatcgttcatgtcacacatgtctagctacgagagtggcgcattgccttctgcagttcgtcaagtgcgtttgtgtgttcttgtttgcttttagttgcgactaggctgtagatccttcttgtatcacaacaatatatgtactgctactgtaccggccccggcctcttgtttaatctgaaatgctcattgtat

SEQ ID NO: 33528 - DNA, 1088 bp, Zea mays
  Clone ID: UC-ZMFLMO17129B03_FLI
cttcaggatggcgggcgacgacggcgcgcagggggcggcgggctcgccgtaccccgacgggcggatttcactagcacgccgatcgtactacgtcgatgttccgcatgtgcagcaggccttcacctgggactgcggcctcgcttgcgtgctcatggtgctcaggacgctagggattgattgctgcgacggcattgccgatctcgagaggctctgccgcaccacgagcatttggacggttgacttagcatatctgttaaacaagttttcagtcagcttttctttctgtaccgtgacccttggagcaaatccacaatattctgctgaatccttttatagggagcaattgcaagaagacatcgatcgagtggacgagctatttgggaaggcgctcgatgctggaattagcattcaatgcaggtccatcaccgcatacgacattgcttttctactgttatctgggcactgcattgctattgctttagtggacaaatcgaagctaaatttgccctgcatcagtgatcatgatgtacaacagcacaacgatgagcctgactacatgggacactatgtcgtaatatgtgggtatgatgctgatgattgtgaatttgagataagagatcctgccagttccaggaaacgcgaacgggtgacaatgaagagcttggacgaggcccgcaaatcctttgggacagacgaggacattctcttggtctctctaacaggaaagagtggaatgaagctgtcgcgtaagctacttgcctgctccatgtagataaataaataggtcactagcaaccttgtgaatacgctgtacatgtccctgtagtagttatgactgtcgagtgccagccctgtacgtagctgagaacgttctcgcagttacagctgatagcagcagtgtggtagtgagcttagtaaggcatcctgtacccatgccatcgccaaaccatggtcgcgcaaaggggttcagcggcagcaaaaggctctgctgaccttgtaaacgagcaagtgttttacttttatgtacgattgttaactgaacgtgtacagatctccggaaataaaattaaaatcgtgctcctctctgc

SEQ ID NO: 33529 - DNA, 1586 bp, Zea mays
  Clone ID: UC-ZMFLMO17129B04_FLI
caaaatgcagacttttcttcacaagctgaatccttctgcaagaccatggacagaacatttactattgatttgtattcgtcctatataaaacagaaactatcagaattttctctatcaaatagttctaaatgtcttgtagcactaattatagaaccaggtaaaaaagtttcactctttgagcttcttgggaatattttcattttttcctctttagcctttagtatgtaactatgcgcactatcatttgatgctaatagctggaaaaaaactcagtacttttccatgccatttactggttcaacctcttaacccatatttgtgtagtaatatacaaggtgcaggtggaatcctcatgatggatcctcttttccagcgagtacttgtgagtgagtgtagaagtcgaaaaatacctgtcatatttgatgagatatttttaggattctgacgtcgtggtgtggatatcatatttgacaatacctttttagaggataaataggtattttctttgtattttatgaccttaataacttctctttcagtctacttctgagttacttggttgtttacctgttatcgcttgctatgcaaaattgatgactgaggtaattgtaccattatctgcaaccttggcaacagaggaagtttttgaatccttcgaaagtgactctaagtttatggcgctcttacatgaccattcatacactgtttatggtatgggctatactgcaacactaaacgctatggattgatatcaggatcctattcaaaccttgatgccgaccacatgaaactcaaggagtttttttcatcaccagctcaataggattttacctgaggaacattttgctttaattggtttgatctgccgtggttgctggtaatttgatatgagcaggaggcaactaatcaacaatgttcagggtgcagggccacaccacacttatggactacttcagtttgtgtgtcaaatctgttttccacaaagaaattatttaaacaaaaggatcgcatagagaaggatgggacagtgatgagactttcaggtggtgggcataactgctttcaagatagtgatgaggcaagattaacattcaaacggaagttctggaagaaggctatggagatagatgatctatgtggaaatgatggtgcatggtggggtattaaaggttacatgcgagacaatttcaaccatagcaataaggtcacatcgcaaaaagagcatttttagaacagtaggctcgtgaaatctttgttggatatgtattgggagcttcgtcctgttaccagttcatccttaacacaccaaacaaggtatgacccaacacgtgcagttgacccaatcattgaagatggtcactacaccttgttttgaagcctagcgagattggacgccttagtgttcaattgttacacgcagatggtatttgtgcagatattaggtttaatgttgagcacaaacaatatttaaagattttctgtgttgagcttgttttgcttttggccaactgttgatagtgttttttgtacaaaagtgattcatttgtactatcacatataaaagtctgcatggtattgatggttcc

SEQ ID NO: 33530 - DNA, 1240 bp, Zea mays
  Clone ID: UC-ZMFLMO17129B06_FLI
gaggacattacccaaaggccatcactgcctagcaatgcagcttaccgcagaatacttttcgttagatcccactaaacgtgaattccctaaaagagacaacattcagttgggtggttattatcattatgcgatgttctctgacaatgtgcttgcaagtgctgtggttgtcaactctacaattgctgcatcaaaggatcctggaaggatattattacatattgtaactgacgcgttgaattatcctgcaatgatgatgtggtttctgacaaacccaccaactccatcagtaatccaaatccagagcctagatgatttgaaatggttgcctggtgatttcagttccagattcaagctgaagggggttcgggatccgagatacacttctgcactcaaccacttgcgtttttatttgccagaagtgtttccatctttgagcaaggttctactcttggaccatgatgtggtagtacagaatgacttgtctggattatgggacctagatatgaagggtaaggtaaccggtgctgtcgacacatgcacctcaagtgaaggtttccgccaattggatagccttattgatttttccaatccaagcgtcttcaacgaacttgacccaaaggcttgtgcatttgcatttgggatgaacatatttgacctgaacgaatggcgcaaacagggtttgagtacaacttatcatagatggtttcaactgggcaaaagtgagaagttgtggaaggcaggaagcctgccactgggtcaggttgtcttctacaaccgaacgctgcctctggaccaccggtggcatgttctagggctcggtcatgactccagcatcggaagagatgaactcgagagtgcctctgtcatccactacagtgggaaactcaaaccctggttggagatttctatcccaaagtacagaggctactggaacaggtaccttaactacgataacccgcacttgcagcagtgcaacattcacggatagaggcgatggcgggtgaggtgattcgcaaggtagaactgggatatacgcaacttcgctgtagtaacttattaggagagcaagttgttgtttttttgtttctgttgctagatgccctatttgcaattttgtttgctagtagtcacaatcggtacaaaagcaaaaaaggaagaacaaaatcgagtacacgagctacagtttcactagtgatacactgaaggtttgacaaaagtcaagccactagctaacattatc

SEQ ID NO: 33531 - DNA, 947 bp, Zea mays
  Clone ID: UC-ZMFLMO17129C08_FLI
gctacttctaccaatggcatacaagaaaatgtggaagttattgaagttgctagtggatctccattgccaggaatgaagcaacagcttgatgattctgtcaggatccccaaggctacaatagacattctaaaggatcaggtttttggatttgacacattttttgtaacaagtcaggagccttacgagggtggagtattattcaagggaaatcttcgtggtaaaccagccaaaagttatgagaagatcacaagtcggctacagaacaaatttggtgatgaatataagctttttcttctcatcaacccagaggatgagaagccagttgctgtggttatacccaagcagacattacagcctgaaactacagcggtcccagaatggtttgctgctgctgcatttggattagttaccatcttcactctgctacttcgaaatgtacctgttctacaggagaacttgctatcaacatttgacaaccttgagttgttgaaagacggactatccggtgctctagtaactggccttataataggggtgcacgaaattggacatatccttgctgccagggaaagtggaatcaagctcggcgtgccatattttgttcctagctggcagataggatctttcggcgggattaccagaatcgtcaatatcgtccgcaaccgtgaggacctactgaagctagcggctgctggaccattggccgggttttccttgggattcgttcttctgctgctgggcttcgtcttgcctccaagtgatggccttggccttgtgatagatccaaccgtcttccatgaatcgttcctcgttggtggtctcgcgaaacttcttctcggagatgttttgaaagaagggacgcagttatccataaacccgcttgttctatgggcctgggccggtctcctgatcaacgctatcaacagcatacccgctggggagcttga

SEQ ID NO: 33532 - DNA, 865 bp, Zea mays
  Clone ID: UC-ZMFLMO17129D01_FLI
gttctgtgtgcctttttttctgaagaaagttcacaagcttccgaagtctataagccattacaagacccattgatttctcgctgtgttgatattattggcatgaatgaagacaaagcttctgtcagtgaaaaactaacatttgctgcaaaaggagttctatcaaaagtattcccaaagcctcgtagagcttggttgcccaccggctgcttgaaactaatggatactctacatcaagctttaccgagcatgtcccttattgcttcagacttcagctatcttccagacgttagcatacctggtgacagggctccattggtttcatcaaagaaggatgggaagacatcagatcatcgcaactactttgatgctcagggtgacgcggacatcttcttcccaaccgacttccggctcctggagcagatcgaccataactgcgctggcttctcaaaggagcagaagaatcccggcgcattcaaacccgtgaagaagaggagaacgatcatacttgatactgcagccttcatggaggagtttggcatgccgctgaagacgaggaccaaagacgggtataatccgcttctcgacgatttcaagaacacaaagttctatctcagcgtccctacacacaacgttcctacccatagcaggaggaactagtcttctttccttttgctgatgtgtcacgagtcaggaaaagacgtctgacaggctagaatcggtctgtcattttgagtagtctgaatttgcaagttttcttaccttaaggtgctgaaaattttatagtttctcttttctgtagaacaaagtttttattatcatttttgacattgatgcatgggtaataaaaggtggaagaagactgact

SEQ ID NO: 33533 - DNA, 948 bp, Zea mays
  Clone ID: UC-ZMFLMO17129D07_FLI
ccgcgatcttgttctcagttctacggcggcgatacccccctccactccccaccctgtcacccccacaaaataagttctgcggcggcgatggcgctctcctcctcccggccgaagcacctcctgcgccccatcctgcggggtttccacgcctcagcgcgggccctggcgcgggtggagccgcacgagttctccaagcccagcgagtacctgggcagctgggagcccgcggcggagcctcgggaggcgtgggcgcggctggaccggctgcgcaaggggtacgcgagcgaggtgcgggagctgcggcggcagtacgcctacgaggtgcagctgttgcaggccgagcggcagcggaaggccgacgccagagccgaggccgcccgcgccgccaaccaggagcgcaaggccgccaagctcgccgccgcccagacgcgcgccgccgagcgccgcgcgttcgaggaggacttccgccagaccctcatgaaagaaagagctgagaagctggagagctggcggaagaaggagaagcgcaaagaggagaagaaggcaataaagaaggagctcctgcgcaggaagagcagcatgtggctttctgaagataagattgaagaacaaatacaaactgctatcatgcaaaccactcctctatgaggttggttctgcgagtaaagctgataatagtagcttgcgaatcatgaggagggggggtggacatcacatggacgtgctcgtcgttacctgtgagaagctaataagaacggacctggtatttggcgtggaaaaggccgtgtgtttatttagttagacttgatcacaccaaaagctgtgcctggagagatggctgaatctgctgtgccttcctttttcacgatccatttgttgttctcgtctgcttaaactcttggcgtgatctggacggaacatatttttggcaattttcttacttggacg

SEQ ID NO: 33534 - DNA, 1614 bp, Zea mays
  Clone ID: UC-ZMFLMO17129F06_FLI
cgaaagagcctccaaaacctcgcaacaaccccgtgacacccacacccatccgccctgcccctcctcgcgctccccaccaaccccgacgagcggcgatgaccggcacggtgtccaagctggcggcgccccggcctgcggcgccaccgctccggccggcgtccatccgcgccgccgcaatcgccttcgctccctccccgcgccgggtcagcgtctccgtcgccgggcgggccaggatcccctccgtcattgcgatggcttctgccaaggaaggaaatggagcaccgaccaagaaaacctcgcttcacgatctctacgagctccagggcctctccccgtggtatgacaacctctgccgacctgtcaccgacttgctgccccttatcgccagcggtgttcgtggagtcaccagcaaccctacaattttccagaaggccatctcatcctccagcgcatatgatgatcagttcaagcagctcatttcgggcggaaaggacgcggagagcgcttactgggaactcgttataaaggatatccaagacgcgtgcagtctttttgagcctatctacgatgagaccgatggggctgatgggtatgtctccgtggaggtgtctcctaggttggcaaatgacactcaaggaactgttgaggcggcaaagtggttacacaaagtggtcaaccgccccaatgtctacataaagatccctgctaccgccgaatgtgttccttccatccgggaagttatcgctaatggcattagcgtcaacgtcacgcttattttctctattgcgacatacgaggctgtgattgatgcttaccttgatgggctagaggcttcgggcttgagcgacttatctcgagttaccagtgtcgcatccttctttgtcagccgagtcgacacccttatcgacaaaatgcttgaaaagattggaacacctgaggcacttgccttgagagggaaggctgccgtcgcacaggccaaactagcaaatcggctctaccagaagaaattctctggcccaaggtgggaggcgttggccaagaaaggtgccaagaaacagaggttgttgtgggcatccaccggtgtcaagaacccagcttatcccgacactctttacatcgacagtctcattggacctgacacggtcaacacgatgcccgaccaagctttgcaggcattcatagaccacggcactgtctcgaggacagttgatgcgaatgtgtccgaggcggaaggtgtatacagcgccttggagaagcttggcattgactgggccgaggtcggaaagcagcttgagctggaaggtgtggactccttcaagaagagctttgacagcctactcgtgagcctgcaggagaagggcaacagcctcaagacggcaactgtgtaaaactgagaagattgggtaccggcgggtgaacgattttactaaataaaatgctagcttgctggctctcttagtttttacgatgtacctttgctctccattttctgaatcgggattgtattctaggcttgcctggccgtcattgtgtgaccaacgttcatggcttgggacgtaaacggttggaaaacatctctgttactttctatacgatttttatttgccccgctct

SEQ ID NO: 33535 - DNA, 1962 bp, Zea mays
  Clone ID: UC-ZMFLMO17129F09_FLI
tgacaccaaagcctgatttgcctgctatacaaaatgttgctgttttacaatctgtggatacagctgcaactgatgcaaatgctagtgaaactggtactcgattactcaccaagagaagtatacatgaattagttgcacagattgattctaatgaaaagctggatcctgaagttgaagatgttcttattgacatcgcagaagattttgttgagtctgtcacaacttttgcttgttctttagcaaagcataggaagtcaagcacattagaagcaaaagatgtactcctacatgcagaaagaagctggaatatcaccttgccaggcttcagtggtgatgaaatcaaactgtacaagaaacagcacataaatgatattcacagggagaggcttgctctggtacccactttttaagaatttgagcaactacccatctaatttcatgcttgattatgtgcatatagccgtacatctcccatcttatggttgactagttagttgttcgtgcattgctacggtttttatatatcacatggatagactttattttaataaaacacaaaaatatgtgttctattggttaggtgggtgtgaatgtggagccaacgaccaaggttcaatccccactcgtgcacaattttactttatttttgcattaagcgggaagcgtgatgtgggacacctgttgaaattggtgctttatatagtagagaaaggcaggaggatgttcttgaaaatgttatcggggttggaaacataatataactgttgaataggcaaaactccaacatattccctccgtcccaaaacagttgttccaaaatgcttgaccttgtttcccaaagcacatttcctttctctcaatacacttttatttttcctaatatatctctagctctaagctctgtcggtctctcctcatagggacattttggtcttttagctataacattggtaggtgtgcacgatcctaagggcgtgtacaacgcaattaaaaacggcgtatctttagctgccggcgggggctatctgtaaaatgcaattaaaaacggtgtatctttagctgccggcgggggctatctgtaaaatttctggagagatttgtcttcaccaaacaactatcctagcgcttggctcagtgacgaaggtacaaatcctgcctgtgttgtatggtgcatgtcgtttcttttggatccaatgtgacatgtgacctcttcctttcccatttactgcatctttccaccaaaaggccatgatcatactttaatgcacttaacacaatgtatttattaaaacatttaatctaagacaatgtatttaagagtgtcttgtgtatgttttatgcttgaaaaaccataagagagggttctatgttgtacatgccctaaatcgcccacaatttttgggcggagcggaggtagtatattgaatgttgtttcgaaaaataactatctgcctgagcattcttctcactgttgaatctgctacttgcatcggctgccgtcctttcatgttgggttgatgtgttattctctttttcttgtaatgatcatcagataaagaagtccatggcgactgacacgagaaactctgctgcccaagctgcagctaaccagaaaaatcagactccgaaaccacctgcgccagcttccccgtgaaacatgtccacaggccctgcaaacacagtatcagtgtaccacgcatcacatctgtggtgttcggacagttgtcggttgtatgttggtagtgttgcaatgagtacatgtatagattattctgtcgttactcgttactaggatctggttagaatgttgtttagttaatccaatgcatggtttctattattgtatatcacttctgttctaaactataaatcatttagggctagtctgggggccacaaaacctgagtggattgaaggggctaaaatcctcccattcaattttaaataagaatagtatttttt

SEQ ID NO: 33536 - DNA, 983 bp, Zea mays
  Clone ID: UC-ZMFLMO17129F10_FLI
atcccatttacaagaagacctttatttttggtgattgacagtagcaccagctatgcattcaagtctattcatggtactgaaaggggggagacttctgccatgctactttcaccaagttcccgatcttccgctgcgggattcagtggcgattctactcggcacagtggtagccaatttactatgttcctcacatctccattgcaagctttctgccttctgcttggcaacaatgggacagatatcgacagggatgcatataacaaagctgaggagttattattattgtccctaaatgaatgggccgcgactttagttgcatcatcttcacttcattctatttgggttgaagttttaggcgacccactcctaagaaggttacttctcaggttcatcttctgccgagcaactcattccctgttcaaaccaacaaaccataagacagagttcctgccgacctgcatgcctcctttgcctgagtctgttgatgcagagagcatgctctcccaaagctgtgtgctgcgagtcgcatcattctttggcgctgccagtcagttctcatttgctgaggttaccacatggcctgatgttgaccctgaggaggctgttgtcaccagttcttctggcagtgccaacaaaggtgtgcctgagacagccagagattcagacatttcaaactcatcatcatctttttgatgcgaccatggcgctaccttcgtccgcttgtgttatttactcatctgcatatgcggatccatttgtaattactggtgctcctttatgcttgatttacacatcaagcagaactgccttgcctttttgtttcctggttacttactgaattaatagtcactagaacatttttttatcccttagtttggaggtgtggaggagctgtgtgagaaagtgtggttgaagagtgttgtttcgttactgtccatggctcggtagaatgtattccctcggtcatttcggtttttctatgt

SEQ ID NO: 33537 - DNA, 1679 bp, Zea mays
  Clone ID: UC-ZMFLMO17129G02_FLI
gcgatatgagtgggatatgttgacagctgatttggagttggtggaaagaattgatggatactacgatgtggtttatggaacctatgaacccaaatatttaaattggtggaaatccaagaaggattttgttttctctcgacaatggtttcgtggacaagatggagcatataccattttgcagactcctgctggtcataacaaaagacctccaaagcatggctacgagcgaacaaagatcaacccatcaacatgggaaataaggactttgtatacatcaggatcatcgagtccaaaatgtgttgttactcttatgttggagattgctccaagtttttggggcagatggaagagaaggcactcaaattttgacaaaagcatcccttttgctttgctcagccaagtagcaggtataagagagtacttcgcagccaatccagccttgacatctgagctgccttcaacagtagtgaagtcaaaagcatctgaaactttgatcatccagagtgaacatgaagattctgaacttggtgatgaattttatgatgcacttactagaggtgaatccttcgaagatggggatagtgatgatgatgatgatgccacaactccaaaggctagaaaagtaaagttgaagaatgtgtcatgggctattgcaggcttggctttaaagacaactaaagctttggttgagacaagtgaattggttacaaattctagtccagttactgttgaccccagccacttccatggcacccttcatagagcgaaaactcaaaatgatcaaaattcttggagtgcacctggtggggagaagtttatgatcagagggaagacttacttaacagattatcacaaggttgttggcggtgatccacttctagagctacttgcggtcgattggttcaaagttaatgaacgctttgattcagttgccttacatcccaaaagccttgtgcaatcagaagctgcaaagaaacttcctttcatattggttataaatttgcaggtgccagcgaaaccaaattataacttggttatgtactacgctgcagagagaccagtgaacaaagattctttgttgggtagattcattgatggaactgatgcataccgagatgccagatttaaacttataccaagcattgttgagggttattggatggttaagcgtgctgtaggaacaaaagcttgccttctgggcaaagcagtaacgtgcaattatcttcgccaggataactttctggagatagatgttgacatcggttcatcatccgttgcccggagcattattggtctagtattgggatatgtcacaagcatagttgttgatcttgctattcttattgaggccaaggaagagaaagagctccccgagtacattctgggcactgttcgtctgaaccgtgtgaatcccgacagtgctgtatcaatctaattacgtttctagccgatctatgcaaatttactcttatcctcttttattctgagagaaacagcgtggcattttgaaaatgtgaaatagcattactatttgctgatccccaatcgagggtaacatatgtaaattggcatgaggcatgactacgtgacgcctttcgtaaatagaataaatcaatggttatgtaatattaatatcccatatacgcgtgtcataatctatgtggcttaaaagtggcatc

SEQ ID NO: 33538 - DNA, 1833 bp, Zea mays
  Clone ID: UC-ZMFLMO17129G04_FLI
atgatgacaagaatgattcaactgtgcagctaaatgtttcaactgaatctcgagttttgaagaacaaaaggaagtacaaagttgatattcttcgatgtgagagcttagcctcacttgccccggctacattagaacggctattccttcgggactatgacattattgtgtcgatggttcctcttccttcttcatcagttcttccaggcccttcaggcccaattcattttggaccaccatcttattcctccatgacaccttggatgaagctagtactgtatacagcaggacattgtggaccagtatctgctgtgttcatgaaagggctacgttttagattgctgcctgaaccattagctggttgtgagaaggcactgctatggtcttgggatggctctgtggtgggtggattagggggaaagtttgaagggaacttactgaagggcaacttattgttacactgcttgaattcgatgctgaaacaatctgctgtactggtgcaaccacttagtatacatgatcttgatacgtcaggaaaccttgtcactgtggatatccctttacccctaaaaaatgatgaccagtcaattgaatctgtggtagcccaaactaatttgccaaaggaacagatattagatttgacttctgtattgaaagacctatctagtaaatttgagctgagcacacttggctacctccgtctactaagacttcacaggatagatgaaccagataaatttgacccagaaaatgtaagctacaagtgggtgcctctgagcttggagttcggggttcctttattcagtccaaagttgtgcgagaagatttgtgaaagggtggttgcatcccatatgcttcagaaagatgatctcattgagcattctgatgtgatgcaaaatgtaagaaggcagctgagagaactttgcagtgaatatcaagcaaccggtccagtagctaagttatttaacaagcgtggaagctcaagggactcaccacgtgccttaatcaatagtattagtggcagatggaatttgtctaatgacccttcaacacctagtggaggagccccaagtgaacacgagaggctgaaatttgttggaaggcagcgaccccgaacagaagttgtgagctttgatgggagcactgtcaggtcatatgcacttgatcctgagcacaatgaagaacaatcatccatacaagacgtaaaaccagatccagaagaaacagacagcaaggatgtagtcttaccaggagtaaatcttatatttgatggagccgaattacacccctttgatattgctgcatgccttcaagcacgtcagcctctgtggcttatatctgaggcatcaactgcttcatcaacattactatgaggggttaattatgctccaatttctacaagttggccgatgaaatttcattagttggggttattcaaaagtattgtctgattcttagaagaacacaatagcgggctgatgctttgttcactataactgagttctttcacaggaattaatcagatgctcctggttaactgggatgcgcgttttgaagcttgtttactgcatcgtatgtttcttggccaatatcttactctacttttcacttgtgtgaaatttccaagtgcgtgctcctacttcaatattgtgaatctttgaggctcgttcagttgagaggctacaggctcgttcagggtgtcaattttacgtttacacatgtaggtctagtttggatactttgggattagagtgttttggagggattggagagggtgtaaatccctaatagatcaaatactctctcaatacatctcaatccattccaatcccactc

SEQ ID NO: 33539 - DNA, 843 bp, Zea mays
  Clone ID: UC-ZMFLMO17130A08_FLI
caaaggccaaggccaagcgagacagggagggaggagaagtaaccaagtgtctcaagcaaccctaccgcccgcccgccggccgcttcatttcatttcctccactccatactcaccacgacacaccgccctcttcccttctcttctctcaagaaagaaccagctagcgcgcgcgcgcacatacaagcctgaagcctccccatacccgccatgtctgcgtcgccggagttctacaagccagcgccgccggcgttctcgccgtgcagctcgccgctcctgctgcacggggcaggggcggcggtgggagcagtagccgaggagagcgccgccgcaaccgtgtcgcaggatgaggaggaggactaccgctgccgtacgccgacgggcggggagagccaggtgaggccgccagggacctgcccgccggcgccgcggaagccgcgggcgcccgcggcccccgcgccgtgccggaagcgcctgttcgaggtggaggtgttcagcctgcggcttgaggagctggagcgcctcttctggcgcccgcgccccgcggcgccgccgccgccgccgcccgctcagaagaagcgccggagggtggcctgcccggagcccaagaagagatagtagctagcttggtgtggcagccggtgctagtagtagtagtagtgtagtacaggtcgtgtagcagcggtagctagctaggtgcagagccaagtggttttggcttggatcgatcacatacagcagcttattattaggatcggaggtccatggtaggggggtgcttaggagaggactgctgtacttgtactgctacagctcgtcggcacatctctctagctagtttcctct

SEQ ID NO: 33540 - DNA, 613 bp, Zea mays
  Clone ID: UC-ZMFLMO17130B02_FLI
ctttaactgctgctggtggattgaggaaaattggacttggtgatacctatgaaagtccttcactgattggaatacattatgagggacagttttttgaatttgtaccttggactggaacagtaagctgggacattggactgtggggtctttggaaaatgtctggcgagaacaaaactcatctggtagaaatagaagcaaccactgcagaatcaggaactgctctgcgcgctcctactatcgaggctggactggtaccagcgtgcaaagacacctgctatggagatctaaggctacagttgtgggaaaagaaatacgatggtagcaagggagagatgatactcgacgccacaagcaacatggcagcactagaagttggcggaggcccctggttcaatgggtggaaagggacaactgttgtgaacgaggttgtaaataacattgtgggcacgccagtcgatgtagagagcctcctcccaatcccatttcttaagcccccaggcctataggatcaccaacgaatgtcacaatgaagaagtatcacggatatcaatgttgatcatacagtaaaactgtgcccagttcaataataattcatgatttttacttgtttttt

SEQ ID NO: 33541 - DNA, 1360 bp, Zea mays
  Clone ID: UC-ZMFLMO17130C03_FLI
gtctccgattccacggcggcgctcaccatcgagacatctgtccctttcacctcccacctcgtcgacccgccctcgcgcgatgtcaccaccacccccgccgagctcgtcaccttcttccgcgacatgtccctcatgcgccgcatggagatcgccgccgactccctctataaggccaagctcatccgcgggttctgccacctctacgacggccaggaggccgtcgccgtcggcatggaggccgccatcacccgctccgattccatcatcaccgcctaccgcgaccactgtacctaccttgcccgaggaggtgacctcgtctccgccttctccgagctgatgggccgcgaggccggctgctcccgcgggaagggtggatccatgcatttctataagaaggatgccaatttctatggcgggcacggcatcgtcggcgcgcaggtgcccctcggatgcggcctagccttcgctcagaagtacaagaaggaggagacggccacgtttgcgctctatggtgacggtgcggctaaccagggacagctctttgaggctctcaacatttcggccctctggaagctgcccgccatattggtttgcgagaacaaccattatggtatgggaacagcggaatggagggcagcgaagagtcctgcttactacaagcgtggcgactatgtgcctggattgaaggttgatggaatggatgttcttgctgtgaagcaagcgtgcaaatttgcaaaagatcatgctgttgcaaatggcccaattgtccttgagatggatacctacaggtaccatggccactctatgtcagatccaggaagcacttaccgcaccagggatgagatttcaggtgtcaggcaggaacgggacccaattgaaagggttagaaagttgcttttggctcacgacttggcaactgctgctgagctcaaggatatggagaaagaaatcaggaaacaagtagatgacgccattgcaaaagcaaaggaaagttctatgcctgatacttctgagctcttcacaaatgtttataagaagggattcaacgtggagtcatttgggcccgacaggaaggagttgagagctactcttccgtaggttgggagaatggcagtcctcaatatgatatgatatccaggagaaataaacattgatgaagaaggcctcagacattgctggaattcttttgttggcaaatgaacctatgtagagatccgttgtcaggaggatctgcttagggcttgttcggttagccttcaatccatgtggattgagtgggattggatgggtttgaatcccacgcaagtcaaacttcttcataattttttccaaacccattcaatccatgtgtattgggaat

SEQ ID NO: 33542 - DNA, 2283 bp, Zea mays
  Clone ID: UC-ZMFLMO17130E05_FLI
ggaccacgtgtacccgccaccgcgccgcgcggctccaccgttcggcggcgctcgggcacggcacgtcgcacggcacgccgtaaaaccctagctcttgcgccccctcctctccaccgcgccggcgagccgtggaggcgcggagctaaggatgccgcggaccaccgtggtggagagccccggctgcccgccgctccgcgccctcaccaccgacatcctcggccttgtcaaagtcgtcgaggcccacgcgaggccggcgggtgccgccaaggtcgtggagacgtggggcgcacccgacgcctcctgcgccatcgtcgctgcctccctcgccgatcgtgccaccgaccccgttttggctgtggcgaggaagaacggcgtggttgagttgctgaatcccctgaacggagatactttggctgctgtcaaggcagtggggccagcaccaaatgatggtggcgctgaaggtgatcccctcactgcattgcaccttttcacaagacaggcttcggactcgatcttaggaacgtttcttgcttgcactgagcaggggaaagcttctataaggtccattacgaaagaaaatgcagcttcgggctcacatattgagccatctgctacatgggatgtgtgcggtggggccaatgtgcaattttgctcagttgatcatggtgaaaactatgtgatgtttggagggaaaggtatagaagtgagtttgtgggatattacatcttgtagtaagacatggtctgctaaatctccccgaacaaatagtcttggtatattcactcggccttggttcactgctgggaccttcttgtgcaaggatgatcatcgtaaaattgtagcctgcacaaatagtcatcaggtccgcttatatgatactgcattgcaaagaaggcctgccatctctgttgagtttaaggagtcaccaatcaaggcagttgctgctgatccgaatgggcatgatgtctatattggcacagggacaggggaccttgcttcctttgacatgagaattggcaatatgcttgcatcctgctatatgttctcttcttaaacacataattgagaacctgatcatatgatattctttagaatgttacgttagttcagtttctatttgttgtaatgttggatggtttcaactggcattgcaccttctgttccactgttgctacttagtttttttccagctagccagtaatctgcaaccaaggcagtattacaactaaaacaatgctgacctacatgtgtactgaactactgataggaatactcattgggggcaggatgaatatacaatataggctataattcgtgtaaaactgttatttagatggtagttaaggacagaaaataggctaccagtaacacttgtgtaaaactgttgtttagatgattgttaaggagaaaaaaatcattatcagaaacgctgcagcaggaagagaatggttgcaagaatcacatgtgcaagcagcgatgagctaccatttgacagctttattaattattatcagtattattattacgatttttctctgttactaaaattgtaaaaccaatatttccccctttttttcagggaaattgcttggatgctattttggcaaatgcagtggaagtattagatccattgttaggcatccagatctacctttgatagcatcttgcggactggatagctacttgcgtatttgggacacaaacacaagacagttgctatctgctgtctttctgaagcaacatcttacaactgtggtccttgattcacatttttctgttgaagagcctggagagatgaaatccaagcaactggagtcttcagtggagactgaggctgaagtccgaaaagaaaagaagaaaaagagtaaggcaattacagaggatgagactgaggcacaaatccgaaaagaaaagaagaaaaagaagagtagaacaattgaagaggaagaacaagctggattgttcgaccatagcgatattaatgatgaagtatatgccagaaaagaaaagaagaaaaagaagagtagaggtattgaagggggcaaggagcgagacagcgacggggaaatttgcagtcccaagagaagaaaatctggagaaagaagcaaatgcctgaagaagaggagcaagaaacagctggttgcctagtacaagtatcatttctcattacccgccttcttgattttgcagaattacacaattttgtgtggtagtttgttcggaattgtatcccttttgaaaccctgcaagggaagtgcatcattttcgtgtgcgcattttttt

SEQ ID NO: 33543 - DNA, 2466 bp, Zea mays
  Clone ID: UC-ZMFLMO17130F05_FLI
caaaattctcaaaatatggatcttttgcggataatgacattgggtcagatggatacggggaaacaaatggttttttgcaccaaaatctggggaaagactgcagctcagacattacatggtctggttcgttctggacatgtagcaagcagcttcggcactatcaagctttttgtcgcaatggaaccacaatatctacccacacttttgtgctggtcttgtcagaggaacaaaaccgctatcttgcatacttggaagacatgtatgaagataagaagggacagaagaagatcaaagtgcgatggtttcatcaaaaccaggaaattgcttgcgctatacctcctccgcctcatccttgcgaagttttcatcactcctttcacacaagtaatcagtgtggaatgtgttgatgatattgcaactgttttaactcgtgatcattatgaaaaatgctcccatgcaatgtcaattatgactgggatccgtttctgctctcgccagtatagtaaaaataagttcaagtattttgatttaagaacgttgcgtggatattttagtcaagcagttgttaggtccatgaaatttccagctgagtcagaaaaggacagtgaatattgtacacctgggaaagctaaatttccaaagcaattagagaggctttattcaaaatgtttgggcactaaaatttgtcgaagcccccaggcagactccataccatcttatcaaatattaagtaacgagcagcctcctgggaagcatctctcaatcaagtttatagtgccccagaatcaactaaagtcgacatataatactggtgacagattagagatcttatctcaagacagtggcattattggttgctggttcaggtgcactgttctgaagtcatgcactaatcataacagattgaaggttcagtatgatgatctccaaaatgctgatgatagtgggagattggaggagatggtacctgcctctgcattggctcttcctgataaactgggactgagacgccaagaccggctaagaatcaggccacgtcctcaagaaaatagttttgttgatggggctgctcttttacctggaactgctgttgatgtctggcaatttagtggttggtgggaaggagttgttgtcagtttggacaacattgtggcagatagccttcaagtatattttccaggagagaactttttccgtgtgtgccagctaaggaacattagaatctctaaagattgggtcaagaaccgatgggttgatattgaaacaaagtcagatgtgttgtcacagataccttcagatagtatccaagcaaagcaaactgataatcatgcactgtctgttggtgtgacgggctccagcagttctgcaatgcctgagcaagagcttgcagctacccaagcaaactccaatggagatgcagcggtacctaagcaagagcttacagttacccaagcaaactccaatggagatcaacctgtgcctaagcaagagcttgcagctacccaagcaaactccaatggagataaacctgtgcctgaccaagagcttgcagctatccaagcaaactccagtggagataaacctgtgcctaagcaagagcttgctgctacccgagcaaactccaatggagataaacctgtgcctgaccaagagcttgcagctatccaagcaaactccagtggagataaacccgcatctgagcaagagcttgcagctacccaagcaaactccaatggagataaaccagtgcctgaacaagagcttccagctacccaagcaaactccgatggagataaaccagtgcctgagcaagagcttccagcaacccaagcaaactccgatggagataaaccagtgcctgagcaagagcttccagctacccaagcaaactccagtggagataaaccagtacctaagatagagcttgcagctaccctagcaaattctaatggagataaatctgtgactgagtttacagctgcccaagcaacctccaatggaaataacaaacaaatagaagcaagtaagcaatccgaggttagtatgacagatgaagcctctgctttggtggaggatgacaagcgaacaattctagggaagcgtcccagggatgttagtatgactgatgaagggtcagctttggtggaggatgacaagcgaacaattatagggaagcatcccagggatgaaggtaatgctgaacagagatgcaacggggaagtaggtgtagtcgttagcaagacatgatgtttgggacgcccaaactcattagactcgtgtacatagctatagatatggtgattgaaacctccaatggcgcggggttttttgctacgctgctcgtatcaagagcgtattgccgcttctttggcatacctctcctagtcttcttattttgctggtagtttgtgtttatgttaagggacacatggattgcaagctgaatggtacccttcccagttcccag

SEQ ID NO: 33544 - DNA, 2083 bp, Zea mays
  Clone ID: UC-ZMFLMO17130F07_FLI
gtcccaagcccaccgaaccctactcaccaacccacccgcaggagaacggaaaaaaaaaatcgtgtcgaggcgactttcgccgccatggcaggcgatcccccgacggctgcggagaaggagaccctggtctcctccttcatcgagatcaccgccggccagaccctcgagactgccacccagttcctccagatgacgagctggcacctggaggaggcgctgcagctgttctacatcgacggcgaggccgcccacaccgccgcgcattcggtggacccgtcgcctgcggcggcggccccgtcggcactagcggcggcggccggggtggaagaggcgatgaggttcgctccacccccggcggctgcactgggcgatgcaatgtcgcatgggtttggggtcagggaggacgacgacgttcgcgcgcccctgccggtgaagagggagactctctacggcgagggaatcgtgtccgtcatgcgacctaatgcatcagctgcatttcgtaactttgaacaagaagcaagacaatctgctgtttgggactctgagcagaatgttgcatctagttctggtgataatcttgcttctttataccgtccaccttttcctttgatgttcaatggatcctttgacaaggcaaagttagaggcttcttccctggacaaatggctattaatcaatttgcagtcgacagaggaatttagctctcacatgcttaaccgagacacttggggaaatgaagcggtggctcagttaattaggtcaaattttattttctggcaggtttactatgacaccagtgaggggaggaaggtatgcacctattaccatttggtgtccatgcctgctattctcctaattgaccccgtcaccgggcaaaaagtacatgcttggaatggaatggttcacccagaccgtttactcgaggatttactaccttacctggataaaggtccgaaggggcaccatgcagctcaacctcaaaagcgcccaaggaaagttgatcaggaagcttctacgggcaagcaaggcaaaatcgctgtagaggatgaggatgaagaactagcaagggcaatagcagcttcgctagaggtagtcattgaagcatcagacgccagtgatgatgatatggctgaagctgaacctgaggaggaaaatgagcccagcttaaacatcaagcctgattatcctcctctccctgaagaacctaaaggaagcagggagcttctctgcagggttgcgattcggctaccgaacaatcaaaggatccaaagaaacttccttcacacagatcctatcaagctcctgtggtcattctgcgctcctcaggttgaggacggggagaagagggctttccacttcgtacaggccattcctggagcatcccagaagctgcagtttggaagcgacctaactttcaggaaagctgggctggccaactcgatgatcaacctcttgtggggctgagacgcttccatcttgcgcttggaaggccttgatcaggacgtgtccagtgtcctccggatgggcttgaagatccagttatttttcattccttgaggattaactcttcatattctgctccgtcccctgggctgcatgttgaaatgctcctttttgccgttcgttcttgtgtctacacatacatcgctgtccccggtagggttttgcctcgatttagtgcacatatctatcagagattcaatctggtggtgtggggcgtgcgcatggtctggtgctttgctttgatgtttcccttttgtatggtcgtggcaaagtctgaaagggagatgcatgaaggcaggcagcgcaatcagattcacagctggacctggatccaaaaccatgaatgaatgagcaggcatggtccttggtgtgccccgtccaacctcacacagtggccgctcaaagctgccggcacaggacagcgtgcggatgcagatgcagtgatgggagatcgcaggcagggagagtagagcagagagagagggacatcacaaggttacgtccctttgatgaatcatcactgcccctccagagacattgtttcgttgcatgatttatatgttctatgacaccttttgtg

SEQ ID NO: 33545 - DNA, 999 bp, Zea mays
  Clone ID: UC-ZMFLMO17130G06_FLI
tgcttatcttctcccgtcccataggttgctaggctcggccgtgtagagcagcaagagcacgccgcgccaagcaacaaagagggaccccgcttccatggaggtggtgggcggcgtgtcgctgaggccgtcgccagcgccggcgcgtatccggactaccctgccacccgtcgacgtaggcggacgcttccttctccgccgggtcgcggggcgccagccggcgaggcgcgcgctggtcgtggaggcccggggcggcaggggctggtcggagcggcagatgcagcagcagcgccgcgcgccgctgctgccgaaaatcgaggacgacggcaacccgcgattcgtcatcttcatccgcaccgccaatgtctacttctggtacccgctcaacatcatcacgggcggtacgacggcgaagatcatgctcgccgccaaggacaacttcctcggcaagtacatctacaaggacacgctcgccaggaacctcgccgccgtcatttacaaagacgaggatgagatcatagacacagcgaaagatcagtaccgtgtgctcaagaccgaaaatgagtttcggtatggctacaaagttgtggagaaagggaacataaggtctgctctgacgacaagcaatgtgatcgaacttccaaagaaggacgagctcaaaaccgtggttgacaaggtgaaggacttctttggcgacgtgactgccggcgccaaagaatcctttgcgcagataacagggtctgctgtcagcaaggaggaagaggaagcagatagcaaagagaagttccgctccaagagacgaaagaagcagcggaagtcgaaggagggcctcaagacggagaaatgattcagtcagtcacacaagtaaagcaccggctgtagtttcgctatcgatgtccgagaactgttctgtaatttctccagcttccttttttttgtttgttttgtaaaaaagacgtcgtgtaacttcattgcgactaacgtgtgctatgccttctcact

SEQ ID NO: 33546 - DNA, 1735 bp, Zea mays
  Clone ID: UC-ZMFLMO17130H03_FLI
cttttctgaaaagaataatcttgaaaccaaggttgaggagactttgcaagattcaggtaagaaagacttcaagaatgagattcatgttatggctgcagcactctccaatgaactgggtatgatggagaatcagttgagtcgatcaaaggatgcagcttctgaagcacttgcattgcgtgagcaagctgaatcattaagatcattggtagctaaaaagattgaggaacacaagaagattttggataaatacaactcacaagtaattgagatcaagtccctcaaggcattggttgaggagttggagcaggaaaagcaggagctggagtttattgcagatatgtacgtgaaagaaagttctgagtctaggacaattgctgatattgaagaatcagaaacccgagctcgcaatcaggctgaatatttgaggagcaatctagaggagcatagtcttgagcttcgggttaaagcagcaaatgaagctgaagctgcatgccagcaaaggctttcctttgctgaagtggaactagaagagttaaggaccaaagtagatgcatctgaaagagatgttgtggaacttaaggaggcaataagaattaaagaggctgaaggagacgcctatatttctgatatcgagacagttggtcaagcatatgaagacatgcaaacgcaaaatcagcatcttcttcaacagcttactgatagagatgactttaacataaagctagtatcagatagtgtgaagatgaaacaagcttgtagttcccttctctctgacaagcttatgctagagaagcaactccagcaagttaacacttcactggagtcatctaaactgaaaattgcccgtggcgaagagcagatgaagacttgtgtagcgcaagctataaaaacttcagctgaaaacagacatcttactattagcctggaaaggattgcgctggaggtatccaacacagataaggaactcaagtggcttcggtcctccgttggatcctctgagaaagaatacgagcaaactcagcaaaagatatctgagctgagagcgttactggagcacgagaggagtgagaggcggcggcttgaagaacaatatgaagaggtgaaaaatgaagttatggagctgacctctgagactgaagagactactgtccggaaacttgaggatgaaataaaagaatgcaagggtattctcaagtgtggtgtatgctttgaccggcctaaagaggttgtgatcaccaaatgtttccacctattctgctcgctatgcatccagagaaacctcgagattcgccaccgaaaatgtcctggctgtggaaccccattcggacaaaacgacgttagggaggtgaagatatgaacctcaccaaagtgacagtgacaaaaccgacttgcgtgtgaacagcagcaacaaactcccttgtgaatatcgtctgttatgttggcgaacatctagatctaacttgctttattactgggattaaaattaggataagaactggaagaagtgaagttcctaatttatttgctatcgtgtgtgctatgtatgattaccctttgggtagagtacccttggcagcgagtggtgtatctgctgggtgtcaatatgctcgaattctagctcctccctgctagcgggtgcatgccagttttattaaggctattccatgtacatggtgtcacactctttaatacataccacataggatgaaaatctgatgtgacatgtgattgaaac

SEQ ID NO: 33547 - DNA, 891 bp, Zea mays
  Clone ID: UC-ZMFLMO17131E10_FLI
ctctccccaccccctcgtgcttctttgatgacgtgctgcattttgctcggccgacgcaagggcacgtcgctcggatgtagttgagtgactgtgactccagcaaggccggcgtcggaaagaccaccacaaccgccagcctcgccgcctccctcgcgcgccacggcctcccagccgtcatcgtcgacgctggcctcctcaacctcgatctcttgttcggcttcaagaaccgtgtccacctcaccgccgccaccgtcctcgcgggagacttcccactcgactaggcgctcgtctgccaccatgcgctccacgacctccacctcctctgcctccaagcctcgctccatgctgcccctctcgttcggatccaagaccctcacctgggtcacagacgcggttcaggttgctgcaatacatgcgactcagaagtattttgtgagtgcttctggggataacttgtggtgcttcgaattctatgatatttcaacacgatcttgcctaacacagattacctctgttagagcgaaggtcgcccaccccctcgctcggctcattaataatgggaacatgaagttataacggagggagagcgaagtctacttcaactaagcgaaggccttgggatggagggatcgaccaggacaggcaagggccttgccaactcccgaaggcctagcgccctaagacgcaggctatagtcactactcgcgcatgttattaaagcgggcccgtgcggctgacatcctggatcgcctgaccccacgggtaagcctcagtctaggtaggatttgtggtgtgtcagtccgggttgtatttaactacactataatgacctgtaataacccttgaagggaaatattctacggataacgtaggtaaacagggactgtattt

SEQ ID NO: 33548 - DNA, 2200 bp, Zea mays
  Clone ID: UC-ZMFLMO17131F09_FLI
agcgaagccagggcaaggtcgtcggagccggagagggaggaaggtggagaacctctacctgcgtcacgtgacaactgtctcctgacccacaggagcggcggactccctctgctcgccgcgcgcggcctgttccggttcggtcggcggccgacggccggcggcggaggcagcaggaagctactgtaccaaccggcccaagagaattgcgggtccagaggcagtgatggcggggcgctacgattgacgtgctacgattatgggcatccaaggcggcgacgcacgagcacgacttcctctcgctgtacgccgccgccgccgccaaggacgctcctctcctgctacacgactccaaggcgccgcctccttctcaaggtaatttcctcttgaagacgcacgacttcctgcagccgttggatcagaagccgggagcgccgccggagccgtcgccgctgcccgcttccgccgcggagagcaggcaccagccgcagcagcaggtcgtcgtcgcgaaccagcacgcgctgcccctgcccggcggcgtcggcaccttcagcatcagccccgcgcccgtgtccgtcgcgctgccggcggccgtcgtcaagtcggagccgccgttcgtgctctggggccagcctgccgcgacgctccatccgggcgcgcgagggcaccagcagcagtgggcgctccccttcgccggcgccgggcaggtcaggctgccgccgcagcaggcgcctccggatagaaagggccggggcggcgccggtggcggcgtcatggagtctggctccagatccagcggcggggcggggttcgacgacgacgacggcctcacgacgcgccgcgaggtctcctcttcgctccaagatttgacagtaagggtggaccggaagggtgggagctgcagcgatggtggtacggatcagcggccaaacacaccgcggtcaaaacactcggccacagagcagcgcagacgcagcaagatcaatgataggtttcagatacttagggagctgttgccacacagtgatcaaaagagagacaaagcaacatttctcttggaggttattgaatatatacggtttttgcaagagaaggtgcaaaaatatgaggcaacatttccagaatggaaccaagaaaatgcaaagatgcttccatggagtaaaggccaaatctcaggagattccccgcctgacccttcacatttcatgagaaatggatcctcccctggatctaatttcactgggaaacttgatgataatcacaacatagtgacatctgcagctgcatcaggggcacaggatcaggtagaaaccgaccacatggctagcggatgctacagatcagcagaaactacggcgaattttacaaataatgctatgtctcagtcccaacctcaatggactggtccgtcccctgtggatgactctgcagtgaacagtgagacgcttaacaaccagcagttggtgattgatgaaggaacaatcagagtgtccagtaactattcccaagagttgcttaactcgttgactcatgcccttcaaagctcaggtgtagatttgtcccaagccaacatctctgtgcagatcaacatgggaaagcgtgccgccaagagacccgctgctggtgtatccagcaactccaaggaaccagctgatccggcatctagcaacgaattagggcatcagttgacgctgtcgggtgccggtgccgactgcctctctcacgcaacaaagcggcataaacggagcaacagctgatggccgctctccctcacctcgctccccgaccgacggatgacggattggtgacattcttcttttccctcccagccaacggggaggctcgtggattggctggctggctgtacattgtgtgctgtgcttggtgacaagctgagacctccggcgtattctttgattcgatcacccccgcgcccgccatcccattgtttacgtagagaagaggaaccgtggagcttttcatcgcggattgtgaagccgctcttgtacacaggcttccattcaatgtgagaagcttccccctccttgacacatctccgtgttgtagacctgtagccacctgtaagatatgtgatgatgcccaacaatcaactctgccagaccactggctagtcgagttgttgggttactttatgtacggtgttctgttatgctgggagtgtaattgccccgccgtctcagtg

SEQ ID NO: 33549 - DNA, 1218 bp, Zea mays
  Clone ID: UC-ZMFLMO17131H02_FLI
atttggacgaggaggacgaaggcttcggctgcggtattgggactcttggaaactttaagaaggccaacggtactgtaaatatgtcggcaacatacaattccaggagtcaagacatcgagagttctgttgttgcacatggagacctctggaggctagaggcatcgcgtggtggatcaacttctggaaatggcacttcgcctctgtaccttgttcagttggggcctctactatttgttcgagactctacacttctcttgcctgttcatctatcaaagcaacacctgctttggtacggttatgatcgcaagaatggtgtccattcactctgtccagctatatggtcaaaacataggagatggttgatgatgtcaatgatgtgtctcaatccaatagcttgttcgtttatggatttgcaattccctaatgggcaactaacatatgttgctggtgaggggatatcagccagtggttttcttccgttatttggtgggttgcttcaagctcaaggaaaatatcctggagaaacaagagtgagcttttcttgcaagaataagcgtggcacaaggtttactcctatgtttcaatggcctgacaagtctgtttcgttaggagttactcaagccttggcatggaaaagatctggtcttatggtgagacccagtatacaagtcagtgtgtgccctacgtttggaggaagtgatcctggggtacgtgcagaagttgtccattcattgaaagaggaattgaatctgatgtgtggcctctcttgctcgcggcatccatcagcttatactgctctatctattggacgatcaaagtggaatggtcaagtgggcagttctggagtggtaatcaccttggaaacacctcttaataacattggaaggccgtcgttatctgttcaactgaatggtggttttgagttgtgattcttcagactccagcgctgaagctgtacataccagtgtgtatatattgccatcaccaatgttcgtgctccatagtttgtggaagtgggctgcagcctgccggcttgcaggtcgtttttgttactgtagtctataggtagtctcaactcagcaaatcagctgccatggtacccaacccatgtgggcacagaagtcaactgctttgttgttcaatcattatgataatccttaggtcttatttggatactctcttattcacattaatctcacgtttattgaagtggaattt

SEQ ID NO: 33550 - DNA, 2368 bp, Zea mays
  Clone ID: UC-ZMFLMO17132A06_FLI
gccgcatcctcatctcggggtccatccactacccgcgcagcacgccggagatgtggccgggcctgctgcagaaggccaaggacggcgggctggacgtggtccagacgtacgtgttctggaacgggcacgagccggtgcgtgggcagtactacttcggcgaccgctacgacctcgtccgcttcgtcaagctcgccaagcaggccggcctctacgtccacctccgcatcgggccctacgtctgcgccgagtggaacttcggcggcttccccgtgtggctcaagtacgtccccggcatcagcttccgcaccgacaacggccccttcaaggcggcgatgcaggcgttcgtggagaagatcgtgtccatgatgaagtcggaggggctcttcgagtggcagggcgggcccatcatcctggcgcaggtggagaacgagtacgggcccatggagtccgtcatgggcgccggcgccaagccctacgccaactgggcagccaagatggccgtcgccaccggcgccggcgtgccctgggtcatgtgcaagcaggacgacgccccggaccccgtgatcaacacctgcaacggcttctactgcgactacttcagccccaactccaacagcaagccgaccatgtggaccgaggcctggacgggctggttcacggcgttcggtggcgcggtgccgcaccggccggtggaggacatggccttcgccgtggcgcgcttcatccagaagggcggctccttcgtcaattactacatgtaccatggaggcaccaacttcgaccgcacctccggtgggccgttcatcgccaccagctacgactacgacgcgccgatcgacgaatacggtctgctgaggcagccgaaatgggggcacctgagggacctgcacaaggccatcaagcaagccgagccggcgctggtctcaggcgacccgactatccagtccctcgggaactacgagaaggcgtacgtgttcaagtcgagcggcggcgcctgcgcggcgttcctgtccaactaccacaccagcgccgcggcgcgggtggtgttcaacgggcggcgctacgacctcccggcctggtccatcagcgtgctgcccgactgcaaggccgccgtgttcaacacggcgacggtgagcgagccgtcggcgccggcgcggatgagccccgcgggcggcttctcgtggcagtcgtacagcgaggccaccaactcgctggacggccgcgccttcaccaaggacgggctggtggagcagctcagcatgacgtgggacaagtcggactacctgtggtacaccacctacgtgaacatcaactcgaacgagcagttcttgaagtccgggcagtggccgcagctgaccatctactctgccggccactccctgcaggtgttcgtcaacggccagtcctacggcgccgtgtatggcggctacgacagccccaagctgacatacagcggctacgtgaagatgtggcaggggagcaacaagatctccatcctcagcgcagcagtcggcctccctaaccagggcacccactacgagacgtggaacgtcggagtgctcggtccggtcacgctgtccggcctcaacgaggggaagcgggacctcagcgaccagaagtggacctaccagatcggcctccacggcgagtcgctgggcgtgcagtccgtcgccggtagctcgtccgtcgagtggggcagcgcggcagggaagcaacccttgacatggcacaaggcctacttcagcgcgccgtccggcgacgcgccggtggccctggacatgggcagcatgggcaagggccaggcgtgggtgaacggccgccacatcgggcggtactggtcgtacaaggcctcctccagcggctgcggcggctgcagctacgcggggacgtacagcgagaccaagtgccagaccggctgcggcgacgtctcccagaggtactaccacgtcccgcgctcctggctcaaccccagcggcaacctgctggtgatgctcgaggagttcggcggcgacctgtccggcgtgaagctggtgaccaggacggcgtgaccaggaatggagaggggagggcatgccgcacgcacacaggatgtgaataatttgctgggaagagaagcgagctgagggcagggcgcgcgcgcgcgcagacacgacacgacacgacaccgattctttcttcctcgtgaagtatctatagatacggcgtacatacggacacaatttgtgcccactatacgtacgtacaaaaaagattagtactagagtttaccgtagatctgttcttggagttggccgacgccggcacggctgcaggaactgcggctcacggccggctggtaatggtactagtagcgtggtttttgctctgc
